United States Patent Application Publication US 2018/0126003 A1 - sequence listing, part 50

SEQ ID NO: 87138 - DNA, 801 bp, Artificial Sequence
  derived and/or modified sequence
atggtgtgcctgagactgcccggcggcagctgcatggccgtgctgaccgtgaccctgatggtgctgagcagccccctggccctggccggcgacaccagacccagattcctggagtacagcaccagcgagtgccacttcttcaacggcaccgagagagtgagatacctggacagatacttccacaaccaggaggagaacgtgagattcgacagcgacgtgggcgagttcagagccgtgaccgagctgggcagacccgacgccgagtactggaacagccagaaggacctgctggagcagaagagaggcagagtggacaactactgcagacacaactacggcgtggtggagagcttcaccgtgcagagaagagtgcaccccaaggtgaccgtgtaccccagcaagacccagcccctgcagcaccacaacctgctggtgtgcagcgtgagcggcttctaccccggcagcatcgaggtgagatggttcagaaacggccaggaggagaagaccggcgtggtgagcaccggcctgatccacaacggcgactggaccttccagaccctggtgatgctggagaccgtgcccagaagcggcgaggtgtacacctgccaggtggagcaccccagcgtgaccagccccctgaccgtggagtggagagccagaagcgagagcgcccagagcaagatgctgagcggcgtgggcggcttcgtgctgggcctgctgttcctgggcgccggcctgttcatctacttcagaaaccagaagggccacagcggcctgcagcccagaggcttcctgagctag

SEQ ID NO: 87139 - DNA, 756 bp, Artificial Sequence
  derived and/or modified sequence
tgactgctgaagctgaccagagacttcccccagagacacgagaagtaccagagctgggccggcaccttccacctgtgcctgaagaagaacaagtaccccgacagcagaagcaccttcatcaagcacgccggcagctacctgaagagaggcgagttcctggccatccacaccgccatcacctgcttcttcagacagatcagcgccagattcctggagtacagcaccagcgagtgccacttcttcaacggcaccgagagagtgagatacctggacagatacttccacaaccaggaggagaacgtgagattcgacagcgacgtgggcgagttcagagccgtgaccgagctgggcagacccgacgccgagtactggaacagccagaaggacctgctggagcagaagagaggcagagtggacaactactgcagacacaactacggcgtggtggagagcttcaccgtgcagagaagagtgcaccccaaggtgaccgtgtaccccagcaagacccagcccctgcagcaccacaacctgctggtgtgcagcgtgagcggcttctaccccggcagcatcgaggtgagatggttcagaaacggccaggaggagaagaccggcgtggtgagcaccggcctgatccacaacggcgactggaccttccagaccctggtgatgctggagaccgtgcccagaagcggcgaggtgtacacctgccaggtggagcaccccagcgtgaccagccccctgaccgtggagtggtag

SEQ ID NO: 87140 - DNA, 1233 bp, Artificial Sequence
  derived and/or modified sequence
cctataacttggaatgtgggtggaggggttcatagttctccctgagtgagacttgcctgctgctctggcccctggtcctgtcctgttctccagcatggtgtgtctgaggctccctggaggctcctgcatggcagttctgacagtgacactgatggtgctgagctccccactggctttggctggggacaccagaccacgtttcttggagtactctacgtctgagtgtcatttcttcaatgggacggagcgggtgcggtacctggacagatacttccataaccaggaggagaacgtgcgcttcgacagcgacgtgggggagttccgggcggtgacggagctggggcggcctgatgccgagtactggaacagccagaaggacctcctggagcagaagcggggccgggtggacaactactgcagacacaactacggggttgtggagagcttcacagtgcagcggcgagtccatcctaaggtgactgtgtatccttcaaagacccagcccctgcagcaccataacctcctggtctgttctgtgagtggtttctatccaggcagcattgaagtcaggtggttccggaatggccaggaagagaagactggggtggtgtccacaggcctgatccacaatggagactggaccttccagaccctggtgatgctggaaacagttcctcggagtggagaggtttacacctgccaagtggagcacccaagcgtgacaagccctctcacagtggaatggagagcacggtctgaatctgcacagagcaagatgctgagtggagtcgggggctttgtgctgggcctgctcttccttggggccgggctgttcatctacttcaggaatcagaaaggacactctggacttcagccaagaggattcctgagctgaagtgcagatgacacattcaaagaagaactttctgccccagctttgcaggatgaaaagctttccctcctggctgttattcttccacaagagagggctttctcaggacctggttgctactggttcagcaactgcagaaaatgtcctcccttgtggcttcctcagctcctgttcttggcctgaagccccacagctttgatggcagtgcctcatcttcaacttttgtgctcccctttgcctaaaccctatggcctcctgtgcatctgtactcaccctgtaccacaaacacattacattattaaatgtttctcaaagatggagttaaaaaaaaaaaaaaaaaa

SEQ ID NO: 87141 - protein, 521 aa, Artificial Sequence
  derived and/or modified sequence
MSGRRFHLSTTDRVIKAVPFPPTQRLTFKEVFENGKPKVDVLKNHLVKEGRLEEEVALKIINDGAAILRQEKTMIEVDAPITVCGDIHGQFFDLMKLFEVGGSPSNTRYLFLGDYVDRGYFSIECVLYLWSLKINHPKTLFLLRGNHECRHLTDYFTFKQECRIKYSEQVYDACMETFDCLPLAALLNQQFLCVHGGMSPEITSLDDIRKLDRFTEPPAFGPVCDLLWSDPSEDYGNEKTLEHYTHNTVRGCSYFYSYPAVCEFLQNNNLLSIIRAHEAQDAGYRMYRKSQATGFPSLITIFSAPNYLDVYNNKAAVLKYENNVMNIRQFNCSPHPYWLPNFMDVFTWSLPFVGEKVTEMLVNVLNICSDDELISDDEAEDHYIPSYQKGSTTVRKEIIRNKIRAIGKMARVFSILRQESESVLTLKGLTPTGTLPLGVLSGGKQTIETATVEAVEAREAIRGFSLQHKIRSFEEARGLDRINERMPPRKDSIHAGGPMKSVTSAHSHAAHRSDQGKKAHS

SEQ ID NO: 87142 - DNA, 1566 bp, Artificial Sequence
  derived and/or modified sequence
atgagcggcagaagattccacctgagcaccaccgacagagtgatcaaggccgtgcccttcccccccacccagagactgaccttcaaggaggtgttcgagaacggcaagcccaaggtggacgtgctgaagaaccacctggtgaaggagggcagactggaggaggaggtggccctgaagatcatcaacgacggcgccgccatcctgagacaggagaagaccatgatcgaggtggacgcccccatcaccgtgtgcggcgacatccacggccagttcttcgacctgatgaagctgttcgaggtgggcggcagccccagcaacaccagatacctgttcctgggcgactacgtggacagaggctacttcagcatcgagtgcgtgctgtacctgtggagcctgaagatcaaccaccccaagaccctgttcctgctgagaggcaaccacgagtgcagacacctgaccgactacttcaccttcaagcaggagtgcagaatcaagtacagcgagcaggtgtacgacgcctgcatggagaccttcgactgcctgcccctggccgccctgctgaaccagcagttcctgtgcgtgcacggcggcatgagccccgagatcaccagcctggacgacatcagaaagctggacagattcaccgagccccccgccttcggccccgtgtgcgacctgctgtggagcgaccccagcgaggactacggcaacgagaagaccctggagcactacacccacaacaccgtgagaggctgcagctacttctacagctaccccgccgtgtgcgagttcctgcagaacaacaacctgctgagcatcatcagagcccacgaggcccaggacgccggctacagaatgtacagaaagagccaggccaccggcttccccagcctgatcaccatcttcagcgcccccaactacctggacgtgtacaacaacaaggccgccgtgctgaagtacgagaacaacgtgatgaacatcagacagttcaactgcagcccccacccctactggctgcccaacttcatggacgtgttcacctggagcctgcccttcgtgggcgagaaggtgaccgagatgctggtgaacgtgctgaacatctgcagcgacgacgagctgatcagcgacgacgaggccgaggaccactacatccccagctaccagaagggcagcaccaccgtgagaaaggagatcatcagaaacaagatcagagccatcggcaagatggccagagtgttcagcatcctgagacaggagagcgagagcgtgctgaccctgaagggcctgacccccaccggcaccctgcccctgggcgtgctgagcggcggcaagcagaccatcgagaccgccaccgtggaggccgtggaggccagagaggccatcagaggcttcagcctgcagcacaagatcagaagcttcgaggaggccagaggcctggacagaatcaacgagagaatgccccccagaaaggacagcatccacgccggcggccccatgaagagcgtgaccagcgcccacagccacgccgcccacagaagcgaccagggcaagaaggcccacagctag

SEQ ID NO: 87143 - DNA, 1566 bp, Artificial Sequence
  derived and/or modified sequence
atgagtggtcgtaggttccacttgagtactactgatcgcgtcattaaggccgtcccctttccccccacacagcggttgacctttaaggaagttttcgaaaatgggaagcctaaagtggatgtgttaaaaaatcacctggtaaaagagggaagactcgaggaagaagtagccctcaaaattattaatgatggcgccgcaatacttcgacaggaaaaaacaatgatcgaagtggatgctcctatcaccgtctgcggagacatccatggccagttttttgatttaatgaagcttttcgaagttggtgggagccccagcaatactcggtacctttttctcggggactacgtggaccgtggctacttttctatcgagtgcgtcctgtatctgtggagtctcaagattaatcatcccaaaacactgtttttactgaggggaaatcacgaatgtcggcacctgacagattacttcacattcaagcaggaatgtcgaatcaagtattccgagcaggtctacgacgcctgtatggagacatttgattgcctgcccctggctgccctgctcaatcagcagttcctttgtgtccacgggggcatgagtcccgaaatcacatcactggatgatataaggaaactggacaggtttacagaaccacccgcgtttggacccgtgtgtgacctgctgtggtctgatcctagtgaggactatggcaacgaaaagaccttggaacattacacccataataccgtccgcggatgctcatatttctatagttaccccgcagtgtgcgaattcctgcaaaataacaaccttctaagtatcatccgcgcccatgaggcccaggatgccggctatagaatgtaccgtaaatcacaggcgaccggatttccaagcctgatcacaattttctctgctccaaattacctggacgtttataataacaaagctgcagttttgaagtacgaaaataacgtcatgaatattcgccagttcaattgctccccccacccctactggctcccgaattttatggacgtgttcacttggtcactccctttcgttggtgaaaaggttacggaaatgctcgtgaacgtgctgaacatatgttctgatgacgagttaatctccgacgatgaagcggaggatcactacatacccagctaccagaagggctcaaccaccgtgcgtaaagaaattatcagaaataaaattcgcgccatcgggaaaatggcccgcgtgtttagtattctgcgccaagaaagcgaatctgttcttacccttaaggggttgacccccaccggcacacttcccctgggggtgctctccgggggcaagcaaacaatcgagacagcaaccgtcgaagcggtggaggctcgagaagcgatcaggggcttttctctgcagcataagatcagatccttcgaggaggcacgtgggttggacaggataaacgagaggatgcctccaaggaaggattctattcacgctggcggacccatgaagagtgtgacgtcagctcattcacacgccgctcacagaagtgaccagggcaagaaagcacactcatag

SEQ ID NO: 87144 - DNA, 1566 bp, Artificial Sequence
  derived and/or modified sequence
atgagcggccgccgcttccacctgagcaccacagacagagtcatcaaggctgtgcccttcccccccacccagaggctgaccttcaaggaggtgtttgaaaatggcaagcccaaggtggatgtgctgaagaaccacctggtgaaggagggccgcctggaggaggaggtggccctgaagatcatcaatgatggagctgccatcctgcggcaggagaagaccatgattgaggtggatgcccccatcaccgtgtgtggggacatccacggccagttctttgacctgatgaagctgtttgaggtgggcggcagccccagcaacacccgctacctgttcctgggggactatgtggaccggggctacttcagcattgaatgtgtgctgtacctgtggagcctgaagatcaaccaccccaagaccctcttcctgctgcggggcaaccacgagtgccgccacctgacagactacttcaccttcaagcaggagtgccgcatcaagtacagcgagcaggtgtatgatgcctgcatggagacctttgactgcctgcccctggccgccctgctgaaccagcagttcctgtgtgtgcatggaggcatgagccctgagatcaccagcctggatgacatcaggaagctggaccgcttcacagagcccccagccttcggccctgtgtgtgacctgctgtggagcgaccccagtgaagattatggaaatgagaagaccctggagcactacacccacaacacagtgcggggctgcagctacttctacagctacccagctgtgtgtgagttcctgcagaacaacaacctgctgagcatcatccgggcccacgaggcccaggatgctggctacaggatgtacaggaagagccaggccaccggcttccccagcctcatcaccatcttcagcgcccccaactacctggatgtgtacaacaacaaggctgctgtgctgaagtatgaaaataatgtgatgaacatccggcagttcaactgcagcccccacccctactggctgcccaacttcatggatgtgttcacctggagcctgccctttgtgggggagaaggtgacagagatgctggtgaatgtgctgaacatctgcagtgatgatgagctgatcagtgatgatgaagctgaggaccactacatccccagctaccagaagggcagcaccaccgtgaggaaggagatcatccggaacaagatccgggccatcggcaagatggcccgggtcttcagcatcctgcggcaggagagcgagagcgtgctgaccctgaagggcctgacccccaccggcaccctgcccctgggcgtgctgagcggcggcaagcagaccattgaaacagccaccgtggaggccgtggaggcccgggaggccatccggggcttcagcctgcagcacaagatccgcagctttgaggaggcccggggcctggaccgcatcaatgaaagaatgccacccaggaaggacagcatccatgctgggggccccatgaagtctgtgaccagcgcccacagccatgctgcccacagaagtgaccagggcaagaaggcccacagctag

SEQ ID NO: 87145 - DNA, 1566 bp, Artificial Sequence
  derived and/or modified sequence
atgagcggccggcggttccacctgagcaccaccgaccgggtgatcaaggccgttcctttcccccccacacaacggctcaccttcaaggaagttttcgaaaacgggaagcctaaggtcgacgtgctgaaaaaccatctcgtgaaagagggaagattggaggaagaagtcgccttgaaaatcataaatgacggggcagcaatcctgcgccaggagaaaaccatgatcgaggtggatgcccccatcacagtatgtggcgacatccatggtcagtttttcgacctgatgaagctgtttgaggtcggggggtccccttctaacacccggtatctgttcctcggcgattacgtggatagagggtacttctcaatcgagtgtgttttgtacttgtggtctctaaagatcaaccatcctaaaactcttttcctgctgagaggtaatcacgagtgcagacatttaaccgattacttcaccttcaagcaagagtgccggatcaagtactctgaacaggtctatgacgcatgcatggagacattcgattgcttgccccttgcagcccttttaaatcagcagtttctatgcgttcatggagggatgtctcctgaaatcacctctctggacgatatcagaaagctcgacaggttcacggagccccccgcctttggtccggtgtgtgaccttctgtggagtgacccctccgaggattacggtaatgagaaaacactggaacactacactcataacacagtgagggggtgcagttacttctatagttatcctgctgtgtgtgagtttttgcagaacaataatctgctgagtatcatcagagcacacgaagctcaggacgccggctatcgaatgtaccggaagagtcaagccacagggttcccctctctcattacaattttctccgccccaaattatctggacgtctacaataataaggcagcagttcttaagtatgagaacaacgtgatgaatatccggcagttcaattgctcgcctcatccatattggcttcctaactttatggacgtctttacctggagcctgccctttgtgggagagaaggttactgaaatgttggtgaacgtcctgaacatttgtagcgatgatgaactgatctcagacgacgaagccgaggatcattacatcccctcataccagaaaggctccaccaccgtgcgcaaggaaatcattcggaacaaaattcgcgcaataggcaagatggctcgcgttttctcgattttgcgacaggaatcggagagcgtgctcaccctcaaaggcctcacccccactggaacactgcctctgggggtgctgagcggcgggaaacagacaattgagaccgccactgtggaggcagtggaggcccgcgaagcgatccgaggcttcagcctgcaacacaagatccgcagctttgaggaggctaggggtctggaccggatcaatgaaaggatgcctcctcggaaagactctatacatgctggtggccccatgaagtcagtcaccagcgctcacagccacgctgcccaccgtagcgaccagggcaagaaggctcactcctag

SEQ ID NO: 87146 - DNA, 1566 bp, Artificial Sequence
  derived and/or modified sequence
atgagtgggagaagatttcatctgtcaactacagaccgggtgatcaaggctgtccccttcccccctacccaaaggttgactttcaaagaggtgtttgagaacggaaagcccaaagtcgatgtgctaaaaaatcacttggtcaaggaaggccgactggaggaagaagttgcgctaaaaatcattaacgatggtgccgcaatcctgcgacaagaaaagaccatgattgaagtcgatgccccaataaccgtttgtggagatattcacgggcagttctttgatctcatgaagcttttcgaagtaggaggatccccttctaacactagatacttatttctcggggattatgtagaccgtggttacttttcaatagaatgtgtgctctatctgtggagcctaaaaataaatcacccaaagaccctgtttctcctccggggaaatcacgaatgtcgccacctaactgactactttacgttcaaacaagagtgcaggattaagtattctgagcaggtgtatgacgcctgcatggaaaccttcgattgcctgccactggcagctctgttgaaccaacagtttttgtgcgtccacggaggtatgagccccgaaattacttccctggacgacattaggaaattggacaggttcacagaacctccagcatttgggcctgtctgtgacctcctgtggtctgatcccagcgaggactacgggaatgagaagactttagagcactacacccacaataccgtcagaggctgtagctacttttattcctaccctgcggtgtgtgaattcctgcagaataacaacctgttgtccattatcagggcacatgaggcgcaggatgccggataccgtatgtatcggaaatcccaagcaacgggattcccaagtctgattactatattttctgccccaaactacctagatgtatacaacaacaaggccgcagtgcttaaatacgaaaataacgttatgaatattaggcagtttaattgttcgccccacccgtactggttacccaacttcatggatgttttcacctggtccctgcctttcgtgggagagaaggttacagagatgcttgtgaatgtcctgaacatttgctcggacgacgaactgatctctgatgacgaagccgaggatcactatattcccagctaccaaaaaggcagcactacagtgaggaaggaaattatccggaataagataagggccattggaaaaatggcaagagtgtttagtattctacgccaggagtcagaaagtgtcttaactctcaagggacttacccctactggtactctgccgctaggagtgttatctggcggtaagcagaccattgagactgctacagtcgaagcagtggaggctagagaagccattcgtggtttttccctgcagcacaaaattaggagcttcgaggaagccagaggcctagatcggattaatgaaaggatgccccctcgtaaggatagcatccacgcagggggacctatgaaaagtgtcacaagtgcccatagtcatgccgctcatcgctcagaccagggtaagaaagcccattcatag

SEQ ID NO: 87147 - DNA, 2094 bp, Artificial Sequence
  derived and/or modified sequence
agcggtcgcggtcggtgccgaagcggtgttccccgccttagccgctggcgcctcccaagagagcggccggtgggccctcgtcctgtcagtggcgtcggaggccggcgctgcggtggccgcgcccttctggtgctcggacaccgctgaggagccggggccgggcacggctggctgacggctccgggcagctaaggctgcccgaggagaaggcggcggccgcggcgtaggcgcacgtccggcgggctcctggagcctggaggaggccgaggggaccatgtccgggaggcgcttccacctctccaccaccgaccgcgtcatcaaagctgtcccctttcctccaacccaacggcttactttcaaggaagtatttgagaatgggaaacctaaagttgatgttttaaaaaaccatttggtaaaggaaggacgactggaagaggaagtagccttaaagataatcaatgatggggctgccatcctgaggcaagagaagactatgatagaagtagatgctccaatcacagtatgtggtgatattcatggacaattctttgacctaatgaagttatttgaagttggaggatcacctagtaacacacgctacctctttctgggtgactatgtggacagaggctatttcagtatagagtgtgtgctgtatttatggagtttaaagattaatcatcccaaaacattgtttctgcttcggggaaatcatgaatgcaggcatcttacagactatttcaccttcaaacaggaatgtcgaatcaaatattcggaacaggtgtatgatgcctgtatggagacatttgactgtcttcctcttgctgccctcttaaaccagcagtttctctgtgtacatggaggaatgtcacctgaaattacttctttagatgacattaggaaattagacaggtttacggaacctcccgcctttggacctgtgtgtgacctgctttggtctgatccctcagaggattatggcaatgagaagaccttggagcactatacccacaacactgtccgagggtgctcttatttctacagttaccctgcagtttgtgaatttttgcagaacaataatttactatcaattatcagagcccatgaagcccaagatgctgggtatcgaatgtacaggaagagccaagccacaggctttccatcacttattacaattttctctgcccccaattacctagatgtctataacaataaagctgctgtgttgaaatatgaaaacaatgtcatgaatatcaggcagtttaactgttctccacacccctactggcttccaaactttatggatgttttcacatggtctttgccttttgttggggaaaaagtcacagagatgctggtaaatgtgctcaacatatgctctgatgacgaactgatttctgatgatgaagcagaagatcactacattccaagctatcagaaaggaagcactacagttcgtaaggagatcatcaggaataagatcagagccattgggaagatggcacgggtcttttcaattcttcggcaagaaagtgagagtgtgctgactctcaagggcctgactcccacaggcacactccctctgggcgtcctctcaggaggcaagcagactatcgagacagccacagtagaagcggtagaggcccgggaagccatcagagggttctcgcttcagcacaagatccggagttttgaagaagcgcgaggtctggaccgaattaatgagcgaatgccaccccgaaaggatagcatacacgctggtgggccaatgaaatctgtaacctcagcacactcacatgctgcgcacaggagcgaccaagggaagaaagcccattcatgacttagagtcctgccgtggctcaggtggatctaaaactcaagaacaaattctatttatttattattggaaaatgaaaagcaactcaaaacaacttcaacgtggaggtgcatttataattcagtctgcatttattctgtaaaaaggtggctgttttataaattcttttaatttatgttcaatatatataaaaagtgcatctgttttgtttttcccttttttctccataattttaagaaatgaatctgattgttgtc

SEQ ID NO: 87148 - protein, 502 aa, Artificial Sequence
  derived and/or modified sequence
MSGRRFHLSTTDRVIKAVPFPPTQRLTFKEVFENGKPKVDVLKNHLVKEGRLEEEVALKIINDGAAILRQEKTMIEVDAPITVCGDIHGQFFDLMKLFEVGGSPSNTRYLFLGDYVDRGYFSIECVLYLWSLKINHPKTLFLLRGNHECRHLTDYFTFKQECRIKYSEQVYDACMETFDCLPLAALLNQQFLCVHGGMSPEITSLDDIRKLDRFTEPPAFGPVCDLLWSDPSEDYGNEKTLEHYTHNTVRGCSYFYSYPAVCEFLQNNNLLSIIRAHEAQDAGYRMYRKSQATGFPSLITIFSAPNYLDVYNNKAAVLKYENNVMNIRQFNCSPHPYWLPNFMDVFTWSLPFVGEKVTEMLVNVLNICSDDELISDDEAEGSTTVRKEIIRNKIRAIGKMARVFSILRQESESVLTLKGLTPTGTLPLGVLSGGKQTIETAIRGFSLQHKIRSFEEARGLDRINERMPPRKDSIHAGGPMKSVTSAHSHAAHRSDQGKKAHS

SEQ ID NO: 87149 - DNA, 1509 bp, Artificial Sequence
  derived and/or modified sequence
atgagcggcagaagattccacctgagcaccaccgacagagtgatcaaggccgtgcccttcccccccacccagagactgaccttcaaggaggtgttcgagaacggcaagcccaaggtggacgtgctgaagaaccacctggtgaaggagggcagactggaggaggaggtggccctgaagatcatcaacgacggcgccgccatcctgagacaggagaagaccatgatcgaggtggacgcccccatcaccgtgtgcggcgacatccacggccagttcttcgacctgatgaagctgttcgaggtgggcggcagccccagcaacaccagatacctgttcctgggcgactacgtggacagaggctacttcagcatcgagtgcgtgctgtacctgtggagcctgaagatcaaccaccccaagaccctgttcctgctgagaggcaaccacgagtgcagacacctgaccgactacttcaccttcaagcaggagtgcagaatcaagtacagcgagcaggtgtacgacgcctgcatggagaccttcgactgcctgcccctggccgccctgctgaaccagcagttcctgtgcgtgcacggcggcatgagccccgagatcaccagcctggacgacatcagaaagctggacagattcaccgagccccccgccttcggccccgtgtgcgacctgctgtggagcgaccccagcgaggactacggcaacgagaagaccctggagcactacacccacaacaccgtgagaggctgcagctacttctacagctaccccgccgtgtgcgagttcctgcagaacaacaacctgctgagcatcatcagagcccacgaggcccaggacgccggctacagaatgtacagaaagagccaggccaccggcttccccagcctgatcaccatcttcagcgcccccaactacctggacgtgtacaacaacaaggccgccgtgctgaagtacgagaacaacgtgatgaacatcagacagttcaactgcagcccccacccctactggctgcccaacttcatggacgtgttcacctggagcctgcccttcgtgggcgagaaggtgaccgagatgctggtgaacgtgctgaacatctgcagcgacgacgagctgatcagcgacgacgaggccgagggcagcaccaccgtgagaaaggagatcatcagaaacaagatcagagccatcggcaagatggccagagtgttcagcatcctgagacaggagagcgagagcgtgctgaccctgaagggcctgacccccaccggcaccctgcccctgggcgtgctgagcggcggcaagcagaccatcgagaccgccatcagaggcttcagcctgcagcacaagatcagaagcttcgaggaggccagaggcctggacagaatcaacgagagaatgccccccagaaaggacagcatccacgccggcggccccatgaagagcgtgaccagcgcccacagccacgccgcccacagaagcgaccagggcaagaaggcccacagctag

SEQ ID NO: 87150 - DNA, 1509 bp, Artificial Sequence
  derived and/or modified sequence
atgtccggacgtcgcttccatttgtccaccaccgacagggtgatcaaggccgtgccattccctcctactcagagattgacttttaaggaagtatttgagaacggaaaacccaaagtagatgttcttaagaaccacttggtcaaagagggacggctcgaagaggaagtggccctgaagataatcaacgacggggccgctatcctgaggcaggaaaagactatgattgaggtggatgctccaattactgtttgcggagatatacatggacagttctttgacctgatgaaactgttcgaggtaggagggagcccctcaaatacccgatatctctttcttggagattatgttgaccgcgggtacttttccatcgagtgtgtgctctatttgtggagtctcaaaatcaaccatcctaaaaccctttttctgcttcgcggcaatcatgagtgccgccatctgactgattatttcacgttcaagcaagagtgtcgcataaagtacagcgagcaggtctacgacgcctgcatggaaaccttcgattgcctgcctcttgctgccctgctgaaccagcaatttctctgcgtgcacggggggatgtcacccgagattacctctctggatgatatccgcaagctggatcgcttcacagagccgccagcttttggccccgtgtgtgatttactgtggtctgacccatccgaagactatggcaatgagaagaccctggagcactatacacacaatacagtgcgtggctgctcctatttctactcctaccccgccgtgtgcgagttccttcagaacaataatctgctatccatcatcagagcccacgaggcccaggatgccggctaccggatgtatcgcaaatcccaagctacagggtttccaagtctcatcaccatcttctctgcccctaactatctggacgtctataacaacaaggcggccgttctgaagtacgagaacaatgtcatgaacattcggcagttcaattgctcaccacacccatactggctgccaaactttatggatgtgtttacctggtcactgccgttcgtgggcgaaaaagtgaccgagatgctggtaaatgtgctgaacatttgctctgatgatgaactgatctccgacgatgaagccgaggggtctaccaccgtcaggaaagagatcatccgtaataaaatccgcgccatcggcaagatggcacgcgttttcagtattctgcgccaagagtctgaatccgttttgacattgaagggtttgacaccaacaggcacattgcctctgggcgtcctcagcgggggcaaacagaccattgaaacagccatccgcggattctctctgcagcacaagatccgctcgttcgaggaggcccgaggtctcgacagaatcaatgaacgaatgccaccgcgtaaggattccattcatgccggtgggcccatgaaatctgtgactagcgcccactcacatgctgctcacagaagcgaccaaggaaaaaaagcccacagttag

SEQ ID NO: 87151 - DNA, 1509 bp, Artificial Sequence
  derived and/or modified sequence
atgagcggccgccgcttccacctgagcaccacagacagagtcatcaaggctgtgcccttcccccccacccagaggctgaccttcaaggaggtgtttgaaaatggcaagcccaaggtggatgtgctgaagaaccacctggtgaaggagggccgcctggaggaggaggtggccctgaagatcatcaatgatggagctgccatcctgcggcaggagaagaccatgattgaggtggatgcccccatcaccgtgtgtggggacatccacggccagttctttgacctgatgaagctgtttgaggtgggcggcagccccagcaacacccgctacctgttcctgggggactatgtggaccggggctacttcagcattgaatgtgtgctgtacctgtggagcctgaagatcaaccaccccaagaccctcttcctgctgcggggcaaccacgagtgccgccacctgacagactacttcaccttcaagcaggagtgccgcatcaagtacagcgagcaggtgtatgatgcctgcatggagacctttgactgcctgcccctggccgccctgctgaaccagcagttcctgtgtgtgcatggaggcatgagccctgagatcaccagcctggatgacatcaggaagctggaccgcttcacagagcccccagccttcggccctgtgtgtgacctgctgtggagcgaccccagtgaagattatggaaatgagaagaccctggagcactacacccacaacacagtgcggggctgcagctacttctacagctacccagctgtgtgtgagttcctgcagaacaacaacctgctgagcatcatccgggcccacgaggcccaggatgctggctacaggatgtacaggaagagccaggccaccggcttccccagcctcatcaccatcttcagcgcccccaactacctggatgtgtacaacaacaaggctgctgtgctgaagtatgaaaataatgtgatgaacatccggcagttcaactgcagcccccacccctactggctgcccaacttcatggatgtgttcacctggagcctgccctttgtgggggagaaggtgacagagatgctggtgaatgtgctgaacatctgcagtgatgatgagctgatcagtgatgatgaagctgagggcagcaccaccgtgaggaaggagatcatccggaacaagatccgggccatcggcaagatggcccgggtcttcagcatcctgcggcaggagagcgagagcgtgctgaccctgaagggcctgacccccaccggcaccctgcccctgggcgtgctgagcggcggcaagcagaccatcgagacagccatccggggcttcagcctgcagcacaagatccgcagctttgaggaggcccggggcctggaccgcatcaatgaaagaatgccacccaggaaggacagcatccacgccggcggccccatgaagtctgtgaccagcgcccacagccacgccgcccacagaagtgaccagggcaagaaggcccacagctag

SEQ ID NO: 87152 - DNA, 1509 bp, Artificial Sequence
  derived and/or modified sequence
atgagcggccggcggttccacctgagcaccaccgaccgggtgatcaaagccgtacctttcccgcctactcaacgcctgacttttaaagaagtcttcgagaacgggaaacctaaagttgacgtcctgaaaaaccatcttgtaaaggagggccggctcgaggaagaagtcgcgctgaagatcattaatgacggcgcggccatattgcgacaggagaagacgatgatcgaggtggatgctccaattaccgtatgcggagacatccatgggcagttctttgatttaatgaagctcttcgaagtaggggggagtcccagtaatactcggtatctgtttttgggcgattacgtagaccggggctattttagtatcgagtgtgttctttacctctggagcctgaagatcaaccaccctaagaccctgttcctgttgagaggaaatcatgagtgtcgacatctcacggattacttcacctttaaacaggagtgtaggatcaaatattcagagcaggtgtatgatgcgtgcatggagacttttgactgtttacctctagcagccctgttgaaccagcagttcctgtgtgtgcatggcggtatgtctcctgaaattacctccttagacgatattcgaaagcttgaccgcttcaccgagcccccagcctttggtccagtgtgcgatctgctgtggagcgatccttcagaagattacgggaatgagaaaaccctcgagcactacacccacaatacagtgcgggggtgttcctatttctactcttatccggctgtgtgcgaattcctccaaaacaataacctgctgtctatcatccgcgcccatgaggctcaggatgcaggctatcggatgtacagaaaatctcaggcaaccggttttccatctcttattaccatttttagcgcgccgaattaccttgacgtttacaacaacaaagctgccgtgttgaaatacgagaataacgttatgaacatccggcagttcaactgcagtccacacccatactggctgcctaattttatggacgtcttcacctggagtctgccatttgttggggagaaagttactgagatgctggttaatgtgctcaacatctgttctgatgacgaactaattagcgacgacgaagcagaagggtccacaaccgtacgcaaagagattatcaggaataagatcagggctattgggaagatggcaagggtgttcagcatcctgcgacaggagagtgagagtgtcctgacccttaaaggcctcaccccaacaggtactctgccattgggagtgctgagcggcggaaaacaaactattgagactgctatcagggggttttcactgcaacacaagatacgttcgtttgaggaggctcgaggactggatagaattaatgaacgcatgcccccgcggaaagatagcatacacgctggggggccaatgaaaagtgtgacttcagcccactctcatgcagcccaccggtccgatcagggtaagaaagcacacagttag

SEQ ID NO: 87153 - DNA, 1509 bp, Artificial Sequence
  derived and/or modified sequence
atgagcgggagacgatttcatctgtccaccacagaccgggtgataaaagctgtgcctttccctcccacccagcggctaaccttcaaagaggtgtttgagaacgggaagcccaaggtcgatgtgttgaagaaccatctcgtaaaggagggtaggctcgaagaggaggtggccctgaagatcattaacgacggtgccgctattctgcgacaggaaaaaactatgattgaagtcgatgcccctattactgtatgcggtgacatccacggtcagttcttcgacttgatgaagctgtttgaggtcggaggatctccttctaacactcggtatctgttcttgggtgattatgttgatcgtggctactttagtattgagtgtgtcctatatctttggagtctcaagattaaccaccccaaaactctgttcttgttgcgcggtaaccacgagtgtcggcatcttacggactactttacttttaagcaggagtgcagaattaaatactccgagcaagtatatgatgcctgtatggagaccttcgactgtttgccactagccgcactactgaatcagcaattcctgtgtgtgcacggcggtatgtcccccgaaatcacttctctggatgacattaggaagctggataggtttaccgagccaccggctttcggccctgtgtgcgacttgttgtggtccgacccttccgaagattatggaaacgagaaaacgctggaacactacacgcacaatacagtgcgcggatgctcctacttttatagctaccccgctgtttgcgaattcctgcagaacaataacctgttgagtatcattcgcgctcatgaggcccaggacgctgggtaccggatgtatcgcaagagccaggcaacaggattccctagcttgatcacgatcttttcggctccaaattacctggatgtatataataataaggcagccgtccttaagtacgaaaataacgtgatgaacatccgtcagtttaattgcagcccacatccatactggctgcccaactttatggacgtgttcacttggagtcttccatttgtcggcgaaaaggtgactgaaatgttggtgaatgtcctgaatatctgttccgatgacgaattgatcagcgacgatgaggccgaggggtcaaccactgtgaggaaggagattatccggaataaaatccgtgctataggtaaaatggcacgcgttttctccatcctccgacaagagtccgagagtgtgctgaccttgaaaggcctaacccccaccggtaccctgccactaggagttctcagtggcggaaaacaaaccatcgaaacagccattcgcggtttcagcctgcagcataagatccgctcctttgaagaagcacgaggcctggatcggattaatgagcgaatgcctccgaggaaagacagcatccacgcaggcggacccatgaaaagcgtaaccagtgctcactcacacgctgcccaccgatctgatcagggaaagaaagcccatagctag

SEQ ID NO: 87154 - DNA, 2132 bp, Artificial Sequence
  derived and/or modified sequence
gccacccttagcagcggtcgcggtcggtgccgaagcggtgttccccgccttagccgctggcgcctcccaagagagcggccggtgggccctcgtcctgtcagtggcgtcggaggccggcgctgcggtggccgcgcccttctggtgctcggacaccgctgaggagccggggccgggcacggctggctgacggctccgggcagctaaggctgcccgaggagaaggcggcggccgcggcgtaggcgcacgtccggcgggctcctggagcctggaggaggccgaggggaccatgtccgggaggcgcttccacctctccaccaccgaccgcgtcatcaaagctgtcccctttcctccaacccaacggcttactttcaaggaagtatttgagaatgggaaacctaaagttgatgttttaaaaaaccatttggtaaaggaaggacgactggaagaggaagtagccttaaagataatcaatgatggggctgccatcctgaggcaagagaagactatgatagaagtagatgctccaatcacagtatgtggtgatattcatggacaattctttgacctaatgaagttatttgaagttggaggatcacctagtaacacacgctacctctttctgggtgactatgtggacagaggctatttcagtatagagtgtgtgctgtatttatggagtttaaagattaatcatcccaaaacattgtttctgcttcggggaaatcatgaatgcaggcatcttacagactatttcaccttcaaacaggaatgtcgaatcaaatattcggaacaggtgtatgatgcctgtatggagacatttgactgtcttcctcttgctgccctcttaaaccagcagtttctctgtgtacatggaggaatgtcacctgaaattacttctttagatgacattaggaaattagacaggtttacggaacctcccgcctttggacctgtgtgtgacctgctttggtctgatccctcagaggattatggcaatgagaagaccttggagcactatacccacaacactgtccgagggtgctcttatttctacagttaccctgcagtttgtgaatttttgcagaacaataatttactatcaattatcagagcccatgaagcccaagatgctgggtatcgaatgtacaggaagagccaagccacaggctttccatcacttattacaattttctctgcccccaattacctagatgtctataacaataaagctgctgtgttgaaatatgaaaacaatgtcatgaatatcaggcagtttaactgttctccacacccctactggcttccaaactttatggatgttttcacatggtctttgccttttgttggggaaaaagtcacagagatgctggtaaatgtgctcaacatatgctctgatgacgaactgatttctgatgatgaagcagaaggaagcactacagttcgtaaggagatcatcaggaataagatcagagccattgggaagatggcacgggtcttttcaattcttcggcaagaaagtgagagtgtgctgactctcaagggcctgactcccacaggcacactccctctgggcgtcctctcaggaggcaagcagactatcgagacagccatcagagggttctcgcttcagcacaagatccggagttttgaagaagcgcgaggtctggaccgaattaatgagcgaatgccaccccgaaaggatagcatacacgctggtgggccaatgaaatctgtaacctcagcacactcacatgctgcgcacaggagcgaccaagggaagaaagcccattcatgacttagagtcctgccgtggctcaggtggatctaaaactcaagaacaaattctatttatttattattggaaaatgaaaagcaactcaaaacaacttcaacgtggaggtgcatttataattcagtctgcatttattctgtaaaaaggtggctgttttataaattcttttaatttatgttcaatatatataaaaagtgcatctgttttgtttttcccttttttctccataattttaagaaatgaatctgattgttgtcaacacatttgtgaagtcttgtgctataaaggggaacttcccctaataaaagggccttggaaacctcaaacctgggtttctgac

SEQ ID NO: 87155 - DNA, 741 bp, Artificial Sequence
  derived and/or modified sequence
atggacgagctgttccccctgatcttccccgccgagcccgcccaggccagcggcccctacgtggagatcatcgagcagcccaagcagagaggcatgagattcagatacaagtgcgagggcagaagcgccggcagcatccccggcgagagaagcaccgacaccaccaagacccaccccaccatcaagatcaacggctacaccggccccggcaccgtgagaatcagcctggtgaccaaggaccccccccacagaccccacccccacgagctggtgggcaaggactgcagagacggcttctacgaggccgagctgtgccccgacagatgcatccacagcttccagaacctgggcatccagtgcgtgaagaagagagacctggagcaggccatcagccagagaatccagaccaacaacaaccccttccaggtgcccatcgaggagcagagaggcgactacgacctgaacgccgtgagactgtgcttccaggtgaccgtgagagaccccagcggcagacccctgagactgccccccgtgctgagccaccccatcttcgacaacagagcccccaacaccgccgagctgaagatctgcagagtgaacagaaacagcggcagctgcctgggcggcgacgagatcttcctgctgtgcgacaaggtgcagaaggaggacatcgaggtgtgcccccaggccagcacccccgccctgagcctgtacgtgatccccgagcaccaccagctgtag

SEQ ID NO: 87156 - DNA, 1134 bp, Artificial Sequence
  derived and/or modified sequence
atggacgagctgttccccctgatcttccccgccgagcccgcccaggccagcggcccctacgtggagatcatcgagcagcccaagcagagaggcatgagattcagatacaagtgcgagggcagaagcgccggcagcatccccggcgagagaagcaccgacaccaccaagacccaccccaccatcaagatcaacggctacaccggccccggcaccgtgagaatcagcctggtgaccaaggaccccccccacagaccccacccccacgagctggtgggcaaggactgcagagacggcttctacgaggccgagctgtgccccgacagatgcatccacagcttccagaacctgggcatccagtgcgtgaagaagagagacctggagcaggccatcagccagagaatccagaccaacaacaaccccttccaggtgcccatcgaggagcagagaggcgactacgacctgaacgccgtgagactgtgcttccaggtgaccgtgagagaccccagcggcagacccctgagactgccccccgtgctgagccaccccatcttcgacaacagagcccccaacaccgccgagctgaagatctgcagagtgaacagaaacagcggcagctgcctgggcggcgacgagatcttcctgctgtgcgacaaggtgcagaaggaggacatcgaggtgtacttcaccggccccggctgggaggccagaggcagcttcagccaggccgacgtgcacagacaggtggccatcgtgttcagaacccccccctacgccgaccccagcctgcaggcccccgtgagagtgagcatgcagctgagaagacccagcgacagagagctgagcgagcccatggagttccagtacctgcccgacaccgacgacagacacagaatcgaggagaagagaaagagaacctacgagaccttcaagagcatcatgaagaagagccccttcagcggccccaccgaccccagacccccccccagaagaatcgccgtgcccagcagaagcagcgccagcgtgcccaagcccggcaaggacttcctgctgagccactggaacgacagattcagcagcgtgcagctgagaagcagcggcgacgaggacagctgggcccccctgcagacctactag

SEQ ID NO: 87157 - DNA, 714 bp, Artificial Sequence
  derived and/or modified sequence
atggacgagctgttccccctgatcttccccgccgagcccgcccaggccagcggcccctacgtggagatcatcgagcagcccaagcagagaggcatgagattcagatacaagtgcgagggcagaagcgccggcagcatccccggcgagagaagcaccgacaccaccaagacccaccccaccatcaagatcaacggctacaccggccccggcaccgtgagaatcagcctggtgaccaaggaccccccccacagaccccacccccacgagctggtgggcaaggactgcagagacggcttctacgaggccgagctgtgccccgacagatgcatccacagcttccagaacctgggcatccagtgcgtgaagaagagagacctggagcaggccatcagccagagaatccagaccaacaacaaccccttccaggtgcccatcgaggagcagagaggcgactacgacctgaacgccgtgagactgtgcttccaggtgaccgtgagagaccccagcggcagacccctgagactgccccccgtgctgagccaccccatcttcgacaacagagcccccaacaccgccgagctgaagatctgcagagtgaacagaaacagcggcagctgcctgggcggcgacgagatcttcctgctgtgcgacaaggtgcagaaggcccacggcatccccgtgcccgccagatacagaagaagcagccccgactag

SEQ ID NO: 87158 - DNA, 1278 bp, Artificial Sequence
  derived and/or modified sequence
atggacgagctgttccccctgatcttccccgccgagcccgcccaggccagcggcccctacgtggagatcatcgagcagcccaagcagagaggcatgagattcagatacaagtgcgagggcagaagcgccggcagcatccccggcgagagaagcaccgacaccaccaagacccaccccaccatcaaggtgtggatgagcggccccctgtacttcggccagatcaacggctacaccggccccggcaccgtgagaatcagcctggtgaccaaggaccccccccacagaccccacccccacgagctggtgggcaaggactgcagagacggcttctacgaggccgagctgtgccccgacagatgcatccacagcttccagaacctgggcatccagtgcgtgaagaagagagacctggagcaggccatcagccagagaatccagaccaacaacaaccccttccaggtgcccatcgaggagcagagaggcgactacgacctgaacgccgtgagactgtgcttccaggtgaccgtgagagaccccagcggcagacccctgagactgccccccgtgctgagccaccccatcttcgacaacagagcccccaacaccgccgagctgaagatctgcagagtgaacagaaacagcggcagctgcctgggcggcgacgagatcttcctgctgtgcgacaaggtgcagaaggaggacatcgaggtgtacttcaccggccccggctgggaggccagaggcagcttcagccaggccgacgtgcacagacaggtggccatcgtgttcagaacccccccctacgccgaccccagcctgcaggcccccgtgagagtgagcatgcagctgagaagacccagcgacagagagctgagcgagcccatggagttccagtacctgcccgacaccgacgacagacacagaatcgaggagaagagaaagagaacctacgagaccttcaagagcatcatgaagaagagccccttcagcggccccaccgaccccagacccccccccagaagaatcgccgtgcccagcagaagcagcgccagcgtgcccaagcccgccccccagccctaccccttcaccagcagcctgagcaccatcaactacgacgagttccccaccatggtgttccccagcggccagatcagccaggccagcgccctggcccccgcccccccccaggtgctgccccaggcccccgcccccgcccccgcccccgccatggtgagcgccctggcccaggcccccgagcactgggtggccggcgactag

SEQ ID NO: 87159 - DNA, 741 bp, Artificial Sequence
  derived and/or modified sequence
atggatgagctgttcccccttatttttccagcagaaccagcccaggcttccgggccttacgtagagatcatcgaacagcctaagcagcgcggcatgcgcttccgttataaatgcgaaggcagatctgcggggagtatcccaggcgagcgctctactgacactactaagacgcatcctaccatcaagattaatgggtacaccgggcccgggaccgtgcgcatcagtttggtgaccaaggatcccccacacagaccacaccctcacgagcttgtcggcaaggactgtagggacggattttacgaagccgaactttgcccagaccggtgtatccacagtttccaaaacctgggaatccaatgcgtgaagaaaagagacctcgaacaagccatctcccagcgcatacaaacaaataacaatccgttccaggtgccgatcgaagaacaaaggggtgactacgacttgaacgcggtgcgcctgtgttttcaagtaactgtgagagacccgagtggtagacccctgcgactgccgcctgtgctgagccatccgatctttgacaaccgggcaccaaatacagctgaattgaagatctgtcgggtaaaccgcaacagcggatcctgcttgggcggagatgagatctttctgctttgcgataaagtgcagaaagaggatatcgaagtgtgtccccaggcctccaccccagctctgagcctatatgttattcctgagcaccatcaactgtag

SEQ ID NO: 87160 - DNA, 1134 bp, Artificial Sequence
  derived and/or modified sequence
atggatgaactgttccctctgatattccccgcagaacctgctcaggcctctggtccctacgtggaaattattgaacagcccaagcagcgcggtatgagatttcgctataaatgcgaaggtcgctccgccgggtcgatccccggagagagaagcacagataccacaaaaacgcatcccactatcaagattaacgggtacaccgggcccggcaccgtgcgcatctcccttgtgacaaaggaccctccccatcgcccgcacccgcatgagctggtcggcaaggattgccgggatggtttttacgaggctgagttatgtccagacaggtgtattcactcatttcagaacttgggtatacagtgtgtgaaaaagagggacctagaacaggccataagccagagaatacagactaataacaacccatttcaggttcccatagaggagcaacgtggagactacgacctaaacgcagtccgattgtgcttccaggtcaccgtacgagacccaagcgggaggcccttgaggttaccccccgtgctgagtcatcccatttttgataaccgcgcgccgaataccgccgagctgaaaatatgcagagtgaataggaactcaggctcatgccttggcggtgatgagatctttttattatgtgataaagtgcagaaagaggacatcgaggtgtattttaccggcccgggatgggaggcccgtgggagtttctctcaggctgacgtgcatcgtcaagttgctattgtgttccgcaccccaccttacgctgacccctctcttcaagctcccgtgagagtttcgatgcagctcaggaggccgagtgacagggaactgagcgaacccatggaattccagtatctccctgacaccgacgatcgacaccggattgaagaaaagcggaaaagaacatacgagacattcaagtccattatgaagaagagtccttttagtggccccaccgatcctaggccaccccctagaagaatcgcggtcccttcacggtcctccgcaagcgtccccaaacccggtaaggattttctcctttcacactggaacgataggttcagcagtgtgcaactgcggtcttccggcgatgaggacagctgggctcctttgcaaacatattag

SEQ ID NO: 87161 - DNA, 714 bp, Artificial Sequence
  derived and/or modified sequence
atggacgagttgtttccactgatctttccagcagagcccgcccaagcatcaggtccatatgttgagattatcgagcagccaaaacagcggggtatgagatttagatacaaatgcgagggccggtccgcaggatctatacccggtgaacgctctaccgacaccactaagacccatccaacaattaaaatcaatggctacacagggccaggcactgtaaggatcagcctggtaacaaaagatcctccccatcgccctcatccacacgagttggtggggaaagactgtcgcgacggattctatgaggccgaattatgcccagataggtgtatccactcatttcagaatctaggcatccagtgtgtgaagaaaagagatctggagcaagccatttcccagagaatacaaactaataataacccttttcaagtgcccattgaggaacaacgaggcgattatgacctgaatgccgtgcggttgtgttttcaggtcaccgttcgggatcctagtggacggccactgcggttacctcctgtcttatcacaccctattttcgacaatcgagctcccaatacagctgaactgaaaatttgtcgcgtcaaccggaattcagggtcgtgcctggggggcgatgagattttcctcttgtgtgacaaagtccagaaggcgcacggaattccggttccggccaggtacaggaggtcctcccccgactag

SEQ ID NO: 87162 - DNA, 1278 bp, Artificial Sequence
  derived and/or modified sequence
atggacgagctctttcctctcattttccccgcagaaccggctcaagcatctgggccctacgtggagatcatagaacaacctaaacagcgcggaatgagattcaggtataagtgtgagggcagatcggctggctcgattcctggagaaaggagcaccgacaccacgaagacccaccctactatcaaggtttggatgtcagggcctctctacttcgggcaaatcaatgggtacacagggcccgggactgtacgaatttcactcgtcaccaaagatcccccacatcgacctcaccctcatgagttggtaggtaaggattgccgggacggtttttacgaagccgagctgtgccccgataggtgcattcacagttttcagaacctcggaatacagtgtgtgaaaaagagagaccttgagcaggctatctcccagcgcattcagactaacaataacccattccaggtaccaatcgaggagcaaaggggggattatgatctgaacgcggtccggctctgttttcaggtgaccgtgcgggatcccagcgggcgccccctgcggctgccccccgtgttgagccacccaatttttgacaatcgggctcctaatacagcagagctgaaaatatgcagggtgaacagaaactccggctcgtgcctgggcggggacgagatattcctgctttgtgataaggtccagaaggaggacatagaggtctattttactgggccaggctgggaggctaggggttccttctcacaggctgacgttcataggcaggtggccatcgtttttaggacgcccccatacgctgatccctctttacaggcccctgtcagggtgagcatgcagctccgacgcccgtcagaccgggaactaagcgagcccatggaattccagtacctgcctgatactgacgaccgccaccgcatcgaggagaaaagaaaaaggacttatgagacttttaaatcaataatgaagaaatcgccatttagcggtcctacggatccccgtccgccaccgcggaggatcgctgtcccatctcgctcgagtgccagtgtcccaaaacctgcgccacagccttatccgttcacctcgagtctttccactatcaattacgacgagttcccaacaatggtgttcccttcaggccagattagtcaggcctcagcgctcgccccagcgccgccacaggttctgccccaggcacccgcgcctgcaccagccccggccatggtatccgcactggcccaggctcctgagcactgggtggcgggcgactag

SEQ ID NO: 87163 - DNA, 741 bp, Artificial Sequence
  derived and/or modified sequence
atggatgagctgttccccctcatcttccctgctgagcccgcccaggccagcggcccctacgtggagatcatcgagcagcccaagcagaggggcatgaggttccgctacaagtgtgagggccgctctgctggcagcatccctggagagaggagcacagacaccaccaagacccaccccaccatcaagatcaatggctacacaggccctggcaccgtgcgcatcagcctggtgaccaaggaccccccccaccggccccacccccatgagctggtgggcaaggactgcagagatggcttctatgaggccgagctgtgcccagaccgctgcatccacagcttccagaacctgggcatccagtgtgtgaagaagagggacctggagcaggccatcagccagaggatccagaccaacaacaaccccttccaggtgcccatcgaggagcagagaggagactatgacctgaatgctgtgcggctgtgcttccaggtgacagtgcgggaccccagcggccggcccctgcggctgccccctgtgctgagccaccccatctttgacaacagagcccccaacacagctgagctgaagatctgccgggtgaacagaaattctggcagctgcctgggcggagatgagatcttcctgctgtgtgacaaggtgcagaaggaggacatcgaggtgtgcccccaggccagcaccccagccctgagcctgtatgtgattcctgagcaccaccagctgtag

SEQ ID NO: 87164 - DNA, 1134 bp, Artificial Sequence
  derived and/or modified sequence
atggatgagctgttccccctcatcttccctgctgagcccgcccaggccagcggcccctacgtggagatcatcgagcagcccaagcagaggggcatgaggttccgctacaagtgtgagggccgctctgctggcagcatccctggagagaggagcacagacaccaccaagacccaccccaccatcaagatcaatggctacacaggccctggcaccgtgcgcatcagcctggtgaccaaggaccccccccaccggccccacccccatgagctggtgggcaaggactgcagagatggcttctatgaggccgagctgtgcccagaccgctgcatccacagcttccagaacctgggcatccagtgtgtgaagaagagggacctggagcaggccatcagccagaggatccagaccaacaacaaccccttccaggtgcccatcgaggagcagagaggagactatgacctgaatgctgtgcggctgtgcttccaggtgacagtgcgggaccccagcggccggcccctgcggctgccccctgtgctgagccaccccatctttgacaacagagcccccaacacagctgagctgaagatctgccgggtgaacagaaattctggcagctgcctgggcggagatgagatcttcctgctgtgtgacaaggtgcagaaggaggacatcgaggtgtacttcaccggccctggctgggaggcccggggcagcttcagccaggctgatgtgcaccggcaggtggccatcgtgttccgcaccccaccctatgctgaccccagcctgcaggcccctgtgcgggtgtccatgcagctgcggcggcccagcgaccgggagctgtctgagcccatggagttccagtacctgcctgacacagatgacagacaccgcatcgaggagaagaggaagaggacctatgagaccttcaagagcatcatgaagaagagccccttcagcggccccacagacccccggcccccaccaagaagaattgctgtgcccagccgcagcagcgcctctgtgcccaagccaggcaaggacttcctgctgagccactggaatgaccgcttcagctctgtgcagctgcggagcagtggagatgaggacagctgggcccccctgcagacctactag

SEQ ID NO: 87165 - DNA, 714 bp, Artificial Sequence
  derived and/or modified sequence
atggatgagctgttccccctcatcttccctgctgagcccgcccaggccagcggcccctacgtggagatcatcgagcagcccaagcagaggggcatgaggttccgctacaagtgtgagggccgctctgctggcagcatccctggagagaggagcacagacaccaccaagacccaccccaccatcaagatcaatggctacacaggccctggcaccgtgcgcatcagcctggtgaccaaggaccccccccaccggccccacccccatgagctggtgggcaaggactgcagagatggcttctatgaggccgagctgtgcccagaccgctgcatccacagcttccagaacctgggcatccagtgtgtgaagaagagggacctggagcaggccatcagccagaggatccagaccaacaacaaccccttccaggtgcccatcgaggagcagagaggagactatgacctgaatgctgtgcggctgtgcttccaggtgacagtgcgggaccccagcggccggcccctgcggctgccccctgtgctgagccaccccatctttgacaacagagcccccaacacagctgagctgaagatctgccgggtgaacagaaattctggcagctgcctgggcggagatgagatcttcctgctgtgtgacaaggtgcagaaggcccacggcatccctgtgcctgcccgctaccgccgcagcagcccagactag

SEQ ID NO: 87166 - DNA, 1278 bp, Artificial Sequence
  derived and/or modified sequence
atggatgagctgttccccctcatcttccctgctgagcccgcccaggccagcggcccctacgtggagatcatcgagcagcccaagcagaggggcatgaggttccgctacaagtgtgagggccgctctgctggcagcatccctggagagaggagcacagacaccaccaagacccaccccaccatcaaggtgtggatgagcggccccctgtacttcggccagatcaatggctacacaggccctggcaccgtgcgcatcagcctggtgaccaaggaccccccccaccggccccacccccatgagctggtgggcaaggactgcagagatggcttctatgaagctgagctgtgcccagaccgctgcatccacagcttccagaacctgggcatccagtgtgtgaagaagagggacctggagcaggccatcagccagaggatccagaccaacaacaaccccttccaggtgcccatcgaggagcagagaggagactatgacctgaatgctgtgcggctgtgcttccaggtgacagtgcgggaccccagcggccggcccctgcggctgccccctgtgctgagccaccccatctttgacaacagagcccccaacacagctgagctgaagatctgccgggtgaacagaaacagcggcagctgcctgggcggagatgagatcttcctgctgtgtgacaaggtgcagaaggaggacatcgaggtgtacttcaccggccctggctgggaggcccggggcagcttcagccaggctgatgtgcaccggcaggtggccatcgtgttccgcaccccaccctatgctgaccccagcctgcaggcccctgtgcgggtgtccatgcagctgcggcggcccagcgaccgggagctgtctgagcccatggagttccagtacctgcctgacacagatgacagacacagaattgaggagaagaggaagaggacctatgagaccttcaagagcatcatgaagaagagccccttcagcggccccacagacccccggcccccacccaggagaattgctgtgcccagccgcagcagcgcctctgtgcccaagccagccccccagccctaccccttcaccagcagcctgagcaccatcaactatgatgagttccccaccatggtgttccccagcggccagatcagccaggccagcgccctggccccagccccaccccaggtgctgccccaggccccagccccagccccagccccagccatggtgtctgccctggcccaggcccctgagcactgggtggccggggactag

SEQ ID NO: 87167 - DNA, 741 bp, Artificial Sequence
  derived and/or modified sequence
atggacgagctgttccccctgatcttccccgccgagcccgcccaggcttccggcccttacgtagagattatcgagcagcccaagcaaaggggcatgcggtttagatacaagtgcgagggtagatcagcaggtagcatcccgggcgaacggtccactgatacaacaaaaacacatcccaccatcaagatcaacggttacacagggcccggaacggtgcggatatccttggtcacgaaagatcccccacaccgccctcaccctcatgagctcgtaggtaaggattgtcgagatggcttctacgaggcagaattgtgcccggaccgctgtatccatagcttccagaacctggggattcagtgcgtgaagaaacgagacctggaacaagccatctcccaacgtatccaaacgaacaataaccctttccaggtacctatcgaggagcagcggggcgactatgatctgaacgcagtccggctgtgcttccaggttaccgttcgcgacccctccggcaggcctctgcggcttccacctgtgctatcccatcctatcttcgacaacagggctccaaacactgcagagctaaagatttgtcgtgtgaatcgtaacagcggatcatgcctggggggggacgaaatcttcctattatgtgacaaagtccaaaaggaggatatagaggtgtgcccccaggcctcaacaccagcactatccctgtacgtgatccctgaacaccaccaactgtag

SEQ ID NO: 87168 - DNA, 1134 bp, Artificial Sequence
  derived and/or modified sequence
atggacgagctgttccccctgatcttccccgccgagcccgcccaggcctctggaccctatgtggagattatcgagcaaccaaagcaacggggtatgcgatttcggtacaaatgtgagggtcggagtgcaggctccattcccggggagagatcaacggacactactaaaacacaccctaccattaagattaatggatatacaggacccggtactgttagaatatccctcgttaccaaggacccccctcaccggccccacccgcacgagctggtgggtaaagattgccgggacggattctatgaagcagaactgtgccctgaccgatgcatccactcatttcagaatctcggcatccaatgcgtcaaaaaaagggatcttgagcaggctataagccagagaatccagaccaacaataacccctttcaggtgcctatcgaggaacagcggggggactatgatctgaacgccgtcaggctatgtttccaggtaacagtccgagatccctcaggcagacctctgaggctccctccagttctgtcgcacccaatcttcgacaacagagcacctaatacagctgagctgaaaatttgtcgagtgaaccgcaatagcggttcctgtttaggaggggacgagattttcctgctctgcgataaggtgcagaaggaggacattgaagtgtatttcaccggccccgggtgggaggcacgaggtagtttcagtcaggcagacgttcacagacaggtcgccattgtctttaggacacccccctacgccgatccctccctgcaggcccccgtgagggtgagtatgcagctaaggcggccttccgacagggagctgagcgaacccatggagttccagtacctcccagatacagacgacagacaccggattgaggaaaagcggaagcggacatatgagactttcaagtccatcatgaaaaaatcaccattttctggcccaacggatcctaggcccccccccagaagaattgccgttccctcaagatccagcgccagcgtccctaagcctggtaaagacttcctccttagtcactggaacgataggttcagctccgttcagctcagaagcagtggtgacgaggactcttgggctcccctccagacctactag

SEQ ID NO: 87169 - DNA, 714 bp, Artificial Sequence
  derived and/or modified sequence
atggacgagctgttccccctgatcttccccgccgagcccgcccaggccagcggcccttacgtggagattattgaacagcctaaacaacggggaatgcggttccgctataaatgcgagggccgcagtgcgggctcaatccccggcgaacgcagtaccgacacaacaaagacacaccccacgatcaaaatcaacggatatacagggcctggtaccgttcgcatcagcctcgtgacgaaggacccgccacatcggccccacccgcacgagctagttggcaaggattgccgcgacggcttctacgaggctgagctatgtccagacagatgcatccatagcttccagaatctcggcatccagtgcgtaaagaagcgcgaccttgaacaggctatcagccagaggatccagacaaataacaatccatttcaggtgcccatcgaggagcagcgcggcgattatgatttaaacgcagttagactttgctttcaggtgactgtgagggacccaagcgggaggcctctgcgactgcctccggtactgtcacacccgatctttgacaatcgagcccctaacacagcggagctcaagatctgccgagtgaacaggaacagcggctcctgccttggcggcgatgaaattttccttctgtgcgacaaagtccaaaaggcgcacggaatcccagttcctgctcgttacaggcggtcgtcacccgattag

SEQ ID NO: 87170 - DNA, 1278 bp, Artificial Sequence
  derived and/or modified sequence
atggacgagctgttccccctgatcttccccgccgagcccgcccaggccagcgggccgtacgtcgaaataatcgagcaaccaaagcagagaggcatgcgattcagatacaagtgcgagggcagaagcgccggttccatccctggtgagcgttcgacagataccacgaagactcaccctaccatcaaagtgtggatgtcaggacctctgtattttggtcaaataaacggctatactggaccaggtacggtccggattagtctggtgacaaaggacccccctcataggccacatccccacgagctcgtaggtaaagattgtagagatggcttttatgaggcagagttgtgcccagacaggtgcatacactcattccagaatctcgggattcaatgcgtgaagaaaagagacctggagcaggccatcagtcagaggattcagactaataacaatccatttcaggtccctattgaagaacagcggggtgactacgacttaaacgccgtgagactctgtttccaagtgaccgttcgggacccttcaggcaggccactccgactgcccccggtcctgtcacacccaatatttgacaatagggctcctaacaccgctgaactgaaaatttgtagagtgaacagaaactctgggagttgtcttggcggcgacgaaatctttctgttgtgcgacaaagtccagaaggaggatatcgaagtctatttcaccggacccgggtgggaagccaggggcagcttctcccaggctgatgtgcatagacaggtggccatcgtgtttagaacccctccatacgccgatccctcacttcaagctccagtacgcgtctccatgcaactgcgcaggccatctgatcgggaactctcagagcccatggaatttcagtacctgcccgacacagatgaccgccaccgcatcgaggagaagaggaagcgaacgtacgagacctttaagtcaatcatgaagaaatcacccttcagcggacccaccgatccacggcctccgcctcgccgcatcgctgtgcctagtcgaagctccgcttctgtccctaaaccagcacctcagccgtatccctttacatcttctttaagcacaattaactatgacgagtttcccaccatggtattcccttccggccagattagccaggccagcgcactcgctccggcacctcctcaggtgctgccccaggcccccgcccccgccccggcgcccgctatggtgagcgccctggcgcaagccccggaacattgggtggcgggggactag

SEQ ID NO: 87171 - DNA, 741 bp, Artificial Sequence
  derived and/or modified sequence
atggatgagctgttcccattgatattcccagcagaacctgcccaggcttcggggccatatgtggaaatcattgagcagccaaagcagcgcggaatgaggtttcgctacaagtgcgaagggagaagcgctggaagcattcccggagagcgatcaactgacactaccaaaacccatccgaccataaagataaacgggtataccggccctggcaccgtcaggatttcactagttacaaaagacccgcctcatcgccctcatcctcacgagctggttggaaaggattgtagggacggtttttatgaggcagagctgtgtccagaccgttgtatacattccttccagaatctgggcattcagtgcgtcaaaaaaagggatttggaacaggctatctcccagagaatccagactaataacaatccattccaggtcccaatcgaagagcagcgcggagactacgacctgaacgcggttcgcctatgcttccaagtcacagtgagggacccctccgggcgtccactgaggttgccccctgtgttgtctcacccaatctttgacaacagggcacctaatactgccgaactgaaaatctgtcgtgtcaatcggaacagcgggtcatgcttaggaggagatgagattttcctgctctgcgacaaggttcagaaagaggatatcgaggtttgcccacaagctagtacaccagcgctgagcctgtatgtcattccggaacaccatcagctgtag

SEQ ID NO: 87172 - DNA, 1134 bp, Artificial Sequence
  derived and/or modified sequence
atggacgaattatttcctctaattttccctgctgagccggcacaggcttcaggcccttacgtggagattatagagcagcccaaacagcgcggtatgcgcttccgctacaaatgcgagggacgaagcgccggatctatccccggtgaacggagcactgacacaactaagactcacccaacaataaagatcaacgggtacacgggacctgggaccgtcagaatcagcctagtgaccaaagaccccccacaccgcccacatccccatgagttagtgggtaaagattgccgggacgggttctacgaagcggaactttgtcctgacaggtgcatccattcgtttcaaaacttaggaattcagtgtgtgaagaagagagaccttgagcaagctatctcacagcgtatccagaccaataacaaccccttccaagtgccaatcgaggagcaacgcggagactacgacctcaacgctgtgcggctgtgctttcaagttaccgtgcgcgaccccagcgggcgaccgctgaggctccctcctgttttatcgcacccgatcttcgacaaccgcgcacccaataccgccgagctgaaaatttgtcgggtaaatagaaactccgggagttgccttggcggtgacgagatcttcctcctttgtgataaggtccaaaaggaggacatcgaggtgtatttcacaggtcccggatgggaggccaggggaagcttttcccaggccgatgtgcaccgccaggtggccatcgtgttccgcacgccaccctatgctgacccttctctgcaggcacctgtgcgggtgagtatgcaactgagacgccctagcgaccgggaactttctgaaccgatggagtttcagtatttacctgacacggatgacaggcaccgaatcgaggagaaaagaaagcggacctacgagaccttcaagtctataatgaaaaagagcccattctccgggccaactgacccgagaccaccaccaagaaggatcgctgttcctagccgctctagtgccagcgtgcctaaacccggtaaggatttccttctgtctcattggaacgatcgcttttccagcgtacagctgcggtcaagcggtgatgaggatagttgggcccctttgcaaacatactag

SEQ ID NO: 87173 - DNA, 714 bp, Artificial Sequence
  derived and/or modified sequence
atggatgagctgttcccccttattttccccgctgaacccgctcaagccagcggcccatatgttgaaataatcgagcagccaaagcagagaggaatgcgctttcgctacaaatgtgagggcagatctgcgggaagcattcctggcgaacgcagcacggacacaactaagacacaccctacaatcaaaatcaatgggtacaccggaccaggaacagtgcggatcagccttgtcacgaaggatccccctcatcgccctcacccccacgaattggttggtaaggattgcagagatggcttttatgaagcagaactgtgccctgaccgatgcattcatagctttcaaaatctcggaattcagtgcgttaagaaaagagacctggagcaggctatttctcagcgaatacagaccaacaataacccattccaggtgcctatcgaagagcagaggggggactatgacctcaatgccgtgcggctttgttttcaggtgacggtccgagatccgtccggacgacccctgaggctcccgccagtgctctcccatcccatcttcgacaaccgggctcctaatacagctgagcttaagatttgccgcgtcaatcgcaactcagggtcttgcctggggggtgacgaaatcttcctcttatgcgataaggtgcagaaagctcatgggataccagtgcccgctcgttacagacgatcatcaccagactag

SEQ ID NO: 87174 - DNA, 1278 bp, Artificial Sequence
  derived and/or modified sequence
atggacgagctgttcccgctcattttccctgctgaacctgcccaggcaagcggaccttacgtcgagataattgagcagcctaaacaacgagggatgcggttccgttacaaatgcgagggcaggtctgctggcagtataccaggcgagaggagcactgacaccacaaagacacatccaaccattaaggtctggatgagtgggccactttactttggccagattaatggatatactgggcctggaaccgtgcgaatcagcttggtaactaaggatcctcctcatagaccgcaccctcatgagctggtggggaaggattgccgcgatggtttctatgaggccgaactgtgccccgatagatgcatccactctttccagaacctgggcatccagtgcgttaagaagcgcgacctggagcaggctatcagtcagcgcatacagacaaacaataaccctttccaggttcctattgaggaacaacggggagactacgatctcaatgctgtcagactgtgctttcaagtgacagtccgcgacccctctggaaggcctcttaggctgcccccagtgctttcccaccctatttttgacaaccgggctcctaacaccgcagaactgaaaatctgtcgggttaaccgcaattccggcagctgcctcgggggtgatgagatattcctgctgtgtgataaggtgcagaaggaagacatcgaagtgtactttacaggaccgggatgggaggcaagaggaagtttttcccaggccgatgtacacaggcaggtcgcaatagttttccggactcccccttacgctgacccatccctgcaagcgccagtcagagtgtctatgcaacttagacggcctagtgacagagagctgagcgaaccaatggaattccaatatctgccagatacagatgaccggcaccgcattgaagagaagcgcaaacgtacctatgaaacttttaaatccatcatgaaaaagagcccatttagcggcccaaccgatcccagacccccacccaggaggattgccgttccaagtcgctcctccgcctcagtgcccaagcccgcaccacagccatatcccttcactagctcactctccacaatcaactatgatgagtttccgactatggtcttcccatcaggacaaatttcccaggctagcgctttggctcccgctccaccacaagtgttgccgcaggctccagctcccgctcctgcccctgctatggtaagcgccctggctcaggcccctgagcactgggtggccggagactag

SEQ ID NO: 87175 - DNA, 3183 bp, Artificial Sequence
  derived and/or modified sequence
ctcgtctgtagtgcacgccgcgggcccagctgcgaccccggccccgcccccgggaccccggccatggacgaactgttccccctcatcttcccggcagagccagcccaggcctctggcccctatgtggagatcattgagcagcccaagcagcggggcatgcgcttccgctacaagtgcgaggggcgctccgcgggcagcatcccaggcgagaggagcacagataccaccaagacccaccccaccatcaagatcaatggctacacaggaccagggacagtgcgcatctccctggtcaccaaggaccctcctcaccggcctcacccccacgagcttgtaggaaaggactgccgggatggcttctatgaggctgagctctgcccggaccgctgcatccacagtttccagaacctgggaatccagtgtgtgaagaagcgggacctggagcaggctatcagtcagcgcatccagaccaacaacaaccccttccaagttcctatagaagagcagcgtggggactacgacctgaatgctgtgcggctctgcttccaggtgacagtgcgggacccatcaggcaggcccctccgcctgccgcctgtcctttctcatcccatctttgacaatcgtgcccccaacactgccgagctcaagatctgccgagtgaaccgaaactctggcagctgcctcggtggggatgagatcttcctactgtgtgacaaggtgcagaaagaggacattgaggtgtatttcacgggaccaggctgggaggcccgaggctccttttcgcaagctgatgtgcaccgacaagtggccattgtgttccggacccctccctacgcagaccccagcctgcaggctcctgtgcgtgtctccatgcagctgcggcggccttccgaccgggagctcagtgagcccatggaattccagtacctgccagatacagacgatcgtcaccggattgaggagaaacgtaaaaggacatatgagaccttcaagagcatcatgaagaagagtcctttcagcggacccaccgacccccggcctccacctcgacgcattgctgtgccttcccgcagctcagcttctgtccccaagccaggtaaggatttccttttgtcccactggaacgacaggttcagctctgttcagctgaggagcagtggagatgaagactcctgggccccattacagacctactgaatcagaggctttgaaaggatggcgcaggaaccagcgacttcctgggatgctaatgcacactgaagcctgggaaccaccgtgccacttaaattctatattgggtatcttgggaatcagaagttaaaaatgcagaatctctgctctcatctctcacttgaattgggggaacaaaaatcacctctaaattagcaagatgtgtgtgcctgtgcgaggctcaaaaactgacaagctctgcacttcaggccgctgctcacttggtgctccatgggctcattgcctctcaggacttagtttttcagctgtaaactgaggagtccagcttatctctccaagtgtcccttcctctaaaaggctggaagagtttcgtgggcttgagtagtcagggaggactccaaggtggaggtgtggctagaactggaccctacaggctgggtcagatggggtaagaggaaggagatagggtgttggcagtgactccctagagagggattgagcctgagcaccatgaagaggggctggggtacagaggacggggtggatctctagggctttctctgacccctgcctctctgtctctctcctccagcaccccagccctatccctttacgtcatccctgagcaccatcaactatgatgagtttcccaccatggtgtttccttctgggcagatcagccaggcctcggccttggccccggcccctccccaagtcctgccccaggctccagcccctgcccctgctccagccatggtatcagctctggcccaggccccagcccctgtcccagtcctagccccaggccctcctcaggctgtggccccacctgcccccaagcccacccaggctggggaaggaacgctgtcagaggccctgctgcagctgcagtttgatgatgaagacctgggggccttgcttggcaacagcacagacccagctgtgttcacagacctggcatccgtcgacaactccgagtttcagcagctgctgaaccagggcatacctgtggccccccacacaactgagcccatgctgatggagtaccctgaggctataactcgcctagtgacaggggcccagaggccccccgacccagctcctgctccactgggggccccggggctccccaatggcctcctttcaggagatgaagacttctcctccattgcggacatggacttctcagccctgctgagtcagatcagctcctaagggggtgacgcctgccctccccagagcactgggttgcaggggattgaagccctccaaaagcacttacggattctggtggggtgtgttccaactgcccccaactttgtggatgtcttccttggaggggggagccatattttattcttttattgtcagtatctgtatctctctctctttttggaggtgcttaagcagaagcattaacttctctggaaaggggggagctggggaaactcaaacttttcccctgtcctgatggtcagctcccttctctgtagggaactctggggtcccccatccccatcctccagcttctggtactctcctagagacagaagcaggctggaggtaaggcctttgagcccacaaagccttatcaagtgtcttccatcatggattcattacagcttaatcaaaataacgccccagataccagcccctgtatggcactggcattgtccctgtgcctaacaccagcgtttgaggggctggccttcctgccctacagaggtctctgccggctctttccttgctcaaccatggctgaaggaaaccagtgcaacagcactggctctctccaggatccagaaggggtttggtctgggacttccttgctctccctcttctcaagtgccttaatagtagggtaagttgttaagagtgggggagagcaggctggcagctctccagtcaggaggcatagtttttactgaacaatcaaagcacttggactcttgctctttctactctgaactaataaatctgttgccaagctgg

SEQ ID NO: 87176 - DNA, 1437 bp, Artificial Sequence
  derived and/or modified sequence
gcatttccgcctctggcgaatggctcgtctgtagtgcacgccgcgggcccagctgcgaccccggccccgcccccgggaccccggccatggacgaactgttccccctcatcttcccggcagagccagcccaggcctctggcccctatgtggagatcattgagcagcccaagcagcggggcatgcgcttccgctacaagtgcgaggggcgctccgcgggcagcatcccaggcgagaggagcacagataccaccaagacccaccccaccatcaaggtttggatgtctgggcctctgtactttggacagatcaatggctacacaggaccagggacagtgcgcatctccctggtcaccaaggaccctcctcaccggcctcacccccacgagcttgtaggaaaggactgccgggatggcttctatgaggctgagctctgcccggaccgctgcatccacagtttccagaacctgggaatccagtgtgtgaagaagcgggacctggagcaggctatcagtcagcgcatccagaccaacaacaaccccttccaagttcctatagaagagcagcgtggggactacgacctgaatgctgtgcggctctgcttccaggtgacagtgcgggacccatcaggcaggcccctccgcctgccgcctgtcctttctcatcccatctttgacaatcgtgcccccaacactgccgagctcaagatctgccgagtgaaccgaaactctggcagctgcctcggtggggatgagatcttcctactgtgtgacaaggtgcagaaagaggacattgaggtgtatttcacgggaccaggctgggaggcccgaggctccttttcgcaagctgatgtgcaccgacaagtggccattgtgttccggacccctccctacgcagaccccagcctgcaggctcctgtgcgtgtctccatgcagctgcggcggccttccgaccgggagctcagtgagcccatggaattccagtacctgccagatacagacgatcgtcaccggattgaggagaaacgtaaaaggacatatgagaccttcaagagcatcatgaagaagagtcctttcagcggacccaccgacccccggcctccacctcgacgcattgctgtgccttcccgcagctcagcttctgtccccaagccagcaccccagccctatccctttacgtcatccctgagcaccatcaactatgatgagtttcccaccatggtgtttccttctgggcagatcagccaggcctcggccttggccccggcccctccccaagtcctgccccaggctccagcccctgcccctgctccagccatggtatcagctctggcccaggccccagagcactgggttgcaggggattgaagccctccaaaagcacttacggattctggtggggtgtgttccaactgcccccaactttgtggatgtcttcctt

SEQ ID NO: 87177 - protein, 4866 aa, Artificial Sequence
  derived and/or modified sequence
MAELGGGGEEDARWYRKEDEVVLQCIATIHKEQRKFCLAAEGLGNRLCFLEPTSEAKYIPPDLCVCNFVLEQSLSVRALQEMLANTGENGGEGAAQGGGHRTLLYGHAVLLRHSFSGMYLTCLTTSRSQTDKLAFDVGLREHATGEACWWTIHPASKQRSEGEKVRIGDDLILVSVSSERYLHLSVSNGNIQVDASFMQTLWNVHPTCSGSSIEEGYLLGGHVVRLFHGHDECLTIPSTDQNDSQHRRIFYEAGGAGTRARSLWRVEPLRISWSGSNIRWGQAFRLRHLTTGHYLALTEDQGLILQDRAKSDTKSTAFSFRASKELKEKLDSSHKRDIEGMGVPEIKYGDSVCFVQHIASGLWVTYKAQDAKTSRLGPLKRKVILHQEGHMDDGLTLQRCQREESQAARIIRNTTALFSQFVSGNNRTAAPITLPIEEVLQTLQDLIAYFQPPEEEMRHEDKQNKLRSLKNRQNLFKEEGMLALVLNCIDRLNVYNSVAHFAGIAREESGMAWKEILNLLYKLLAALIRGNRNNCAQFSNNLDWLISKLDRLESSSGILEVLHCILTESPEALNLIAEGHIKSIISLLDKHGRNHKVLDILCSLCLCNGVAVRANQNLICDNLLPRRNLLLQTRLINDVTSIRPNIFLGVAEGSAQYKKWYFELIIDQVDPFLTAEPTHLRVGWASSSGYAPYPGGGEGWGGNGVGDDLYSYGFDGLHLWSGRIPRAVASINQHLLRSDDVVSCCLDLGVPSISFRINGQPVQGMFENFNTDGLFFPVMSFSAGVKVRFLMGGRHGEFKFLPPSGYAPCYEALLPKEKMRLEPVKEYKRDADGIRDLLGTTQFLSQASFIPCPVDTSQVILPPHLEKIRDRLAENIHELWGMNKIELGWTFGKIRDDNKRQHPCLVEFSKLPETEKNYNLQMSTETLKTLLALGCHIAHVNPAAEEDLKKVKLPKNYMMSNGYKPAPLDLSDVKLLPPQEILVDKLAENAHNVWAKDRIKQGWTYGIQQDLKNKRNPRLVPYALLDERTKKSNRDSLREAVRTFVGYGYNIEPSDQELADSAVEKVSIDKIRFFRVERSYAVRSGKWYFEFEVVTGGDMRVGWARPGCRPDVELGADDQAFVFEGNRGQRWHQGSGYFGRTWQPGDVVGCMINLDDASMIFTLNGELLITNKGSELAFADYEIENGFVPICCLGLSQIGRMNLGTDASTFKFYTMCGLQEGFEPFAVNMNRDVAMWFSKRLPTFVNVPKDHPHIEVMRIDGTMDSPPCLKVTHKTFGTQNSNADMIYCRLSMPVECHSSFSHSPCLDSEAFQKRKQMQEILSHTTTQCYYAIRIFAGQDPSCVWVGWVTPDYHLYSEKFDLNKNCTVTVTLGDERGRVHESVKRSNCYMVWGGDIVASSQRSNRSNVDLEIGCLVDLAMGMLSFSANGKELGTCYQVEPNTKVFPAVFLQPTSTSLFQFELGKLKNAMPLSAAIFRSEEKNPVPQCPPRLDVQTIQPVLWSRMPNSFLKVETERVSERHGWVVQCLEPLQMMALHIPEENRCVDILELCEQEDLMRFHYHTLRLYSAVCALGNSRVAYALCSHVDLSQLFYAIDNKYLPGLLRSGFYDLLISIHLASAKERKLMMKNEYIIPITSTTRNIRLFPDESKRHGLPGVGLRTCLKPGFRFSTPCFVVTGEDHQKQSPEIPLESLRTKALSMLTEAVQCSGAHIRDPVGGSVEFQFVPVLKLIGTLLVMGVFDDDDVRQILLLIDPSVFGEHSAGTEEGAEKEEVTQVEEKAVEAGEKAGKEAPVKGLLQTRLPESVKLQMCELLSYLCDCELQHRVEAIVAFGDIYVSKLQANQKFRYNELMQALNMSAALTARKTKEFRSPPQEQINMLLNFQLGENCPCPEEIREELYDFHEDLLLHCGVPLEEEEEEEEDTSWTGKLCALVYKIKGPPKPEKEQPTEEEERCPTTLKELISQTMICWAQEDQIQDSELVRMMFNLLRRQYDSIGELLQALRKTYTISHTSVSDTINLLAALGQIRSLLSVRMGKEEELLMINGLGDIMNNKVFYQHPNLMRVLGMHETVMEVMVNVLGTEKSQIAFPKMVASCCRFLCYFCRISRQNQKAMFEHLSYLLENSSVGLASPSMRGSTPLDVAASSVMDNNELALSLEEPDLEKVVTYLAGCGLQSCPMLLAKGYPDVGWNPIEGERYLSFLRFAVFVNSESVEENASVVVKLLIRRPECFGPALRGEGGNGLLAAMQGAIKISENPALDLPSQGYKREVSTGDDEEEEEIVHMGNAIMSFYSALIDLLGRCAPEMHLIQTGKGEAIRIRSILRSLVPTEDLVGIISIPLKLPSLNKDGSVSEPDMAANFCPDHKAPMVLFLDRVYGIKDQTFLLHLLEVGFLPDLRASASLDTVSLSTTEAALALNRYICSAVLPLLTRCAPLFAGTEHCTSLIDSTLQTIYRLSKGRSLTKAQRDTIEECLLAICNHLRPSMLQQLLRRLVFDVPQLNEYCKMPLKLLTNHYEQCWKYYCLPSGWGSYGLAVEEELHLTEKLFWGIFDSLSHKKYDPDLFRMALPCLSAIAGALPPDYLDTRITATLEKQISVDADGNFDPKPINTMNFSLPEKLEYIVTKYAEHSHDKWACDKSQSGWKYGISLDENVKTHPLIRPFKTLTEKEKEIYRWPARESLKTMLAVGWTVERTKEGEALVQQRENEKLRSVSQANQGNSYSPAPLDLSNVVLSRELQGMVEVVAENYHNIWAKKKKLELESKGGGSHPLLVPYDTLTAKEKFKDREKAQDLFKFLQVNGIIVSRGMKDMELDASSMEKRFAYKFLKKILKYVDSAQEFIAHLEAIVSSGKTEKSPRDQEIKFFAKVLLPLVDQYFTSHCLYFLSSPLKPLSSSGYASHKEKEMVAGLFCKLAALVRHRISLFGSDSTTMVSCLHILAQTLDTRTVMKSGSELVKAGLRAFFENAAEDLEKTSENLKLGKFTHSRTQIKGVSQNINYTTVALLPILTSIFEHVTQHQFGMDLLLGDVQISCYHILCSLYSLGTGKNIYVERQRPALGECLASLAAAIPVAFLEPTLNRYNPLSVFNTKTPRERSILGMPDTVEDMCPDIPQLEGLMKEINDLAESGARYTEMPHVIEVILPMLCNYLSYWWERGPENLPPSTGPCCTKVTSEHLSLILGNILKIINNNLGIDEASWMKRIAVYAQPIISKARPDLLRSHFIPTLEKLKKKAVKTVQEEEQLKADGKGDTQEAELLILDEFAVLCRDLYAFYPMLIRYVDNNRSNWLKSPDADSDQLFRMVAEVFILWCKSHNFKREEQNFVIQNEINNLAFLTGDSKSKMSKSGGQDQERKKTKRRGDLYSIQTSLIVAALKKMLPIGLNMCTPGDQELISLAKSRYSHRDTDEEVREHLRNNLHLQEKSDDPAVKWQLNLYKDVLKSEEPFNPEKTVERVQRISAAVFHLEQVEQPLRSKKAVWHKLLSKQRKRAVVACFRMAPLYNLPRHRSINLFLHGYQRFWIETEEYSFEEKLVQDLAKSPKVEEEEEEETEKQPDPLHQIILYFSRNALTERSKLEDDPLYTSYSSMMAKSCQSGEDEEEDEDKEKTFEEKEMEKQKTLYQQARLHERGAAEMVLQMISASKGEMSPMVVETLKLGIAILNGGNAGVQQKMLDYLKEKKDAGFFQSLSGLMQSCRSVLDLNAFERQNKAEGLGMVTEEGTLIVRERGEKVLQNDEFTRDLFRFLQLLCEGHNSDFQNFLRTQMGNTTTVNVIISTVDYLLRLQESISDFYWYYSGKDIIDESGQHNFSKALAVTKQIFNSLTEYIQGPCIGNQQSLAHSRLWDAVVGFLHVFANMQMKLSQDSSQIELLKELLDLLQDMVVMLLSLLEGNVVNGTIGKQMVDTLVESSTNVEMILKFFDMFLKLKDLTSSDTFKEYDPDGKGIISKKEFQKAMEGQKQYTQSEIDFLLSCAEADENDMFNYVDFVDRFHEPAKDIGFNVAVLLTNLSEHMPNDSRLKCLLDPAESVLNYFEPYLGRIEIMGGAKKIERVYFEISESSRTQWEKPQVKESKRQFIFDVVNEGGEQEKMELFVNFCEDTIFEMQLASQISESDSADRPEEEEEDEDSSYVLEIAGEEEEDGSLEPASAFAMACASVKRNVTDFLKRATLKNLRKQYRNVKKMTAKELVKVLFSFFWMLFVGLFQLLFTILGGIFQILWSTVFGGGLVEGAKNIRVTKILGDMPDPTQFGIHDDTMEAERAEVMEPGITTELVHFIKGEKGDTDIMSDLFGLHPKKEGSLKHGPEVGLGDLSEIIGKDEPPTLESTVQKKRKAQAAEMKAANEAEGKVESEKADMEDGEKEDKDKEEEQAEYLWTEVTKKKKRRCGQKVEKPEAFTANFFKGLEIYQTKLLHYLARNFYNLRFLALFVAFAINFILLFYKVTEEPLEEETEDVANLWNSFNDEEEEEAMVFFVLQESTGYMAPTLRALAIIHTIISLVCVVGYYCLKVPLVVFKREKEIARKLEFDGLYITEQPSEDDIKGQWDRLVINTPSFPNNYWDKFVKRKVINKYGDLYGAERIAELLGLDKNALDFSPVEETKAEAASLVSWLSSIDMKYHIWKLGVVFTDNSFLYLAWYTTMSVLGHYNNFFFAAHLLDIAMGFKTLRTILSSVTHNGKQLVLTVGLLAVVVYLYTVVAFNFFRKFYNKSEDDDEPDMKCDDMMTCYLFHMYVGVRAGGGIGDEIEDPAGDPYEMYRIVFDITFFFFVIVILLAIIQGLIIDAFGELRDQQEQVREDMETKCFICGIGNDYFDTTPHGFETHTLQEHNLANYLFFLMYLINKDETEHTGQESYVWKMYQERCWDFFPAGDCFRKQYEDQLG

SEQ ID NO: 87178 - protein, 4865 aa, Artificial Sequence
  derived and/or modified sequence
MAEGGEGGEDEIQFLRTEDEVVLQCIATIHKEQRKFCLAAEGLGNRLCFLEPTSEAKYIPPDLCVCNFVLEQSLSVRALQEMLANTGENGGEGAAQGGGHRTLLYGHAVLLRHSFSGMYLTCLTTSRSQTDKLAFDVGLREHATGEACWWTIHPASKQRSEGEKVRIGDDLILVSVSSERYLHLSVSNGNIQVDASFMQTLWNVHPTCSGSSIEEGYLLGGHVVRLFHGHDECLTIPSTDQNDSQHRRIFYEAGGAGTRARSLWRVEPLRISWSGSNIRWGQAFRLRHLTTGHYLALTEDQGLILQDRAKSDTKSTAFSFRASKELKEKLDSSHKRDIEGMGVPEIKYGDSVCFVQHIASGLWVTYKAQDAKTSRLGPLKRKVILHQEGHMDDGLTLQRCQREESQAARIIRNTTALFSQFVSGNNRTAAPITLPIEEVLQTLQDLIAYFQPPEEEMRHEDKQNKLRSLKNRQNLFKEEGMLALVLNCIDRLNVYNSVAHFAGIAREESGMAWKEILNLLYKLLAALIRGNRNNCAQFSNNLDWLISKLDRLESSSGILEVLHCILTESPEALNLIAEGHIKSIISLLDKHGRNHKVLDILCSLCLCNGVAVRANQNLICDNLLPRRNLLLQTRLINDVTSIRPNIFLGVAEGSAQYKKWYFELIIDQVDPFLTAEPTHLRVGWASSSGYAPYPGGGEGWGGNGVGDDLYSYGFDGLHLWSGRIPRAVASINQHLLRSDDVVSCCLDLGVPSISFRINGQPVQGMFENFNTDGLFFPVMSFSAGVKVRFLMGGRHGEFKFLPPSGYAPCYEALLPKEKMRLEPVKEYKRDADGIRDLLGTTQFLSQASFIPCPVDTSQVILPPHLEKIRDRLAENIHELWGMNKIELGWTFGKIRDDNKRQHPCLVEFSKLPETEKNYNLQMSTETLKTLLALGCHIAHVNPAAEEDLKKVKLPKNYMMSNGYKPAPLDLSDVKLLPPQEILVDKLAENAHNVWAKDRIKQGWTYGIQQDLKNKRNPRLVPYALLDERTKKSNRDSLREAVRTFVGYGYNIEPSDQELADSAVEKVSIDKIRFFRVERSYAVRSGKWYFEFEVVTGGDMRVGWARPGCRPDVELGADDQAFVFEGNRGQRWHQGSGYFGRTWQPGDVVGCMINLDDASMIFTLNGELLITNKGSELAFADYEIENGFVPICCLGLSQIGRMNLGTDASTFKFYTMCGLQEGFEPFAVNMNRDVAMWFSKRLPTFVNVPKDHPHIEVMRIDGTMDSPPCLKVTHKTFGTQNSNADMIYCRLSMPVECHSSFSHSPCLDSEAFQKRKQMQEILSHTTTQCYYAIRIFAGQDPSCVWVGWVTPDYHLYSEKFDLNKNCTVTVTLGDERGRVHESVKRSNCYMVWGGDIVASSQRSNRSNVDLEIGCLVDLAMGMLSFSANGKELGTCYQVEPNTKVFPAVFLQPTSTSLFQFELGKLKNAMPLSAAIFRSEEKNPVPQCPPRLDVQTIQPVLWSRMPNSFLKVETERVSERHGWVVQCLEPLQMMALHIPEENRCVDILELCEQEDLMRFHYHTLRLYSAVCALGNSRVAYALCSHVDLSQLFYAIDNKYLPGLLRSGFYDLLISIHLASAKERKLMMKNEYIIPITSTTRNIRLFPDESKRHGLPGVGLRTCLKPGFRFSTPCFVVTGEDHQKQSPEIPLESLRTKALSMLTEAVQCSGAHIRDPVGGSVEFQFVPVLKLIGTLLVMGVFDDDDVRQILLLIDPSVFGEHSAGTEEGAEKEEVTQVEEKAVEAGEKAGKEAPVKGLLQTRLPESVKLQMCELLSYLCDCELQHRVEAIVAFGDIYVSKLQANQKFRYNELMQALNMSAALTARKTKEFRSPPQEQINMLLNFQLGENCPCPEEIREELYDFHEDLLLHCGVPLEEEEEEEEDTSWTGKLCALVYKIKGPPKPEKEQPTEEEERCPTTLKELISQTMICWAQEDQIQDSELVRMMFNLLRRQYDSIGELLQALRKTYTISHTSVSDTINLLAALGQIRSLLSVRMGKEEELLMINGLGDIMNNKVFYQHPNLMRVLGMHETVMEVMVNVLGTEKSQIAFPKMVASCCRFLCYFCRISRQNQKAMFEHLSYLLENSSVGLASPSMRGSTPLDVAASSVMDNNELALSLEEPDLEKVVTYLAGCGLQSCPMLLAKGYPDVGWNPIEGERYLSFLRFAVFVNSESVEENASVVVKLLIRRPECFGPALRGEGGNGLLAAMQGAIKISENPALDLPSQGYKREVSTGDDEEEEEIVHMGNAIMSFYSALIDLLGRCAPEMHLIQTGKGEAIRIRSILRSLVPTEDLVGIISIPLKLPSLNKDGSVSEPDMAANFCPDHKAPMVLFLDRVYGIKDQTFLLHLLEVGFLPDLRASASLDTVSLSTTEAALALNRYICSAVLPLLTRCAPLFAGTEHCTSLIDSTLQTIYRLSKGRSLTKAQRDTIEECLLAICNHLRPSMLQQLLRRLVFDVPQLNEYCKMPLKLLTNHYEQCWKYYCLPSGWGSYGLAVEEELHLTEKLFWGIFDSLSHKKYDPDLFRMALPCLSAIAGALPPDYLDTRITATLEKQISVDADGNFDPKPINTMNFSLPEKLEYIVTKYAEHSHDKWACDKSQSGWKYGISLDENVKTHPLIRPFKTLTEKEKEIYRWPARESLKTMLAVGWTVERTKEGEALVQQRENEKLRSVSQANQGNSYSPAPLDLSNVVLSRELQGMVEVVAENYHNIWAKKKKLELESKGGGSHPLLVPYDTLTAKEKFKDREKAQDLFKFLQVNGIIVSRGMKDMELDASSMEKRFAYKFLKKILKYVDSAQEFIAHLEAIVSSGKTEKSPRDQEIKFFAKVLLPLVDQYFTSHCLYFLSSPLKPLSSSGYASHKEKEMVAGLFCKLAALVRHRISLFGSDSTTMVSCLHILAQTLDTRTVMKSGSELVKAGLRAFFENAAEDLEKTSENLKLGKFTHSRTQIKGVSQNINYTTVALLPILTSIFEHVTQHQFGMDLLLGDVQISCYHILCSLYSLGTGKNIYVERQRPALGECLASLAAAIPVAFLEPTLNRYNPLSVFNTKTPRERSILGMPDTVEDMCPDIPQLEGLMKEINDLAESGARYTEMPHVIEVILPMLCNYLSYWWERGPENLPPSTGPCCTKVTSEHLSLILGNILKIINNNLGIDEASWMKRIAVYAQPIISKARPDLLRSHFIPTLEKLKKKAVKTVQEEEQLKADGKGDTQEAELLILDEFAVLCRDLYAFYPMLIRYVDNNRSNWLKSPDADSDQLFRMVAEVFILWCKSHNFKREEQNFVIQNEINNLAFLTGDSKSKMSKSGGQDQERKKTKRRGDLYSIQTSLIVAALKKMLPIGLNMCTPGDQELISLAKSRYSHRDTDEEVREHLRNNLHLQEKSDDPAVKWQLNLYKDVLKSEEPFNPEKTVERVQRISAAVFHLEQVEQPLRSKKAVWHKLLSKQRKRAVVACFRMAPLYNLPRHRSINLFLHGYQRFWIETEEYSFEEKLVQDLAKSPKVEEEEEEETEKQPDPLHQIILYFSRNALTERSKLEDDPLYTSYSSMMAKSCQSGEDEEEDEDKEKTFEEKEMEKQKTLYQQARLHERGAAEMVLQMISASKGEMSPMVVETLKLGIAILNGGNAGVQQKMLDYLKEKKDAGFFQSLSGLMQSCSVLDLNAFERQNKAEGLGMVTEEGTLIVRERGEKVLQNDEFTRDLFRFLQLLCEGHNSDFQNFLRTQMGNTTTVNVIISTVDYLLRLQESISDFYWYYSGKDIIDESGQHNFSKALAVTKQIFNSLTEYIQGPCIGNQQSLAHSRLWDAVVGFLHVFANMQMKLSQDSSQIELLKELLDLLQDMVVMLLSLLEGNVVNGTIGKQMVDTLVESSTNVEMILKFFDMFLKLKDLTSSDTFKEYDPDGKGIISKKEFQKAMEGQKQYTQSEIDFLLSCAEADENDMFNYVDFVDRFHEPAKDIGFNVAVLLTNLSEHMPNDSRLKCLLDPAESVLNYFEPYLGRIEIMGGAKKIERVYFEISESSRTQWEKPQVKESKRQFIFDVVNEGGEQEKMELFVNFCEDTIFEMQLASQISESDSADRPEEEEEDEDSSYVLEIAGEEEEDGSLEPASAFAMACASVKRNVTDFLKRATLKNLRKQYRNVKKMTAKELVKVLFSFFWMLFVGLFQLLFTILGGIFQILWSTVFGGGLVEGAKNIRVTKILGDMPDPTQFGIHDDTMEAERAEVMEPGITTELVHFIKGEKGDTDIMSDLFGLHPKKEGSLKHGPEVGLGDLSEIIGKDEPPTLESTVQKKRKAQAAEMKAANEAEGKVESEKADMEDGEKEDKDKEEEQAEYLWTEVTKKKKRRCGQKVEKPEAFTANFFKGLEIYQTKLLHYLARNFYNLRFLALFVAFAINFILLFYKVTEEPLEEETEDVANLWNSFNDEEEEEAMVFFVLQESTGYMAPTLRALAIIHTIISLVCVVGYYCLKVPLVVFKREKEIARKLEFDGLYITEQPSEDDIKGQWDRLVINTPSFPNNYWDKFVKRKVINKYGDLYGAERIAELLGLDKNALDFSPVEETKAEAASLVSWLSSIDMKYHIWKLGVVFTDNSFLYLAWYTTMSVLGHYNNFFFAAHLLDIAMGFKTLRTILSSVTHNGKQLVLTVGLLAVVVYLYTVVAFNFFRKFYNKSEDDDEPDMKCDDMMTCYLFHMYVGVRAGGGIGDEIEDPAGDPYEMYRIVFDITFFFFVIVILLAIIQGLIIDAFGELRDQQEQVREDMETKCFICGIGNDYFDTTPHGFETHTLQEHNLANYLFFLMYLINKDETEHTGQESYVWKMYQERCWDFFPAGDCFRKQYEDQLG

SEQ ID NO: 87179 - DNA, 14601 bp, Artificial Sequence
  derived and/or modified sequence
atggctgagctcggggggggtggggaggaagacgctagatggtatcgcaaggaagacgaagttgttcttcagtgtatcgctaccattcacaaggaacaaaggaagttctgcctggccgccgaaggattaggcaataggttatgctttctcgagcccacttccgaggccaagtacatcccacccgatttgtgcgtgtgcaacttcgtactggaacagtctctctctgtgcgcgccctgcaggaaatgctggcaaatactggggagaatggaggagagggcgctgctcagggaggcggccatagaactctgctttatgggcatgccgtgctcctgaggcactccttctccggaatgtacttaacctgtctcaccacctcacggtcccagacagataaattggcctttgacgtcggattgagggagcacgcaactggcgaagcctgttggtggacaatccaccccgcgagcaaacagagatccgaaggcgagaaagtccggattggagacgacctgatcttagtatcggtgtctagcgagaggtatctgcacctgagtgtctccaatggaaacatccaagttgacgcctcttttatgcagactttgtggaatgtccaccccacatgttctgggagtagcatagaggaaggatatctgctcggaggccacgtggtgcgccttttccatgggcacgatgagtgcttgactatcccaagcaccgatcaaaacgactctcagcatcgtcgtatattttatgaggccggcggagctggaactcgagcgagaagtctctggagggtagagcccctgcggatttcctggagcggttccaatatacggtggggacaggctttccgcctgaggcatctgaccaccggccactaccttgccctcacagaggatcagggtctgatccttcaggatcgtgctaagtcagacaccaaatccaccgccttctcttttcgtgcctccaaagagttaaaggaaaagctcgactcatcccataagcgggacatcgagggcatgggggtcccggagatcaaatacggtgacagtgtctgtttcgttcagcatatcgcctccggtttgtgggtaacctacaaggctcaagacgccaaaacatcgaggctggggcctctgaaacggaaggtgatcttgcaccaggaagggcacatggatgatggactgacactgcagagatgccaacgcgaggaaagccaggcggcacgcattatcaggaacactaccgctttattcagtcaatttgtgagcggaaacaaccgcacagccgcccccataactctgccaatcgaggaggtgttacagactcttcaggacctgatcgcctactttcaacctccggaggaggagatgcgtcatgaggacaaacagaacaagttgagaagccttaagaataggcaaaatttatttaaggaagaggggatgctagccctagtgttgaattgcatcgaccgattgaacgtgtataattcagtcgcccatttcgcaggtatcgcccgggaagaatcgggcatggcttggaaggaaattctgaacctcctgtacaaactgttggccgcccttatacggggaaatcgtaataactgtgcacagttctccaacaacctggactggcttatcagcaagctggacaggctggagagctcctctgggattctcgaggtgcttcattgcattctcactgagagccctgaagcactgaaccttattgccgagggccatatcaaatcaatcatttcgctactcgacaagcacggccgcaaccataaggtgcttgatatactgtgtagcttgtgtctgtgcaatggtgtggcagtcagggccaatcaaaatctcatctgtgataacctcctcccacggcgcaaccttctgctgcagactagactaattaatgatgtgacatccataagacctaacattttcctgggggtcgcagagggctccgcacagtataagaaatggtacttcgagttgattattgaccaggtggacccatttctcacagctgagcccacccatctgcgggtcggctgggcgtccagctccggttatgctccgtatcccggaggcggcgagggctggggcggcaacggagttggcgatgatctttattcttacggattcgacggcttgcacctgtggagcggcaggatcccaagggccgtcgcgtctattaatcaacacttgctgcggtccgatgacgtcgtgagctgttgtctcgatcttggggtgccaagcatcagctttcggatcaacggacagccagtgcagggaatgtttgaaaacttcaacacagacgggctgttctttcctgtgatgagcttctccgccggagtcaaggtgcgctttctgatgggtggaagacacggggaatttaagttcctgccaccatccggctacgcgccttgttacgaagccctgttacctaaagaaaagatgcgcctggagccggttaaggagtacaagcgtgacgctgatgggatcagggacctcctggggaccacccagtttctctcacaggcctcctttatcccctgccccgtagacacaagccaggtcatcctgccgccccacctcgagaaaattcgcgataggctcgcggaaaacatccatgaactttggggcatgaacaaaattgagctgggttggacatttggcaagattcgtgatgataataagagacagcacccatgcctcgttgagtttagtaaattgcctgagacggaaaaaaattacaatctccagatgtctactgaaacattgaaaacactcctcgcactgggatgtcacatcgcccacgtcaatcccgcggccgaagaggatctgaagaaagtaaagctgcctaagaactatatgatgtccaatgggtataagcccgcaccactggacctgtctgatgtgaaactgctgccccctcaggagatcttggtggacaaactggccgagaacgcccataatgtatgggccaaagataggatcaagcagggctggacatacgggatccagcaggatcttaaaaacaagcgcaacccaagactggtgccctatgcactactggatgagagaactaagaagagtaatcgtgacagtctgcgagaagccgtccgcacgttcgttggatatggctataacatcgaaccaagcgatcaggagttagctgactctgctgttgagaaagtttccatcgataaaatcagattctttagggtggagcgttcctacgcagtacgcagcggaaaatggtactttgaatttgaggtggtcactggaggagacatgcgagtgggctgggcccgccctggctgcagacccgatgtcgaactgggtgccgacgaccaggcatttgtatttgagggcaaccgcgggcagaggtggcatcagggatcaggctattttggaaggacgtggcaaccgggcgacgttgtgggatgcatgatcaacctggatgacgcatctatgatattcactttaaatggtgaactcctcattaccaacaagggatccgaactggcgtttgcggattacgagattgagaatggtttcgttcccatctgttgtctcggactctcccagattgggcggatgaacctcggaacagatgcatcaacctttaagttctacacgatgtgcggcttgcaagaaggcttcgaacccttcgccgtgaatatgaatcgagatgttgctatgtggttcagtaaaagactgcccacctttgttaatgtgcctaaggaccaccctcacatagaggtaatgaggatagatggcacaatggacagccctccatgtcttaaggtgacccacaaaactttcgggacacagaactcaaatgcagacatgatctattgccgtctgtctatgcccgtcgaatgccacagcagcttttctcacagtccctgccttgatagcgaagccttccagaagaggaaacagatgcaggagatcctgagccacacaacaacacagtgctattacgcgatcaggatctttgcaggccaggatccctcctgcgtttgggtggggtgggtgactccagattaccacctctatagtgagaagttcgatcttaacaaaaactgcaccgtcacggttacactcggggatgagcgggggcgcgtgcatgagtcagtgaaacgaagtaactgctatatggtatggggaggggatatcgtagctagctcccagagaagcaatagaagcaacgtggacctagaaatcggctgcctggtggatttggcgatgggcatgctctctttttcagcaaacgggaaagagctcggaacatgttaccaggtcgaacctaatacaaaggtgttcccggcagtctttctacagccaacctcgacttctttatttcagttcgaactgggaaaattgaaaaatgccatgccactctccgctgctatatttaggtcagaagaaaagaacccagttccacagtgtcccccaaggctggacgtgcagacaatccagccagtgctttggtcaaggatgcccaactcctttctgaaggtggaaaccgagagggtctctgaacggcacggatgggtggttcagtgcctggagccacttcagatgatggccctgcatatccctgaggagaatcggtgcgtggacatcctcgaattgtgcgagcaggaggacttaatgcggtttcactatcacactctgaggctttattcagccgtgtgcgcgttaggcaacagtagagtggcctacgctttgtgctcacatgtggatttgtcacaactgttttacgccatcgataataaatacctgccaggactgcttcgctctggattttacgaccttcttatctcaattcatctcgcatcagccaaggagagaaaattaatgatgaagaacgaatatattattcctatcacatctaccactagaaacatacggctgttccccgacgagagcaaacgacatgggttacctggagtcggtctgagaacatgtctaaaacctggcttcagattctctacgccttgtttcgtggtgacaggggaagaccatcagaaacagtcccctgagatacctctcgagtccttacgcactaaggcgcttagcatgctgactgaagccgttcagtgttcgggcgcgcacattagggatcctgtgggaggaagtgtggagtttcaattcgtccctgtcttgaaactgatcgggacactgttggtgatgggcgtgttcgacgacgatgatgtgaggcagatcctactcctcatagaccccagtgtattcggggagcacagtgctgggaccgaggagggggcagagaaggaggaagtgacgcaagtcgaggaaaaggctgtggaagcaggagagaaggcagggaaggaagctcctgtgaaaggtctcttgcagactcgcttgcctgagtctgttaagcttcaaatgtgtgagctactgtcctatctgtgcgattgtgaattgcagcatcgggttgaagcaattgtcgccttcggtgacatctacgttagcaaactgcaggctaatcagaaattccggtataacgagctgatgcaggccctgaatatgtcagccgccctgacagcaaggaagacgaaggagtttagaagccctcctcaagaacaaattaatatgctgttgaactttcagctgggggagaactgtccttgccccgaagaaatccgagaggaattatatgatttccacgaggacctgcttttacattgcggcgtgccgctcgaggaggaggaggaggaggaagaagatactagttggacaggaaagctgtgcgcactcgtgtacaaaatcaagggaccacccaaaccagagaaagaacagccgaccgaggaggaggaacgttgtccaactacacttaaagaattgatttctcagacaatgatctgctgggctcaggaagaccaaatacaggatagcgagcttgtacggatgatgtttaatctgctgagaaggcaatatgattcaattggggagctgttgcaggctctgaggaagacctatacaatcagccacacctccgtgtccgatacaattaatctattagcggctcttggtcaaattagaagcttgctctccgtcagaatgggtaaggaggaagaacttctaatgatcaacggactgggtgacatcatgaataacaaagtcttttaccaacaccccaacctaatgagagttttagggatgcatgagaccgttatggaagtgatggtgaatgtcctaggaacggagaagtctcaaatcgcatttcccaagatggttgccagctgttgccgatttctgtgctacttctgtcggatttctcgacagaaccagaaggccatgtttgagcatctatcttatcttctcgaaaactctagcgttggactggctagtccttcaatgaggggaagcacccccctcgacgtggcagcaagctcagttatggacaacaatgagctggcacttagcctggaagagcctgacctggagaaggtagtcacttacctcgccggatgcggccttcagtcctgtcctatgttgttggcgaagggatacccggatgtcggatggaatcctatcgagggcgagcgatacttaagcttccttcggtttgcagtcttcgtcaactcggaaagcgtcgaagagaatgcgagcgttgtagtgaagctgctgattcgccggccggagtgcttcgggcccgctctccgcggggaggggggtaacggcctcctggccgccatgcagggtgcaattaagatcagtgagaatccagccctagaccttcccagtcagggctacaagcgggaagtgagcacaggagatgatgaggaggaagaggagattgtgcacatgggtaatgccatcatgtctttttattctgccttgatcgacctgttgggcagatgcgcgcccgaaatgcatcttatccagaccgggaaaggagaagcgatcaggataagaagcatacttaggagtttggtacctacagaagacttggtcggcatcatttccataccactgaagctcccctcgctgaacaaggatgggagcgtatccgagccagatatggccgccaacttttgccctgaccataaagccccaatggtgctctttctcgatcgagtgtatggaatcaaagaccagacattcctgcttcacctgcttgaagtaggctttctgcccgacctgcgagcctcagcctccctggatacggttagtctgtccaccacagaggccgccttagccctgaatagatacatatgtagcgcggtgttgccattgctgacacgatgtgcaccgttgtttgctggcactgaacactgcacttctctgattgacagtactctgcagaccatctaccgcctgagcaaagggcgatcacttactaaagctcagagggacactatcgaagagtgcctgctggcaatttgcaaccacctgaggccttcaatgctgcagcagctcctgagaagactggtgtttgatgtgcctcagctgaatgaatactgcaagatgcctcttaagctgctcacaaatcactacgaacagtgctggaagtattattgtctgccaagcgggtggggaagttacggtctcgccgtggaagaagagctccacctcaccgagaagcttttctggggcatctttgactcgttgtcacacaaaaagtatgatcctgatttgttccggatggctctgccctgcctgagcgccattgcaggggctcttcctccagattacctggatacgaggattaccgcaactctggaaaagcagatcagcgtggacgcagatggcaacttcgatccaaaacctataaatacaatgaacttcagtttgccagagaagctcgagtacatcgtgaccaagtatgctgagcatagtcacgacaaatgggcatgcgacaagtcacagtctggatggaaatatggcattagccttgacgagaacgtcaagacgcatcctctgataagaccttttaagacactgactgagaaggagaaggagatttacagatggccagcccgggaaagtctcaagacaatgttagctgtgggatggacagtcgagcgcaccaaagaaggagaggctctagtgcagcagcgcgagaatgagaagttacggagtgtcagccaagctaaccaggggaattcctatagccctgccccccttgacctcagcaatgtggttctctccagagagctccaggggatggtggaagtcgtcgccgagaattaccacaacatttgggcaaagaagaagaaacttgagcttgaatctaagggagggggctcccatcctctgctcgtcccatatgacacattgacagctaaggaaaagtttaaggacagagagaaggcacaggacctattcaagtttcttcaggtgaatgggattatcgtcagccggggcatgaaggacatggagctcgacgcgtccagcatggagaaacggttcgcctataagtttctgaagaagattttgaagtacgtggacagcgctcaagagttcattgcacatctggaggctattgttagttctgggaaaacggagaaatctccacgtgaccaggagataaagtttttcgctaaggtgcttcttccactcgtcgatcagtattttacttcccattgtctgtacttcttgtctagcccactgaaacctctttcttccagcggctacgcgagtcataaagaaaaagagatggtggccggactcttctgtaagttggcagctctcgttagacaccggatcagcctattcggttccgatagcactaccatggtcagctgtctgcatatcctcgcccaaaccctggacacacgcacagtaatgaaaagcggctcggaactggtgaaagccggtctgagggccttttttgagaatgctgccgaggatttggagaaaacgtccgaaaatctcaagctggggaagttcacacactcacgcactcagattaagggggtcagccagaatataaattatactactgtcgcccttctgccgattctaacgagtatcttcgagcacgtcacacaacatcagttcgggatggatctgctgttaggagatgtacaaatcagttgctaccacatattgtgttccctgtactccctgggcaccgggaaaaacatctacgtggaacggcagagacccgccctcggtgagtgtctagcttctctcgccgctgccattccagtggcgttcctggaacccaccttgaaccgctataatccactgtctgtcttcaatacaaaaacaccccgagagaggtctatcttggggatgcctgacaccgtcgaagatatgtgccctgatatcccacagttggaaggcctgatgaaggaaatcaatgacctggcagaaagcggggctagatacacggagatgccacatgttattgaagtgatacttccaatgctgtgtaactacctttcatactggtgggagcgggggccagagaatctgccaccctcaaccgggccctgttgtaccaaggtgacctctgagcacctgagcctaatcctaggaaacattctgaagattatcaacaataacctggggatcgacgaagctagctggatgaagcggatagcagtgtatgctcaaccgattatctccaaggctcggcctgacctgttacgaagtcacttcataccaactctcgaaaaactcaaaaagaaagcggtgaagactgtccaggaagaagagcaattaaaagccgacggcaagggcgacacccaggaggctgagttgctgatcctggacgagtttgcagtcttatgccgggatctctatgccttctatcctatgctgatccggtacgtcgataataacaggagtaattggctcaagtctcctgacgcggacagtgatcaactctttcgaatggtcgccgaggtctttatactgtggtgtaagtcacataattttaagagagaagaacaaaactttgtaatccagaacgagattaataacttagcatttctgacaggcgactccaagtccaagatgagcaaaagcggtggccaggatcaggagcgcaagaaaacgaagaggaggggagatttgtatagtatacaaacttctctcatcgtcgcagcactcaaaaagatgctgccaatagggcttaacatgtgcacacctggggaccaagagctaatctctctagccaagagccggtactcccaccgtgacaccgatgaagaggttagagaacacctgagaaataaccttcacttgcaggagaaaagcgacgacccggcagtgaaatggcagttaaatctgtacaaagacgtgctgaagtctgaagagcccttcaaccctgaaaagaccgtcgagcgggtgcagcgaattagcgctgctgtctttcaccttgagcaggtggagcagcctctaaggtccaagaaggcagtttggcacaagcttttgtcaaaacagcgaaagagggcagttgtagcttgttttcgcatggcccctctgtataacctgccacgccatcgctcaattaacctcttcttgcatgggtatcagcgcttctggatcgagacagaagagtactcgtttgaggaaaagcttgtccaggatcttgcaaaatcccccaaggttgaggaagaagaggaagaagaaacagaaaagcagcccgaccctctccaccagattatcctgtatttcagccgcaatgcactcactgaaaggtcaaaactggaagacgacccactctatacaagctattcctctatgatggctaagtcatgccaaagtggcgaggatgaagaggaagatgaggacaaggagaaaacctttgaggaaaaggagatggaaaagcaaaaaaccctgtaccagcaggcacggctgcatgagaggggtgccgccgagatggtactccagatgatttccgcctccaaaggcgaaatgagtcctatggttgtcgagaccctaaagctgggcatagccatactcaatggaggcaacgctggcgtgcagcagaaaatgctcgactatctcaaggagaagaaggacgcaggattcttccagagcttgtctggactgatgcagtcctgtcggagtgtgcttgacctaaatgctttcgaacggcagaacaaggccgaggggctggggatggttacagaagaaggaaccctgatcgtgcgggaacgcggagagaaggtgctacagaatgatgagttcactcgggacctttttagattccttcagctgctgtgcgagggccataactccgatttccagaacttcctgcgcacccagatggggaatactacgacagtgaacgtgattatcagcactgtcgactatctcctgcgattgcaagagtctatatcggatttctactggtactatagtgggaaagacattattgacgaatctggccaacacaattttagtaaggcactggcagtgaccaagcagatcttcaatagcctgacggagtatatccagggcccatgcattggcaaccagcagtcactggctcatagccgcctctgggacgcggtcgtcggtttcctccatgttttcgctaatatgcaaatgaaactgagtcaagactccagtcagatcgagctgctgaaagaactgttagatctactccaggacatggtggtaatgttactaagccttctggagggtaacgtggtgaatggaacaattggcaagcagatggtagacaccctggtggagtccagcaccaacgtggaaatgatcctcaaattctttgacatgttccttaagttaaaggaccttacgtcatccgatacctttaaggagtacgatcctgatggtaagggaatcatatccaagaaagagttccagaaagccatggagggccagaagcagtacacccagagcgagattgactttttgcttagttgtgctgaagctgacgaaaacgatatgtttaactacgttgactttgttgacaggttccacgaaccagcgaaagatatcgggtttaatgtcgcagtgttgctcaccaacctttcagaacacatgccgaatgacagtcgcctgaaatgccttcttgatcctgccgagtccgtccttaattactttgagccttacctcggccgaatagagatcatgggaggagccaagaaaatcgaacgggtgtactttgagatttctgaaagctcacgaacccagtgggaaaagccgcaggtcaaggagtcaaaacgccagttcatttttgatgtggtgaacgaaggtggtgagcaggaaaagatggaactatttgtcaacttttgtgaggacactatcttcgaaatgcaactagcttcccaaatttctgagtccgattcagcggatagaccagaggaagaggaagaagacgaagatagttcgtacgtcctggaaattgccggagaagaggaagaagatggatcgttggagccggcatcagctttcgccatggcctgcgctagtgtgaaaaggaacgtgaccgattttctgaaacgcgctactcttaagaatctccggaaacagtatcgtaatgttaaaaagatgaccgctaaagagctggtgaaggttctgttctcgttcttctggatgctgttcgtcggtttattccagttgctatttactattttgggcggtatcttccagatcttatggtctacagtgttcggtgggggtttggtggagggcgcaaaaaacattagagtcacaaaaatattaggtgacatgcccgaccccacgcagtttggcatccatgacgataccatggaggccgagcgtgcagaggtgatggaacccggtataaccacagaactggtccatttcattaaaggagagaagggcgacacggatattatgtcagaccttttcggtctgcaccccaaaaaagaaggcagtcttaagcacggacctgaggtgggcctaggcgatctctcagagatcatcggcaaggacgaacccccaacgcttgaaagcacagtacagaaaaagcgaaaggcccaggctgccgaaatgaaggcggccaacgaagcggagggaaaggtcgagtcagagaaagcagacatggaagatggcgagaaagaggataaagataaggaagaggagcaggcagagtacctgtggactgaagtgactaagaaaaaaaagcgaaggtgcggacaaaaagtcgagaaacctgaggccttcaccgccaactttttcaaaggtctcgagatctatcaaacaaaactacttcattatcttgcaaggaatttttataatctgcgatttttggcgctattcgtggctttcgcaattaattttatattactgttttataaagtgactgaggaacccctcgaagaagaaaccgaggatgttgccaatctgtggaattcctttaatgacgaggaggaggaggaagccatggtttttttcgtgttgcaagagtctacaggctacatggcccctactctccgggccctcgccattatccacacgataatctctctcgtttgtgtcgtggggtattattgtctgaaggtccctctcgtggtcttcaagagagaaaaagaaatcgcacgcaagctggagtttgacgggctgtatattacagagcagccatccgaagacgacatcaagggccagtgggatagactggtgataaacaccccttcatttcctaacaactactgggacaagtttgtgaagcgcaaagtgatcaacaaatacggcgacctctacggcgccgaacggattgcagaactgttaggcttggataaaaatgcgcttgatttctcccctgtggaggaaactaaggccgaagcggcgtcattagtatcatggctgtcttcgattgacatgaaatatcatatctggaagctcggcgttgtgttcacagacaactcttttttgtacctggcctggtacaccacaatgtctgttctggggcattataataatttcttcttcgccgcccatctgctggatatagccatgggattcaagacattgcgcacaatcctgagctctgtgactcataatgggaaacagctggtcctgaccgtcgggctcctggcagtggtcgtgtatctgtacaccgttgtcgcattcaacttcttccgcaagttttataataagtcagaagatgatgatgagcccgatatgaaatgcgatgacatgatgacctgctatcttttccatatgtacgtcggcgttagagcgggtggcggcataggagatgaaattgaggacccagcgggcgacccttatgaaatgtacagaatcgtgttcgatatcacattcttcttttttgtgatcgtcatcctcctcgccatcatccagggacttatcatcgatgccttcggcgagctaagggatcagcaggagcaggtgagggaagatatggaaaccaaatgcttcatctgtggaataggtaatgattactttgatacgaccccccacggcttcgaaacgcatacgctgcaggagcacaacctcgctaactacctgtttttcttaatgtatctgatcaacaaagatgaaacagaacacaccgggcaagaaagctacgtgtggaaaatgtaccaagaaagatgctgggatttttttcccgctggagattgctttcgaaaacagtacgaagatcaactcggatag

SEQ ID NO: 87180 - DNA, 14598 bp, Artificial Sequence
  derived and/or modified sequence
atggccgaaggaggggaggggggtgaagacgaaatacagtttctgaggaccgaggacgaagtcgtactgcaatgtattgccacgatccataaagagcaaaggaaattctgtttggccgccgagggccttggcaaccgactatgcttcctcgaaccaaccagcgaagcaaaatatatcccaccagacctgtgcgtatgcaactttgtgctggaacagagcctttccgtaagagctctccaggaaatgctcgcaaacaccggtgagaacggtggcgagggtgcagcccaggggggaggacaccggacactgctgtacgggcacgccgtcctcctgaggcattcttttagtggaatgtatctgacctgcttgactacatcacgatctcagactgacaagctggcatttgacgtcggactcagggagcacgccactggcgaagcttgctggtggaccatacatcccgcctcaaaacaacgatccgaaggtgagaaagttaggatcggggacgatcttatcttggtatccgtctcttccgaaaggtatctccatctgtctgttagcaacggcaacattcaagttgatgcttctttcatgcagacgctgtggaacgtgcatcccacctgcagcggcagtagcatcgaggaaggatacctgctgggtggccacgtagtcaggctgttccacggccatgacgagtgtctgaccattcctagtactgaccaaaatgacagtcagcatcgccgcatcttctatgaggcaggtggggcaggcactcgtgcccgctccctatggagagttgaaccattgcggatctcttggtctggctctaatatccggtgggggcaggcctttcgcttacgccatctgaccactggacattacctggcactcacagaagaccagggcctaatcctgcaggacagggccaaatctgatacaaagagtaccgcttttagttttcgggcctcgaaagagctgaaggagaaactcgactcgagccacaagagagatatcgaggggatgggagtgccggaaataaaatatggcgattcagtgtgcttcgtccaacacattgcgagtggactgtgggtgacttataaggctcaggacgctaagacttcacgcttaggaccactcaaacggaaggtcatcctgcaccaagaaggtcatatggatgacggtctcactctgcaacggtgccagcgtgaggaaagtcaggcggctagaataatccggaacacaactgctcttttcagtcagttcgtttccgggaataacaggaccgcggccccaatcacactaccaatagaggaagtgcttcagactctccaggatctgatcgcctattttcagccaccggaggaggaaatgaggcatgaggataagcagaacaagctgagatctctgaaaaatcgccagaatctcttcaaggaggaaggcatgcttgcgttggttcttaactgcattgaccgtctgaacgtgtataacagcgtcgcgcattttgctggcatcgccagagaggaatctggtatggcctggaaggagattctgaatctgctgtataagcttttagccgccctgattcgtgggaatcggaataactgtgctcagttctcgaacaatctcgactggcttattagcaagcttgatagattggaaagctctagtggaatcctcgaggtcttacactgcattctcacagaaagcccagaggctctcaatctcatcgctgagggccatatcaagagtatcatttccctgctcgacaaacacggtcgcaaccacaaggttctggatattttgtgcagcctgtgtctttgtaatggggttgccgtgcgtgcaaatcagaacttgatatgcgacaacctgctgcccaggcggaatcttctgttgcagacccgtttgatcaacgatgtcacaagtatcaggccaaacattttcctaggcgtggccgaggggtccgctcagtacaagaagtggtacttcgagttgattattgaccaggtagacccgttcctgaccgcggagccaacacacttacgggtggggtgggccagcagttctggatacgccccatatccaggaggaggggaggggtggggtggaaacggagtgggggacgatctgtactcttacgggtttgatggactgcacctatggtcaggacgaatcccaagagccgtggccagtatcaaccagcacctgctccggagtgatgacgtcgtgagctgttgtctagacctgggcgtgcctagtatcagcttccgaatcaatgggcagcctgttcagggcatgttcgaaaatttcaacacagacggcttgttttttcctgtgatgtcgtttagtgccggggtcaaggtcagattcctgatgggaggccgccacggggagttcaagttcctccctccatccggatatgccccctgttatgaggccctgcttccaaaagaaaaaatgcgcctcgagcccgtgaaagagtacaaaagggacgcagatggcattcgagatctactggggacgacacagtttttgagtcaggccagctttatcccttgccccgttgataccagtcaggtgattttaccaccacacttagagaaaattcgagaccggcttgccgaaaatattcacgagctctggggaatgaacaaaatcgagcttgggtggacctttggtaaaattcgggatgataataaaagacagcatccatgtctggtcgaattttctaagctgcccgaaaccgaaaagaactacaatttgcagatgagcactgaaacactgaagactctcctggctctgggatgccacattgcccacgttaatccggcagccgaagaggacctcaagaaagttaaactaccaaaaaattatatgatgtctaatggttacaagccagctcctctcgaccttagcgacgtcaagttgctcccaccacaagagattctagtggacaagctcgctgaaaatgcccataacgtatgggccaaggaccgaatcaagcaaggctggacctatggaatacagcaggatctcaagaacaaaagaaatccaagactcgttccatacgctctccttgacgagcggactaaaaaatccaatagggactccctgagggaagccgttcgcacttttgtcggatacgggtacaacatcgagccctcagatcaggagctggcagatagcgcagttgaaaaagtttctatcgataaaatccgatttttccgagtggaacgatcatacgctgtccggagcggaaagtggtactttgagttcgaggtagtaacgggcggggatatgagagttggatgggcccgccctggatgtaggccagacgtggagctcggtgcggacgaccaagcgttcgtttttgagggaaataggggccagcgatggcatcagggcagtgggtacttcggacgcacatggcagccaggtgacgtcgtcggatgtatgattaatttagacgatgcctcaatgatcttcactttgaatggggaactcctgatcactaacaaggggtccgagctggcatttgccgattacgagattgagaatggttttgtccctatctgttgcttaggactctctcagatcggtcgaatgaatctgggtacggatgccagcacctttaaattctacactatgtgtgggctgcaggaaggcttcgagccattcgccgttaatatgaatcgagacgtggcaatgtggttctccaagaggttgccgacgtttgtgaatgtgcccaaggaccaccctcatattgaggttatgcggattgacgggaccatggactcacccccctgtctgaaagtcacccacaagacatttggcactcagaattcaaacgctgatatgatctactgtaggttgagcatgcccgtagaatgtcacagcagtttcagccattccccctgtctcgattccgaagccttccaaaagcggaaacagatgcaggagatactgtcccacacaacaacacagtgctactatgcaatcaggatttttgccgggcaggacccaagctgcgtgtgggtcgggtgggtgacgccagactaccatctttacagcgaaaagttcgatctgaacaaaaactgcaccgtgactgtgaccctgggcgatgagaggggacgcgtacacgagagcgtcaagaggtccaactgttacatggtatggggcggagatatagtagcttcttcacaacgctctaatcgctctaatgtggacctggagataggatgcctagtggatctcgccatgggaatgttgtcattctccgctaatggcaaagaactgggtacgtgctaccaggtcgaaccgaacactaaggtatttcctgcggtgttcctgcagcccacaagcacctctctgtttcagttcgaactgggaaagctgaagaatgcgatgccactaagcgccgcaatctttagatctgaggaaaagaatccagtaccccagtgtccgcctcgcttggatgtgcaaaccattcagcccgtactttggtcacgcatgcctaactcattcctcaaggtggaaacggagagagtctccgagaggcacgggtgggtagtccagtgccttgaacctctgcagatgatggcccttcacattcccgaagagaaccggtgtgttgatatccttgaactatgtgagcaagaggacctcatgaggtttcactatcacactctgcgtctgtacagtgccgtatgtgcactggggaatagcagggttgcatacgctctgtgctcccacgtagacttgtcccagctgttctatgcgattgataataagtaccttcctggactgctaaggagtggcttttatgatttgctgattagtattcacctggcgtctgctaaggagcgcaaactgatgatgaagaatgagtatattataccaatcacgtcaacaactagaaacatcaggctcttccctgacgagtctaagcgtcacggcctgccaggcgtgggtctgcggacatgcctaaaacctgggtttaggttttcaaccccttgtttcgtggtcaccggagaagatcaccagaagcaaagtcctgaaatacccttagagtcccttcgcaccaaagccttgagcatgcttacggaagcggtccaatgctcaggggcacacatccgcgatcccgttggtggaagcgttgagttccagtttgtgcctgtcctgaaactgattggaaccctgcttgtaatgggagtgttcgatgacgacgacgtcaggcagattctccttctcatcgatcccagcgtgtttggtgagcatagtgccgggactgaggaaggtgccgagaaggaggaagtaacacaggtcgaagagaaagctgtggaggcaggagaaaaggccgggaaagaagcgcctgttaaaggcttgctccagacgcgattgcccgaatcagtgaagctccagatgtgtgaactgcttagctacctctgtgactgtgagttgcagcatagggtagaagccatcgtagcgtttggcgatatatacgtgagcaaattacaggccaatcagaagttccggtacaacgagttgatgcaggcactgaatatgtccgctgccctgacagccagaaaaaccaaagaattccggagtccaccgcaagagcagattaacatgctactgaactttcaactcggagagaactgtccatgtcccgaagaaattagggaggaactttatgactttcacgaggatctccttcttcattgcggagtgccattagaggaagaggaggaggaagaggaagacactagttggacggggaagctgtgtgccctggtctacaagatcaagggccctcctaaaccagaaaaggagcagccgacagaggaggaggaaaggtgccctaccaccctaaaagagctcatatcccaaacgatgatctgttgggcccaggaagaccaaattcaagactctgagttagtcagaatgatgtttaatcttttgcggcggcagtatgacagcatcggcgaactcttgcaggcactccggaagacatatactattagtcacaccagcgtgtcagacacaattaatctgctggctgccttaggtcagatcagatccctcctatcagtgcgcatgggcaaggaagaggaactgctgatgattaatggtctgggcgatatcatgaataacaaggtgttctaccagcacccaaatctcatgagggtccttggcatgcatgagactgtgatggaggtcatggtcaatgtgctgggcactgaaaagagtcagattgctttcccaaaaatggtagcgtcgtgctgccgcttcctttgttatttctgcaggatctccaggcagaatcagaaagcaatgtttgagcatttgtcttacctactggaaaattcttctgtcggtctggcctctcctagtatgcgaggctcaaccccactagacgttgcggcgagtagtgtgatggacaataacgagctggccctctcactcgaggagcccgatcttgagaaagtggtcacttacctggcgggctgtggactgcagagctgtcccatgttgctcgctaaaggctatccagacgtgggatggaatcccatagagggggagagatacctctcatttcttaggtttgcagtctttgtgaattccgagagtgtcgaagaaaatgcttcggttgttgttaagcttcttattagaaggccagagtgtttcggtcctgctttaagaggtgagggaggtaatggactgttagctgcaatgcagggcgcaatcaagatttctgagaatcccgccctcgatctgcccagccagggatacaagagagaagtttccacaggggatgacgaggaggaggaggagattgtgcatatggggaacgcaattatgagcttctactccgccctcatcgatttactaggtcgctgcgcccccgaaatgcacctcatccagacagggaagggtgaggcgatcagaatacggtccatactgagaagtctagtacctactgaggatctggtgggcatcatttcaatcccccttaagctgccgagcctgaataaagacgggtccgtaagcgagccggatatggctgccaacttttgtcccgaccataaggccccaatggtgctgtttctcgatcgggtttatgggattaaggatcaaacatttctgctgcacctcctggaggtgggcttcctgccggatctgagagcttctgcctctctcgacaccgtgagcctcagcaccaccgaggctgcacttgccttaaaccgatacatatgctctgcagtgctccctttactgacgcgttgtgcccccctgtttgcagggactgagcactgtacaagcttgattgattcaacgctccaaaccatttaccgcctaagcaaaggccgctcacttacaaaagctcagcgggatacgattgaggagtgtttgttggcaatctgcaatcatctgcggccgagcatgttgcagcaacttctgagacggttggtgttcgacgtgccgcagctcaacgaatactgcaagatgcctcttaaactgttaaccaaccactacgagcaatgttggaaatactattgtctcccctccgggtggggctcatacggacttgccgtagaggaagagttgcatctgaccgagaagctcttctgggggattttcgacagtttatctcacaagaagtacgatccagatctgtttagaatggctctaccttgcctgtcagccattgctggggcccttcctcctgactatctggacaccaggatcacagcaaccctggagaaacagatctccgtggatgccgatggaaacttcgatcccaagccaatcaacaccatgaatttctctttgcccgagaaacttgaatatatagtcaccaagtatgcggaacattcccacgacaaatgggcttgtgacaagtcacagagcgggtggaagtacggcattagtctggatgaaaatgtgaagacccaccctctcatcaggcccttcaaaacactgacagagaaggaaaaagagatctaccggtggcccgctagggagtccctgaagactatgttagccgtgggctggaccgttgagcgcacgaaggaaggtgaagcgttggtccagcagcgcgaaaatgagaaactccgttctgtctcacaggccaaccagggaaattcatactcgcccgcccctttagatctgtctaatgttgtactctcacgcgaactgcagggcatggtggaggtggtagctgagaattatcacaatatatgggcaaagaaaaaaaaactggaactcgagtccaaaggggggggctctcatccgctgctcgtgccatacgataccttgacagccaaggaaaagttcaaggaccgcgaaaaagcacaagatctcttcaaatttctccaagtcaatgggatcatcgtgagccgcgggatgaaagacatggaattggacgcttcaagcatggagaagcgtttcgcctacaagttccttaagaagatcctgaagtatgtcgactcagcgcaggaatttattgctcaccttgaagcaatagtttctagtggaaagactgagaaatctcccagggaccaggaaattaagtttttcgcgaaagtgctgttgcctcttgtggaccagtacttcacctcccactgcttatacttcctgtcatcgcctctcaaaccgttgagtagcagtgggtacgcatcacacaaggaaaaggagatggtggcgggactgttttgtaaactggcagccctggtccgccaccggattagcctgtttggcagcgattccactaccatggtgtcttgcttgcacatcctggcgcagaccctcgatacacggactgtgatgaaatcgggctctgaactggtgaaagccggcctcagagccttctttgaaaatgcagcggaagacctggaaaagacttccgaaaacctcaaactgggcaagttcacccatagccgcacccagataaagggagtttcccagaacataaactacaccaccgtcgctctcctgccgattctcacatctattttcgagcatgtgactcagcatcaatttggcatggatcttctgttaggtgacgttcagatcagttgctatcatattctctgtagcctgtattcactaggcactggaaaaaatatctacgtggaacgtcagaggcccgccctgggcgagtgcctcgctagcttggctgccgcgattccagttgcgttcctggagccaacattgaatcggtataatcccttaagcgtgtttaacaccaagactccaagagaacgctcaatccttggcatgccagacactgtggaggatatgtgccctgacataccgcagttggagggactgatgaaggaaattaacgatctcgccgaaagcggagcgagatacacggagatgcctcacgtaatcgaggtgatcctgcccatgctttgcaactatttgtcctattggtgggaacgaggtccagagaatctgcctccctctaccggtccatgctgtactaaagttacgagcgaacatctgagtctaatcctgggaaatatccttaaaattatcaacaataatctcggcatcgatgaggcctcttggatgaagcgcattgcggtgtatgcccagcccattatatcgaaagccaggccagatctgcttagatcccacttcataccaacactagagaagctgaagaaaaaggcagtgaagacagttcaggaagaggagcagcttaaggcggacggcaagggggatacacaggaggccgagctgctgatccttgatgagtttgctgttctttgtcgggatttatatgccttttaccccatgcttatccgctatgttgacaataaccgtagcaactggctgaagtcaccagacgcggattctgatcagctctttagaatggtcgccgaggtattcattttatggtgcaagtctcacaattttaagagggaggagcagaacttcgttatacaaaatgagatcaacaacttggccttccttactggtgactctaaatccaagatgtcaaaatcagggggccaggaccaggaacgcaagaagaccaagcgccgcggcgacctctattccatacagacaagcctgattgtggccgctctcaagaagatgttacccatcggccttaacatgtgcacccctggagatcaagagcttatttctctcgcaaagtcccgatattcccaccgagatactgatgaggaggtgagagaacacttacgcaataatctgcacttgcaggagaaatccgatgatcctgccgtcaaatggcagctcaatctctataaggatgtgctaaaatcagaagaacctttcaacccagagaagacagtggagcgggtgcagagaatcagcgcggcggtgtttcacctggaacaggtggagcaacctttaaggtcaaagaaggccgtgtggcataagcttttgtccaagcagcgaaaaagggccgtcgttgcttgttttcgaatggcacctctgtacaatctgccgcgtcacagatcaattaacttattcctgcacggttatcaacgcttttggatagaaactgaagaatattcttttgaagaaaagcttgttcaggatttagcaaagagtccaaaagtggaggaggaagaggaagaggaaaccgaaaaacagccagatcccctgcaccagataattctctatttctcgcgcaatgctttgaccgagcgctcgaaattggaggacgacccactgtacaccagctattcctcaatgatggccaagagctgccaaagcggcgaggacgaggaagaagacgaggataaagaaaagacttttgaggagaaggaaatggaaaagcaaaagactctgtaccaacaggcccgtctccatgagagaggtgccgctgagatggtgctccagatgatttctgcttccaaaggtgagatgtcccccatggtggtggaaaccctgaagctgggtatcgcgattctgaacggggggaatgcaggcgtgcaacaaaagatgctggactacctcaaagagaaaaaggacgccgggttcttccagtccttgtcaggcctaatgcagtcttgctcagttttggacctaaacgcatttgagagacagaacaaggccgagggcctagggatggtcaccgaagaagggacactcatcgtaagagagcgtggggaaaaagtgctacagaatgatgagttcacaagggatctgttcagattcctgcagttattgtgcgagggccacaatagtgacttccagaacttccttcggactcagatgggaaatacgactactgtgaatgttattatcagtacagtggattacctacttcggctgcaggagtccatctccgatttctattggtactacagcggcaaagacataatagatgagagtgggcagcataattttagcaaagccttagccgtaactaaacaaatctttaatagcttgaccgagtacatacaggggccatgtatcggtaaccagcagtcgctggcacacagcagactctgggacgcggtcgtgggatttctgcatgtcttcgccaatatgcaaatgaagctctcccaggattcatctcaaatcgaactgctcaaagagcttctagatctacttcaggatatggtggtaatgcttttgagccttctagaggggaatgtggtcaatggtacaatcggaaaacaaatggtcgacactctcgtcgaaagcagcaccaacgtggagatgattctaaagtttttcgacatgtttctgaagctgaaagatcttacgtccagcgacaccttcaaagaatatgaccccgatggcaaaggcatcatttcaaaaaaggagttccaaaaggccatggagggccagaaacaatatacacagtcggaaattgatttcctcctctcatgtgcagaagctgatgagaatgatatgttcaattacgtcgacttcgttgatcgatttcatgaaccagcgaaggatattgggttcaacgtggctgttctcctgactaaccttagtgagcacatgccaaatgattcaaggctcaaatgcctgctggacccggctgagtcggtgttgaactactttgagccatatcttggtcggattgaaatcatgggcggtgctaagaagatcgagcgagtttatttcgaaatctccgagtcgtcccgcacacaatgggagaaacctcaggttaaagaaagtaagcggcagttcatcttcgatgtggtaaacgaaggtggggagcaagaaaagatggaactgttcgttaacttttgcgaggacaccatcttcgaaatgcagctggcgtcacaaatctccgagtccgacagtgccgaccgtcccgaggaggaagaagaggacgaggactccagctatgtgctggagattgccggcgaggaggaggaggatgggagcctggaaccagcgtctgcattcgctatggcgtgcgcttctgtaaagcgcaatgtgactgatttcctaaaacgtgcaacgctcaaaaacctgcgaaagcaatatcgcaacgtcaagaaaatgacagccaaagagttggtcaaagtactgttctcttttttctggatgctatttgtgggcctattccagctactcttcacgatccttggtggcatctttcaaatcctgtggtccaccgtgtttggcgggggattagtggagggcgcgaagaatatccgggtcaccaagatcctgggagatatgcccgaccctactcaattcgggatccatgacgatacgatggaagccgagcgcgccgaagtaatggaacccggcatcactaccgagctagtgcatttcattaagggggaaaagggggacacagatatcatgtcagatctcttcggccttcaccccaaaaaagagggaagtcttaagcatgggccagaagtgggcctcggcgatctctccgaaattattgggaaagatgaacctcccaccctcgagtctacggtacaaaaaaagcgaaaagctcaggcggcagaaatgaaagcagccaacgaggcagaggggaaagtggagagtgagaaagctgatatggaggacggcgagaaagaagacaaagacaaggaagaggagcaggccgagtacctttggactgaggtcaccaagaaaaagaaaaggaggtgcggacagaaagtggaaaaaccagaggctttcaccgcgaacttttttaaggggctcgagatttaccagactaagttgttgcattacttggccagaaatttttataaccttcgatttctagcactcttcgtagcatttgccatcaactttatcttactgttctataaggtaacagaggagcctctggaggaggagactgaagacgtagccaacctgtggaattcttttaatgacgaggaagaagaagaagcgatggtgttcttcgtgctgcaagagtccacggggtacatggcaccaactctgcgggccctggctatcattcacaccatcatctcgctggtttgcgtggtgggatactattgtctgaaggttccattagttgtcttcaaacgggagaaggaaattgcacgcaaactggaattcgacggcctttacattaccgagcagccctccgaggatgacattaagggccaatgggaccgtttggtgattaacacaccaagctttccgaataactactgggacaagtttgttaagaggaaagtgatcaacaaatatggcgatctgtatggtgctgaaaggatcgcagaattactcggcttagacaaaaatgcactcgatttctcaccagtcgaggagaccaaggctgaagctgcgtccctcgttagttggttgtcatccatcgacatgaagtaccatatctggaagctgggcgtagtgtttaccgacaactcctttctgtaccttgcctggtacaccaccatgtccgtcttgggccactacaataatttcttctttgctgcccacctgctcgacatcgccatggggttcaagacccttcgaacaattttatcaagtgtgacccacaatgggaagcagctggtgctcacagtgggcctgcttgcggtagtggtctacctgtatacagtggtcgcctttaattttttccggaagttctacaataaatctgaagacgatgatgagcctgacatgaagtgcgatgatatgatgacatgttacctttttcatatgtacgtgggtgttcgagccggggggggcatcggagacgagattgaggatccagcaggcgatccttatgagatgtatagaatagtgttcgacataacctttttcttttttgtcatagtgatacttctggcaatcatacaagggctgattatcgacgcatttggggagctgagagatcaacaggagcaggtcagagaggacatggaaacgaagtgctttatatgcggtattggtaatgattatttcgatacgacaccccatggcttcgagacacatactctccaggaacacaacctggcaaattacttattcttcctgatgtacctaattaacaaagatgaaaccgaacacaccggacaggagtcctacgtgtggaagatgtaccaggagcggtgttgggattttttcccggctggcgactgtttcagaaagcaatacgaggatcagctgggatag

SEQ ID NO: 87181 - DNA, 14601 bp, Artificial Sequence
  derived and/or modified sequence
atggccgagctgggcggcggcggggaggaggatgcccgctggtacaggaaggaggatgaggtggtgctgcagtgcatcgccaccatccacaaggagcagaggaagttctgcctggccgctgagggcctgggcaaccggctgtgcttcctggagcccaccagcgaggccaagtacatccccccagacctgtgtgtgtgcaactttgtgctggagcagagcctgtctgtgcgggccctgcaggagatgctggccaacacaggagaaaatggaggagagggcgccgcccagggcggcggccacaggaccctgctgtatggccatgctgtgctgctgcggcacagcttcagcggcatgtacctgacctgcctgaccaccagccgcagccagacagacaagctggcctttgatgtgggcctgcgggagcacgccaccggggaggcctgctggtggaccatccacccagccagcaagcagaggtctgagggggagaaggtgagaattggagatgacctgatcctggtgtctgtgagcagcgagcgctacctgcacctgtctgtgtccaatggaaacatccaggtggatgccagcttcatgcagaccctgtggaatgtgcaccccacctgcagcggcagcagcattgaggagggctacctgctgggcggccacgtggtgcggctcttccacggccatgatgagtgcctgaccatccccagcacagaccagaatgacagccagcaccggcgcatcttctatgaagctggaggagctggcacccgggcccggagcctgtggagggtggagcccctgcgcatctcctggagcggcagcaacatccgctggggccaggccttccggctgcggcacctgaccaccggccactacctggccctgacagaggaccagggcctcatcctgcaggaccgggccaagagtgacaccaagagcacagccttctccttccgggccagcaaggagctgaaggagaagctggacagcagccacaagagggacatcgagggcatgggcgtgcctgagatcaagtacggggacagcgtgtgctttgtgcagcacatcgccagcggcctgtgggtgacctacaaggcccaggatgccaagaccagccggctgggccccctgaagaggaaggtgatcctgcaccaggagggccacatggatgatggcctgaccctgcagcgctgccagcgggaggagagccaggccgcccgcatcatccggaacaccacagccctcttcagccagtttgtgtctggcaacaacagaacagctgcccccatcaccctgcccatcgaggaggtgctgcagaccctgcaggacctgattgcctacttccagcccccagaggaggagatgagacatgaggacaagcagaacaagctgcggagcctgaagaaccggcagaacctcttcaaggaggagggcatgctggccctggtgctgaactgcatcgaccggctgaatgtgtacaacagcgtggcccactttgctggcatcgcccgggaggagagcggcatggcctggaaggagatcctgaacctgctgtacaagctgctggccgccctgatccggggcaacagaaacaactgtgcccagttcagcaacaacctggactggctgatcagcaagctggaccggctggagagcagcagcggcatcctggaggtgctgcactgcatcctgacagagagccctgaggccctgaacctgattgctgagggccacatcaagagcatcatcagcctgctggacaagcatggaagaaaccacaaggtgctggacatcctgtgcagcctgtgcctgtgcaatggagtggccgtgcgggccaaccagaacctgatctgtgacaacctgctgcccaggaggaacctgctgctgcagaccaggctcatcaatgatgtgaccagcatccggcccaacatcttcctgggcgtggccgagggcagcgcccagtacaagaagtggtactttgagctgatcatcgaccaggtggaccccttcctgacagctgagcccacccacctgcgggtgggctgggccagcagcagcggctacgccccctacccaggcggcggggagggctggggcggcaatggagtgggagatgacctgtacagctatggctttgatggcctgcacctgtggagcggccgcatccccagggctgtggccagcatcaaccagcacctgctgcggagtgatgatgtggtgtcctgctgcctggacctgggcgtgcccagcatctccttccgcatcaatggccagcctgtgcagggcatgtttgagaacttcaacacagatggcctcttcttccctgtgatgtccttctctgctggggtgaaggtgcgcttcctgatgggcggcagacatggagagttcaagttcctgccccccagcggctacgccccctgctatgaggccctgctgcccaaggagaagatgaggctggagcctgtgaaggagtacaagagagatgctgatggcatccgggacctgctgggcaccacccagttcctgagccaggccagcttcatcccctgccctgtggacaccagccaggtgatcctgcccccccacctggagaagatccgggaccggctggccgagaacatccacgagctgtggggcatgaacaagattgagctgggctggaccttcggcaagatcagagatgacaacaagaggcagcacccctgcctggtggagttcagcaagctgcctgagacagagaagaactacaacctgcagatgagcacagagaccctgaagaccctgctggccctgggctgccacatcgcccacgtgaacccagctgctgaggaggacctgaagaaggtgaagctgcccaagaactacatgatgagcaatggctacaagccagcccccctggacctgagtgatgtgaagctgctgcccccccaggagatcctggtggacaagctggccgagaatgcccacaacgtgtgggccaaggaccgcatcaagcagggctggacctacggcatccagcaggacctgaagaacaagaggaacccccggctggtgccctatgccctgctggatgagaggaccaagaagagcaacagagacagcctgcgggaggccgtgaggacctttgtgggctacggctacaacatcgagcccagcgaccaggagctggccgacagcgctgtggagaaggtgtccattgacaagatccgcttcttccgggtggagaggagctatgctgtgcgcagcggcaagtggtactttgaatttgaggtggtgactggaggagacatgagggtgggctgggcccggcccggctgcaggccagatgtggagctgggcgcagatgaccaggcctttgtgtttgagggcaacagaggccagcgctggcaccagggcagcggctacttcggccgcacctggcagcctggagatgtggtgggctgcatgatcaacctggatgatgcctccatgatcttcaccctgaatggagagctgctgatcaccaacaagggcagcgagctggcctttgctgactatgaaattgaaaatggatttgtgcccatctgctgcctgggcctgagccagatcggccgcatgaacctgggcacagatgccagcaccttcaagttctacaccatgtgtggcctgcaggagggctttgagccctttgctgtgaacatgaacagagatgtggccatgtggttcagcaagaggctgcccacctttgtgaatgtgcccaaggaccacccccacatcgaggtgatgagaattgatggcaccatggacagccccccctgcctgaaggtgacccacaagaccttcggcacccagaacagcaatgctgacatgatctactgccgcctgtccatgcctgtggagtgccacagcagcttcagccacagcccctgcctggacagcgaggccttccagaagaggaagcagatgcaggagatcctgagccacaccaccacccagtgctactatgccatccgcatctttgctggccaggaccccagctgtgtgtgggtgggctgggtgaccccagactaccacctgtacagcgagaagtttgacctgaacaagaactgcaccgtgacagtgaccctgggagatgagcggggccgggtgcatgaatctgtgaagaggagcaactgctacatggtgtggggcggggacatcgtggccagcagccagaggagcaacagaagcaatgtggacctggagatcggctgcctggtggacctggccatgggcatgctgtccttcagcgccaacgggaaggagctgggcacctgctaccaggtggagcccaacaccaaggtgtttcctgctgtgttcctgcagcccaccagcaccagcctcttccagtttgagctgggcaagctgaagaatgccatgcccctgtctgctgccatcttccgctctgaggagaagaaccctgtgccccagtgccccccccggctggatgtgcagaccatccagcctgtgctgtggagcaggatgcccaacagcttcctgaaggtggagacagagcgggtgtctgaaagacatggctgggtggtgcagtgcctggagcccctgcagatgatggccctgcacatcccagaagaaaatagatgtgtggacatcctggagctgtgtgagcaggaggacctgatgaggttccactaccacaccctgcggctgtacagcgctgtgtgtgccctgggcaacagccgggtggcctatgccctgtgcagccacgtggacctgagccagctgttctacgccatcgacaacaagtacctgcccggcctgctgcggagcggcttctatgacctgctgatcagcatccacctggccagcgccaaggagaggaagctgatgatgaagaatgagtacatcatccccatcaccagcaccaccaggaacatccgcctcttcccagatgagagcaagagacatggcctgcccggggtgggcctgcggacctgcctgaagccaggcttccgcttcagcaccccctgctttgtggtgactggagaggaccaccagaagcagagccctgagatccccctggagagcctgcggaccaaggccctgtccatgctgacagaggccgtgcagtgcagcggggcccacatccgggaccctgtgggcggctctgtggagttccagtttgtgcctgtgctgaagctgattggcaccctgctggtgatgggcgtgtttgatgatgatgatgtgcggcagatcctgctgctgattgaccccagcgtgtttggagagcacagcgctggaacagaggagggcgctgagaaggaggaggtgacccaggtggaggagaaggctgtggaggccggggagaaggccggcaaggaggcccctgtgaagggcctgctgcagacccggctgcctgagagcgtgaagctgcagatgtgtgagctgctgagctacctgtgtgactgtgagctgcagcaccgggtggaggccatcgtggcctttggagacatctacgtgtccaagctgcaggccaaccagaagttccgctacaatgagctgatgcaggccctgaacatgtctgctgccctgacagccaggaagaccaaggagttccgcagccccccccaggagcagatcaacatgctgctgaacttccagctgggggagaactgcccctgcccagaggagatccgggaggagctgtatgacttccacgaggacctgctgctgcactgcggcgtgcccctggaggaggaggaggaggaggaggaggacacctcctggacaggcaagctgtgtgccctggtgtacaagatcaagggcccccccaagccagagaaggagcagcccacagaggaggaggagcgctgccccaccaccctgaaggagctgatcagccagaccatgatctgctgggcccaggaggaccagatccaggacagcgagctggtgaggatgatgttcaacctgctgcggcggcagtatgacagcattggagagctgctgcaggccctgaggaagacctacaccatcagccacacctctgtgtctgacaccatcaacctgctggccgccctgggccagatccgcagcctgctgtctgtgaggatgggcaaggaggaggagctgctgatgatcaatggcctgggggacatcatgaacaacaaggtgttctaccagcaccccaacctgatgagggtgctgggcatgcatgagaccgtgatggaggtgatggtgaatgtgctgggcacagagaagagccagatcgccttccccaagatggtggccagctgctgccgcttcctgtgctacttctgccgcatcagccggcagaaccagaaggccatgtttgagcacctgagctacctgctggagaacagctctgtgggcctggccagccccagcatgaggggcagcacccccctggatgtggccgccagctctgtgatggacaacaatgagctggccctgagcctggaggagccagacctggagaaggtggtgacctacctggccggctgcggcctgcagagctgccccatgctgctggccaagggctacccagatgtgggctggaaccccatcgagggggagcgctacctgtccttcctgcgctttgctgtgtttgtgaacagcgagagcgtggaggagaatgcctctgtggtggtgaagctgctgatcagaagacctgagtgcttcggccctgccctgcggggggagggcggcaatggcctgctggccgccatgcagggcgccatcaagatcagcgagaacccagccctggacctgcccagccagggctacaagcgggaggtgtccactggagatgatgaggaggaggaggagatcgtgcacatgggaaatgccatcatgtccttctacagcgccctgattgacctgctgggccgctgtgcccctgagatgcacctgatccagacaggcaagggggaggccatccgcatccgcagcatcctgcggagcctggtgcccacagaggacctggtgggcatcatcagcatccccctgaagctgcccagcctgaacaaggatggctctgtgtctgagccagacatggccgccaacttctgcccagaccacaaggcccccatggtgctcttcctggacagagtgtatggcatcaaggaccagaccttcctgctgcacctgctggaggtgggcttcctgcctgacctgcgggccagcgccagcctggacacagtgtccctgagcaccacagaagctgccctggccctgaaccgctacatctgcagcgctgtgctgcccctgctgacccgctgtgcccccctgtttgctggaacagagcactgcaccagcctgattgacagcaccctgcagaccatctaccgcctgagcaagggccgcagcctgaccaaggcccagagggacaccatcgaggagtgcctgctggccatctgcaaccacctgcggcccagcatgctgcagcagctgctgcggcggctggtgtttgatgtgccccagctgaatgagtactgcaagatgcccctgaagctgctgaccaaccactatgagcagtgctggaagtactactgcctgcccagcggctggggcagctatggcctggccgtggaggaggagctgcacctgacagagaagctgttctggggcatctttgacagcctgagccacaagaagtatgaccctgacctcttcaggatggccctgccctgcctgagcgccatcgccggggccctgcccccagactacctggacacccgcatcacagccaccctggagaagcagatctctgtggatgctgatggcaactttgaccccaagcccatcaacaccatgaacttcagcctgcctgagaagctggagtacatcgtgaccaagtatgcagagcacagccatgacaagtgggcctgtgacaagagccagagcggctggaagtatggcatcagcctggatgaaaatgtgaagacccaccccctcatccggcccttcaagaccctgacagagaaggagaaggagatctaccgctggccagcccgggagagcctgaagaccatgctggccgtgggctggacagtggagaggaccaaggagggggaggccctggtgcagcagcgggagaatgagaagctgcggtctgtgtcccaggccaaccagggcaacagctacagccctgcccccctggacctgagcaatgtggtgctgagccgggagctgcagggcatggtggaggtggtggccgagaactaccacaacatctgggccaagaagaagaagctggagctggagagcaagggcggcggcagccaccccctgctggtgccctatgacaccctgacagccaaggagaagttcaaggaccgggagaaggcccaggacctcttcaagttcctgcaggtgaatggcatcatcgtgtcccggggcatgaaggacatggagctggatgccagctccatggagaagagatttgcctacaagttcctgaagaagatcctgaagtatgtggacagcgcccaggagttcatcgcccacctggaggccatcgtgagcagcggcaagacagagaagagcccccgggaccaggagatcaagttctttgccaaggtgctgctgcccctggtggaccagtacttcaccagccactgcctgtacttcctgagcagccccctgaagcccctgagcagcagcggctacgccagccacaaggagaaggagatggtggccggcctcttctgcaagctggccgccctggtgcgccaccgcatcagcctgtttggaagtgacagcaccaccatggtgtcctgcctgcacatcctggcccagaccctggacaccaggacagtgatgaagagcggcagcgagctggtgaaggccggcctgcgggccttctttgaaaatgctgctgaggacctggagaagaccagcgagaacctgaagctgggcaagttcacccacagcaggacccagatcaagggcgtgtcccagaacatcaactacaccaccgtggccctgctgcccatcctgaccagcatctttgaacatgtgacccagcaccagtttggcatggacctgctgctgggagatgtgcagatcagctgctaccacatcctgtgcagcctgtacagcctgggcaccgggaagaacatctacgtggagcggcagaggcctgccctgggagaatgtctggccagcctggccgccgccatccctgtggccttcctggagcccaccctgaaccgctacaaccccctgagcgtcttcaacaccaagaccccccgggagaggagcatcctgggcatgccagacacagtggaggacatgtgcccagacatcccccagctggagggcctgatgaaggagatcaatgacctggccgagagcggggcccgctacacagagatgcctcatgtgattgaagtcatcctgcccatgctgtgcaactacctgagctactggtgggagcggggccctgagaacctgccccccagcacaggcccctgctgcaccaaggtgaccagcgagcacctgagcctcatcctgggcaacatcctgaagatcatcaacaacaacctgggcattgatgaggcctcctggatgaagagaattgctgtgtatgcccagcccatcatcagcaaggcccggccagacctgctgcggagccacttcatccccaccctggagaagctgaagaagaaggctgtgaagacagtgcaggaggaggagcagctgaaggcagatggaaaaggagacacccaggaggccgagctgctgatcctggatgaatttgctgtgctgtgccgggacctgtatgccttctaccccatgctgatccgctacgtggacaacaacagaagcaactggctgaagagcccagatgctgacagcgaccagctgttcaggatggtggccgaggtgttcatcctgtggtgcaagagccacaacttcaagcgggaggagcagaactttgtgatccagaatgagatcaacaacctggccttcctgaccggggacagcaagagcaagatgagcaagagcggcggccaggaccaggagaggaagaagaccaagagaagaggagacctgtacagcatccagaccagcctcatcgtggccgccctgaagaagatgctgcccatcggcctgaacatgtgcacccctggggaccaggagctgatcagcctggccaagagccgctacagccaccgggacacagatgaggaggtgcgggagcacctgaggaacaacctgcacctgcaggagaagagtgatgatcctgctgtgaagtggcagctgaacctgtacaaggatgtgctgaagtctgaggagcccttcaaccctgagaagacagtggagcgggtgcagaggatctctgctgctgtgttccacctggagcaggtggagcagcccctgcggagcaagaaggctgtgtggcacaagctgctgagcaagcagaggaagagagctgtggtggcctgcttcaggatggcccccctgtacaacctgcccaggcacaggagcatcaacctcttcctgcacggctaccagcgcttctggattgaaacagaggagtacagctttgaggagaagctggtgcaggacctggccaagagccccaaggtggaggaggaggaggaggaggagacagagaagcagcctgaccccctgcaccagatcatcctgtacttcagcagaaatgccctgacagagaggagcaagctggaggatgaccccctgtacaccagctacagctccatgatggccaagagctgccagagcggagaagatgaggaggaggatgaggacaaggagaagacctttgaggagaaggagatggagaagcagaagaccctgtaccagcaggcccggctgcacgagagaggagctgctgagatggtgctgcagatgatcagcgccagcaaaggagagatgagccccatggtggtggagaccctgaagctgggcatcgccatcctgaatggaggaaatgctggggtgcagcagaagatgctggactacctgaaggagaagaaggatgctggcttcttccagagcctgagcggcctgatgcagagctgccgctctgtgctggacctgaatgcctttgagcggcagaacaaggccgagggcctgggcatggtgacagaggagggcaccctgattgtgcgggagcggggggagaaggtgctgcagaatgatgagttcacccgggacctcttccgcttcctgcagctgctgtgtgagggccacaacagcgacttccagaacttcctgcggacccagatgggcaacaccaccaccgtgaatgtcatcatcagcacagtggactacctgctgcggctgcaggagagcatcagtgacttctactggtactacagcggcaaggacatcattgatgaaagtggccagcacaacttcagcaaggccctggccgtgaccaagcagatcttcaacagcctgacagagtacatccagggcccctgcatcggcaaccagcagagcctggcccacagccggctgtgggatgctgtggtgggcttcctgcacgtgtttgccaacatgcagatgaagctgagccaggacagcagccagatcgagctgctgaaggagctgctggacctgctgcaggacatggtggtgatgctgctgagcctgctggagggcaatgtggtgaatggcaccatcggcaagcagatggtggacaccctggtggagagcagcaccaacgtggagatgatcctgaagttctttgacatgttcctgaagctgaaggacctgaccagcagtgacaccttcaaggagtatgaccctgatggcaagggcatcatcagcaagaaggagttccagaaggccatggagggccagaagcagtacacccagagcgagattgacttcctgctgagctgtgccgaggctgatgaaaatgacatgttcaactacgtggactttgtggaccgcttccacgagcccgccaaggacatcggcttcaacgtggccgtgctgctgaccaacctgtctgagcacatgcccaatgacagccggctgaagtgcctgctggaccctgctgagagcgtgctgaactactttgagccctacctgggccgcatcgagatcatgggcggggccaagaagattgagcgggtgtactttgagatcagcgagagcagcaggacccagtgggagaagccccaggtgaaggagagcaagaggcagttcatctttgatgtggtgaatgaaggaggagagcaggagaagatggagctgtttgtgaacttctgtgaggacaccatctttgagatgcagctggccagccagatcagcgagagtgacagcgctgacaggcctgaggaggaggaggaggatgaggacagcagctatgtgctggagattgctggggaggaggaggaggatggcagcctggagcccgccagcgcctttgccatggcctgtgcctctgtgaagagaaatgtgacagacttcctgaagagggccaccctgaagaacctgaggaagcagtacagaaatgtgaagaagatgacagccaaggagctggtgaaggtgctcttctccttcttctggatgctgtttgtgggcctcttccagctgctcttcaccatcctgggcggcatcttccagatcctgtggagcacagtgtttggaggcggcctggtggagggcgccaagaacatccgggtgaccaagatcctgggggacatgccagaccccacccagtttggcatccatgatgacaccatggaggccgagagagctgaggtgatggagcccggcatcaccacagagctggtgcacttcatcaagggggagaagggggacacagacatcatgtctgacctgtttggcctgcaccccaagaaggagggcagcctgaagcacggccctgaggtgggcctgggggacctgtctgagatcatcggcaaggatgagccccccaccctggagagcacagtgcagaagaagaggaaggcccaggccgctgagatgaaggccgccaatgaggccgagggcaaggtggagagcgagaaggctgacatggaggatggagagaaggaggacaaggacaaggaggaggagcaggccgagtacctgtggacagaggtgaccaagaagaagaagagaagatgtggccagaaggtggagaagccagaggccttcaccgccaacttcttcaagggcctggagatctaccagaccaagctgctgcactacctggccaggaacttctacaacctgcgcttcctggccctgtttgtggcctttgccatcaacttcatcctgctcttctacaaggtgacagaggagcccctggaggaggagacagaagatgtggccaacctgtggaacagcttcaatgatgaggaggaggaggaggccatggtgttctttgtgctgcaggagagcacaggctacatggcccccaccctgcgggccctggccatcatccacaccatcatcagcctggtgtgtgtggtgggctactactgcctgaaggtgcccctggtggtgttcaagcgggagaaggagatcgccaggaagctggagtttgatggcctgtacatcacagagcagcccagtgaagatgacatcaagggccagtgggaccggctggtgatcaacacccccagcttccccaacaactactgggacaagtttgtgaagaggaaggtgatcaacaagtacggggacctgtatggagctgagagaattgctgagctgctgggcctggacaagaatgccctggacttcagccctgtggaggagaccaaggccgaggccgccagcctggtgtcctggctgagcagcattgacatgaagtaccacatctggaagctgggcgtggtgttcacagacaacagcttcctgtacctggcctggtacaccaccatgtctgtgctgggccactacaacaacttcttctttgctgcccacctgctggacatcgccatgggcttcaagaccctgcggaccatcctgagctctgtgacccacaacgggaagcagctggtgctgactgtgggcctgctggccgtggtggtgtacctgtacacagtggtggccttcaacttcttcaggaagttctacaacaagtcagaagatgatgatgagccagacatgaagtgtgatgacatgatgacctgctacctgttccacatgtatgtgggcgtgcgggccggcggcggcattggagatgaaattgaagatcctgctggggacccctatgagatgtacagaattgtgtttgacatcaccttcttcttcttcgtcatcgtcatcctgctggccatcatccagggcctcatcattgatgcctttggagagctgcgggaccagcaggagcaggtgcgggaggacatggagaccaagtgcttcatctgtggcattggaaatgactactttgacaccaccccccacggctttgagacccacaccctgcaggagcacaacctggccaactacctgttcttcctgatgtacctgatcaacaaggatgaaacagagcacacaggccaggagagctatgtgtggaagatgtaccaggagcgctgctgggacttcttccctgctggggactgcttcaggaagcagtatgaggaccagctgggctag

SEQ ID NO: 87182 - DNA, 14598 bp, Artificial Sequence
  derived and/or modified sequence
atggccgagggcggggagggcggagaagatgagatccagttcctgaggacagaagatgaggtggtgctgcagtgcatcgccaccatccacaaggagcagaggaagttctgcctggccgctgagggcctgggcaaccggctgtgcttcctggagcccaccagcgaggccaagtacatccccccagacctgtgtgtgtgcaactttgtgctggagcagagcctgtctgtgcgggccctgcaggagatgctggccaacacaggagaaaatggaggagagggcgccgcccagggcggcggccacaggaccctgctgtatggccatgctgtgctgctgcggcacagcttcagcggcatgtacctgacctgcctgaccaccagccgcagccagacagacaagctggcctttgatgtgggcctgcgggagcacgccaccggggaggcctgctggtggaccatccacccagccagcaagcagaggtctgagggggagaaggtgagaattggagatgacctgatcctggtgtctgtgagcagcgagcgctacctgcacctgtctgtgtccaatggaaacatccaggtggatgccagcttcatgcagaccctgtggaatgtgcaccccacctgcagcggcagcagcattgaggagggctacctgctgggcggccacgtggtgcggctcttccacggccatgatgagtgcctgaccatccccagcacagaccagaatgacagccagcaccggcgcatcttctatgaagctggaggagctggcacccgggcccggagcctgtggagggtggagcccctgcgcatctcctggagcggcagcaacatccgctggggccaggccttccggctgcggcacctgaccaccggccactacctggccctgacagaggaccagggcctcatcctgcaggaccgggccaagagtgacaccaagagcacagccttctccttccgggccagcaaggagctgaaggagaagctggacagcagccacaagagggacatcgagggcatgggcgtgcctgagatcaagtacggggacagcgtgtgctttgtgcagcacatcgccagcggcctgtgggtgacctacaaggcccaggatgccaagaccagccggctgggccccctgaagaggaaggtgatcctgcaccaggagggccacatggatgatggcctgaccctgcagcgctgccagcgggaggagagccaggccgcccgcatcatccggaacaccacagccctcttcagccagtttgtgtctggcaacaacagaacagctgcccccatcaccctgcccatcgaggaggtgctgcagaccctgcaggacctgattgcctacttccagcccccagaggaggagatgagacatgaggacaagcagaacaagctgcggagcctgaagaaccggcagaacctcttcaaggaggagggcatgctggccctggtgctgaactgcatcgaccggctgaatgtgtacaacagcgtggcccactttgctggcatcgcccgggaggagagcggcatggcctggaaggagatcctgaacctgctgtacaagctgctggccgccctgatccggggcaacagaaacaactgtgcccagttcagcaacaacctggactggctgatcagcaagctggaccggctggagagcagcagcggcatcctggaggtgctgcactgcatcctgacagagagccctgaggccctgaacctgattgctgagggccacatcaagagcatcatcagcctgctggacaagcatggaagaaaccacaaggtgctggacatcctgtgcagcctgtgcctgtgcaatggagtggccgtgcgggccaaccagaacctgatctgtgacaacctgctgcccaggaggaacctgctgctgcagaccaggctcatcaatgatgtgaccagcatccggcccaacatcttcctgggcgtggccgagggcagcgcccagtacaagaagtggtactttgagctgatcatcgaccaggtggaccccttcctgacagctgagcccacccacctgcgggtgggctgggccagcagcagcggctacgccccctacccaggcggcggggagggctggggcggcaatggagtgggagatgacctgtacagctatggctttgatggcctgcacctgtggagcggccgcatccccagggctgtggccagcatcaaccagcacctgctgcggagtgatgatgtggtgtcctgctgcctggacctgggcgtgcccagcatctccttccgcatcaatggccagcctgtgcagggcatgtttgagaacttcaacacagatggcctcttcttccctgtgatgtccttctctgctggggtgaaggtgcgcttcctgatgggcggcagacatggagagttcaagttcctgccccccagcggctacgccccctgctatgaggccctgctgcccaaggagaagatgaggctggagcctgtgaaggagtacaagagagatgctgatggcatccgggacctgctgggcaccacccagttcctgagccaggccagcttcatcccctgccctgtggacaccagccaggtgatcctgcccccccacctggagaagatccgggaccggctggccgagaacatccacgagctgtggggcatgaacaagattgagctgggctggaccttcggcaagatcagagatgacaacaagaggcagcacccctgcctggtggagttcagcaagctgcctgagacagagaagaactacaacctgcagatgagcacagagaccctgaagaccctgctggccctgggctgccacatcgcccacgtgaacccagctgctgaggaggacctgaagaaggtgaagctgcccaagaactacatgatgagcaatggctacaagccagcccccctggacctgagtgatgtgaagctgctgcccccccaggagatcctggtggacaagctggccgagaatgcccacaacgtgtgggccaaggaccgcatcaagcagggctggacctacggcatccagcaggacctgaagaacaagaggaacccccggctggtgccctatgccctgctggatgagaggaccaagaagagcaacagagacagcctgcgggaggccgtgaggacctttgtgggctacggctacaacatcgagcccagcgaccaggagctggccgacagcgctgtggagaaggtgtccattgacaagatccgcttcttccgggtggagaggagctatgctgtgcgcagcggcaagtggtactttgaatttgaggtggtgactggaggagacatgagggtgggctgggcccggcccggctgcaggccagatgtggagctgggcgcagatgaccaggcctttgtgtttgagggcaacagaggccagcgctggcaccagggcagcggctacttcggccgcacctggcagcctggagatgtggtgggctgcatgatcaacctggatgatgcctccatgatcttcaccctgaatggagagctgctgatcaccaacaagggcagcgagctggcctttgctgactatgaaattgaaaatggatttgtgcccatctgctgcctgggcctgagccagatcggccgcatgaacctgggcacagatgccagcaccttcaagttctacaccatgtgtggcctgcaggagggctttgagccctttgctgtgaacatgaacagagatgtggccatgtggttcagcaagaggctgcccacctttgtgaatgtgcccaaggaccacccccacatcgaggtgatgagaattgatggcaccatggacagccccccctgcctgaaggtgacccacaagaccttcggcacccagaacagcaatgctgacatgatctactgccgcctgtccatgcctgtggagtgccacagcagcttcagccacagcccctgcctggacagcgaggccttccagaagaggaagcagatgcaggagatcctgagccacaccaccacccagtgctactatgccatccgcatctttgctggccaggaccccagctgtgtgtgggtgggctgggtgaccccagactaccacctgtacagcgagaagtttgacctgaacaagaactgcaccgtgacagtgaccctgggagatgagcggggccgggtgcatgaatctgtgaagaggagcaactgctacatggtgtggggcggggacatcgtggccagcagccagaggagcaacagaagcaatgtggacctggagatcggctgcctggtggacctggccatgggcatgctgtccttcagcgccaacgggaaggagctgggcacctgctaccaggtggagcccaacaccaaggtgtttcctgctgtgttcctgcagcccaccagcaccagcctcttccagtttgagctgggcaagctgaagaatgccatgcccctgtctgctgccatcttccgctctgaggagaagaaccctgtgccccagtgccccccccggctggatgtgcagaccatccagcctgtgctgtggagcaggatgcccaacagcttcctgaaggtggagacagagcgggtgtctgaaagacatggctgggtggtgcagtgcctggagcccctgcagatgatggccctgcacatcccagaagaaaatagatgtgtggacatcctggagctgtgtgagcaggaggacctgatgaggttccactaccacaccctgcggctgtacagcgctgtgtgtgccctgggcaacagccgggtggcctatgccctgtgcagccacgtggacctgagccagctgttctacgccatcgacaacaagtacctgcccggcctgctgcggagcggcttctatgacctgctgatcagcatccacctggccagcgccaaggagaggaagctgatgatgaagaatgagtacatcatccccatcaccagcaccaccaggaacatccgcctcttcccagatgagagcaagagacatggcctgcccggggtgggcctgcggacctgcctgaagccaggcttccgcttcagcaccccctgctttgtggtgactggagaggaccaccagaagcagagccctgagatccccctggagagcctgcggaccaaggccctgtccatgctgacagaggccgtgcagtgcagcggggcccacatccgggaccctgtgggcggctctgtggagttccagtttgtgcctgtgctgaagctgattggcaccctgctggtgatgggcgtgtttgatgatgatgatgtgcggcagatcctgctgctgattgaccccagcgtgtttggagagcacagcgctggaacagaggagggcgctgagaaggaggaggtgacccaggtggaggagaaggctgtggaggccggggagaaggccggcaaggaggcccctgtgaagggcctgctgcagacccggctgcctgagagcgtgaagctgcagatgtgtgagctgctgagctacctgtgtgactgtgagctgcagcaccgggtggaggccatcgtggcctttggagacatctacgtgtccaagctgcaggccaaccagaagttccgctacaatgagctgatgcaggccctgaacatgtctgctgccctgacagccaggaagaccaaggagttccgcagccccccccaggagcagatcaacatgctgctgaacttccagctgggggagaactgcccctgcccagaggagatccgggaggagctgtatgacttccacgaggacctgctgctgcactgcggcgtgcccctggaggaggaggaggaggaggaggaggacacctcctggacaggcaagctgtgtgccctggtgtacaagatcaagggcccccccaagccagagaaggagcagcccacagaggaggaggagcgctgccccaccaccctgaaggagctgatcagccagaccatgatctgctgggcccaggaggaccagatccaggacagcgagctggtgaggatgatgttcaacctgctgcggcggcagtatgacagcattggagagctgctgcaggccctgaggaagacctacaccatcagccacacctctgtgtctgacaccatcaacctgctggccgccctgggccagatccgcagcctgctgtctgtgaggatgggcaaggaggaggagctgctgatgatcaatggcctgggggacatcatgaacaacaaggtgttctaccagcaccccaacctgatgagggtgctgggcatgcatgagaccgtgatggaggtgatggtgaatgtgctgggcacagagaagagccagatcgccttccccaagatggtggccagctgctgccgcttcctgtgctacttctgccgcatcagccggcagaaccagaaggccatgtttgagcacctgagctacctgctggagaacagctctgtgggcctggccagccccagcatgaggggcagcacccccctggatgtggccgccagctctgtgatggacaacaatgagctggccctgagcctggaggagccagacctggagaaggtggtgacctacctggccggctgcggcctgcagagctgccccatgctgctggccaagggctacccagatgtgggctggaaccccatcgagggggagcgctacctgtccttcctgcgctttgctgtgtttgtgaacagcgagagcgtggaggagaatgcctctgtggtggtgaagctgctgatcagaagacctgagtgcttcggccctgccctgcggggggagggcggcaatggcctgctggccgccatgcagggcgccatcaagatcagcgagaacccagccctggacctgcccagccagggctacaagcgggaggtgtccactggagatgatgaggaggaggaggagatcgtgcacatgggaaatgccatcatgtccttctacagcgccctgattgacctgctgggccgctgtgcccctgagatgcacctgatccagacaggcaagggggaggccatccgcatccgcagcatcctgcggagcctggtgcccacagaggacctggtgggcatcatcagcatccccctgaagctgcccagcctgaacaaggatggctctgtgtctgagccagacatggccgccaacttctgcccagaccacaaggcccccatggtgctcttcctggacagagtgtatggcatcaaggaccagaccttcctgctgcacctgctggaggtgggcttcctgcctgacctgcgggccagcgccagcctggacacagtgtccctgagcaccacagaagctgccctggccctgaaccgctacatctgcagcgctgtgctgcccctgctgacccgctgtgcccccctgtttgctggaacagagcactgcaccagcctgattgacagcaccctgcagaccatctaccgcctgagcaagggccgcagcctgaccaaggcccagagggacaccatcgaggagtgcctgctggccatctgcaaccacctgcggcccagcatgctgcagcagctgctgcggcggctggtgtttgatgtgccccagctgaatgagtactgcaagatgcccctgaagctgctgaccaaccactatgagcagtgctggaagtactactgcctgcccagcggctggggcagctatggcctggccgtggaggaggagctgcacctgacagagaagctgttctggggcatctttgacagcctgagccacaagaagtatgaccctgacctcttcaggatggccctgccctgcctgagcgccatcgccggggccctgcccccagactacctggacacccgcatcacagccaccctggagaagcagatctctgtggatgctgatggcaactttgaccccaagcccatcaacaccatgaacttcagcctgcctgagaagctggagtacatcgtgaccaagtatgcagagcacagccatgacaagtgggcctgtgacaagagccagagcggctggaagtatggcatcagcctggatgaaaatgtgaagacccaccccctcatccggcccttcaagaccctgacagagaaggagaaggagatctaccgctggccagcccgggagagcctgaagaccatgctggccgtgggctggacagtggagaggaccaaggagggggaggccctggtgcagcagcgggagaatgagaagctgcggtctgtgtcccaggccaaccagggcaacagctacagccctgcccccctggacctgagcaatgtggtgctgagccgggagctgcagggcatggtggaggtggtggccgagaactaccacaacatctgggccaagaagaagaagctggagctggagagcaagggcggcggcagccaccccctgctggtgccctatgacaccctgacagccaaggagaagttcaaggaccgggagaaggcccaggacctcttcaagttcctgcaggtgaatggcatcatcgtgtcccggggcatgaaggacatggagctggatgccagctccatggagaagagatttgcctacaagttcctgaagaagatcctgaagtatgtggacagcgcccaggagttcatcgcccacctggaggccatcgtgagcagcggcaagacagagaagagcccccgggaccaggagatcaagttctttgccaaggtgctgctgcccctggtggaccagtacttcaccagccactgcctgtacttcctgagcagccccctgaagcccctgagcagcagcggctacgccagccacaaggagaaggagatggtggccggcctcttctgcaagctggccgccctggtgcgccaccgcatcagcctgtttggaagtgacagcaccaccatggtgtcctgcctgcacatcctggcccagaccctggacaccaggacagtgatgaagagcggcagcgagctggtgaaggccggcctgcgggccttctttgaaaatgctgctgaggacctggagaagaccagcgagaacctgaagctgggcaagttcacccacagcaggacccagatcaagggcgtgtcccagaacatcaactacaccaccgtggccctgctgcccatcctgaccagcatctttgaacatgtgacccagcaccagtttggcatggacctgctgctgggagatgtgcagatcagctgctaccacatcctgtgcagcctgtacagcctgggcaccgggaagaacatctacgtggagcggcagaggcctgccctgggagaatgtctggccagcctggccgccgccatccctgtggccttcctggagcccaccctgaaccgctacaaccccctgagcgtcttcaacaccaagaccccccgggagaggagcatcctgggcatgccagacacagtggaggacatgtgcccagacatcccccagctggagggcctgatgaaggagatcaatgacctggccgagagcggggcccgctacacagagatgcctcatgtgattgaagtcatcctgcccatgctgtgcaactacctgagctactggtgggagcggggccctgagaacctgccccccagcacaggcccctgctgcaccaaggtgaccagcgagcacctgagcctcatcctgggcaacatcctgaagatcatcaacaacaacctgggcattgatgaggcctcctggatgaagagaattgctgtgtatgcccagcccatcatcagcaaggcccggccagacctgctgcggagccacttcatccccaccctggagaagctgaagaagaaggctgtgaagacagtgcaggaggaggagcagctgaaggcagatggaaaaggagacacccaggaggccgagctgctgatcctggatgaatttgctgtgctgtgccgggacctgtatgccttctaccccatgctgatccgctacgtggacaacaacagaagcaactggctgaagagcccagatgctgacagcgaccagctgttcaggatggtggccgaggtgttcatcctgtggtgcaagagccacaacttcaagcgggaggagcagaactttgtgatccagaatgagatcaacaacctggccttcctgaccggggacagcaagagcaagatgagcaagagcggcggccaggaccaggagaggaagaagaccaagagaagaggagacctgtacagcatccagaccagcctcatcgtggccgccctgaagaagatgctgcccatcggcctgaacatgtgcacccctggggaccaggagctgatcagcctggccaagagccgctacagccaccgggacacagatgaggaggtgcgggagcacctgaggaacaacctgcacctgcaggagaagagtgatgatcctgctgtgaagtggcagctgaacctgtacaaggatgtgctgaagtctgaggagcccttcaaccctgagaagacagtggagcgggtgcagaggatctctgctgctgtgttccacctggagcaggtggagcagcccctgcggagcaagaaggctgtgtggcacaagctgctgagcaagcagaggaagagagctgtggtggcctgcttcaggatggcccccctgtacaacctgcccaggcacaggagcatcaacctcttcctgcacggctaccagcgcttctggattgaaacagaggagtacagctttgaggagaagctggtgcaggacctggccaagagccccaaggtggaggaggaggaggaggaggagacagagaagcagcctgaccccctgcaccagatcatcctgtacttcagcagaaatgccctgacagagaggagcaagctggaggatgaccccctgtacaccagctacagctccatgatggccaagagctgccagagcggagaagatgaggaggaggatgaggacaaggagaagacctttgaggagaaggagatggagaagcagaagaccctgtaccagcaggcccggctgcacgagagaggagctgctgagatggtgctgcagatgatcagcgccagcaaaggagagatgagccccatggtggtggagaccctgaagctgggcatcgccatcctgaatggaggaaatgctggggtgcagcagaagatgctggactacctgaaggagaagaaggatgctggcttcttccagagcctgagcggcctgatgcagagctgcagcgtgctggacctgaatgcctttgagcggcagaacaaggccgagggcctgggcatggtgacagaggagggcaccctcatcgtgcgggagcggggggagaaggtgctgcagaatgatgagttcacccgggacctcttccgcttcctgcagctgctgtgtgagggccacaacagcgacttccagaacttcctgcggacccagatgggcaacaccaccaccgtgaatgtcatcatcagcacagtggactacctgctgcggctgcaggagagcatcagtgacttctactggtactacagcggcaaggacatcattgatgagagcggccagcacaacttcagcaaggccctggccgtgaccaagcagatcttcaacagcctgacagagtacatccagggcccctgcatcggcaaccagcagagcctggcccacagccggctgtgggatgctgtggtgggcttcctgcacgtgtttgccaacatgcagatgaagctgagccaggacagcagccagatcgagctgctgaaggagctgctggacctgctgcaggacatggtggtgatgctgctgagcctgctggagggcaatgtggtgaatggcaccatcggcaagcagatggtggacaccctggtggagagcagcaccaacgtggagatgatcctgaagttctttgacatgttcctgaagctgaaggacctgaccagcagtgacaccttcaaggagtatgaccctgatggcaagggcatcatcagcaagaaggagttccagaaggccatggagggccagaagcagtacacccagagcgagattgacttcctgctgagctgtgccgaggctgatgaaaatgacatgttcaactacgtggactttgtggaccgcttccacgagcccgccaaggacatcggcttcaacgtggccgtgctgctgaccaacctgtctgagcacatgcccaatgacagccggctgaagtgcctgctggaccctgctgagagcgtgctgaactactttgagccctacctgggcagaattgagatcatgggcggggccaagaagattgaaagagtgtactttgagatcagcgagagcagcaggacccagtgggagaagccccaggtgaaggagagcaagaggcagttcatctttgatgtggtgaatgaaggaggagagcaggagaagatggagctgtttgtgaacttctgtgaggacaccatctttgagatgcagctggccagccagatcagcgagagtgacagcgctgacaggcctgaggaggaggaggaggatgaggacagcagctatgtgctggagattgctggggaggaggaggaggatggcagcctggagcccgccagcgcctttgccatggcctgtgcctctgtgaagagaaatgtgacagacttcctgaagagggccaccctgaagaacctgaggaagcagtacagaaatgtgaagaagatgacagccaaggagctggtgaaggtgctcttctccttcttctggatgctgtttgtgggcctcttccagctgctcttcaccatcctgggcggcatcttccagatcctgtggagcacagtgtttggaggcggcctggtggagggcgccaagaacatccgggtgaccaagatcctgggggacatgccagaccccacccagtttggcatccatgatgacaccatggaggccgagcgggcagaggtgatggagcccggcatcaccacagagctggtgcacttcatcaagggggagaagggggacacagacatcatgtctgacctgtttggcctgcaccccaagaaggagggcagcctgaagcacggccctgaggtgggcctgggggacctgtctgagatcatcggcaaggatgagccccccaccctggagagcacagtgcagaagaagaggaaggcccaggccgctgagatgaaggccgccaatgaagctgagggcaaggtggagagcgagaaggctgacatggaggatggagagaaggaggacaaggacaaggaggaggagcaggccgagtacctgtggacagaggtgaccaagaagaagaagaggcgctgtggccagaaggtggagaagccagaggccttcaccgccaacttcttcaagggcctggagatctaccagaccaagctgctgcactacctggccaggaacttctacaacctgcgcttcctggccctgtttgtggcctttgccatcaacttcatcctgctcttctacaaggtgacagaggagcccctggaggaggagacagaagatgtggccaacctgtggaacagcttcaatgatgaggaggaggaggaggccatggtgttctttgtgctgcaggagagcacaggctacatggcccccaccctgcgggccctggccatcatccacaccatcatcagcctggtgtgtgtggtgggctactactgcctgaaggtgcccctggtggtgttcaagcgggagaaggagatcgccaggaagctggagtttgatggcctgtacatcacagagcagcccagtgaagatgacatcaagggccagtgggaccggctggtgatcaacacccccagcttccccaacaactactgggacaagtttgtgaagaggaaggtgatcaacaagtatggagacctgtatggagctgagagaattgctgagctgctgggcctggacaagaatgccctggacttcagccctgtggaggagaccaaggccgaggccgccagcctggtgtcctggctgagcagcattgacatgaagtaccacatctggaagctgggcgtggtgttcacagacaacagcttcctgtacctggcctggtacaccaccatgtctgtgctgggccactacaacaacttcttctttgctgcccacctgctggacatcgccatgggcttcaagaccctgcggaccatcctgagctctgtgacccacaacgggaagcagctggtgctgactgtgggcctgctggccgtggtggtgtacctgtacacagtggtggccttcaacttcttcaggaagttctacaacaagtcagaagatgatgatgagccagacatgaagtgtgatgacatgatgacctgctacctgttccacatgtatgtgggcgtgcgggccggcggcggcattggagatgaaattgaggaccctgctggggacccctatgagatgtaccgcatcgtgtttgacatcaccttcttcttctttgtgattgtcatcctgctggccatcatccagggcctcatcattgatgccttcggggagctgcgggaccagcaggagcaggtgcgggaggacatggagaccaagtgcttcatctgtggcattggaaatgactactttgacaccacccctcatggctttgagacccacaccctgcaggagcacaacctggccaactacctgttcttcctgatgtacctgatcaacaaggatgaaacagagcacacaggccaggagagctatgtgtggaagatgtaccaggagcgctgctgggacttcttccctgctggggactgcttcaggaagcagtatgaggaccagctgggctag

SEQ ID NO: 87183 - DNA, 14601 bp, Artificial Sequence
  derived and/or modified sequence
atggccgagctgggcggcggcggcgaggaggacgcccggtggtacagaaaagaggacgaagttgtgcttcagtgcatagctaccatccacaaggaacagcggaagttctgtctggctgctgaaggccttggcaaccgactttgttttctagagccaactagcgaggcaaagtatatcccgcccgacctgtgtgtatgcaatttcgtccttgagcaaagcctgtcagttcgcgctttgcaggagatgctggcgaatacaggtgaaaacggcggggagggagctgctcagggagggggacacaggaccctgctgtatgggcatgccgtcctgctgcgccacagtttttcagggatgtatcttacctgcctgacaacttcgaggagtcaaacagataaactcgctttcgatgtggggctccgcgagcatgccacaggcgaagcgtgctggtggactatccaccccgcatcaaagcagcgatccgagggcgaaaaggtcagaattggagatgacctgatcctggtgagtgtgtcatccgagcgttatctgcacttgagcgtatcaaatggcaacatccaggtcgacgctagctttatgcagacattgtggaacgtgcaccccacgtgttctggcagctccatcgaagaggggtacttattagggggtcatgtcgtgaggctctttcatggtcatgacgagtgcttgacgatacccagtaccgaccagaatgattcacagcacagacgcattttttacgaagcagggggcgccgggacccgagctagaagcctctggcgcgtcgagccactgaggatcagttggtctggctcgaacattcggtgggggcaagcgttcaggttacggcacctgactaccggtcattacttagcattgacagaggatcagggcctgattctgcaggaccgagctaagtcggataccaagagtacagctttcagctttagggcctccaaagagctcaaggagaagctggattcttctcacaaaagggacattgaagggatgggggtgccagaaatcaagtacggcgactccgtttgctttgtgcagcacatagcttcagggctgtgggtcacatacaaagcacaggatgcaaagacttctaggctgggtccccttaaaaggaaggtgattctgcatcaagagggacatatggatgatgggttgacactccagcgatgtcaacgagaggagtcacaggctgctagaattatacgcaatacaacagccttattttctcagtttgtgtccggcaacaacaggaccgcagccccgattaccttacccatagaagaggtactccaaacactgcaggacttaatcgcatactttcagcctcccgaagaggaaatgagacatgaggataagcagaacaagctgaggtcccttaagaacagacagaacttgttcaaagaagaaggcatgctcgctttggtgcttaactgcattgataggttgaatgtgtacaatagcgtcgcacacttcgcaggaatcgcaagggaggagagcggcatggcctggaaagagattctcaatctcctgtataagctcctggccgccctcatacgcggtaaccgaaacaattgtgcacagttctctaacaacctggactggcttatctcaaaactggacaggctcgaatcctcaagtgggatcttggaggtgcttcattgcatcctaaccgagagccctgaggccctgaatctcattgcagaaggccacatcaaatccatcatatccctcttggacaagcacggcagaaatcataaggtcctggacattttgtgttctctatgtctgtgcaacggggtcgccgtcagagccaatcaaaatctgatttgcgataatttgctgccccgccgaaacctcctgttgcagactagactgatcaacgacgttacctccatccgtcccaatatcttcttaggagtcgccgaggggtccgcacagtataagaagtggtactttgaacttatcatcgaccaggttgacccttttctcacagctgagcccactcacttgcgggttggttgggcctcctcttcaggctatgcaccttaccccggtggcggggagggttggggagggaatggcgttggggatgatctgtactcctatggttttgacgggttacacctctggtcaggccgcatcccacgggcagtggcaagtattaatcagcatctgcttaggagcgatgacgtggtgagctgttgcctggacctcggcgtcccgtccatctcatttagaatcaacggtcagcctgttcaggggatgtttgaaaatttcaatacagacggtttgttctttcccgtcatgtcgttctcagccggagtcaaggtgaggtttttaatgggcggcagacacggtgaatttaagtttcttcctcccagcggatacgccccttgttatgaggctctactgccaaaggagaaaatgaggctcgagccagtgaaagaatataaacgggacgctgacgggattcgggacttactggggaccacccaattcttgtcacaggccagctttatcccctgccctgttgatactagtcaagtgattctccccccccatcttgagaagatacgggaccggcttgcggaaaatattcacgaactctggggcatgaacaaaatcgagctggggtggactttcgggaaaattagggatgataataagaggcagcacccgtgtcttgtggaattttcaaaattaccagagacagagaagaactataatctgcaaatgtccaccgaaacacttaaaacactgctggccctgggatgccacattgcacatgtgaacccagctgcagaggaagatttaaaaaaagtcaaactgccaaaaaattacatgatgagcaacgggtataagccggctccgctcgatctgagtgacgtaaagttgctccctccacaggaaatcctggtggacaaactggcagagaacgctcataatgtgtgggcgaaggaccggattaaacaagggtggacatacggtatccagcaggacctcaaaaacaagcggaaccctcgattggtcccatacgctcttctggatgaacgtaccaaaaagtctaatagggattctttacgagaggccgtgaggacttttgtgggttatggctacaatattgaaccctccgaccaggaactcgctgattcagccgttgagaaagtgtcaatcgacaaaattcgattcttccgagtggaacgtagctacgctgtgcgcagtggaaaatggtacttcgaattcgaggtagtgactggaggagacatgcgggtaggctgggcacgccctggttgccgcccagacgtcgaactcggggcagacgaccaggccttcgtgtttgagggcaatcggggtcagaggtggcaccaaggcagcggctactttggacggacctggcagcccggtgatgtggtcggttgcatgattaatctcgacgacgcctcaatgatattcaccctgaatggggaactgttaattacgaataaaggttcagagctagcttttgctgactatgaaattgagaatggttttgtaccaatctgctgcctggggctgagccagattggacgcatgaatcttgggaccgacgcatccacctttaagttttatacaatgtgtggtctgcaggagggctttgagccatttgccgtgaacatgaatcgcgacgtcgctatgtggttctcaaaaagattgccgaccttcgtgaacgtgcccaaagatcacccccacattgaagtcatgcgcattgatggcacaatggatagcccaccgtgcctgaaggtgacccacaaaacgttcggcacacagaattcaaacgcagatatgatttattgccgtctgagtatgccggtcgaatgccactcatcattttcacacagcccttgcctcgacagtgaggcattccagaagagaaagcagatgcaggaaatactctcacatacaactactcagtgctattacgccatccggatctttgctggacaggatcctagctgcgtctgggttgggtgggtcacccctgattaccatctgtatagtgaaaagtttgacctcaataagaattgtaccgtcaccgtgaccctcggcgacgagagaggacgagtacatgagagtgtgaagcgctccaattgttatatggtttggggcggagacatagtggctagttctcagcgcagcaaccggagcaatgtcgacctggagatcgggtgtctagtggatttagctatgggtatgctgtccttttccgccaatggtaaggagcttgggacatgctaccaggttgaacctaacacaaaagtcttcccggctgtgttcctgcagccgacttccactagcttgtttcagtttgagctgggaaagctaaaaaacgcaatgccactgagtgctgctatattcagatccgaggaaaaaaaccccgtgccccagtgtccccctaggctcgatgtgcagaccatccagcctgtgttgtggagcagaatgcccaattcatttttgaaagtagaaacggaacgggtttccgagcgccacggatgggtggtccagtgcctggagcctctgcagatgatggccctacatatcccagaagagaacaggtgcgtggacatactcgaactttgcgagcaggaggacctgatgcggttccactatcatacactcagactgtattctgctgtctgcgctctggggaatagtagagtggcgtacgcattgtgctctcacgtcgacctgagccaattgttctatgccatagataataagtacctgcctggactgctacgatccgggttttacgatctgttgatcagcattcacctggcatcagcgaaagaaagaaaactgatgatgaagaacgaatatattatccccatcacttctaccacgcgcaatattcgcctttttcctgacgaaagcaaacggcatgggctcccaggtgtgggactgcggacttgcttaaaacccggattcagattcagtaccccttgcttcgtcgtgaccggcgaggaccaccagaagcagtcgccagaaattcccttggagtcccttaggaccaaggctcttagtatgcttactgaggctgtgcagtgcagcggagcccacatcagggatccagtcggaggcagtgttgagttccaattcgtgcctgtgctaaaactcataggtacactactggtgatgggcgtatttgacgacgacgacgttaggcagattctccttttaatagatccttccgtgtttggcgagcactcagccggaaccgaggagggggccgagaaggaggaagtgactcaggttgaagaaaaggccgtggaggccggcgaaaaagcgggaaaggaggcacccgtgaagggccttcttcagacacgcttaccggaatccgtaaagctgcagatgtgtgaactcctttcctacctatgtgactgtgaattgcaacaccgagttgaagctatcgttgcttttggcgatatctatgtatctaaactacaggccaatcaaaaattcagatataacgaattaatgcaggctcttaatatgagtgcggcactcactgctaggaagaccaaagagttccggagcccgccacaggaacagatcaacatgcttcttaattttcagttgggcgagaattgcccttgtccggaagaaattcgggaagaactctatgatttccatgaagatttgctcctgcactgtggggtccctttggaagaggaggaggaagaagaggaggacacttcttggaccggaaagctgtgtgccttggtgtataagataaagggccccccaaagccagaaaaggagcagcctactgaagaggaggagcggtgcccgacaacgcttaaggagttgatttcccaaacaatgatctgctgggcacaagaggaccagatacaggactccgaactggtaagaatgatgttcaacctgctgaggagacaatatgactccatcggagaactgctgcaggctttgaggaagacctacaccattagtcatacaagcgtcagtgacaccattaacctgctggcagccttgggccagatcaggtcattgctctcagtacgcatggggaaggaggaggagttattaatgattaacggcctgggcgacatcatgaataacaaagtcttctaccagcatcctaacctcatgcgcgtgctgggaatgcatgagactgtgatggaggtgatggtgaacgttctcggaaccgagaagtctcagattgcattccccaagatggttgcgagctgctgcaggtttctgtgctatttctgtcgcatctctagacagaatcagaaggcaatgtttgaacacttgagttaccttctggagaatagctccgtggggctagcgtcacctagcatgcggggttctactcccttggatgtcgctgcatccagcgttatggataataacgagctggccctgagcctggaggagcccgatctggagaaggtcgtgacgtacctagccgggtgtggtcttcagtcatgtccaatgctgctggccaaggggtaccctgatgtgggctggaatccaatcgaaggtgagagatacttgtcattcttacggttcgctgttttcgtcaattcagagagtgtggaagaaaatgctagtgtcgtggttaagctgctgattagacgaccagagtgcttcggccccgccttgcgcggcgaaggcggtaacggtcttctcgcggcaatgcagggcgccataaaaatcagcgaaaatcctgcgctcgatctgccatctcagggctataagagggaagtgagtacaggggatgacgaggaagaagaagagatcgtgcatatgggaaatgccattatgtcattttacagcgcgttaatagacctcctgggaaggtgcgcccccgaaatgcacctcattcagaccggcaagggcgaagctatccggatcaggagcatcctgagaagtctcgtccccaccgaggacctggtggggatcatttccattcctttaaaactcccctcccttaataaagatggtagcgtgtccgagcccgacatggctgccaacttctgccctgatcacaaggcacctatggtactgttcctcgaccgggtttacggcattaaggaccagacattcctcctccacctccttgaggtcggtttcctgcccgacctgcgtgccagcgcgtccctcgatacagtttcactgtcaacaacagaagccgcactggcccttaatcgctatatatgctctgctgtgctcccactgttgacacggtgcgcccccctgttcgcaggcacagagcactgcacatccctgatcgactctacccttcagactatatatcgcctgtccaagggacgttcacttaccaaagcccagagggatactattgaggagtgcctgctcgcaatctgtaatcacttgaggcctagtatgctccaacaactgctaaggagactcgtgttcgacgtgccgcagctgaatgaatattgcaagatgccgttgaagttacttacaaatcactacgagcaatgctggaaatattactgcctaccgtccggttgggggtcgtacggactggcagtcgaggaggagcttcaccttacagaaaaacttttttgggggatctttgactccttgtctcacaaaaagtatgaccccgatctgttccgcatggctcttccttgcctctccgcaattgcaggggccctgcctcccgactacctagatacaagaatcacggccactctcgaaaaacaaatttcggtggacgcagatggaaacttcgaccccaagcctattaacaccatgaatttttctctgcccgagaagttggagtacatcgttaccaagtacgccgagcattcccacgataagtgggcatgcgacaagagtcaatctgggtggaagtatgggatcagcttagatgaaaatgttaagacccatccccttatacgcccctttaaaaccctgactgaaaaggagaaagaaatctaccggtggcctgctcgggagagcctcaagaccatgttagccgtgggttggaccgttgaaaggacgaaggaaggcgaagctctggtccaacagagggaaaacgaaaagctgaggtctgtttcccaggctaaccaagggaatagctactctcccgcaccactcgatctctcgaatgtcgttttgtctagggagctgcagggcatggtcgaggtggtggctgaaaactaccacaacatctgggctaagaaaaagaaactggagcttgagtcaaagggaggtgggtcacatcccctgttggtgccatatgacacacttaccgccaaggagaaattcaaggacagagagaaagcgcaggatctctttaagtttctacaggtgaatggaataatcgtgtcacggggcatgaaggatatggaactcgatgcttcgagcatggagaagagattcgcatataagtttctcaaaaaaatattgaaatacgtagattctgcgcaggaattcatagcccatctcgaagccatcgtcagttcgggaaagacggagaaaagcccacgggaccaggagattaaattttttgccaaggtactgctccccctggtggatcagtacttcacaagccactgcctgtattttctttcttctcctctgaagccgttatcaagctccggttatgcctcccacaaagaaaaggagatggtcgccggtttgttttgcaagctcgctgctctggtacgacaccggatatctctgtttgggtccgattctacaacaatggtaagctgcctccacattttggctcagactcttgacactagaacggtgatgaagagcggttctgaactggtcaaggctggcctgagggccttcttcgagaatgcagcggaggacctggaaaaaactagtgaaaacctgaaactaggtaaatttacccacagccggactcaaataaagggcgtgagccaaaacatcaactataccaccgtggctctgctaccgatccttacctctatcttcgagcatgttacccaacaccagtttggaatggatctcttgctgggcgacgtccagataagttgttaccatatactctgctctctgtactccctaggcacagggaagaacatttacgtggagaggcagagaccagcactcggggaatgcttggcgagtttagcagctgccatcccagtggctttccttgaacccacactgaaccgttataacccgttaagtgtgttcaacactaaaacacctcgcgaaagaagcatacttggaatgcccgacacagtagaagacatgtgccctgatataccccaactggaaggtttgatgaaggagataaatgatttggccgagtccggggccaggtacacagagatgccacatgttatagaggttatcctgccaatgctgtgtaactacctgagctactggtgggagcggggccctgagaatttgccgccctcaactggtccatgttgcacaaaggttaccagcgagcacctctctctgatcttgggaaatatactcaagatcataaataacaatttgggcatcgatgaagccagttggatgaaacgaatcgctgtctacgctcaaccaattattagcaaggccagacctgacctgctgaggtcccatttcatcccaactcttgagaagctgaaaaagaaagcggtcaagaccgtacaggaagaagaacagttaaaagctgatggcaaaggcgatacccaggaggccgagctcctcatcctggacgaatttgcggtgctctgtagagacctttacgccttctaccccatgctgattagatacgtggataacaaccgctccaattggcttaagtccccagatgccgattcagaccaactgttccgcatggtggcagaggtgtttattttgtggtgcaagagccacaactttaaacgagaagagcaaaatttcgtcattcaaaatgaaattaataatctagcattccttactggtgacagcaagtctaagatgtctaaatccggcggccaggaccaggaaagaaagaagacaaagcgtcggggagatctgtattccattcaaacctcgcttatcgtggctgccttgaagaagatgttgcccatcgggctcaatatgtgcactccgggcgatcaggagctgatcagcttggccaagtccagatactcacacagggatacagatgaagaagttagagaacacctgcggaacaacctccacctgcaagagaagtccgacgaccctgctgtcaagtggcagttaaatctgtacaaggacgtgctgaaatctgaggagccgttcaaccctgagaaaacagttgagcgcgtccagagaattagcgccgccgtttttcatctggagcaggtggagcagcccctccgctcaaagaaagcagtgtggcataagttactttccaaacaaagaaagcgagcagtggtggcctgttttagaatggcccccctttacaacctaccccggcacagatccatcaacttgttcctccacggataccaaagattctggattgaaaccgaagagtattcttttgaggaaaagttagttcaagacctggcaaagtctccaaaggtggaagaggaggaagaggaggagaccgagaagcagcccgacccactgcatcagatcattctgtactttagccgcaatgcacttacagaaaggagtaagctggaagacgacccactatatacctcctatagctccatgatggcaaaaagctgtcagtcaggcgaagacgaggaagaggacgaagacaaagagaagaccttcgaagagaaagagatggagaagcagaaaacgctttaccaacaagcccgtctccacgagcgcggagccgccgagatggtgttgcagatgatctctgccagcaagggggagatgagtccaatggtagtcgagaccctcaagctgggtattgctatcctcaatggtgggaatgcaggggtgcagcagaaaatgcttgactatctgaaagagaaaaaggacgccgggttcttccagtccctgagcggactgatgcagtcatgccggtcagtcttggacctgaatgcgtttgagcgccagaacaaagccgaggggctgggtatggtgacagaagagggcaccctgatcgtaagagagcggggagaaaaagtgctgcagaatgatgaatttactagagacctgtttcgctttctgcagctgctttgcgagggccacaattccgactttcagaattttcttagaacacagatgggcaatacaactactgtcaatgtcatcatcagcactgtcgattacctgctccgattacaggagtccatctcggacttctactggtactactctggcaaggacatcattgatgagagtggacagcacaacttctcgaaagcgcttgcagtgaccaagcagatctttaacagcctgactgaatatatccagggcccctgcattgggaaccagcaaagccttgcgcattcccgactgtgggatgccgtggtaggtttccttcacgttttcgcaaatatgcagatgaagttatcccaagactcatcccaaatcgaattgctgaaggagctcttagacctacttcaggatatggtggtgatgctgctttcattactagagggcaacgttgtcaacggaacgatagggaaacaaatggtagacacactggtagaatcctcaactaacgtcgaaatgatcttgaagttttttgatatgtttctgaaactaaaggacttgacgagtagcgacacctttaaggagtatgatcccgacggtaagggaataatctcaaagaaagaattccagaaagccatggagggtcagaagcagtacacccagagtgaaattgatttcctgctttcatgtgctgaggccgacgagaacgatatgttcaattatgtggatttcgtggaccgatttcacgaacccgccaaggatatcggttttaacgtagctgtgttgctgactaacctgagcgagcatatgccgaacgattcgcgactgaagtgcctgctggaccctgcagagagtgtgctgaactacttcgaaccctacctgggaagaattgagataatgggtggcgccaaaaaaattgagcgggtgtacttcgagatcagcgaaagcagtaggactcagtgggaaaagccacaagtgaaggaatccaaaaggcaattcatattcgacgtcgttaatgaggggggcgaacaggaaaaaatggaactattcgttaatttttgtgaggacactatctttgagatgcagcttgccagtcagatcagcgaaagcgatagcgccgacagaccagaggaggaagaagaagatgaggattcttcttacgtgcttgaaatcgccggagaagaggaagaggacggtagcctcgaaccggccagtgcattcgcaatggcctgcgcttcagtaaaacgtaacgtcacagatttcctgaaacgggccacactcaaaaacctgaggaaacagtacaggaatgtgaaaaaaatgactgctaaagagttggtgaaagtgctgtttagtttcttctggatgttgttcgtgggcttattccagctccttttcactatcctcggtggaatatttcagattctctggtctactgtgtttggaggcgggctggtagagggcgcgaagaacattagggtgactaaaattctgggagatatgcctgacccgactcagttcggaattcacgatgacaccatggaggcggaacgcgcggaggtgatggaacccggaatcaccacagagctcgtgcactttatcaagggcgaaaagggagacacggatatcatgtcggacttatttgggctccatccaaagaaagagggatctcttaaacatggaccggaagtcgggttgggggacctgtcagaaattatagggaaagatgagccacccaccctagagagcactgtacaaaaaaagcgcaaagcgcaggctgcggaaatgaaggcggccaacgaggctgagggaaaagtggagtccgagaaggctgacatggaagatggggaaaaagaggacaaagataaagaagaagaacaagcagaatatctgtggaccgaggtgactaagaagaagaaacgacggtgcggtcagaaggtcgagaaaccagaagcatttaccgcaaacttcttcaaaggcctcgagatttaccagactaaactgctccactacttggcccgtaatttctataatctgaggtttctcgccttattcgtggcctttgcaataaacttcatcttgctgttctataaagtcacggaggaacccctggaagaggaaactgaagatgtggcaaacctttggaatagctttaatgatgaagaagaggaagaggcgatggttttcttcgtcctgcaggagtccacaggctatatggccccgaccctgcgggccctcgccatcattcatacgatcatttcgctggtgtgtgtggttggatattattgcctcaaggtaccacttgtggttttcaaacgggagaaagagatcgccagaaaacttgaattcgacggcctatacataaccgagcaacctagtgaggatgatattaagggccagtgggaccggctagttattaatactcctagtttcccaaacaattattgggataaatttgtaaaacggaaggtgatcaacaagtacggcgacctttacggggctgaacgaatcgcagaacttctgggactcgataaaaatgcactagatttcagtccggtggaagagaccaaggccgaggcagccagcctggtcagctggttgtcaagcatcgacatgaagtatcacatatggaaattgggagtggtgttcactgacaactcctttctgtatttagcctggtatactacgatgagtgttctggggcattataacaatttcttctttgccgcccacctcctggatatcgcaatggggttcaagaccctgagaacgattctgagctcagtgacacacaatgggaaacagttggtgctaactgtcggacttctggccgttgttgtttatttgtacacagtggttgctttcaacttcttccggaaattctataataagtctgaggacgacgatgaaccagacatgaaatgcgacgatatgatgacttgttatctttttcacatgtatgttggagttcgagctggcggagggattggcgacgaaatagaagatccagcaggagacccctacgaaatgtatcgtattgttttcgatatcacatttttcttctttgttatcgtcatcctcctggctatcatccagggattaatcattgatgcctttggcgagctgagagatcagcaggaacaggtccgtgaggatatggaaaccaagtgtttcatttgcggtattggcaatgattacttcgacacgaccccgcacggttttgaaactcacacgctccaagagcataatctagcgaactacctgttcttccttatgtaccttattaataaagacgaaacagaacatacaggacaggagagctatgtttggaaaatgtaccaggaaagatgctgggacttttttcccgccggtgattgctttaggaagcagtatgaagaccagctcggatag

SEQ ID NO: 87184 - DNA, 14598 bp, Artificial Sequence
  derived and/or modified sequence
atggccgagggcggcgagggcggcgaggacgagatccagttcctgcgcacagaagacgaagttgtgctccagtgtatcgcaactatccacaaggagcagcgcaagttttgtctggccgcagagggattaggcaatcggctgtgttttctggaaccaacatctgaagcaaaatacatcccaccagatctctgcgtgtgtaatttcgtgctggagcagagcctgtcagtgagagccctgcaggagatgctcgctaacactggagagaatgggggagagggggcagcccagggaggaggacatagaacacttctttatggacacgcagtcctcttgagacattctttttccggaatgtatctcacatgcctcaccacctctcgatcccagacggacaaactcgctttcgatgtcggcctaagagagcacgcaactggtgaagcatgctggtggaccattcatccagcgtccaagcagcggagcgagggtgagaaagtgcgcattggagatgatctgattctggtcagcgtgagctcagagcgatacctgcacctgtctgtaagtaacggcaatatccaggtggatgccagcttcatgcagactctttggaacgtgcacccgacatgctccggctcatctatcgaggagggctacctgctgggcgggcacgtagtgcgtctcttccacggccacgacgagtgcttgacaataccctcaaccgaccagaacgattctcagcacagacggatattctacgaggctggcggagcaggaactagagcaagatcgctgtggcgagtcgagcctctgcggatctcctggtctgggagcaatatcaggtggggccaggcgttcagactacgacatctgactaccggtcattatctggccctgaccgaggatcaggggttgattctgcaggatcgggccaaaagcgacactaagagcaccgccttttcatttagagcgagcaaggagcttaaggagaagttagattcttcccacaaaagggacatcgaagggatgggcgttcctgaaatcaaatatggggatagcgtgtgctttgttcaacacatcgcttccgggctctgggtgacatataaggcgcaagacgcaaagacatctaggttgggtcctcttaaaagaaaggttatattacaccaggaagggcacatggatgatggccttacgctgcagcgctgtcagcgagaggaatcccaagcagcaaggatcatcaggaacactaccgcactattctcacagttcgtgtctggcaacaatcgtaccgctgcaccgataacgctccctatagaagaggtcctgcaaacgctacaggaccttatcgcctactttcagccacccgaggaggaaatgaggcacgaggacaagcagaataaacttcggtcattgaaaaatcggcaaaacctgtttaaggaggagggcatgctagctctggttctaaattgtattgataggctaaacgtatataattcagtcgctcatttcgcgggaattgctcgcgaggaatcaggaatggcatggaaagaaatcctgaatttgctctataaactcttggccgccctgattcggggaaatagaaataactgtgctcagttcagcaacaatcttgactggttaattagtaagttagatagactcgagagctcctccggcatactggaggtactgcactgcattttgaccgagagtccggaagctctgaatttgattgccgagggtcatatcaagtccatcatatcactcttggataagcacggacggaaccataaagtattggatatcctgtgtagcttatgtctctgcaatggcgtggccgtgagggctaaccagaatttgatctgtgataacctgctgcctcgcaggaacctgctgttacagacgcggttgatcaacgatgtgacttcaatccgcccaaacatctttcttggtgtggctgaaggttctgcacagtacaagaagtggtacttcgagcttattattgaccaggtcgaccccttcctgaccgcagagcccacacaccttcgagtcggctgggcctcgtcgtcaggctacgctccttaccccggcggtggcgagggctgggggggcaacggggtgggagatgacttatacagctacggctttgacggtctccacttatggagcggccgtatccctcgggctgtggcctctatcaaccagcacctgctgagatctgacgatgtggtgtcgtgctgcctggaccttggagtgccttccatttctttccggatcaatgggcaacctgtgcagggcatgttcgaaaactttaacactgacggcctgttctttcccgtgatgagctttagtgccggggttaaagtacggtttctgatgggtggtaggcacggcgagttcaaatttctgccacccagcggatatgccccctgttacgaggcactactgccaaaagaaaaaatgaggctggagcctgtgaaggaatacaagcgagacgctgacggtattagagacttgctgggcacaactcagtttcttagccaggccagcttcataccttgccctgtcgatactagccaggttatcttgcctccgcatttagagaaaatacgagatcgtctggccgagaacattcacgagctgtgggggatgaataaaatcgagttaggatggaccttcggcaagattagagatgataataagcgtcagcatccctgtcttgtcgaattctctaaattgccggaaacagaaaaaaactataatctgcaaatgagcacagaaactcttaaaactttgctggccctcgggtgccatattgctcatgttaaccccgcagcggaggaagacctcaagaaagtaaaattgcctaagaattacatgatgagcaacggctataagccagcacccttggacctgagtgatgtcaagctgcttcctccacaggagatcctggtcgataaacttgctgagaacgcgcacaatgtgtgggcaaaggaccgcatcaaacaaggttggacttacggcattcagcaggatctgaagaacaaacggaatccgcggttggtgccttatgcactcctggacgagaggacaaaaaaatcaaatagggattcgctacgtgaggctgtgcgaacatttgtgggctacggttacaatatagagccctcagaccaagaattggccgacagtgctgttgagaaagtgagcattgataaaatccgcttcttcagggttgagcggtcatacgcagtgcgaagtggaaaatggtactttgagtttgaggtcgtgacaggcggcgatatgcgcgtcggttgggccagacctggatgtcgccctgacgtggagctgggcgcagacgatcaggcattcgtcttcgaagggaaccgcggccaacggtggcaccagggcagcggatattttggtcgaacgtggcagcccggagatgtggttggctgcatgatcaatctggatgacgctagcatgatctttacccttaatggagaattactgatcactaacaagggcagtgaactggcattcgccgactatgagatcgaaaacggcttcgtgccgatttgctgtttggggctgtcccagattggtcgaatgaacctcggcactgatgctagcacatttaagttctatacaatgtgtggccttcaagaaggtttcgaaccttttgcggtgaacatgaatcgcgacgtggccatgtggtttagcaagcgactgccgacctttgtaaatgttccaaaggaccacccacatattgaagtgatgcggatcgatggcacgatggattctcccccttgtctgaaggtgacacacaaaacatttggaacacagaacagcaatgccgatatgatctactgtcggctatcgatgccagtggagtgccatagttcattctctcatagcccgtgtcttgatagcgaggcgtttcagaagcgcaagcagatgcaggaaattctgtctcacacaaccactcagtgttactacgccatcaggattttcgcaggtcaggatcctagctgtgtctgggttggctgggtaacgccagactatcatctttatagtgaaaaatttgacctcaacaagaattgtactgtcacggtcacactaggcgacgagcgggggcgggtgcacgagtcggtgaaaaggtcaaactgttatatggtatggggcggcgacattgtggcttcttcacagcgaagtaaccgttctaacgtggatctggagatcgggtgtctggttgatcttgctatgggcatgctgagcttcagcgccaacggaaaggagctgggtacttgctaccaggtggaaccgaatactaaggtctttccagccgtctttctgcagccgacaagtactagcctatttcagtttgagttaggcaagctgaagaacgccatgcccttatcggctgccatttttcgcagtgaggagaaaaaccctgttccgcagtgccctccgcgtctggacgtgcaaaccatccagcccgtactgtggtccaggatgccaaattctttcttgaaggtggaaaccgaaagggtgagtgagaggcatggctgggtggtccagtgcctcgaaccactgcagatgatggccctgcacattcccgaggagaatcgatgcgtggacattctcgagctgtgtgaacaggaagacctgatgaggttccattatcacacactcaggctgtactccgccgtgtgcgcccttgggaacagccgcgtcgcgtatgcattatgttcacatgtcgatctctcccagctattctacgccattgacaataagtatttgccaggactcttgcgcagcggtttttatgatctgctcatttctatccacctggcttctgctaaggaaagaaagctcatgatgaaaaacgagtatatcattcctattactagcacaactagaaatatcaggctgttcccagacgagtcgaaaagacacggcttacctggtgtcggcctgaggacatgcctaaagccaggatttcgcttcagtaccccatgctttgtggtcacaggagaagaccaccagaaacagagtccagagatccccctcgagagccttaggaccaaggccttgtccatgctcaccgaagcggtccaatgctctggagctcacataagagaccctgtcggaggatctgtcgagttccagttcgtgcccgtcctgaagctgatagggacactgctcgtgatgggtgtgttcgatgacgacgatgtccggcagattctcctgctcatcgatccaagcgttttcggagaacactctgctggaacagaggagggcgccgagaaggaagaggtgacacaggtcgaggagaaggcagtggaggcaggagaaaaagccggcaaggaggcccccgtgaagggtctcctccagacacgtctgcctgagtctgtgaaacttcaaatgtgcgaattgctgtcttatctgtgcgactgtgagctccagcaccgggtggaggctattgtcgcctttggggatatatacgtttcgaagctgcaggccaatcagaagtttcgatataatgagctcatgcaagccctcaacatgtccgccgccctgaccgcccggaagaccaaggagttcagaagccctcctcaagaacaaataaatatgctgctgaatttccagctcggagaaaattgcccttgccccgaggagattagggaagaactttacgacttccatgaagacttgctccttcactgcggcgtccctttggaagaggaagaagaggaggaagaagatacctcatggacaggtaagctttgtgccctcgtttataagattaaaggaccacccaagccggagaaagagcagccaaccgaagaggaggaaagatgccccacaacactcaaagagctgatctcccaaactatgatctgctgggctcaggaggaccaaatccaggattccgaattagttaggatgatgtttaatctgctaaggcgacagtatgactccattggggaacttttacaggcgctgagaaaaacatacacaataagccacacatccgtttccgatacaatcaatctgctggccgctctgggccagattcggtcacttctgtcggtgcgcatgggcaaggaggaggagctgttgatgatcaatgggcttggagacatcatgaataacaaggtgttctaccagcaccccaacctcatgagggtcctgggcatgcatgaaacagtgatggaagtcatggtgaacgttctcgggaccgaaaagtcccaaatcgcgttccctaagatggtggcttcgtgctgcagatttctgtgctacttttgcagaatctctcgccaaaaccaaaaggctatgttcgagcatttgtcttacctcctcgagaattcatcagtgggccttgccagcccaagcatgagggggtcaacccctcttgatgtcgctgcttcatccgtaatggacaataacgagttagccctatctcttgaggaacccgatttggagaaggttgtgacttatctggcaggctgtggacttcagagttgtccaatgcttcttgcaaaagggtatcccgatgtgggatggaatcctattgaaggcgaacgctacttgtcatttctgagatttgcagtgttcgttaactcagaaagtgttgaagagaatgcaagtgtcgtcgtgaagctccttatcagaaggccggaatgtttcggaccggccctccgcggtgaaggaggtaatgggctgctggcagccatgcagggagctattaaaatcagcgagaaccccgcacttgatctgccttcacagggttataaacgggaagtgagtaccggagacgatgaagaagaggaagaaattgttcacatggggaatgctattatgagtttttatagtgcactgattgatctattgggacgttgtgcaccggaaatgcacctgattcagaccggtaaaggcgaagccattagaattcgctctatcctacggagtctggtaccgaccgaggacctcgtgggcatcattagcatacctctaaaactcccttccctgaataaggatggctcagtgagcgagcctgacatggccgccaatttctgccccgaccataaggccccgatggtcttattcctcgatcgcgtgtacgggataaaagaccaaacgtttctgctgcacctcctggaagttggattcctaccagacctgagggcctccgcatcattagatactgtgtcactatccacgaccgaggctgcccttgctcttaaccgatacatttgttccgccgttctgccacttctgactagatgtgctcccctgttcgctggaaccgaacactgtacatctttgatcgatagcactttgcagaccatttacagactatccaagggccggtctctaacaaaagcccagcgggacaccatagaggagtgcctcctggcaatctgtaaccacttgaggccatccatgttacaacaacttctcaggcgactggtattcgacgttcctcaactgaacgagtactgcaagatgccactgaaactgctaacaaaccattacgagcagtgctggaagtactattgtttgcccagtggttggggatcatacggcttggcggtggaggaagagttgcacctaacggagaagcttttctggggcatttttgatagcctgagtcataagaagtacgatcccgacctcttccgaatggccctgccttgtttgtctgctatcgccggagcactgcctccagattaccttgatacccgaattaccgctaccctcgaaaagcagatcagcgtcgacgcggacgggaacttcgaccccaagcccattaacactatgaatttttcactgccagaaaagctggagtacatcgttactaaatatgccgagcattcacacgacaaatgggcttgcgacaagagccagtctggttggaaatatggcatctccttggacgaaaatgtaaagacccatccactgatccggccgttcaaaacattgaccgagaaggagaaagagatttatcggtggcccgctagggaatccctgaagaccatgcttgcggtgggctggaccgtggagagaactaaagaaggggaggccttggtccaacagagagaaaacgagaagctcagatctgtgtcccaagcaaaccagggtaatagttacagtcctgctccactggatttgagcaatgtggttctaagccgggaactgcaaggaatggtcgaggttgtggcagaaaattatcataatatttgggcgaaaaaaaaaaagctggagttggaatccaaaggaggcgggagccaccccctgcttgttccttacgacacgttgaccgcgaaggagaagtttaaagaccgagaaaaggctcaggatctgtttaaattcctgcaagtgaacggcattatagtgtctcggggcatgaaggacatggaactggatgcttcgtccatggaaaagcgatttgcctataaattccttaagaagatccttaaatatgtagacagcgcccaagagtttattgcgcatctggaagcaatcgtaagtagcgggaagactgagaagtctccacgcgaccaagaaatcaaattcttcgccaaggtcctgctgccgctcgtcgaccaatatttcactagccactgtctctatttcctctctagtccattgaagcctctctcctcttcaggctacgcctcccacaaagagaaggaaatggtcgcaggactcttctgcaaactggctgctttggtgcggcataggatatctctctttggctcagacagtacaacaatggtctcttgtcttcacatattggcccagactctggacactaggaccgtcatgaaaagcggatcagaacttgttaaggcagggctgcgcgcgttcttcgaaaatgctgcagaagacctcgagaaaacctctgagaatctaaagctgggcaaattcactcattcccgcactcagattaaaggtgtgtcccagaacattaattatactacagtcgcattactgcctatcctgaccagcatatttgagcatgtaacccaacaccagttcggcatggacctgctcttgggagacgttcaaatttcatgctaccacattctgtgttctttgtacagcctcggaacaggcaagaacatttacgtcgagcgtcagaggcctgctctgggggaatgcttagctagcctggctgccgcaatccctgtggcctttctggagcctactctgaatcggtataaccccctgagcgtgttcaataccaaaacacctcgtgaacgaagtatcctggggatgccagacactgtcgaagacatgtgtcctgatatcccccagttagagggcctaatgaaggaaattaacgatctggctgagagcggcgcacggtacacggagatgccacatgttattgaagtcatcctgcccatgctctgtaactatctgtcctactggtgggagcgcggaccagaaaacctgccgccttccaccggaccctgctgtaccaaagtgacttctgagcacctgagcttgatcctcggaaatattctgaaaattataaacaacaatctgggcatcgatgaagcaagctggatgaaacgtatagccgtatacgctcagccgataattagcaaagccaggccagaccttctgaggtcgcatttcatacctactttggagaagctgaaaaaaaaggcggtgaagactgtgcaggaagaagagcaattgaaggcagacgggaagggtgacacgcaggaggccgaactgctgattcttgacgaatttgccgtcctctgtcgggacctgtatgcgttctatccaatgctgatccgttacgttgacaataaccggagtaactggcttaagagtccagatgctgatagcgatcagctatttcgcatggtagccgaagtgttcatactatggtgcaagagtcataactttaaaagggaagagcagaactttgtgatccagaatgagatcaataatctcgcgtttcttacaggagattcaaagagcaagatgtccaagagtggcggccaagatcaggagaggaagaaaacaaagcgccggggggacctctattctattcagaccagcctgattgtggctgcgctgaaaaaaatgctgcccatcggacttaatatgtgtactccaggagatcaggagctaatcagcttggccaaaagtaggtattcccatagggacactgatgaagaggtacgggagcacctcaggaataacctgcacttgcaagaaaagagcgatgatcccgccgtcaaatggcagctgaacctttacaaagatgttctcaagtctgaagagcccttcaacccagagaagacagtggagcgggtccagagaattagcgcagccgtttttcatctggagcaggttgaacaaccactgaggtccaaaaaagcagtctggcacaaactcctctccaagcagaggaagagggcggtggtggcttgtttccgaatggctcctctctacaaccttcccaggcatcggagcatcaatttgttcctgcatggatatcagaggttttggatcgagaccgaggaatattcttttgaagagaagctggtacaggatttagccaaaagcccaaaagtcgaggaagaagaggaggaggaaaccgagaaacagcctgatcctctccaccagatcatcctttatttttctaggaacgctttaaccgagaggtctaaactagaagatgatcccctgtatacctcttactcctctatgatggccaagtcctgccagtctggagaagacgaggaggaagatgaagacaaggagaaaacgttcgaggagaaggaaatggagaaacagaaaaccctctaccaacaggcacgcctgcatgaaagaggcgccgcagagatggtgctgcagatgatttctgcctcgaaaggtgagatgtcaccaatggtggtggaaactctgaaacttggcattgccatcttaaacggaggcaacgccggagtgcaacagaaaatgttagactacctgaaagaaaaaaaagacgccggcttctttcagtccctaagcggtctcatgcaatcttgctctgttctggacctcaacgcattcgagcggcagaataaggctgaagggttaggcatggtaaccgaggaggggacgttaatagtgcgggagcgcggcgaaaaggttttgcagaacgacgaattcactagagatctcttccgtttcttgcaacttctgtgtgagggccacaactctgattttcaaaacttcttaaggacccagatgggcaacacgactactgttaacgtgataatctctaccgtggactatctgttacggttgcaggagtccatttctgacttctactggtactatagcggcaaggatattattgacgagagcggccagcacaacttttccaaagctctggccgtgaccaagcagatctttaacagtcttacagagtacattcaaggaccatgtattggtaatcagcagtccctcgcgcactctcgcctgtgggacgccgtcgtgggattcctgcacgtgtttgccaatatgcagatgaaactcagccaggatagctctcagattgaactacttaaggagcttctcgatctcctgcaggacatggtcgtcatgctgttgagtctgctagaggggaatgtggtgaatgggaccataggaaaacaaatggtggacacattagtggagagcagcactaatgttgagatgatcctgaagttctttgatatgtttctcaagcttaaggacttgacttctagcgacacatttaaggaatacgaccccgatggaaagggcatcattagcaaaaaggagttccagaaggccatggaagggcagaagcagtatacccagagcgagattgatttcctcctctcctgtgctgaagcagacgaaaatgacatgttcaactacgtagacttcgtggatcgattccacgaacctgccaaagacattggctttaatgttgcagtcctcttaacaaacttgagcgagcatatgcccaatgactctcgattaaagtgtttgctggacccggccgaatcagtgctgaactactttgagccttacttgggaaggatcgaaattatgggtggcgccaaaaagatcgagcgcgtttacttcgagatttctgagtcgtctagaacacagtgggagaagccccaagtcaaggagtcaaaaagacaattcattttcgatgtcgttaatgaaggaggcgaacaagaaaaaatggagctctttgtgaatttttgtgaggatacaattttcgagatgcagctggcaagtcaaattagcgaaagtgactccgccgatagacccgaggaggaggaggaggacgaagattcgtcatatgttctggagattgccggggaggaggaagaggacggttctctcgaacccgcctcagcttttgccatggcctgtgcaagcgtcaaacggaatgtgactgattttctgaagcgggcgacactcaagaaccttcggaagcagtacaggaatgtcaaaaaaatgactgctaaggagctggtgaaggtcctgttcagtttcttttggatgctgttcgtgggcctttttcaactactgttcactatcctgggaggcatctttcagattctttggagtaccgtgttcgggggaggactggtggagggcgccaagaacatccgggtgactaaaatcctcggtgacatgccagaccctacccagtttggaattcatgacgacaccatggaggctgagcgggccgaagtcatggagcctgggattaccactgaattagttcattttataaagggagaaaagggtgataccgatattatgagcgacttatttggcctccatccaaaaaaagagggttctttgaaacatggaccagaggtcggcctgggggatctgtcagaaatcatcgggaaagatgagcccccaacattggaaagtactgtccaaaaaaagagaaaggctcaggcagcagagatgaaagcagctaacgaggccgagggcaaagtggagtcagaaaaggcagatatggaggacggcgagaaggaggataaagacaaggaggaggaacaggcagaatacctgtggactgaggtcaccaagaaaaagaagcgccggtgcggtcagaaggtcgaaaaaccggaggcttttaccgctaacttctttaagggactggaaatctatcagactaaactgctacattacctagccaggaatttttacaacttaaggttcctagctctgtttgtggcctttgccattaattttatcctcctgttttacaaggtgaccgaggagccgctggaagaggagaccgaggatgtcgctaacctgtggaattccttcaatgatgaggaagaagaagaggccatggtgttctttgtccttcaggagagcaccggatacatggcccctacactgcgcgccctcgcaatcatccatactattatcagtctagtttgcgtagtgggatattattgcctgaaagtgccactggtggtattcaaacgcgaaaaagagatcgcaaggaagctcgaattcgatggcctgtacatcacagaacagccatcggaggatgatattaaaggacagtgggaccgtctggtgatcaataccccctcctttcctaacaattactgggacaagtttgtaaaacgcaaagttattaataaatacggcgacctttacggtgctgaaaggattgctgagctcctggggctggataaaaacgccctcgatttcagccctgtggaggaaaccaaagccgaggcagcgagtttggtatcctggctttcgtcaattgatatgaagtaccatatctggaaactcggtgtggtctttactgataacagcttcctttacctggcctggtacactactatgagtgtgttaggtcactataacaatttttttttcgccgcccacctcctggacattgccatgggctttaagactttgcggactattctgagctccgtgacacataatgggaagcagttggtcctgacagtcggtctgttggctgtcgttgtctatctgtatactgttgtagcattcaattttttccgcaagttctacaacaagagcgaggatgacgacgagcctgacatgaaatgcgacgatatgatgacctgttatctttttcatatgtatgtgggcgtgagagctggcggcggtatcggtgatgaaattgaagaccctgccggggatccctacgagatgtaccggatcgtgtttgacattacctttttcttttttgtgatcgtgatattgctggcaattatccagggtctgatcattgatgccttcggggagctgcgcgatcagcaggagcaggtgagagaggatatggagactaagtgcttcatttgcggaattggcaatgactactttgatacaacaccacacggttttgagacccacacactgcaggaacataacctggccaattatctgttcttccttatgtatttaattaacaaagatgaaacggaacacactggacaagagagctatgtctggaagatgtaccaggaaaggtgctgggacttcttccctgccggcgattgcttcagaaaacagtatgaggatcagctggggtag

SEQ ID NO: 87185 - DNA, 14601 bp, Artificial Sequence
  derived and/or modified sequence
atggcagaactcggagggggtggagaagaagatgccaggtggtaccggaaggaagacgaggttgtgttacagtgcatcgctaccatccacaaggagcagcgcaaattctgtctagcggctgagggacttggcaatcgactctgctttcttgagcccacgagcgaggcgaagtacattcctcctgatttgtgtgtgtgcaatttcgtcctcgagcagtctctctcggtgcgcgctctgcaagagatgctcgccaatacaggcgagaacgggggagaaggcgcagcacagggagggggacaccgcactttactgtacgggcacgccgtgctgttgagacacagcttctccggaatgtatttgacttgtctgactactagtcggagccagaccgataaactggccttcgacgtcggactccgggaacacgctactggggaggcttgctggtggaccatccatcctgcttctaaacagagatccgagggcgagaaggtaaggatcggggatgacctgatcttagttagcgtttcttccgagcggtaccttcacctgtcagtgagcaatggaaacatccaggtcgatgctagctttatgcagacactgtggaacgtgcatcccacttgtagcggctcttcgattgaagaggggtatctgttaggtggacatgtcgtgcggcttttccatggtcacgacgaatgtctgactatcccatccaccgaccagaatgactcccagcatcggagaattttctatgaggcaggaggtgctggaactagagcacggagcctatggcgagtagagccactgcggatttcctggagcgggagcaacattcgctgggggcaggcattcaggctgcgacacctgactaccggccattacctggctctcacagaagatcaaggcctcatcctgcaggacagggccaaatctgacacgaaatccacagcgttttcatttcgcgcaagcaaggaattaaaggagaaattggacagttctcataagagagacatcgaaggcatgggtgtccctgagatcaaatatggcgacagcgtgtgctttgttcagcacattgcctctgggctttgggttacatataaagcccaggatgctaagacatcacgcctcggcccactgaaacggaaggtgatcctgcatcaggaaggacatatggacgacggtctgacccttcaaaggtgtcagcgggaggagtcccaagccgctaggatcattcggaatacgactgccctcttctcacaattcgtgtctggaaacaataggaccgcagccccaatcaccctacctatcgaggaagttttgcagacgttacaggacctgatagcatacttccagcctcccgaagaagagatgcgccacgaggacaaacagaataaattgaggagtctcaaaaacaggcagaacctttttaaggaggagggtatgttggccctcgtcctgaattgcatcgaccgactcaatgtttataatagtgtcgcacatttcgccggaattgcgagggaggaaagcggcatggcttggaaagagatcctcaatctgctttacaagcttctcgcagcattaatccggggtaataggaacaactgcgcccagttttctaataacctcgactggctcatttcaaagttggataggcttgaaagctcttcagggatactcgaagtcctacactgcattctaactgagagtcctgaggctttgaatctgatagccgagggtcacattaaaagcattatatcactgctagacaaacatggtcgcaatcataaagtactggacattctgtgcagcctctgtctgtgcaatggggtggcagtgcgtgccaatcagaacctgatttgcgacaacctgttgcctcgacggaaccttttattgcagacgaggttgattaacgacgtgacgagcattcgccctaacatttttctgggggttgcagagggtagtgctcagtacaaaaagtggtactttgagctaatcattgaccaagtagatccctttctcactgccgaaccaacacacctgcgagtcggttgggccagctctagtggttacgctccataccctggtggcggagaggggtggggaggaaatggcgtaggggacgatctgtattcttacggtttcgatggcctgcatctgtggtctggaagaattccccgtgccgtcgcctctattaatcaacacctactccgcagtgatgatgtcgtgtcctgttgcctagacttgggggtccctagcatttctttccgtattaacggtcagccggtgcagggaatgtttgagaatttcaatacggatggtctctttttccctgtgatgtccttttcagcaggcgtgaaagtccgcttcctgatggggggtcggcacggagaattcaaattcctgcccccaagtggttacgcaccctgctatgaggctctactacccaaggagaagatgagacttgaacccgttaaagaatacaagagagacgccgacggtatcagggatctattggggaccacacagtttctttcacaggccagcttcattccgtgtccagtcgatacatcccaggtgatcctgccaccccacttggagaagatcagagacaggttggccgaaaatatacacgaattgtggggaatgaataagattgaactgggatggacattcggcaagattagggacgacaataaacgacaacatccgtgccttgtggagttctccaagctgcctgaaaccgaaaagaattacaacctacagatgagtactgaaactttgaagactctcttagccttagggtgccacatcgctcacgtcaatcccgcagcggaagaggatctcaagaaggtgaaactgcccaagaattatatgatgtccaacggatataagccagcccctctggacctgagcgatgtaaaactcctccccccacaggagattctggtcgataaactggcggaaaacgctcacaacgtgtgggccaaagaccgtatcaaacagggttggacctatggaattcaacaggacttgaaaaataaacgtaatcccagactcgtcccctatgccctcctcgatgagaggacaaaaaagagcaaccgggacagcctgagggaagccgtccggaccttcgtgggatatggctacaatatagagccatcagatcaggagcttgccgattctgcagtggagaaggttagcatcgacaagatacgcttttttcgggttgagagatcttacgccgtccggtccgggaagtggtactttgagtttgaggttgtgacaggaggggatatgcgcgtggggtgggcccgaccgggatgtcgaccagatgtcgaactaggcgctgacgaccaagcattcgtgtttgaagggaaccgcggtcagagatggcatcagggttctggttacttcgggcgaacttggcagcctggagacgtggtggggtgtatgattaacttagatgacgcaagtatgatttttaccctgaacggagagctgctaataactaataaaggcagcgaactcgcgttcgcagactacgaaatcgagaacggattcgtgcctatctgttgcctcgggctgtcccagatcggtcgcatgaacctcggtacggacgcgtctacatttaaattttatactatgtgtggactacaggaggggttcgagccgttcgcggtgaacatgaaccgcgatgtagcaatgtggtttagtaagcggctacccaccttcgtgaacgtccctaaagaccaccctcatatcgaagtcatgcggattgacggcactatggatagccccccatgtctgaaagtgacgcataaaacattcggaacacagaattccaatgcagatatgatatattgtagattgtctatgcccgtggagtgccactcttcctttagccacagcccctgtcttgacagtgaagctttccaaaagagaaagcagatgcaggaaatcctgtcccatacgactacccagtgctactatgcaatccggattttcgccggacaggaccccagctgtgtgtgggttggatgggtaactcccgactatcatttatactccgaaaaatttgatctaaacaagaactgtactgttacagtgaccctcggggatgaacgcggacgggtgcatgagagcgtgaagcgcagcaattgttacatggtatgggggggtgacatcgtcgcgtcttcacaacggtcaaacaggagtaacgtggacctggagatcggatgcctggtggatctcgccatgggaatgctgagcttcagtgccaatggtaaagagctgggcacatgctaccaggttgagcccaacactaaagtgttcccagcagtgttcctacaacccacctccacctcactctttcaattcgaattagggaagctaaaaaacgcgatgccactatctgccgctatctttagatctgaggagaagaatccagtcccacagtgtccgcctaggcttgacgtgcagactatccagcccgtcttatggagcaggatgccaaatagcttcctgaaggtggagacagaacgtgtaagtgagagacatggttgggttgtccagtgtctggagcccttgcagatgatggcgctccacatcccagaggagaacaggtgtgtcgatatattagagctgtgtgaacaagaggacttgatgagattccactaccacactttacgactatatagtgctgtatgtgccctgggtaattcgagagtcgcttatgctttgtgctctcatgtagacctctcccagctattctacgccattgacaacaagtatctgccaggtctcctgcgctccggattttacgatctgctgatcagcatacacttggcgagcgctaaggagcggaagctgatgatgaagaatgagtatattataccaatcacttctactacaagaaatatcaggttgttccctgatgaaagtaaaagacacggcctgccaggcgtcgggctgcgcacctgcttaaagccaggtttccgcttttctactccttgtttcgtcgtaacaggtgaagatcatcagaaacaatctcctgagattcccctggaaagcctgaggaccaaggctctgtctatgcttacagaggccgtgcagtgcagtggggcacatatccgcgaccccgtgggcggttccgtggaattccagtttgttcctgtcctgaaacttattgggacattgttggtgatgggggtgttcgatgatgatgatgtaaggcagattctgctgctgatcgatcctagcgtgttcggggaacatagtgccggtactgaagagggggctgaaaaggaagaggtgacccaggttgaagaaaaggcagtggaggctggcgaaaaggccggaaaggaggcgcctgtcaaaggtttgctccagaccagattgcctgaaagcgtgaaactgcagatgtgtgagctgctttcttacctttgcgactgcgagctgcaacacagggttgaggccatcgtggcctttggggacatctacgtatctaaactgcaagccaaccagaagttcaggtacaacgagctcatgcaggctctgaatatgagtgcggctctgactgctcgaaagacgaaggagtttcggtctccaccccaggaacagatcaatatgctgcttaacttccagttaggcgagaattgtccatgccccgaagaaattcgggaggagctgtatgattttcacgaagacctccttttgcattgtggagtcccactagaagaagaggaggaagaagaggaggatacttcgtggactgggaagctctgcgcactggtatataagatcaaaggcccaccgaagccggaaaaagaacagcctaccgaggaggaggagcgttgccccacaactctgaaagaactcattagtcagaccatgatttgctgggctcaggaagatcagattcaggactccgaattggtacgaatgatgtttaatcttctgcgtcggcagtacgattccattggtgagctcctgcaggcactgcggaaaacttacaccatctcccacacatccgtttcggacaccataaatttgctggctgcattggggcagatccggtcactgctctcagttcgcatgggtaaggaggaagaactccttatgataaacggcctgggagacatcatgaacaataaggtcttttaccagcatcccaatctaatgcgggtacttggcatgcatgagacagtgatggaggtgatggtgaacgtcctgggcaccgagaaatcccaaattgccttcccaaagatggttgcttcctgctgccggtttctgtgctatttttgcagaatttcgagacaaaatcagaaggcaatgtttgagcatctctcataccttctagaaaatagttccgtgggcctagctagcccctcaatgagggggagtacccccttggatgtggccgcttcctcggtgatggacaataacgagctcgccttgagcctggaagagcccgatctggaaaaagtcgtgacttatctggcaggatgtgggttacaaagttgccctatgctgctggctaaaggctaccccgacgtcggttggaacccaatagagggagagcgatacctgagcttcctgaggtttgccgttttcgtcaactcagaatccgtggaagagaacgccagcgtagtcgttaagcttctgatcaggcggccagaatgtttcggacctgcactcagaggagaaggagggaacgggctgctggcagctatgcagggcgctatcaaaatctcggagaatcctgccctggatcttccctcacagggttataaaagggaggtcagtactggagacgatgaggaggaggaggaaatcgtgcatatggggaacgccataatgagcttttactcagcccttatcgacttgctgggccgatgtgccccagagatgcaccttattcagacaggaaaaggtgaagcaatccgtatcaggtcaattttacggagcctcgtgcctactgaagaccttgtgggcattatctctatccctctaaagctgccatccttgaataaagatggctccgtgtctgagcccgacatggctgctaacttttgcccagatcacaaggctcctatggtactgtttctggaccgcgtgtatggaattaaagaccagactttcctgttgcatcttttggaagtgggatttcttccagacctgcgcgcaagcgctagtctggatactgtgtccttaagtacaacagaggcagcactggcactgaaccggtacatctgctctgccgtgctcccactgcttaccaggtgtgcgcctctgttcgctggcacagaacactgcaccagtctgatcgacagtaccttgcagactatttacagactcagtaaggggaggtcgttgacaaaggcccagagggacaccatcgaagaatgcttattagctatttgcaatcatctgcggccatccatgctgcagcagttacttcggagattagtctttgacgtccctcagctcaatgagtactgcaagatgcctttgaagctgttgactaatcattatgaacagtgttggaagtactattgtctgccttctgggtggggttcatacggactagcagtagaggaagagctgcacctgaccgaaaagctgttctggggcatctttgactcactgtcacataaaaaatatgatcccgacctgttccgcatggcactcccttgtctgtccgcaatcgctggggcactgccgccagattatttggatacgaggattaccgcaactttagaaaagcagatatcggtcgatgcagacggcaactttgaccctaagccaattaataccatgaacttctcccttcccgagaaactggagtacatcgtgaccaaatacgctgaacacagccacgataagtgggcttgcgataaatcacagagcggttggaagtacgggatctcacttgatgaaaatgtgaaaacccatcccctcattaggccctttaaaactctgaccgaaaaagaaaaggaaatttataggtggcccgcacgtgaaagcctcaagaccatgctcgctgtcgggtggaccgttgagcgcacgaaggagggagaagcacttgtgcaacaacgagaaaatgaaaaactgagatcagtctcccaggcaaatcaaggtaattcctacagtcccgcacctctcgatctgagcaatgttgtactgagccgcgaactgcagggcatggttgaagtggtggcagaaaactatcataatatctgggctaagaagaagaagctcgaactggagagtaagggcggagggagtcaccccttactggtgccttacgatacacttacagctaaggagaaattcaaggacagggagaaggctcaggacctcttcaagtttctgcaggtgaacggcatcatcgtgtctcgcggaatgaaagacatggagctggatgcatccagcatggagaagcggtttgcctataaattcctgaagaaaatactgaagtacgtggactctgctcaggagtttattgctcacttggaagccatcgtgagttctggaaaaaccgagaagagcccaagggaccaggaaatcaaattctttgccaaggtgttgctgccactggtggaccaatactttacttctcactgtctgtactttctgagctcacccctgaaacctctgagttcctccggctacgcaagtcataaagaaaaagagatggtggccggactgttttgcaagctagccgcactcgtgagacatcgcattagcctctttggttctgactcaacgactatggtctcgtgcctgcacattctggctcagactctggatacccggactgtgatgaaatcggggtcagaattagtaaaggccggtctcagagcattttttgaaaacgccgcagaggatctggagaaaaccagcgaaaaccttaagcttggaaagttcacgcattcacggacccagatcaagggggtgtcccaaaacattaactacactacagttgcactgttacccatcttaacttccatattcgagcatgttacccaacaccaattcggaatggacttactgctcggcgacgtacagatttcctgttaccatattctctgctccctgtacagcctcggtaccggtaaaaatatctatgtggagcgtcagaggcccgctctgggggaatgccttgcatctctggccgctgcgattcctgtcgctttcttggagcctaccctcaacagatacaaccctcttagcgtttttaacacaaaaacgccacgcgagaggtcaatactcggcatgcccgatacagtcgaggatatgtgtcctgacattccacagctagaagggctgatgaaagagataaatgatctggctgagtctggcgcacgctatacagaaatgcctcacgtgatcgaggtgattcttccaatgctctgtaactatctgagctactggtgggaacggggacctgagaatttgcctcccagtaccggcccttgttgtacaaaggtaacctctgagcacctttccctgatcctgggaaacattctcaagatcatcaacaacaacctcgggattgatgaagctagttggatgaagcggatcgctgtgtatgcccaacctatcattagcaaagcacgccctgacctgctgagatcgcactttatcccgaccctcgagaagctgaagaagaaggccgtcaaaacagtgcaggaggaggaacagcttaaagccgatggaaaaggcgatactcaagaggctgagctcctgatactcgatgaattcgcagttctctgtcgagacctgtacgctttctatcctatgctgatcaggtatgtggacaataacagatctaattggctcaagagccctgacgcagactccgatcagctgttccgcatggtggcagaagttttcatcctatggtgcaagtcccataactttaaacgggaggagcagaacttcgtgatccagaacgagattaacaatctcgcatttctgacaggcgacagcaaatctaaaatgtctaaatcggggggacaagatcaagagcgcaaaaagaccaaacgacgtggagacctctacagcatacaaacctcccttatagtggccgcactgaaaaaaatgctaccaatcggcttgaacatgtgtacgcctggagatcaggaattaatctccctagcaaagtctaggtatagccatagagatacggacgaggaagtgcgcgaacatcttcgcaacaacttgcacctccaggagaagtcggacgatccagcggtgaaatggcagctgaatctatataaggacgtgcttaagagcgaagaacccttcaacccagaaaaaactgttgagcgggtgcagcgcattagcgctgccgtctttcacctggagcaggtggagcagccccttaggagcaagaaggctgtatggcacaaacttcttagtaagcagcgcaagcgcgctgtggtggcctgttttcgtatggccccactatacaacctgcctaggcacaggtctataaatctcttcttgcatggttatcagagattttggatagagaccgaggagtacagctttgaagaaaaactggtacaggatctggccaaatcccccaaagtcgaagaggaggaagaggaggagacagaaaaacagcccgacccccttcatcagatcatcctctacttctctcgaaatgccttgacagagcgaagcaaactcgaggacgatccgctgtacacgtcctattcctcgatgatggctaagagttgccagtcaggggaagacgaggaagaagatgaagataaagaaaaaacattcgaggaaaaggagatggaaaagcagaagacactgtaccaacaggccaggctccacgagaggggcgctgctgaaatggtactccagatgattagtgcgagcaagggagagatgtcaccgatggtggtggaaaccttaaagttagggatagccatcctgaacgggggtaacgcgggagtccagcagaagatgctggactatttgaaagaaaaaaaagatgcaggattttttcagagtctgtcaggactgatgcaaagctgcagaagcgtgttggatcttaatgcctttgagaggcagaataaggccgagggattaggaatggtcaccgaagagggaaccctgatcgtgcgcgaaagaggagaaaaggtcctgcagaacgatgaatttactcgagacctgttcagattcctacaacttctgtgcgagggccataatagcgattttcagaacttcctccggacacagatgggtaacaccacgacggttaacgttatcattagtaccgtcgactacctgctcagactccaggagtcaatctcggatttttactggtactacagtggtaaagacattattgatgagtccggacagcacaatttcagcaaagctctggccgtaaccaagcagattttcaatagcttgactgaatacatccaaggcccttgcattgggaaccaacagagcctggctcatagtcggttatgggacgcagtggtgggcttcctccacgttttcgctaatatgcaaatgaagctaagtcaggactcttcacagatagagctcctcaaagaactgcttgatctgctccaggatatggttgtaatgttgttgagcctgcttgagggaaatgtcgtaaatgggactataggcaaacagatggtggacacacttgtcgaatcgtccaccaatgtggagatgattctgaaatttttcgacatgttcctgaagctgaaagatctgaccagctcagatacattcaaggagtatgaccccgacggcaaaggcattatttccaagaaagagttccaaaaggctatggaaggacagaaacaatatacacagtccgagatagatttccttctctcctgtgcggaggccgatgagaacgatatgttcaactatgtggattttgtcgatcgcttccatgagccggctaaggatataggtttcaatgtcgccgtgttgctgacgaatctgtccgagcacatgccgaatgatagtcgcctgaagtgtttactggacccagccgaaagtgttctgaactacttcgaaccatacctggggagaatagagatcatgggaggcgcaaaaaagatcgaaagagtttacttcgagataagcgaaagttcaagaacacagtgggaaaaaccacaggttaaggagtccaagagacaattcatcttcgatgtggtaaatgagggaggggaacaggagaagatggaactgttcgtgaatttctgtgaggatactatcttcgagatgcagttggctagtcagatttctgagtcggattcagccgacaggccagaagaggaggaggaagatgaggattcaagttacgtgctcgaaattgccggtgaagaagaggaggatggttctcttgagcccgcatccgcgtttgcaatggcttgcgctagtgtaaagaggaacgtgacagactttcttaagcgggcaacactgaagaacctgaggaaacaataccgaaatgtaaaaaaaatgaccgccaaggagctcgtgaaagtactgtttagtttcttctggatgctgtttgtgggcttgttccagttgctgtttacaatcctggggggaatctttcaaattttgtggtcaaccgtttttggtggtgggctggtggaaggggcaaagaacattcgcgtgaccaaaattctgggtgacatgcctgaccccacccagtttggcatacatgacgataccatggaggcagagcgtgccgaggtcatggagccaggaatcactaccgaactcgttcacttcatcaaaggggaaaaaggtgacacagacattatgtcagacctcttcggactacatcctaagaaagagggtagcctaaagcatggcccagaggtggggttaggcgatctttctgaaataatcgggaaagatgaaccacctacgctagagagcaccgtacagaagaaacggaaggcccaggcagcggaaatgaaagccgctaacgaggctgaaggcaaagtcgagagtgaaaaagccgatatggaggatggtgaaaaggaggataaggataaagaggaggagcaggcagagtatttgtggaccgaagtgactaaaaagaagaaaagaagatgcgggcaaaaagtggagaagcccgaggcatttaccgcaaatttctttaagggcctggagatttaccaaacaaagctcctgcactacctggcgcgtaatttttataacctcagatttctcgccctgtttgtggccttcgccataaattttattctcctgttctacaaagtcactgaggaacccctggaagaggagactgaggacgtggctaatctttggaactcttttaacgacgaagaggaggaggaagccatggtgttttttgtccttcaagagtctacaggctacatggctcccacacttcgggctctggccatcatccacacaatcatatccctggtctgtgtagtggggtactattgcctgaaggtgcctttggttgtgtttaaaagggaaaaagaaatcgccagaaagttggagtttgacgggctatatatcactgaacagccttcagaagacgacataaagggacaatgggaccgacttgtgataaacactcccagctttcctaacaactattgggataaatttgtgaaaaggaaggtaatcaacaagtatggtgatctctacggggcagagaggatcgcagaactgttggggctcgataagaatgcccttgacttcagtcccgtcgaggagacaaaggccgaggctgccagcctcgtttcctggctatcctccattgatatgaagtatcacatttggaagctaggggtggtcttcactgataacagtttcctctatctggcctggtacaccaccatgtcggtgctaggacactacaataatttctttttcgcagcccacctgttagatatcgccatgggtttcaagaccctccgtacaatccttagctctgttacccataatggaaagcagctggttctcacggtggggcttctggctgtggtcgtgtacttatacactgtggttgcctttaacttttttcggaagttttacaacaagtccgaagatgatgacgagcccgatatgaagtgcgacgacatgatgacctgctacttgttccacatgtatgttggcgtccgggctggaggtggcattggggatgaaatcgaggaccctgccggagacccttatgaaatgtataggatcgtgttcgacatcacctttttcttctttgtcatagtgattcttttggcgatcattcaaggactgatcattgatgcatttggtgagctacgggaccaacaggaacaggttcgggaggatatggagacaaaatgcttcatttgtggtatcgggaatgactattttgacaccaccccgcacgggtttgagacacatactcttcaggaacataacctggcaaactatctgttttttctgatgtacctgatcaataaagacgagactgagcacaccggacaagagagttacgtgtggaagatgtatcaggagcgatgctgggacttctttccagctggcgactgctttcgcaagcaatacgaggaccagctcgggtaa

SEQ ID NO: 87186 - DNA, 14598 bp, Artificial Sequence
  derived and/or modified sequence
atggctgagggcggagagggaggagaagatgagatccaattccttcggacggaggatgaagtcgtgctgcagtgtatcgctacaatccataaggagcagaggaaattctgcttagctgcagaaggcttgggaaatcgactgtgctttctggagccaactagtgaggcaaagtatataccgccagatttgtgcgtctgcaattttgtcctggagcagtctctcagcgtcagggccttacaggaaatgctggcgaacactggtgagaacggaggggaaggagctgcacagggtggtggtcatagaacactgttgtacggccacgctgtgctcctgcgacatagctttagtggtatgtatttaacctgcctgactacttcccgcagccagaccgacaaattggcctttgacgtgggactacgggagcacgctacaggcgaggcctgctggtggaccatccaccctgcctccaaacaaaggtccgagggggagaaagtgcggatcggggatgaccttattctcgtctccgtttcctctgaacggtatctgcacctatctgtctctaatggaaatatccaggtggacgcatcattcatgcaaacactgtggaatgtgcaccctacgtgcagcggttcctccatcgaggagggctacctattgggcggacatgtagtacggctcttccacggtcatgatgagtgcctgactattccaagcaccgatcagaatgactctcaacacagaaggattttttacgaggccggtggcgcaggcacgcgcgctagatcactgtggagggtagaacccttgcgaattagctggagcggatccaatatcaggtggggccaggccttcagattgcgacacctcacgactgggcactaccttgcactcacagaagatcagggcctgatactgcaagatcgggctaagagcgatacgaaaagcactgccttttcctttcgcgctagcaaggagctcaaagaaaagctggattcaagccacaagcgagatattgaagggatgggcgtccccgagattaaatacggtgattccgtatgctttgtccagcatatcgcatctggcctctgggttacatacaaagcgcaagacgctaaaaccagccggctcggtccactcaaacgtaaagttatactgcaccaggagggccacatggacgatggactgaccctgcagcggtgccagcgtgaggaaagccaggctgccagaataattcgcaatacaactgcattgttcagtcagtttgtgagcggtaacaaccgcaccgcggcaccaattaccctcccgatcgaggaagttctgcagacactccaggacctcatagcatatttccagcctccagaggaagagatgaggcatgaggataaacagaacaagttgcggagtctcaaaaatcgacagaacctttttaaagaggaggggatgttggctctggttcttaactgcatcgataggctgaacgtatacaactcggtcgcccattttgcaggaattgcacgggaagagtctggaatggcctggaaggagatcctgaatctcttatacaagctgctggccgctctcattaggggtaatcggaacaattgcgcacagttcagcaacaacttagactggttaatttcaaagttggaccgcttggaaagcagttcaggaattctcgaggtcttgcattgcatactgacggagagtccagaggccttgaatctaattgctgaaggccatattaagtcgattataagtttactggacaagcatggccgaaatcataaggtcctggacatattgtgctcactgtgcctgtgtaatggcgtggccgttcgggcaaatcaaaacctaatttgtgacaacttgctgcctagaagaaatctgttgctgcagactcgtctcatcaacgatgtaaccagtatcagacccaatatctttctcggggtggcagaaggtagcgctcagtataagaagtggtattttgagcttatcatagatcaggttgacccttttcttactgcagagcctactcacctgcgggttggatgggccagctctagtgggtacgccccataccctggaggaggcgagggttggggcggaaatggtgtgggggacgacttatacagctacggttttgatggtttgcacttgtggtccggcagaatcccgagggccgtcgcctcgattaaccagcatctccttcgaagtgacgacgtggtcagttgttgtctggatctaggagtgcccagcatcagcttcaggatcaacggccagccggtacagggcatgtttgagaattttaacaccgatggcctgttttttccggtgatgagtttctccgcaggagtgaaggttaggttcctgatgggaggtagacacggtgagtttaagtttctgcccccttccggttacgcgccatgttatgaagcccttctgcccaaggagaagatgagactcgaacccgtcaaagagtacaagcgggatgcggacgggatccgcgacttgttgggaaccactcagttcctctcccaggcctcctttatcccttgtccagtggacacaagtcaggtgattctaccgccacatctggagaagattagggatagattggctgaaaatatccacgagctgtggggtatgaacaaaattgaactcggttggacctttggaaagatccgggacgataacaagaggcagcacccgtgcctagtggaattttccaagttgcctgagacagagaagaactacaatctccaaatgagcacggaaacactgaagactcttctcgccctagggtgtcacattgcccacgttaacccggcagccgaggaggacctcaagaaagtcaaattgcctaagaactatatgatgtcgaacggctacaaacctgctcctcttgatctgagcgatgttaagctcctgcctcctcaggaaattcttgttgacaaattagcagagaacgcccacaatgtctgggctaaagatagaataaagcaaggctggacctacggtatccagcaggacctgaagaataaacggaatccacgactggtgccctatgccctcctcgatgagaggacaaaaaaatctaatcgggattcactccgtgaagcagtgagaacgtttgtgggctatggctacaacatcgagccctccgatcaggaactggccgacagcgcagtcgagaaagtatcaattgataagatacggttcttcagggtcgagcgttcttacgccgtaagatctggaaaatggtacttcgagtttgaggtcgtcaccgggggagacatgagagtgggttgggccaggcctgggtgccgtcccgatgtcgaacttggagccgatgatcaggcatttgtgtttgagggcaaccgcggtcagaggtggcatcagggtagtggctattttggtaggacctggcaacccggagatgtggtcggctgtatgataaacttagatgatgcatctatgatatttaccctgaatggcgagctgctgatcaccaataagggatctgagctggctttcgctgactacgaaatagaaaatgggttcgttcccatctgctgccttggtctgagccagattggtcgaatgaatctgggcactgacgcatctaccttcaaattctatactatgtgtggacttcaggaagggtttgagccctttgccgttaatatgaatagagacgttgccatgtggttctccaagaggttgcccaccttcgttaacgtgccgaaagaccatccacacatcgaggtgatgaggattgatggcaccatggactctcctccttgcctgaaagtgacccacaaaacattcggaactcaaaattctaatgccgatatgatttactgcagactgagtatgccagtcgagtgccactctagcttttcccattcaccctgtttggatagcgaggcattccaaaaacggaaacaaatgcaggagattctcagccacaccaccacccagtgctactatgccatcaggatttttgccggacaggacccttcatgtgtgtgggtgggctgggtgactcccgattaccacttgtactcggagaaatttgatctcaacaagaattgcacagtgactgtgactttaggagacgaacgcggaagggtacatgagtccgtcaagcgatccaactgctatatggtctggggcggtgacatcgtcgcatcttctcagcgttctaatcgttctaacgtcgatctggaaatcggatgcctggtggatcttgccatgggaatgctgagctttagcgctaacggaaaagagctgggcacctgttaccaggtggaacctaacacaaaggtttttccggctgtgtttctgcagcccacatcaacgtcactgtttcagttcgagttgggcaagctgaagaacgcgatgcccctgtctgctgcaattttcaggtccgaggagaagaacccagtcccccagtgtccaccaagactagatgtccaaacgattcagccagtcctgtggtcccgaatgcccaacagtttcctcaaggtcgaaacagagagagtcagcgagaggcacggttgggtggttcagtgtctagaacctctgcaaatgatggccctgcatattccagaagagaatcgctgtgtggatatactggagctgtgtgaacaagaggatcttatgaggttccattaccatacgctgagactatactcagccgtgtgcgcccttgggaacagtagggtggcatacgctctgtgtagccatgtcgatctctctcagctattctacgccattgacaataaatatctccctggactgctcaggagtggattctacgatctgctgattagcatccatctcgccagcgcgaaggaacggaaactgatgatgaagaatgaatacataatccccatcacctcaacaacaagaaacattcgtctcttcccagatgaatctaagagacacggtctgcctggggtgggacttcgaacctgcctgaaacctgggttccgcttctcaactccttgcttcgtggttaccggtgaggatcaccagaaacaaagccctgaaattcccctggagtctttacgcacaaaagcgctcagcatgctcactgaagccgtccagtgctctggggctcacatcagggaccccgtcggcggatctgtggagttccagtttgtgccagtgctgaagcttatcggcaccttacttgtgatgggcgtatttgacgatgacgacgttagacagatactgttgctgatcgaccctagcgtcttcggagagcactcagctggtactgaggagggagccgaaaaggaggaggttacgcaagtggaagagaaagccgtggaggccggagagaaggccggaaaagaagccccagtaaaaggtctgctccagacacgactgccagaatctgtaaagctccagatgtgtgaacttcttagctacctgtgtgattgtgaactccagcatagggtcgaggctattgtggcatttggtgacatctacgtgagtaagcttcaagcaaatcaaaagttcaggtataatgagctgatgcaggctctgaacatgtccgctgccttgactgcacgtaaaaccaaggagttcagatcccctcctcaggaacagatcaacatgttacttaatttccagctgggcgaaaattgtccttgtcccgaggagattcgggaagaattatacgacttccacgaggatttgctgctacactgcggtgtgcccctggaggaggaagaggaagaagaggaagatacctcttggacaggtaagctctgtgcccttgtgtataaaatcaaggggcctccaaagcccgagaaagaacaaccaacggaagaggaggagagatgccccactaccctgaaagagttaatatcgcagacaatgatctgttgggctcaggaggatcaaattcaggacagtgagctggtgcgaatgatgttcaatctcctaagacgccagtatgattccattggtgagctcctgcaagcgctaagaaagacctacacaataagccacaccagcgtcagtgatacaatcaatctgctggccgcattgggacagatccgctctctgttatctgtgcgaatgggcaaggaagaggaacttcttatgattaacggcctgggggacattatgaacaataaagtattttatcagcacccgaacttaatgcgggtcctgggaatgcatgagaccgttatggaggtcatggtcaacgtactgggcacagaaaaatctcagatcgcttttcccaaaatggtcgcttcatgctgcagattcctgtgttacttctgccgaatttcacgccaaaaccagaaggctatgttcgaacacctgagttatctgttagagaacagttctgtggggttggcaagccctagcatgagaggcagtacacctctggatgtggcagcatcaagtgtaatggataacaacgaactggccctgtctctcgaggaacccgatttagaaaaagtggtcacttacctggccggatgtggcctgcaatcatgcccgatgctcttagcgaaaggatatcctgacgtcggctggaaccccattgaaggggagaggtacctgagctttcttcgtttcgctgtatttgtgaactctgaatcagttgaggagaacgccagcgtggtagttaaactgcttattaggcggcctgaatgctttggaccagctttaagaggcgaagggggaaacgggcttttggcggcaatgcagggagccataaaaatcagcgagaaccctgcgctcgacctgccctcgcaaggatataagcgggaggtctctaccggggacgatgaggaggaagaggaaatagtgcacatgggtaacgctataatgtccttctactccgcgctgatcgacctgctgggcaggtgcgctcccgaaatgcacttaattcaaacaggtaaaggggaagctattcgtataagaagcattttgcggagcctggtgccgacagaggatttggtgggaattatcagcattccactcaagttaccctctctcaataaggacggaagcgtcagcgaacctgatatggccgctaacttttgcccagaccataaggcaccgatggtgctctttttggatagggtttatggaatcaaagaccaaacttttctgctgcatttgctggaggttgggtttttgccagacctcagagcttccgcgtccctggacaccgtcagtctaagtaccaccgaggctgccctcgcactgaaccgctatatttgttccgccgtcctgccgctactgaccaggtgcgcccctctatttgctggcacagaacactgcacatccctcatcgatagtactttacagaccatttataggctgtccaagggacggagtctgacaaaagcccagcgagacaccattgaagaatgtctgcttgctatctgcaaccatctcagaccatcgatgttgcagcagttgctgcgaagactggtgtttgatgtaccccaactgaacgagtattgtaaaatgccgctgaaacttcttacaaatcattacgaacagtgttggaagtattattgcctgccttccggttggggatcatacggactggctgtggaagaagagctgcacctgacagagaaactgttttgggggatcttcgactccctgtcccacaagaagtacgatccagacctgttccgcatggctttgccttgcctgtcggcaattgctggagctttgcctcctgactacctggacacccgtatcaccgcgaccctagaaaaacaaatctcagtggacgctgacggaaactttgacccaaagcccattaataccatgaacttctcccttccagagaagttggaatatattgtgacgaagtatgctgagcatagtcacgacaaatgggcgtgtgataagagtcagagcgggtggaagtacggcatctctttggatgagaatgtgaaaacgcaccctctcattcgcccattcaagacactcaccgaaaaggaaaaagagatataccggtggcctgccagggagagcttgaagacaatgctagccgtgggctggactgtcgaaagaactaaggagggggaggctctggtgcagcaacgcgaaaacgaaaaactaagatctgtgagtcaggctaatcaaggaaattcgtactcgcctgcaccgcttgatttgtctaacgtggtacttagtcgagaactgcagggtatggtggaagtggtggcagaaaattaccataacatatgggcgaagaagaagaagttagagttagaaagcaaaggagggggatcccatcctttgctggtcccgtacgacacactgactgccaaagaaaaattcaaagatagagaaaaggcccaggacctcttcaaattcctccaagtgaatggcattatcgtaagtcgcggaatgaaggacatggagctggacgcaagcagtatggagaaacggtttgcctacaagttcctgaaaaaaattttgaagtatgtggactcagctcaggagtttatcgcacacctggaggccatcgtgagcagtggtaaaaccgagaaaagtcccagagatcaagaaatcaagttctttgccaaagtcttactgcccctcgttgatcagtattttacaagtcactgcctgtactttctgagcagccccctcaagccgctgtcatcctctgggtatgcgtcacacaaagaaaaagagatggtcgctgggttgttttgcaaactcgcagctcttgtgcggcaccgcatatctcttttcggctcagattccacaacaatggtgagctgtctgcatatcctggcgcagactttggatactaggactgtgatgaagtctggaagtgagctggttaaggccggtctgcgagcatttttcgagaacgctgctgaggacctggagaagacctcagagaacttgaagctgggaaaatttacacacagccgaacgcagatcaaaggtgtatcccagaacatcaattacacgaccgtggcccttctgcccatcctgaccagtatcttcgagcatgtgacccagcaccaatttgggatggacctgctactgggcgatgtccagatctcctgttaccatatcctttgtagtctctactctcttgggaccggtaaaaacatttacgtggaaagacagagaccagctctgggggaatgtttggcatccctcgccgcagcaatcccagttgcgttccttgaacctacactcaacagatataatccactgagcgtgttcaacaccaaaacccctcgtgagaggtccatcctggggatgcctgacacggtcgaggatatgtgtccagatatcccccaactggaggggctgatgaaagagattaacgacctggccgaatcaggggctcgctataccgagatgccccacgtaattgaagtgatcctgccgatgctttgtaactatctgtcctactggtgggagaggggtcccgagaatctgcctccctctacagggccatgttgcactaaagtcacctccgaacacctaagcctgattctaggaaatattctcaaaatcatcaataataacctgggcattgatgaggcaagctggatgaagaggattgctgtgtacgctcaacccattatcagtaaagctcgccctgatctgctccgatcccatttcatccccacactcgaaaagctcaaaaagaaagcagtgaagacagtgcaagaggaagaacagctcaaggcggacggcaaaggtgacacacaggaggcagagcttctgattttggacgagttcgcggtactttgcagagatctgtacgccttctatcctatgctcattaggtacgttgataataaccgcagtaattggctgaagtcccccgacgcggatagcgatcagctgttcaggatggtcgccgaggtgtttatactctggtgcaaaagtcataacttcaagcgggaggaacagaatttcgttattcagaacgaaattaacaacttagcattcttgacaggggattcaaagtccaagatgtctaagagcggcggacaggatcaggaaaggaagaaaactaaacgaaggggcgatctctactcaatacagacctccctgattgtggccgcactgaagaagatgctgccaattgggctcaatatgtgcacacctggcgaccaggagctgattagcctggcaaaatcaaggtatagtcaccgagacactgatgaggaggtgcgagagcacttgcgtaacaatcttcatcttcaagagaagtcggacgacccagcggtgaagtggcagctgaacctctataaagatgtattgaaatctgaggaaccgttcaaccctgagaagactgtcgagagagtgcagcgtataagtgccgctgtttttcacctggagcaggtggagcagccactaaggtcaaagaaggccgtgtggcataagttactgtccaagcagcgcaaaagggcagtggttgcctgctttcgaatggcgccactgtacaacttgcccaggcatagatctataaatctgtttttgcacgggtatcagcgattttggatagagactgaggagtacagtttcgaggaaaagctcgtgcaggatctagcaaaatcccctaaggtcgaagaggaggaggaggaggagacagagaagcaacctgacccactccaccagattattctatatttttcgcgtaacgccttaacagagcggagcaagcttgaagacgatcctctgtatacaagctattcaagcatgatggccaaatcctgccagagcggcgaagacgaggaagaggacgaagacaaggagaagactttcgaggagaaggaaatggagaaacagaagacactctaccagcaagccaggctgcacgaaagaggcgctgccgagatggtcctccagatgatttcggccagcaagggggaaatgtctccgatggttgtagagaccctaaagttggggattgctatactaaatggaggtaacgccggagtccagcagaaaatgctcgactatctgaaggagaagaaagatgccggtttcttccagtcgttgagcggccttatgcaatcttgttccgtgttagacctcaacgcgttcgaaaggcagaacaaggccgagggcctaggaatggtgaccgaagagggaaccttaattgtgcgggaacgtggtgagaaggttctgcagaacgatgagttcacccgagatctgtttaggtttttacagctcctgtgtgaaggacataactccgactttcagaatttcctgcggacccagatgggaaatacgaccacagtgaacgtaatcatctcaactgttgactaccttctaaggttacaggagagtatctcagacttctactggtattactcagggaaagatataatagacgagtctgggcagcacaatttctccaaggctctggctgtcactaagcagatcttcaatagcctgaccgagtacatacaggggccatgtattggaaatcaacagagcctggcgcactccagactgtgggacgccgtagtgggcttcctgcacgtgtttgctaatatgcagatgaaacttagtcaggacagcagtcagatcgagctgctgaaggaactgctggatttgttgcaagatatggtcgttatgctgctgtccctgttggaaggcaacgtggtcaatggaacaatcgggaagcagatggtagatacactggtcgaatccagtaccaatgttgagatgatcctgaagttttttgatatgttcctgaaactgaaagacttgacctcctccgacacttttaaggagtatgaccccgacggcaaggggattattagcaagaaagaattccagaaagctatggagggacagaaacagtatacgcaatctgaaattgactttcttctgtcttgcgctgaagcagacgaaaatgacatgttcaattacgtcgatttcgtggaccgctttcacgagccggctaaggatatcggattcaatgtggccgtactgctgaccaatctcagcgaacacatgcccaacgacagtagactgaagtgtttactcgatcccgctgaatctgtccttaactacttcgaaccctacctgggtagaatcgaaattatgggcggagctaaaaagatcgaacgtgtgtatttcgagatcagtgaatcctcccgcacccaatgggaaaaaccacaggtgaaagagtcgaagagacagttcattttcgacgttgtgaatgaaggcggagagcaggagaagatggagctgttcgtgaacttttgcgaggatactatctttgaaatgcagttggcttcacagatctctgaaagcgacagtgcggacagaccggaggaagaggaggaggatgaagacagctcatatgtactcgagatcgccggtgaggaggaggaagacggtagtctggagccagcttcagcattcgctatggcctgtgcgtctgtgaagaggaacgtgactgattttctgaagcgggctacgctgaaaaacctccgcaaacagtacaggaatgttaaaaaaatgaccgccaaggaactggtgaaagtcctgttcagctttttctggatgctcttcgtcggcctgtttcaactgctctttactatccttggcggaatcttccagatcctctggtccactgtatttgggggtggattggttgagggtgccaagaacataagagtcactaagatcctgggagacatgcccgatccaacacagttcgggatccatgatgacaccatggaagcagaacgggcagaagtaatggagccaggaatcactaccgagctcgtacattttatcaagggcgagaagggagatacggacattatgtctgacctattcggcctgcaccccaagaaagaagggagtcttaaacacggacctgaagtcggcttgggggatctaagtgaaattattggtaaggatgaaccaccaaccttagagagcaccgttcagaaaaagcgaaaggctcaggccgctgaaatgaaggctgccaacgaagccgaggggaaagtggaaagcgaaaaggcggatatggaggacggggagaaggaagataaagataaggaagaggagcaagccgagtatctgtggactgaagtcactaagaaaaaaaaaagacgatgtggccagaaagtggagaaacctgaagcctttacagctaatttctttaaaggccttgaaatctatcagactaagttattacattatctggcgaggaacttctacaacctccgctttctagccctcttcgtagcgttcgctatcaactttatcctcctcttctataaggtaaccgaagaacccctagaggaggagactgaggacgtagccaacctatggaactctttcaacgacgaggaggaggaggaagctatggtgtttttcgtgctccaggaaagcacgggctacatggcacccacgctcagggcacttgccatcatacatactatcatcagcctcgtgtgcgtggtgggatactattgcttgaaagtaccgcttgtggtctttaaaagggagaaggaaattgcacggaagttggagttcgatggcctgtatataaccgaacaaccctctgaagatgacattaagggccagtgggaccgactggtaatcaataccccgtcttttccgaataactattgggataagtttgtgaagaggaaggtgattaacaaatatggcgatctgtacggcgctgaaaggattgccgaactcctggggctggacaagaacgccctggacttcagtccagtggaggagaccaaagctgaggctgcatctcttgtttcctggctgagctccatcgacatgaaataccacatatggaaacttggcgttgtctttacagataactcgttcctgtatctggcctggtataccaccatgtccgtgcttggccactacaataactttttctttgccgctcacctgctcgacattgcgatggggttcaaaaccctcaggacaatcctgtcatctgtgactcacaatggaaaacagctggtgcttactgtcggtctgcttgcagtggtggtgtatctctacacagtggtcgcattcaacttttttcgtaagttctacaataagtcagaggatgatgacgaaccggatatgaagtgtgacgacatgatgacctgttatttgttccatatgtacgtgggcgtgagggccggaggaggaattggggacgagattgaggacccagcaggcgacccttacgagatgtatagaatcgtttttgatatcaccttcttcttttttgttattgtgatactgctggcaataatccaaggcctgattatcgacgcgtttggagaactccgtgatcagcaggagcaggttcgtgaggacatggagactaaatgtttcatctgtggaatcggcaacgactactttgatacaacaccacacggatttgagacacataccttgcaagagcataacctggcaaattatctttttttcttgatgtatcttataaataaggacgaaacagaacataccggccaggagagctacgtttggaagatgtaccaggaacgatgttgggacttcttcccagccggagactgcttccgtaaacagtatgaagatcagctgggctat

SEQ ID NO: 87187 - DNA, 15473 bp, Artificial Sequence
  derived and/or modified sequence
atggctgagctaggtggtggtggtgaagaggatgcaagatggtacaggaaggaggatgaagtggtactccagtgcatcgccaccattcataaggagcagaggaagttctgcctggcagccgagggacttgggaatcgcctgtgcttcttggaacccacttcagaagccaagtacattcctccagatctctgcgtctgcaattttgtgctggaacagtccctatctgtcagagccctgcaggaaatgcttgccaacacaggtgaaaatggcggcgaaggggcagcacaaggaggtggccacaggaccctgttatacggccatgcagttctcctgaggcactctttcagcggaatgtatctaacatgcttgactacatcaagatcccagacagacaaacttgcctttgatgtaggtctacgggaacatgccacaggagaagcctgttggtggactatacatcctgcttccaaacagaggtccgaaggagagaaagttcgaattggcgatgacctcatcctcgtcagcgtgtcctctgaaagataccttcatctctcagtatcaaatggtaacatacaagtggatgcctcctttatgcaaacactctggaatgtacatcctacgtgctcaggaagtagcatcgaagaaggatacctacttggtgggcatgtagtacgtcttttccatggtcatgatgaatgtttgacgataccatctacagaccagaatgattcccagcacaggaggatattctacgaagctgggggagctgggactcgagccaggtctctttggagagtggaaccccttcggataagctggagtggcagtaacatcagatggggccaggctttccgactccggcatctcaccacaggccactacctggccttgacagaagaccaaggccttatactgcaagaccgggcaaagtcagacaccaagtccacagctttctctttccgggcatcaaaggaactcaaggagaaattagactccagtcacaagcgagacatagaaggcatgggagttccagaaatcaagtatggagattctgtctgctttgtgcagcatatagccagtggtctgtgggtgacctacaaagcacaagacgccaaaacttcccgcctgggacctctaaaaagaaaggtcatactccatcaggaaggccacatggatgatggattaacactgcagagatgccagcgtgaggagtcccaggctgctcggatcatccggaacactacagccttattcagccagtttgtcagcggaaacaatcgcacagctgcccccatcaccctgcctatagaagaagtcctgcagaccctacaggacttgatcgcctacttccagcccccagaggaggagatgcgacatgaagacaagcagaacaagctccgctcactcaaaaacagacaaaatcttttcaaggaagagggaatgttggcccttgtcttaaattgcattgaccgcttaaatgtctacaatagcgtagcacactttgcagggattgcaagggaagagagtggcatggcctggaaagaaattctgaacctcctctacaaattgctggctgctctcattcgcggaaacagaaacaattgcgctcaattctccaataaccttgattggctcatcagtaaattggacagactagaatcttcctcaggtatcttggaagttttgcactgcatcttaactgaaagcccagaagccttaaatctgatagcggagggccacatcaagtcgatcatctccctgttggataagcacgggcggaatcacaaggttctggatatcctgtgctccctctgtctctgcaatggggttgcagtgagagccaaccagaatctgatctgtgacaacttgctgccccggagaaacctactcctgcagacacgactgattaacgatgtaaccagtatccggccaaacatcttcctgggagtcgcggagggctcagcccagtacaagaagtggtacttcgagctgattatcgaccaggtggaccccttcctaacagcagagcccacacatctgcgggtgggctgggcctcttcttcaggctatgccccatacccaggaggtggagaaggatggggaggcaatggtgttggtgacgacctgtactcctatggctttgatggacttcacctttggtcaggccggatacccagagctgtggcttccatcaaccagcacctcctgagatcggatgacgtggtaagctgctgcctggacctcggggtgcccagcatctcattccgcatcaatgggcagcccgtgcaggggatgtttgagaacttcaacacagacgggctcttcttccctgtgatgagcttttcagcaggtgtcaaagtacgtttcctgatgggtggacgtcatggagagtttaagttcctgcctccctctggctatgccccttgctatgaagccttacttccaaaagagaagatgagattggagcctgtcaaagaatataaacgtgatgctgatggcattagagatctcttgggtaccacccagttcctctcccaagcctctttcatcccatgccccgtagacaccagtcaggttattttgccacctcacctagaaaagatccgagacagactagctgaaaacatccatgagctttggggaatgaataaaatagaacttggctggactttcggcaagatacgagatgacaataaaagacaacacccttgccttgtggagttttcaaagctcccagaaactgagaagaactataacctgcaaatgtcaactgaaaccttaaaaaccctcttggccctggggtgccacattgctcatgttaacccagctgctgaggaggatctcaagaaggtcaaactgcccaaaaactatatgatgtccaacggctataagccagcccctttggatttgtctgatgtgaagctgttacctcctcaagaaattttagtggataagcttgcagaaaatgcacacaatgtttgggcaaaagacagaataaaacaaggatggacctatggcatccaacaggatttgaagaacaaaagaaatccccgtctggtgccatatgcattactggatgagcgtaccaagaagtcaaacagggacagcctgcgggaagctgtgcgcacttttgttggttacgggtataacattgagccatcagaccaagaactagctgactcggctgtggagaaggtcagcatagacaagatccgatttttccgggtagagcgatcttatgcagtgagatctggaaagtggtattttgagtttgaagtggtgactggaggagacatgcgagtcggctgggcgaggccaggctgtcgacctgatgtcgagctgggggccgatgaccaagcctttgtgtttgaaggcaacaggggccagcgttggcatcaaggaagtgggtattttgggcgtacctggcagccaggggatgtggtcggatgtatgattaacctggatgatgcttcaatgatcttcacactgaatggggagctgctgatcaccaacaaaggctctgaacttgccttcgctgactacgagattgagaatggcttcgtgcccatctgctgtctgggtctatctcagatcggccgcatgaatctcgggacagatgccagtaccttcaagttttataccatgtgcggtctccaagagggctttgagccttttgctgtcaacatgaacagagatgttgctatgtggttcagcaagcgcctcccgacgtttgtcaacgtgccaaaggatcatccacacatagaggtcatgaggattgatggcaccatggacagccctccgtgtctcaaggtgacgcataagacatttggcacacagaatagcaatgccgacatgatctattgccgcttgagcatgcctgtcgagtgccactcctccttcagccacagcccctgtctggacagtgaagctttccagaaaaggaaacagatgcaagaaatactctctcatacaacaacacagtgctactacgccatccgcatctttgctggacaggatccatcctgtgtctgggtcggatgggtgactccagactatcacttgtacagtgaaaagtttgacctgaataaaaactgcacagtgactgtcaccctaggggatgaaagaggccgggtccatgaaagtgtgaaacgcagcaactgctacatggtctggggtggagacattgtagccagttcccagagatcaaatcggagcaacgtggacctggagatcggctgtctcgtggatctggccatgggcatgttgtccttctcagccaatggaaaggaactgggcacctgctaccaggtggagcctaataccaaagtgtttccagcagtcttcctgcagcctacaagtacttctttgtttcagtttgaacttggaaagctgaagaacgcaatgcccctgtcagcggccatattcaggagtgaagagaagaacccagtcccacagtgtccacctcggctggacgtccaaaccatccagcccgtgctctggagccgcatgcccaacagcttcctgaaggtggagaccgagcgtgtgagcgagcgccacggctgggtggtgcagtgcctggagcccctgcagatgatggcgctccacatccccgaggagaacaggtgtgtggatatcctggagctctgtgagcaggaggacctgatgcggttccattaccacacgctgaggctctacagcgcggtgtgcgccctgggaaacagccgcgtggcctacgccctgtgcagccacgtggacctctcccagctcttctatgccattgacaacaagtacctccccggcctccttcgatctggtttctatgacctgctcatcagcatccacctggccagcgccaaggagaggaagctgatgatgaagaacgagtacatcatccccattaccagcaccaccaggaatatccgcctcttcccggacgagtccaagaggcatggactgcctggggtgggcctgagaacatgtctcaagcccgggttcaggttctccaccccttgctttgttgtgactggtgaggatcaccaaaagcagagccccgagattcccttggagagtctcaggacgaaggctctgagtatgctgacagaggcagtgcagtgcagcggggcccacatccgagaccctgtaggggggtctgtggagttccagtttgtgcctgtgctgaaactcattggaaccctgctggtcatgggcgtgtttgatgatgatgatgttcggcagatcctcctcctgattgatccctctgtgtttggggagcatagtgcggggacagaggagggagcagaaaaggaggaagtgacccaggtggaggagaaggctgtggaggctggggagaaggccggcaaggaggctcctgtcaaaggcttgttgcagactcgattacccgaatccgtcaagctgcagatgtgtgagctcctcagctatctctgcgactgtgagctgcagcaccgagtggaggccattgtggcatttggtgacatttatgtctccaagctgcaggcaaatcagaagttccgctacaatgagctcatgcaggccctgaacatgtctgcggccctgactgcccggaagaccaaggagttccgctcacccccacaggagcagatcaacatgctgcttaactttcaactgggagagaactgcccctgcccagaggagattcgggaggagctgtatgatttccatgaggaccttctccttcactgtggggttcctttggaagaagaggaagaggaggaggaggacacctcctggacaggaaaactctgtgccttggtttacaaaatcaaaggcccacccaagccagagaaggagcagccgacggaggaggaggagagatgccccacaacattgaaggaactcatctcacagacgatgatctgctgggcccaggaggaccagatccaggattcagagctggtccgaatgatgttcaacctcctccggaggcagtatgacagcattggggagctgctgcaggcgctgcggaagacctacaccatcagccacacctctgtaagcgacaccatcaacctgctggctgccctgggccaaatccgctccctcctcagtgtcaggatgggcaaggaagaggagttgctcatgatcaatgggctgggagacataatgaacaacaaggtgttttaccagcatcccaacctcatgagagtcctgggcatgcacgagacggtgatggaggtgatggtgaacgtgttgggtacagagaaatctcagattgcatttccaaagatggttgctagctgctgccgtttcctttgctatttctgtcgaattagccggcaaaatcagaaggccatgtttgagcatctgagttatcttctggagaatagcagtgttggcctagcctccccgtcgatgaggggatccaccccgctggatgtggcagcttcctctgtgatggacaacaatgagttagcgctgagcttagaggaaccagacctcgagaaggtggtgacctacttggcaggctgtggcctacagagctgccccatgcttctggccaaaggataccctgatgtcggctggaaccccattgaaggggaacgctacctgtccttcctgaggtttgctgtcttcgtgaacagtgagagtgtggaagaaaacgccagcgttgtggtcaagctgctcatcagacgcccagagtgcttcggcccggccctgcggggtgaggggggaaacgggctcttggcagccatgcagggtgccattaagatctctgagaacccagcgctcgacctcccctctcaaggatacaaaagagaagtcagcacgggggacgatgaagaggaagaagaaatcgtgcatatgggcaatgcaattatgtcattttattcggcccttatagatctactgggccgctgtgctcctgaaatgcacctcatccagacaggaaagggggaagccatccgcatcaggtccatcctgcgctccctggtccccacagaagacctggttgggatcatcagcatccccttgaaactgccctccctcaacaaagatgggtcggtcagtgagccagatatggcggccaatttctgccctgaccacaaggcacctatggtgctgttcttggaccgcgtttatggcattaaggatcaaacttttctgctccacttgctggaggttggatttttacctgacctaagagcttctgcctctctagatacagtttccctaagcaccacagaggctgcgcttgcactaaataggtatatatgttctgctgtgctcccgctcctcacaagatgtgcccctctctttgccggaacagaacactgcacctctctgattgattccacactgcagacaatatacaggctatccaagggacgttccctcaccaaagcacaaagggacactatagaagaatgtttgcttgccatttgcaatcacttgaggccttccatgttacagcaactcctgcgacgcctcgtttttgatgtgccgcaactcaatgaatactgcaaaatgcctctcaagcttctgacgaatcactatgaacagtgttggaagtattactgcctgccttcaggatgggggagctacgggctagctgtggaagaagagctgcacctaacggagaagcttttctgggggatttttgactcgctctcccataagaaatatgacccagatcttttccgaatggccctgccttgtctcagtgctatagctggggccttgccaccagattatttagataccagaatcacagccacgttggagaaacagatctcagtggatgcggatggcaactttgacccaaaacctattaacaccatgaatttttccttgcctgaaaaattggaatacatcgtcaccaagtatgctgagcattcacatgataaatgggcctgtgacaagagtcagagtggatggaaatatgggatttccctggatgaaaatgtgaagacccacccactgataaggcctttcaagacattaacggagaaggagaaggaaatttatcgctggcctgcgcgagagtccctgaaaaccatgctggctgtgggctggactgtggagaggaccaaagagggagaagctttggttcaacagcgggaaaatgagaagcttcgaagtgtgtcccaggccaaccagggcaacagctacagtcctgctcccctcgacctctcaaacgttgtgctctccagagagctccagggaatggtggaggtcgtggctgagaactatcacaatatctgggccaagaagaagaagctggagctggagagcaaaggtggtggcagccaccctcttctggtaccatatgacaccttgactgccaaggaaaagttcaaggaccgggagaaggcacaggacctgtttaagttcctccaagtgaatggcatcatagtttccaggggtatgaaggatatggagctggatgcctcctccatggagaagaggtttgcctataagttcttgaagaagatcctgaaatacgttgattctgctcaagaatttattgcccatttagaagccattgtcagcagtgggaaaactgaaaagtctccccgtgaccaggagatcaaattctttgccaaagttctcctcccgctggttgaccagtacttcaccagtcattgcctctacttcttgtcatcccctctgaagccccttagcagcagcggatatgcctcccataaggagaaagaaatggtggccggcctgttctgcaaacttgccgctctcgttagacacagaatttccctctttggtagtgattctactacaatggtgagctgtcttcacatcttagctcagacacttgacacaaggactgtcatgaagtcaggctcagagctggtgaaggctgggttacgagcattctttgaaaatgctgcagaagatttggagaagacttcagaaaacctgaaacttgggaagttcacccattcccgaacgcagattaaaggcgtttctcagaatattaactacactacagtggctctgctccccatcctgacgtccatctttgagcacgtcactcagcatcagtttggaatggatctactcttgggtgatgtgcagatttcatgctaccacatactgtgcagcctctactcccttgggacgggaaagaacatttatgttgaaaggcaacgccctgcccttggagaatgtctggcctcgctggcagctgccataccagtggcattcctggagcccacccttaatcgctacaatccactctcggtcttcaacaccaaaacccccagggagaggtctattctggggatgccagacacggtagaagacatgtgtcctgacatcccccagctggaaggcctgatgaaggaaatcaacgacctggccgagtcaggggcccggtacacagagatgccccatgtcatcgaggtgatcttacccatgctctgcaactacttgtcctactggtgggagcggggtcctgagaacctgccccccagcacagggccatgctgcaccaaggtcacctctgaacacctcagtctcatcctgggcaacattctgaaaatcatcaacaacaacctgggcatcgatgaggcctcctggatgaagcgcattgcagtgtatgcacagcccatcatcagcaaagccaggcccgacctgctgagaagccacttcatcccaactctggagaagctgaagaaaaaggctgtcaagacggtgcaggaggaggagcagttgaaagccgatggcaaaggggacacccaggaggcagaactcctcatcctggacgagttcgcggtcctctgcagagatctctatgccttctaccccatgctgatccgctacgtggacaacaacagatctaactggctgaaaagtcctgatgctgattctgaccagctcttccgcatggtggcagaagtcttcattctgtggtgtaaatctcataacttcaagagagaagagcaaaattttgtgattcagaatgaaattaataatttggcatttttaactggagacagcaaaagcaagatgtcaaaatctggaggacaagaccaggagcggaagaagacaaagcggcggggagacttgtattccatccagacctccctcatcgtggctgcactcaagaaaatgctgcccattggtttgaatatgtgtactccaggcgaccaggagctgatctccctcgcaaaatcgcgatacagccatagggacacagatgaagaggtcagagaacatctgcggaacaacttgcacttgcaggaaaagtctgatgacccagctgtaaaatggcaactgaacctctacaaggatgttctgaagagtgaagaacctttcaatccggaaaagacagtggagcgtgtgcagagaatttcagcagctgtcttccacctggaacaggtggaacagcctttgaggtccaagaaggccgtctggcacaaactgttatcaaagcaacggaaacgggcagtggtggcctgtttcaggatggcccctctctacaacctgcccaggcaccgctctattaacctcttcctccatggctatcagagattttggatagaaacagaggagtattcctttgaagagaaactagtacaggatttggctaaatctccaaaggtggaagaggaggaggaggaagagacagaaaaacaacctgacccactacatcagatcattctctattttagccgcaacgctctcacggagaggagcaaattggaagacgaccctttgtacacctcctattccagcatgatggccaagagttgtcaaagtggtgaggatgaagaagaagatgaagacaaggaaaaaacattcgaagagaaagagatggagaagcaaaaaaccctctatcagcaagctcggctgcatgagcgtggtgctgcagagatggtccttcagatgataagcgctagcaaaggtgagatgagccccatggtggttgagacgctgaagctggggatcgccattctgaacggaggcaatgctggtgtgcaacagaaaatgctagattacctaaaggagaaaaaggatgctggattctttcaaagcctttctggtcttatgcagtcttgcagaagtgtccttgatttgaatgcatttgagaggcagaataaagctgaaggcctggggatggtgactgaagaaggaacactcattgttcgggaacgtggtgaaaaagtactccagaatgacgagttcacgcgtgatctctttagattcctacagttactttgtgagggacataacagtgactttcagaacttcctgcggactcagatgggcaacaccaccaccgtgaatgtcatcatcagcactgtggactaccttctgcgtctgcaggaatcaatcagtgatttctactggtattattcagggaaggacatcattgatgaatctggacagcacaatttttccaaagctctggcagtcaccaagcagattttcaattctcttacagaatacatccagggcccttgcattggtaatcaacagagcctggctcacagcaggctgtgggacgcagtggttggcttcctccatgtctttgctaatatgcagatgaaactctctcaggattccagtcagatcgagctgctgaaggaactcttggatctccttcaggacatggtggtgatgcttctgtccctcctggaagggaatgtggtaaatggcaccattggcaagcagatggttgacacactggtagaatcatctaccaatgtagaaatgatcttgaaattctttgacatgttcttgaaacttaaagacttaaccagctcagacaccttcaaagaatatgacccagatggtaaaggaattatctccaaaaaagaattccagaaggccatggaagggcaaaaacagtacacgcagtcagagattgactttctcctgtcgtgtgcagaagctgatgagaatgacatgtttaattacgttgattttgtagaccggttccatgagccagccaaggacatagggtttaatgtggctgtgttattgacaaatctttctgaacacatgccaaacgattcccgcctgaagtgtctgttggacccagcagaaagtgtgctaaattacttcgaaccctacctaggacgcatcgagatcatgggtggggccaagaagattgagcgtgtttattttgagatcagtgaatccagtcgcactcagtgggagaagccccaggtgaaggaatctaagcgacagttcatttttgatgttgtcaatgaaggtggggagcaggaaaagatggagctgtttgtgaacttctgtgaggacaccatctttgaaatgcagttagcatctcagatctctgaatccgattcagctgacaggccagaagaggaggaagaagatgaagattcttcttacgtgttagaaattgcgggtgaagaggaagaagacgggtctcttgagccggcctctgcatttgctatggcctgtgcctctgtgaagaggaatgtcaccgacttcctgaagagagcaaccctgaagaacctcaggaagcagtacaggaacgtgaaaaagatgactgcgaaggagctggtgaaggtgctcttctcctttttctggatgctgttcgtggggctattccagttgctcttcaccatcctgggaggaatctttcagatcctctggagcacagtgtttggagggggcctggtagaaggggcaaagaacatcagagtgaccaagatcctgggtgacatgcctgacccaacccaatttggtatccatgatgacactatggaggctgagagggcagaggtgatggagccaggtatcaccactgaactagtacacttcataaagggggagaagggagatacagatatcatgtcagacctctttggactccacccaaagaaagagggcagcttaaagcatgggcctgaagtgggtttgggtgacctctcagaaattattggcaaggatgaaccccctacattagagagtactgtacagaagaagaggaaagctcaggcagcagaaatgaaagcagcaaatgaagcagaaggaaaagtagaatccgagaaggcagacatggaagatggagagaaggaagacaaagacaaagaagaggagcaagctgagtacctgtggacagaagtgacaaaaaagaagaagcggcggtgtggtcagaaggttgagaagccggaagctttcacagccaatttctttaaagggctggaaatctatcagaccaagttactgcattacctggccaggaatttctacaacctgaggttccttgctctgtttgtagccttcgctatcaacttcatcctgcttttttataaggtcactgaagaacctttagaagaagagacagaggatgttgcaaacctatggaattcctttaatgacgaggaagaggaagaagcgatggtattctttgtccttcaggagagcaccgggtatatggcaccaaccctgcgtgccctggccatcatccataccatcatctctctagtctgtgtggtgggctactactgcctgaaggtgcctttggtggttttcaaaagggaaaaagaaatcgccaggaagctggagtttgatggcctatatatcaccgaacagccatctgaagatgacatcaaggggcagtgggaccgcttggtgatcaacacaccatcttttcctaataactactgggacaagtttgtaaagagaaaggtgatcaacaagtatggagatctctacggagcagaacgcattgctgaacttctgggtttggacaaaaatgctcttgactttagcccagtagaagagaccaaagcagaagcggcttctctggtgtcatggctaagttccatagacatgaagtaccatatctggaagcttggagttgtttttactgacaactcctttctctaccttgcctggtatacaaccatgtcagtcctgggccactacaataacttcttctttgctgctcacctattggacatcgcaatgggcttcaagacactgaggaccattctgtcatctgtaactcacaatggcaaacagttggttctgactgtcggtctcctggccgtggtggtttatctctatactgtggtggctttcaacttcttccgcaagttctacaacaaaagcgaagacgatgacgagcccgatatgaagtgcgacgacatgatgacgtgttaccttttccacatgtacgtgggagtgagagcaggaggtggcattggtgatgaaattgaagaccctgctggtgatccttatgaaatgtatcgcattgtctttgacattacctttttcttcttcgtcattgtcatcttgctggccatcattcaaggtcttattattgatgctttcggagagctaagagaccagcaggaacaagtacgagaagatatggagactaaatgtttcatctgtgggattggcaatgactactttgacacaacccctcatggttttgaaacacatacattacaagagcacaacttagccaactacttgttctttctgatgtatttgattaataaagatgaaacagagcacacgggtcaggaatcttatgtctggaagatgtaccaagaaaggtgttgggatttcttcccagccggtgactgctttcgtaaacaatatgaagatcagcttggataaatctgaatcaaagaagcgcgacaattctggacagtcaacttcccatgaaataaagtcccctttttacagttctgcaacatatctgaaatgtgacattttctaaatgcctcccttaaaaaaaaaactgctgaaaatctgtgctattttgaaattgatttggctttttgtgcctaatggacatacactgtgggagagaacctgtcaaaatgtcgaagaaggaaggcgaagaatcaagtaatctctaggcaaatgccttcaagttttccagttctgaggtaactagttcagtttgttgggatggaagcatgaaggaaagggctagagaagtatgaaatctcgaatgtgtaatacctgaaaatttaaacacttgaatgtcatcatggtatccaacttgtgactcatagggtctgaactcactccaaaagataataactgcagtctaatttttcccatggtacttgctagtgactgtatccagaaaagctttaagcagttaaagaaacagaaaaaaaccgacactttgtcgacactgaaatatcgattaagtgccttaaaacctctttagacatagctatgcaagttttttatgtttgtgttccagaaggacagttccattcattagttgtgatcttccgtcttactttatgaaactgcacttgaaggttattcatacaagtttttttagtaacagctgtcagtcaactgctgttattagaagaaaagtactgtactgaaaattcagaaaaaaaatctcaaccttatgccaaaatggagtaatgctttatggtcccttgtaagtagtggagctgctctgtttaggtgaatctcctcaaatacaatgaagtgcccactgcaataaagtaatacgtacc

SEQ ID NO: 87188 - DNA, 15557 bp, Artificial Sequence
  derived and/or modified sequence
gcagcagcagtcagcgcacgccgagcggctgccgggggaagcagaggcgccggaggctggggcaccgccgacgcctcgggagccatggccgaagggggagaaggaggcgaggacgagatccagtttctgaggactgaggatgaagtggtactccagtgcatcgccaccattcataaggagcagaggaagttctgcctggcagccgagggacttgggaatcgcctgtgcttcttggaacccacttcagaagccaagtacattcctccagatctctgcgtctgcaattttgtgctggaacagtccctatctgtcagagccctgcaggaaatgcttgccaacacaggtgaaaatggcggcgaaggggcagcacaaggaggtggccacaggaccctgttatacggccatgcagttctcctgaggcactctttcagcggaatgtatctaacatgcttgactacatcaagatcccagacagacaaacttgcctttgatgtaggtctacgggaacatgccacaggagaagcctgttggtggactatacatcctgcttccaaacagaggtccgaaggagagaaagttcgaattggcgatgacctcatcctcgtcagcgtgtcctctgaaagataccttcatctctcagtatcaaatggtaacatacaagtggatgcctcctttatgcaaacactctggaatgtacatcctacgtgctcaggaagtagcatcgaagaaggatacctacttggtgggcatgtagtacgtcttttccatggtcatgatgaatgtttgacgataccatctacagaccagaatgattcccagcacaggaggatattctacgaagctgggggagctgggactcgagccaggtctctttggagagtggaaccccttcggataagctggagtggcagtaacatcagatggggccaggctttccgactccggcatctcaccacaggccactacctggccttgacagaagaccaaggccttatactgcaagaccgggcaaagtcagacaccaagtccacagctttctctttccgggcatcaaaggaactcaaggagaaattagactccagtcacaagcgagacatagaaggcatgggagttccagaaatcaagtatggagattctgtctgctttgtgcagcatatagccagtggtctgtgggtgacctacaaagcacaagacgccaaaacttcccgcctgggacctctaaaaagaaaggtcatactccatcaggaaggccacatggatgatggattaacactgcagagatgccagcgtgaggagtcccaggctgctcggatcatccggaacactacagccttattcagccagtttgtcagcggaaacaatcgcacagctgcccccatcaccctgcctatagaagaagtcctgcagaccctacaggacttgatcgcctacttccagcccccagaggaggagatgcgacatgaagacaagcagaacaagctccgctcactcaaaaacagacaaaatcttttcaaggaagagggaatgttggcccttgtcttaaattgcattgaccgcttaaatgtctacaatagcgtagcacactttgcagggattgcaagggaagagagtggcatggcctggaaagaaattctgaacctcctctacaaattgctggctgctctcattcgcggaaacagaaacaattgcgctcaattctccaataaccttgattggctcatcagtaaattggacagactagaatcttcctcaggtatcttggaagttttgcactgcatcttaactgaaagcccagaagccttaaatctgatagcggagggccacatcaagtcgatcatctccctgttggataagcacgggcggaatcacaaggttctggatatcctgtgctccctctgtctctgcaatggggttgcagtgagagccaaccagaatctgatctgtgacaacttgctgccccggagaaacctactcctgcagacacgactgattaacgatgtaaccagtatccggccaaacatcttcctgggagtcgcggagggctcagcccagtacaagaagtggtacttcgagctgattatcgaccaggtggaccccttcctaacagcagagcccacacatctgcgggtgggctgggcctcttcttcaggctatgccccatacccaggaggtggagaaggatggggaggcaatggtgttggtgacgacctgtactcctatggctttgatggacttcacctttggtcaggccggatacccagagctgtggcttccatcaaccagcacctcctgagatcggatgacgtggtaagctgctgcctggacctcggggtgcccagcatctcattccgcatcaatgggcagcccgtgcaggggatgtttgagaacttcaacacagacgggctcttcttccctgtgatgagcttttcagcaggtgtcaaagtacgtttcctgatgggtggacgtcatggagagtttaagttcctgcctccctctggctatgccccttgctatgaagccttacttccaaaagagaagatgagattggagcctgtcaaagaatataaacgtgatgctgatggcattagagatctcttgggtaccacccagttcctctcccaagcctctttcatcccatgccccgtagacaccagtcaggttattttgccacctcacctagaaaagatccgagacagactagctgaaaacatccatgagctttggggaatgaataaaatagaacttggctggactttcggcaagatacgagatgacaataaaagacaacacccttgccttgtggagttttcaaagctcccagaaactgagaagaactataacctgcaaatgtcaactgaaaccttaaaaaccctcttggccctggggtgccacattgctcatgttaacccagctgctgaggaggatctcaagaaggtcaaactgcccaaaaactatatgatgtccaacggctataagccagcccctttggatttgtctgatgtgaagctgttacctcctcaagaaattttagtggataagcttgcagaaaatgcacacaatgtttgggcaaaagacagaataaaacaaggatggacctatggcatccaacaggatttgaagaacaaaagaaatccccgtctggtgccatatgcattactggatgagcgtaccaagaagtcaaacagggacagcctgcgggaagctgtgcgcacttttgttggttacgggtataacattgagccatcagaccaagaactagctgactcggctgtggagaaggtcagcatagacaagatccgatttttccgggtagagcgatcttatgcagtgagatctggaaagtggtattttgagtttgaagtggtgactggaggagacatgcgagtcggctgggcgaggccaggctgtcgacctgatgtcgagctgggggccgatgaccaagcctttgtgtttgaaggcaacaggggccagcgttggcatcaaggaagtgggtattttgggcgtacctggcagccaggggatgtggtcggatgtatgattaacctggatgatgcttcaatgatcttcacactgaatggggagctgctgatcaccaacaaaggctctgaacttgccttcgctgactacgagattgagaatggcttcgtgcccatctgctgtctgggtctatctcagatcggccgcatgaatctcgggacagatgccagtaccttcaagttttataccatgtgcggtctccaagagggctttgagccttttgctgtcaacatgaacagagatgttgctatgtggttcagcaagcgcctcccgacgtttgtcaacgtgccaaaggatcatccacacatagaggtcatgaggattgatggcaccatggacagccctccgtgtctcaaggtgacgcataagacatttggcacacagaatagcaatgccgacatgatctattgccgcttgagcatgcctgtcgagtgccactcctccttcagccacagcccctgtctggacagtgaagctttccagaaaaggaaacagatgcaagaaatactctctcatacaacaacacagtgctactacgccatccgcatctttgctggacaggatccatcctgtgtctgggtcggatgggtgactccagactatcacttgtacagtgaaaagtttgacctgaataaaaactgcacagtgactgtcaccctaggggatgaaagaggccgggtccatgaaagtgtgaaacgcagcaactgctacatggtctggggtggagacattgtagccagttcccagagatcaaatcggagcaacgtggacctggagatcggctgtctcgtggatctggccatgggcatgttgtccttctcagccaatggaaaggaactgggcacctgctaccaggtggagcctaataccaaagtgtttccagcagtcttcctgcagcctacaagtacttctttgtttcagtttgaacttggaaagctgaagaacgcaatgcccctgtcagcggccatattcaggagtgaagagaagaacccagtcccacagtgtccacctcggctggacgtccaaaccatccagcccgtgctctggagccgcatgcccaacagcttcctgaaggtggagaccgagcgtgtgagcgagcgccacggctgggtggtgcagtgcctggagcccctgcagatgatggcgctccacatccccgaggagaacaggtgtgtggatatcctggagctctgtgagcaggaggacctgatgcggttccattaccacacgctgaggctctacagcgcggtgtgcgccctgggaaacagccgcgtggcctacgccctgtgcagccacgtggacctctcccagctcttctatgccattgacaacaagtacctccccggcctccttcgatctggtttctatgacctgctcatcagcatccacctggccagcgccaaggagaggaagctgatgatgaagaacgagtacatcatccccattaccagcaccaccaggaatatccgcctcttcccggacgagtccaagaggcatggactgcctggggtgggcctgagaacatgtctcaagcccgggttcaggttctccaccccttgctttgttgtgactggtgaggatcaccaaaagcagagccccgagattcccttggagagtctcaggacgaaggctctgagtatgctgacagaggcagtgcagtgcagcggggcccacatccgagaccctgtaggggggtctgtggagttccagtttgtgcctgtgctgaaactcattggaaccctgctggtcatgggcgtgtttgatgatgatgatgttcggcagatcctcctcctgattgatccctctgtgtttggggagcatagtgcggggacagaggagggagcagaaaaggaggaagtgacccaggtggaggagaaggctgtggaggctggggagaaggccggcaaggaggctcctgtcaaaggcttgttgcagactcgattacccgaatccgtcaagctgcagatgtgtgagctcctcagctatctctgcgactgtgagctgcagcaccgagtggaggccattgtggcatttggtgacatttatgtctccaagctgcaggcaaatcagaagttccgctacaatgagctcatgcaggccctgaacatgtctgcggccctgactgcccggaagaccaaggagttccgctcacccccacaggagcagatcaacatgctgcttaactttcaactgggagagaactgcccctgcccagaggagattcgggaggagctgtatgatttccatgaggaccttctccttcactgtggggttcctttggaagaagaggaagaggaggaggaggacacctcctggacaggaaaactctgtgccttggtttacaaaatcaaaggcccacccaagccagagaaggagcagccgacggaggaggaggagagatgccccacaacattgaaggaactcatctcacagacgatgatctgctgggcccaggaggaccagatccaggattcagagctggtccgaatgatgttcaacctcctccggaggcagtatgacagcattggggagctgctgcaggcgctgcggaagacctacaccatcagccacacctctgtaagcgacaccatcaacctgctggctgccctgggccaaatccgctccctcctcagtgtcaggatgggcaaggaagaggagttgctcatgatcaatgggctgggagacataatgaacaacaaggtgttttaccagcatcccaacctcatgagagtcctgggcatgcacgagacggtgatggaggtgatggtgaacgtgttgggtacagagaaatctcagattgcatttccaaagatggttgctagctgctgccgtttcctttgctatttctgtcgaattagccggcaaaatcagaaggccatgtttgagcatctgagttatcttctggagaatagcagtgttggcctagcctccccgtcgatgaggggatccaccccgctggatgtggcagcttcctctgtgatggacaacaatgagttagcgctgagcttagaggaaccagacctcgagaaggtggtgacctacttggcaggctgtggcctacagagctgccccatgcttctggccaaaggataccctgatgtcggctggaaccccattgaaggggaacgctacctgtccttcctgaggtttgctgtcttcgtgaacagtgagagtgtggaagaaaacgccagcgttgtggtcaagctgctcatcagacgcccagagtgcttcggcccggccctgcggggtgaggggggaaacgggctcttggcagccatgcagggtgccattaagatctctgagaacccagcgctcgacctcccctctcaaggatacaaaagagaagtcagcacgggggacgatgaagaggaagaagaaatcgtgcatatgggcaatgcaattatgtcattttattcggcccttatagatctactgggccgctgtgctcctgaaatgcacctcatccagacaggaaagggggaagccatccgcatcaggtccatcctgcgctccctggtccccacagaagacctggttgggatcatcagcatccccttgaaactgccctccctcaacaaagatgggtcggtcagtgagccagatatggcggccaatttctgccctgaccacaaggcacctatggtgctgttcttggaccgcgtttatggcattaaggatcaaacttttctgctccacttgctggaggttggatttttacctgacctaagagcttctgcctctctagatacagtttccctaagcaccacagaggctgcgcttgcactaaataggtatatatgttctgctgtgctcccgctcctcacaagatgtgcccctctctttgccggaacagaacactgcacctctctgattgattccacactgcagacaatatacaggctatccaagggacgttccctcaccaaagcacaaagggacactatagaagaatgtttgcttgccatttgcaatcacttgaggccttccatgttacagcaactcctgcgacgcctcgtttttgatgtgccgcaactcaatgaatactgcaaaatgcctctcaagcttctgacgaatcactatgaacagtgttggaagtattactgcctgccttcaggatgggggagctacgggctagctgtggaagaagagctgcacctaacggagaagcttttctgggggatttttgactcgctctcccataagaaatatgacccagatcttttccgaatggccctgccttgtctcagtgctatagctggggccttgccaccagattatttagataccagaatcacagccacgttggagaaacagatctcagtggatgcggatggcaactttgacccaaaacctattaacaccatgaatttttccttgcctgaaaaattggaatacatcgtcaccaagtatgctgagcattcacatgataaatgggcctgtgacaagagtcagagtggatggaaatatgggatttccctggatgaaaatgtgaagacccacccactgataaggcctttcaagacattaacggagaaggagaaggaaatttatcgctggcctgcgcgagagtccctgaaaaccatgctggctgtgggctggactgtggagaggaccaaagagggagaagctttggttcaacagcgggaaaatgagaagcttcgaagtgtgtcccaggccaaccagggcaacagctacagtcctgctcccctcgacctctcaaacgttgtgctctccagagagctccagggaatggtggaggtcgtggctgagaactatcacaatatctgggccaagaagaagaagctggagctggagagcaaaggtggtggcagccaccctcttctggtaccatatgacaccttgactgccaaggaaaagttcaaggaccgggagaaggcacaggacctgtttaagttcctccaagtgaatggcatcatagtttccaggggtatgaaggatatggagctggatgcctcctccatggagaagaggtttgcctataagttcttgaagaagatcctgaaatacgttgattctgctcaagaatttattgcccatttagaagccattgtcagcagtgggaaaactgaaaagtctccccgtgaccaggagatcaaattctttgccaaagttctcctcccgctggttgaccagtacttcaccagtcattgcctctacttcttgtcatcccctctgaagccccttagcagcagcggatatgcctcccataaggagaaagaaatggtggccggcctgttctgcaaacttgccgctctcgttagacacagaatttccctctttggtagtgattctactacaatggtgagctgtcttcacatcttagctcagacacttgacacaaggactgtcatgaagtcaggctcagagctggtgaaggctgggttacgagcattctttgaaaatgctgcagaagatttggagaagacttcagaaaacctgaaacttgggaagttcacccattcccgaacgcagattaaaggcgtttctcagaatattaactacactacagtggctctgctccccatcctgacgtccatctttgagcacgtcactcagcatcagtttggaatggatctactcttgggtgatgtgcagatttcatgctaccacatactgtgcagcctctactcccttgggacgggaaagaacatttatgttgaaaggcaacgccctgcccttggagaatgtctggcctcgctggcagctgccataccagtggcattcctggagcccacccttaatcgctacaatccactctcggtcttcaacaccaaaacccccagggagaggtctattctggggatgccagacacggtagaagacatgtgtcctgacatcccccagctggaaggcctgatgaaggaaatcaacgacctggccgagtcaggggcccggtacacagagatgccccatgtcatcgaggtgatcttacccatgctctgcaactacttgtcctactggtgggagcggggtcctgagaacctgccccccagcacagggccatgctgcaccaaggtcacctctgaacacctcagtctcatcctgggcaacattctgaaaatcatcaacaacaacctgggcatcgatgaggcctcctggatgaagcgcattgcagtgtatgcacagcccatcatcagcaaagccaggcccgacctgctgagaagccacttcatcccaactctggagaagctgaagaaaaaggctgtcaagacggtgcaggaggaggagcagttgaaagccgatggcaaaggggacacccaggaggcagaactcctcatcctggacgagttcgcggtcctctgcagagatctctatgccttctaccccatgctgatccgctacgtggacaacaacagatctaactggctgaaaagtcctgatgctgattctgaccagctcttccgcatggtggcagaagtcttcattctgtggtgtaaatctcataacttcaagagagaagagcaaaattttgtgattcagaatgaaattaataatttggcatttttaactggagacagcaaaagcaagatgtcaaaatctggaggacaagaccaggagcggaagaagacaaagcggcggggagacttgtattccatccagacctccctcatcgtggctgcactcaagaaaatgctgcccattggtttgaatatgtgtactccaggcgaccaggagctgatctccctcgcaaaatcgcgatacagccatagggacacagatgaagaggtcagagaacatctgcggaacaacttgcacttgcaggaaaagtctgatgacccagctgtaaaatggcaactgaacctctacaaggatgttctgaagagtgaagaacctttcaatccggaaaagacagtggagcgtgtgcagagaatttcagcagctgtcttccacctggaacaggtggaacagcctttgaggtccaagaaggccgtctggcacaaactgttatcaaagcaacggaaacgggcagtggtggcctgtttcaggatggcccctctctacaacctgcccaggcaccgctctattaacctcttcctccatggctatcagagattttggatagaaacagaggagtattcctttgaagagaaactagtacaggatttggctaaatctccaaaggtggaagaggaggaggaggaagagacagaaaaacaacctgacccactacatcagatcattctctattttagccgcaacgctctcacggagaggagcaaattggaagacgaccctttgtacacctcctattccagcatgatggccaagagttgtcaaagtggtgaggatgaagaagaagatgaagacaaggaaaaaacattcgaagagaaagagatggagaagcaaaaaaccctctatcagcaagctcggctgcatgagcgtggtgctgcagagatggtccttcagatgataagcgctagcaaaggtgagatgagccccatggtggttgagacgctgaagctggggatcgccattctgaacggaggcaatgctggtgtgcaacagaaaatgctagattacctaaaggagaaaaaggatgctggattctttcaaagcctttctggtcttatgcagtcttgcagtgtccttgatttgaatgcatttgagaggcagaataaagctgaaggcctggggatggtgactgaagaaggaacactcattgttcgggaacgtggtgaaaaagtactccagaatgacgagttcacgcgtgatctctttagattcctacagttactttgtgagggacataacagtgactttcagaacttcctgcggactcagatgggcaacaccaccaccgtgaatgtcatcatcagcactgtggactaccttctgcgtctgcaggaatcaatcagtgatttctactggtattattcagggaaggacatcattgatgaatctggacagcacaatttttccaaagctctggcagtcaccaagcagattttcaattctcttacagaatacatccagggcccttgcattggtaatcaacagagcctggctcacagcaggctgtgggacgcagtggttggcttcctccatgtctttgctaatatgcagatgaaactctctcaggattccagtcagatcgagctgctgaaggaactcttggatctccttcaggacatggtggtgatgcttctgtccctcctggaagggaatgtggtaaatggcaccattggcaagcagatggttgacacactggtagaatcatctaccaatgtagaaatgatcttgaaattctttgacatgttcttgaaacttaaagacttaaccagctcagacaccttcaaagaatatgacccagatggtaaaggaattatctccaaaaaagaattccagaaggccatggaagggcaaaaacagtacacgcagtcagagattgactttctcctgtcgtgtgcagaagctgatgagaatgacatgtttaattacgttgattttgtagaccggttccatgagccagccaaggacatagggtttaatgtggctgtgttattgacaaatctttctgaacacatgccaaacgattcccgcctgaagtgtctgttggacccagcagaaagtgtgctaaattacttcgaaccctacctaggacgcatcgagatcatgggtggggccaagaagattgagcgtgtttattttgagatcagtgaatccagtcgcactcagtgggagaagccccaggtgaaggaatctaagcgacagttcatttttgatgttgtcaatgaaggtggggagcaggaaaagatggagctgtttgtgaacttctgtgaggacaccatctttgaaatgcagttagcatctcagatctctgaatccgattcagctgacaggccagaagaggaggaagaagatgaagattcttcttacgtgttagaaattgcgggtgaagaggaagaagacgggtctcttgagccggcctctgcatttgctatggcctgtgcctctgtgaagaggaatgtcaccgacttcctgaagagagcaaccctgaagaacctcaggaagcagtacaggaacgtgaaaaagatgactgcgaaggagctggtgaaggtgctcttctcctttttctggatgctgttcgtggggctattccagttgctcttcaccatcctgggaggaatctttcagatcctctggagcacagtgtttggagggggcctggtagaaggggcaaagaacatcagagtgaccaagatcctgggtgacatgcctgacccaacccaatttggtatccatgatgacactatggaggctgagagggcagaggtgatggagccaggtatcaccactgaactagtacacttcataaagggggagaagggagatacagatatcatgtcagacctctttggactccacccaaagaaagagggcagcttaaagcatgggcctgaagtgggtttgggtgacctctcagaaattattggcaaggatgaaccccctacattagagagtactgtacagaagaagaggaaagctcaggcagcagaaatgaaagcagcaaatgaagcagaaggaaaagtagaatccgagaaggcagacatggaagatggagagaaggaagacaaagacaaagaagaggagcaagctgagtacctgtggacagaagtgacaaaaaagaagaagcggcggtgtggtcagaaggttgagaagccggaagctttcacagccaatttctttaaagggctggaaatctatcagaccaagttactgcattacctggccaggaatttctacaacctgaggttccttgctctgtttgtagccttcgctatcaacttcatcctgcttttttataaggtcactgaagaacctttagaagaagagacagaggatgttgcaaacctatggaattcctttaatgacgaggaagaggaagaagcgatggtattctttgtccttcaggagagcaccgggtatatggcaccaaccctgcgtgccctggccatcatccataccatcatctctctagtctgtgtggtgggctactactgcctgaaggtgcctttggtggttttcaaaagggaaaaagaaatcgccaggaagctggagtttgatggcctatatatcaccgaacagccatctgaagatgacatcaaggggcagtgggaccgcttggtgatcaacacaccatcttttcctaataactactgggacaagtttgtaaagagaaaggtgatcaacaagtatggagatctctacggagcagaacgcattgctgaacttctgggtttggacaaaaatgctcttgactttagcccagtagaagagaccaaagcagaagcggcttctctggtgtcatggctaagttccatagacatgaagtaccatatctggaagcttggagttgtttttactgacaactcctttctctaccttgcctggtatacaaccatgtcagtcctgggccactacaataacttcttctttgctgctcacctattggacatcgcaatgggcttcaagacactgaggaccattctgtcatctgtaactcacaatggcaaacagttggttctgactgtcggtctcctggccgtggtggtttatctctatactgtggtggctttcaacttcttccgcaagttctacaacaaaagcgaagacgatgacgagcccgatatgaagtgcgacgacatgatgacgtgttaccttttccacatgtacgtgggagtgagagcaggaggtggcattggtgatgaaattgaagaccctgctggtgatccttatgaaatgtatcgcattgtctttgacattacctttttcttcttcgtcattgtcatcttgctggccatcattcaaggtcttattattgatgctttcggagagctaagagaccagcaggaacaagtacgagaagatatggagactaaatgtttcatctgtgggattggcaatgactactttgacacaacccctcatggttttgaaacacatacattacaagagcacaacttagccaactacttgttctttctgatgtatttgattaataaagatgaaacagagcacacgggtcaggaatcttatgtctggaagatgtaccaagaaaggtgttgggatttcttcccagccggtgactgctttcgtaaacaatatgaagatcagcttggataaatctgaatcaaagaagcgcgacaattctggacagtcaacttcccatgaaataaagtcccctttttacagttctgcaacatatctgaaatgtgacattttctaaatgcctcccttaaaaaaaaaactgctgaaaatctgtgctattttgaaattgatttggctttttgtgcctaatggacatacactgtgggagagaacctgtcaaaatgtcgaagaaggaaggcgaagaatcaagtaatctctaggcaaatgccttcaagttttccagttctgaggtaactagttcagtttgttgggatggaagcatgaaggaaagggctagagaagtatgaaatctcgaatgtgtaatacctgaaaatttaaacacttgaatgtcatcatggtatccaacttgtgactcatagggtctgaactcactccaaaagataataactgcagtctaatttttcccatggtacttgctagtgactgtatccagaaaagctttaagcagttaaagaaacagaaaaaaaccgacactttgtcgacactgaaatatcgattaagtgccttaaaacctctttagacatagctatgcaagttttttatgtttgtgttccagaaggacagttccattcattagttgtgatcttccgtcttactttatgaaactgcacttgaaggttattcatacaagtttttttagtaacagctgtcagtcaactgctgttattagaagaaaagtactgtactgaaaattcagaaaaaaaatctcaaccttatgccaaaatggagtaatgctttatggtcccttgtaagtagtggagctgctctgtttaggtgaatctcctcaaatacaatgaagtgcccactgcaataaagtaatacgtaccaat

SEQ ID NO: 87189 - DNA, 14601 bp, Artificial Sequence
  derived and/or modified sequence
atggccgagctgggcggcggcggcgaggaggacgccagatggtacagaaaggaggacgaggtggtgctgcagtgcatcgccaccatccacaaggagcagagaaagttctgcctggccgccgagggcctgggcaacagactgtgcttcctggagcccaccagcgaggccaagtacatcccccccgacctgtgcgtgtgcaacttcgtgctggagcagagcctgagcgtgagagccctgcaggagatgctggccaacaccggcgagaacggcggcgagggcgccgcccagggcggcggccacagaaccctgctgtacggccacgccgtgctgctgagacacagcttcagcggcatgtacctgacctgcctgaccaccagcagaagccagaccgacaagctggccttcgacgtgggcctgagagagcacgccaccggcgaggcctgctggtggaccatccaccccgccagcaagcagagaagcgagggcgagaaggtgagaatcggcgacgacctgatcctggtgagcgtgagcagcgagagatacctgcacctgagcgtgagcaacggcaacatccaggtggacgccagcttcatgcagaccctgtggaacgtgcaccccacctgcagcggcagcagcatcgaggagggctacctgctgggcggccacgtggtgagactgttccacggccacgacgagtgcctgaccatccccagcaccgaccagaacgacagccagcacagaagaatcttctacgaggccggcggcgccggcaccagagccagaagcctgtggagagtggagcccctgagaatcagctggagcggcagcaacatcagatggggccaggccttcagactgagacacctgaccaccggccactacctggccctgaccgaggaccagggcctgatcctgcaggacagagccaagagcgacaccaagagcaccgccttcagcttcagagccagcaaggagctgaaggagaagctggacagcagccacaagagagacatcgagggcatgggcgtgcccgagatcaagtacggcgacagcgtgtgcttcgtgcagcacatcgccagcggcctgtgggtgacctacaaggcccaggacgccaagaccagcagactgggccccctgaagagaaaggtgatcctgcaccaggagggccacatggacgacggcctgaccctgcagagatgccagagagaggagagccaggccgccagaatcatcagaaacaccaccgccctgttcagccagttcgtgagcggcaacaacagaaccgccgcccccatcaccctgcccatcgaggaggtgctgcagaccctgcaggacctgatcgcctacttccagccccccgaggaggagatgagacacgaggacaagcagaacaagctgagaagcctgaagaacagacagaacctgttcaaggaggagggcatgctggccctggtgctgaactgcatcgacagactgaacgtgtacaacagcgtggcccacttcgccggcatcgccagagaggagagcggcatggcctggaaggagatcctgaacctgctgtacaagctgctggccgccctgatcagaggcaacagaaacaactgcgcccagttcagcaacaacctggactggctgatcagcaagctggacagactggagagcagcagcggcatcctggaggtgctgcactgcatcctgaccgagagccccgaggccctgaacctgatcgccgagggccacatcaagagcatcatcagcctgctggacaagcacggcagaaaccacaaggtgctggacatcctgtgcagcctgtgcctgtgcaacggcgtggccgtgagagccaaccagaacctgatctgcgacaacctgctgcccagaagaaacctgctgctgcagaccagactgatcaacgacgtgaccagcatcagacccaacatcttcctgggcgtggccgagggcagcgcccagtacaagaagtggtacttcgagctgatcatcgaccaggtggaccccttcctgaccgccgagcccacccacctgagagtgggctgggccagcagcagcggctacgccccctaccccggcggcggcgagggctggggcggcaacggcgtgggcgacgacctgtacagctacggcttcgacggcctgcacctgtggagcggcagaatccccagagccgtggccagcatcaaccagcacctgctgagaagcgacgacgtggtgagctgctgcctggacctgggcgtgcccagcatcagcttcagaatcaacggccagcccgtgcagggcatgttcgagaacttcaacaccgacggcctgttcttccccgtgatgagcttcagcgccggcgtgaaggtgagattcctgatgggcggcagacacggcgagttcaagttcctgccccccagcggctacgccccctgctacgaggccctgctgcccaaggagaagatgagactggagcccgtgaaggagtacaagagagacgccgacggcatcagagacctgctgggcaccacccagttcctgagccaggccagcttcatcccctgccccgtggacaccagccaggtgatcctgcccccccacctggagaagatcagagacagactggccgagaacatccacgagctgtggggcatgaacaagatcgagctgggctggaccttcggcaagatcagagacgacaacaagagacagcacccctgcctggtggagttcagcaagctgcccgagaccgagaagaactacaacctgcagatgagcaccgagaccctgaagaccctgctggccctgggctgccacatcgcccacgtgaaccccgccgccgaggaggacctgaagaaggtgaagctgcccaagaactacatgatgagcaacggctacaagcccgcccccctggacctgagcgacgtgaagctgctgcccccccaggagatcctggtggacaagctggccgagaacgcccacaacgtgtgggccaaggacagaatcaagcagggctggacctacggcatccagcaggacctgaagaacaagagaaaccccagactggtgccctacgccctgctggacgagagaaccaagaagagcaacagagacagcctgagagaggccgtgagaaccttcgtgggctacggctacaacatcgagcccagcgaccaggagctggccgacagcgccgtggagaaggtgagcatcgacaagatcagattcttcagagtggagagaagctacgccgtgagaagcggcaagtggtacttcgagttcgaggtggtgaccggcggcgacatgagagtgggctgggccagacccggctgcagacccgacgtggagctgggcgccgacgaccaggccttcgtgttcgagggcaacagaggccagagatggcaccagggcagcggctacttcggcagaacctggcagcccggcgacgtggtgggctgcatgatcaacctggacgacgccagcatgatcttcaccctgaacggcgagctgctgatcaccaacaagggcagcgagctggccttcgccgactacgagatcgagaacggcttcgtgcccatctgctgcctgggcctgagccagatcggcagaatgaacctgggcaccgacgccagcaccttcaagttctacaccatgtgcggcctgcaggagggcttcgagcccttcgccgtgaacatgaacagagacgtggccatgtggttcagcaagagactgcccaccttcgtgaacgtgcccaaggaccacccccacatcgaggtgatgagaatcgacggcaccatggacagccccccctgcctgaaggtgacccacaagaccttcggcacccagaacagcaacgccgacatgatctactgcagactgagcatgcccgtggagtgccacagcagcttcagccacagcccctgcctggacagcgaggccttccagaagagaaagcagatgcaggagatcctgagccacaccaccacccagtgctactacgccatcagaatcttcgccggccaggaccccagctgcgtgtgggtgggctgggtgacccccgactaccacctgtacagcgagaagttcgacctgaacaagaactgcaccgtgaccgtgaccctgggcgacgagagaggcagagtgcacgagagcgtgaagagaagcaactgctacatggtgtggggcggcgacatcgtggccagcagccagagaagcaacagaagcaacgtggacctggagatcggctgcctggtggacctggccatgggcatgctgagcttcagcgccaacggcaaggagctgggcacctgctaccaggtggagcccaacaccaaggtgttccccgccgtgttcctgcagcccaccagcaccagcctgttccagttcgagctgggcaagctgaagaacgccatgcccctgagcgccgccatcttcagaagcgaggagaagaaccccgtgccccagtgcccccccagactggacgtgcagaccatccagcccgtgctgtggagcagaatgcccaacagcttcctgaaggtggagaccgagagagtgagcgagagacacggctgggtggtgcagtgcctggagcccctgcagatgatggccctgcacatccccgaggagaacagatgcgtggacatcctggagctgtgcgagcaggaggacctgatgagattccactaccacaccctgagactgtacagcgccgtgtgcgccctgggcaacagcagagtggcctacgccctgtgcagccacgtggacctgagccagctgttctacgccatcgacaacaagtacctgcccggcctgctgagaagcggcttctacgacctgctgatcagcatccacctggccagcgccaaggagagaaagctgatgatgaagaacgagtacatcatccccatcaccagcaccaccagaaacatcagactgttccccgacgagagcaagagacacggcctgcccggcgtgggcctgagaacctgcctgaagcccggcttcagattcagcaccccctgcttcgtggtgaccggcgaggaccaccagaagcagagccccgagatccccctggagagcctgagaaccaaggccctgagcatgctgaccgaggccgtgcagtgcagcggcgcccacatcagagaccccgtgggcggcagcgtggagttccagttcgtgcccgtgctgaagctgatcggcaccctgctggtgatgggcgtgttcgacgacgacgacgtgagacagatcctgctgctgatcgaccccagcgtgttcggcgagcacagcgccggcaccgaggagggcgccgagaaggaggaggtgacccaggtggaggagaaggccgtggaggccggcgagaaggccggcaaggaggcccccgtgaagggcctgctgcagaccagactgcccgagagcgtgaagctgcagatgtgcgagctgctgagctacctgtgcgactgcgagctgcagcacagagtggaggccatcgtggccttcggcgacatctacgtgagcaagctgcaggccaaccagaagttcagatacaacgagctgatgcaggccctgaacatgagcgccgccctgaccgccagaaagaccaaggagttcagaagccccccccaggagcagatcaacatgctgctgaacttccagctgggcgagaactgcccctgccccgaggagatcagagaggagctgtacgacttccacgaggacctgctgctgcactgcggcgtgcccctggaggaggaggaggaggaggaggaggacaccagctggaccggcaagctgtgcgccctggtgtacaagatcaagggcccccccaagcccgagaaggagcagcccaccgaggaggaggagagatgccccaccaccctgaaggagctgatcagccagaccatgatctgctgggcccaggaggaccagatccaggacagcgagctggtgagaatgatgttcaacctgctgagaagacagtacgacagcatcggcgagctgctgcaggccctgagaaagacctacaccatcagccacaccagcgtgagcgacaccatcaacctgctggccgccctgggccagatcagaagcctgctgagcgtgagaatgggcaaggaggaggagctgctgatgatcaacggcctgggcgacatcatgaacaacaaggtgttctaccagcaccccaacctgatgagagtgctgggcatgcacgagaccgtgatggaggtgatggtgaacgtgctgggcaccgagaagagccagatcgccttccccaagatggtggccagctgctgcagattcctgtgctacttctgcagaatcagcagacagaaccagaaggccatgttcgagcacctgagctacctgctggagaacagcagcgtgggcctggccagccccagcatgagaggcagcacccccctggacgtggccgccagcagcgtgatggacaacaacgagctggccctgagcctggaggagcccgacctggagaaggtggtgacctacctggccggctgcggcctgcagagctgccccatgctgctggccaagggctaccccgacgtgggctggaaccccatcgagggcgagagatacctgagcttcctgagattcgccgtgttcgtgaacagcgagagcgtggaggagaacgccagcgtggtggtgaagctgctgatcagaagacccgagtgcttcggccccgccctgagaggcgagggcggcaacggcctgctggccgccatgcagggcgccatcaagatcagcgagaaccccgccctggacctgcccagccagggctacaagagagaggtgagcaccggcgacgacgaggaggaggaggagatcgtgcacatgggcaacgccatcatgagcttctacagcgccctgatcgacctgctgggcagatgcgcccccgagatgcacctgatccagaccggcaagggcgaggccatcagaatcagaagcatcctgagaagcctggtgcccaccgaggacctggtgggcatcatcagcatccccctgaagctgcccagcctgaacaaggacggcagcgtgagcgagcccgacatggccgccaacttctgccccgaccacaaggcccccatggtgctgttcctggacagagtgtacggcatcaaggaccagaccttcctgctgcacctgctggaggtgggcttcctgcccgacctgagagccagcgccagcctggacaccgtgagcctgagcaccaccgaggccgccctggccctgaacagatacatctgcagcgccgtgctgcccctgctgaccagatgcgcccccctgttcgccggcaccgagcactgcaccagcctgatcgacagcaccctgcagaccatctacagactgagcaagggcagaagcctgaccaaggcccagagagacaccatcgaggagtgcctgctggccatctgcaaccacctgagacccagcatgctgcagcagctgctgagaagactggtgttcgacgtgccccagctgaacgagtactgcaagatgcccctgaagctgctgaccaaccactacgagcagtgctggaagtactactgcctgcccagcggctggggcagctacggcctggccgtggaggaggagctgcacctgaccgagaagctgttctggggcatcttcgacagcctgagccacaagaagtacgaccccgacctgttcagaatggccctgccctgcctgagcgccatcgccggcgccctgccccccgactacctggacaccagaatcaccgccaccctggagaagcagatcagcgtggacgccgacggcaacttcgaccccaagcccatcaacaccatgaacttcagcctgcccgagaagctggagtacatcgtgaccaagtacgccgagcacagccacgacaagtgggcctgcgacaagagccagagcggctggaagtacggcatcagcctggacgagaacgtgaagacccaccccctgatcagacccttcaagaccctgaccgagaaggagaaggagatctacagatggcccgccagagagagcctgaagaccatgctggccgtgggctggaccgtggagagaaccaaggagggcgaggccctggtgcagcagagagagaacgagaagctgagaagcgtgagccaggccaaccagggcaacagctacagccccgcccccctggacctgagcaacgtggtgctgagcagagagctgcagggcatggtggaggtggtggccgagaactaccacaacatctgggccaagaagaagaagctggagctggagagcaagggcggcggcagccaccccctgctggtgccctacgacaccctgaccgccaaggagaagttcaaggacagagagaaggcccaggacctgttcaagttcctgcaggtgaacggcatcatcgtgagcagaggcatgaaggacatggagctggacgccagcagcatggagaagagattcgcctacaagttcctgaagaagatcctgaagtacgtggacagcgcccaggagttcatcgcccacctggaggccatcgtgagcagcggcaagaccgagaagagccccagagaccaggagatcaagttcttcgccaaggtgctgctgcccctggtggaccagtacttcaccagccactgcctgtacttcctgagcagccccctgaagcccctgagcagcagcggctacgccagccacaaggagaaggagatggtggccggcctgttctgcaagctggccgccctggtgagacacagaatcagcctgttcggcagcgacagcaccaccatggtgagctgcctgcacatcctggcccagaccctggacaccagaaccgtgatgaagagcggcagcgagctggtgaaggccggcctgagagccttcttcgagaacgccgccgaggacctggagaagaccagcgagaacctgaagctgggcaagttcacccacagcagaacccagatcaagggcgtgagccagaacatcaactacaccaccgtggccctgctgcccatcctgaccagcatcttcgagcacgtgacccagcaccagttcggcatggacctgctgctgggcgacgtgcagatcagctgctaccacatcctgtgcagcctgtacagcctgggcaccggcaagaacatctacgtggagagacagagacccgccctgggcgagtgcctggccagcctggccgccgccatccccgtggccttcctggagcccaccctgaacagatacaaccccctgagcgtgttcaacaccaagacccccagagagagaagcatcctgggcatgcccgacaccgtggaggacatgtgccccgacatcccccagctggagggcctgatgaaggagatcaacgacctggccgagagcggcgccagatacaccgagatgccccacgtgatcgaggtgatcctgcccatgctgtgcaactacctgagctactggtgggagagaggccccgagaacctgccccccagcaccggcccctgctgcaccaaggtgaccagcgagcacctgagcctgatcctgggcaacatcctgaagatcatcaacaacaacctgggcatcgacgaggccagctggatgaagagaatcgccgtgtacgcccagcccatcatcagcaaggccagacccgacctgctgagaagccacttcatccccaccctggagaagctgaagaagaaggccgtgaagaccgtgcaggaggaggagcagctgaaggccgacggcaagggcgacacccaggaggccgagctgctgatcctggacgagttcgccgtgctgtgcagagacctgtacgccttctaccccatgctgatcagatacgtggacaacaacagaagcaactggctgaagagccccgacgccgacagcgaccagctgttcagaatggtggccgaggtgttcatcctgtggtgcaagagccacaacttcaagagagaggagcagaacttcgtgatccagaacgagatcaacaacctggccttcctgaccggcgacagcaagagcaagatgagcaagagcggcggccaggaccaggagagaaagaagaccaagagaagaggcgacctgtacagcatccagaccagcctgatcgtggccgccctgaagaagatgctgcccatcggcctgaacatgtgcacccccggcgaccaggagctgatcagcctggccaagagcagatacagccacagagacaccgacgaggaggtgagagagcacctgagaaacaacctgcacctgcaggagaagagcgacgaccccgccgtgaagtggcagctgaacctgtacaaggacgtgctgaagagcgaggagcccttcaaccccgagaagaccgtggagagagtgcagagaatcagcgccgccgtgttccacctggagcaggtggagcagcccctgagaagcaagaaggccgtgtggcacaagctgctgagcaagcagagaaagagagccgtggtggcctgcttcagaatggcccccctgtacaacctgcccagacacagaagcatcaacctgttcctgcacggctaccagagattctggatcgagaccgaggagtacagcttcgaggagaagctggtgcaggacctggccaagagccccaaggtggaggaggaggaggaggaggagaccgagaagcagcccgaccccctgcaccagatcatcctgtacttcagcagaaacgccctgaccgagagaagcaagctggaggacgaccccctgtacaccagctacagcagcatgatggccaagagctgccagagcggcgaggacgaggaggaggacgaggacaaggagaagaccttcgaggagaaggagatggagaagcagaagaccctgtaccagcaggccagactgcacgagagaggcgccgccgagatggtgctgcagatgatcagcgccagcaagggcgagatgagccccatggtggtggagaccctgaagctgggcatcgccatcctgaacggcggcaacgccggcgtgcagcagaagatgctggactacctgaaggagaagaaggacgccggcttcttccagagcctgagcggcctgatgcagagctgcagaagcgtgctggacctgaacgccttcgagagacagaacaaggccgagggcctgggcatggtgaccgaggagggcaccctgatcgtgagagagagaggcgagaaggtgctgcagaacgacgagttcaccagagacctgttcagattcctgcagctgctgtgcgagggccacaacagcgacttccagaacttcctgagaacccagatgggcaacaccaccaccgtgaacgtgatcatcagcaccgtggactacctgctgagactgcaggagagcatcagcgacttctactggtactacagcggcaaggacatcatcgacgagagcggccagcacaacttcagcaaggccctggccgtgaccaagcagatcttcaacagcctgaccgagtacatccagggcccctgcatcggcaaccagcagagcctggcccacagcagactgtgggacgccgtggtgggcttcctgcacgtgttcgccaacatgcagatgaagctgagccaggacagcagccagatcgagctgctgaaggagctgctggacctgctgcaggacatggtggtgatgctgctgagcctgctggagggcaacgtggtgaacggcaccatcggcaagcagatggtggacaccctggtggagagcagcaccaacgtggagatgatcctgaagttcttcgacatgttcctgaagctgaaggacctgaccagcagcgacaccttcaaggagtacgaccccgacggcaagggcatcatcagcaagaaggagttccagaaggccatggagggccagaagcagtacacccagagcgagatcgacttcctgctgagctgcgccgaggccgacgagaacgacatgttcaactacgtggacttcgtggacagattccacgagcccgccaaggacatcggcttcaacgtggccgtgctgctgaccaacctgagcgagcacatgcccaacgacagcagactgaagtgcctgctggaccccgccgagagcgtgctgaactacttcgagccctacctgggcagaatcgagatcatgggcggcgccaagaagatcgagagagtgtacttcgagatcagcgagagcagcagaacccagtgggagaagccccaggtgaaggagagcaagagacagttcatcttcgacgtggtgaacgagggcggcgagcaggagaagatggagctgttcgtgaacttctgcgaggacaccatcttcgagatgcagctggccagccagatcagcgagagcgacagcgccgacagacccgaggaggaggaggaggacgaggacagcagctacgtgctggagatcgccggcgaggaggaggaggacggcagcctggagcccgccagcgccttcgccatggcctgcgccagcgtgaagagaaacgtgaccgacttcctgaagagagccaccctgaagaacctgagaaagcagtacagaaacgtgaagaagatgaccgccaaggagctggtgaaggtgctgttcagcttcttctggatgctgttcgtgggcctgttccagctgctgttcaccatcctgggcggcatcttccagatcctgtggagcaccgtgttcggcggcggcctggtggagggcgccaagaacatcagagtgaccaagatcctgggcgacatgcccgaccccacccagttcggcatccacgacgacaccatggaggccgagagagccgaggtgatggagcccggcatcaccaccgagctggtgcacttcatcaagggcgagaagggcgacaccgacatcatgagcgacctgttcggcctgcaccccaagaaggagggcagcctgaagcacggccccgaggtgggcctgggcgacctgagcgagatcatcggcaaggacgagccccccaccctggagagcaccgtgcagaagaagagaaaggcccaggccgccgagatgaaggccgccaacgaggccgagggcaaggtggagagcgagaaggccgacatggaggacggcgagaaggaggacaaggacaaggaggaggagcaggccgagtacctgtggaccgaggtgaccaagaagaagaagagaagatgcggccagaaggtggagaagcccgaggccttcaccgccaacttcttcaagggcctggagatctaccagaccaagctgctgcactacctggccagaaacttctacaacctgagattcctggccctgttcgtggccttcgccatcaacttcatcctgctgttctacaaggtgaccgaggagcccctggaggaggagaccgaggacgtggccaacctgtggaacagcttcaacgacgaggaggaggaggaggccatggtgttcttcgtgctgcaggagagcaccggctacatggcccccaccctgagagccctggccatcatccacaccatcatcagcctggtgtgcgtggtgggctactactgcctgaaggtgcccctggtggtgttcaagagagagaaggagatcgccagaaagctggagttcgacggcctgtacatcaccgagcagcccagcgaggacgacatcaagggccagtgggacagactggtgatcaacacccccagcttccccaacaactactgggacaagttcgtgaagagaaaggtgatcaacaagtacggcgacctgtacggcgccgagagaatcgccgagctgctgggcctggacaagaacgccctggacttcagccccgtggaggagaccaaggccgaggccgccagcctggtgagctggctgagcagcatcgacatgaagtaccacatctggaagctgggcgtggtgttcaccgacaacagcttcctgtacctggcctggtacaccaccatgagcgtgctgggccactacaacaacttcttcttcgccgcccacctgctggacatcgccatgggcttcaagaccctgagaaccatcctgagcagcgtgacccacaacggcaagcagctggtgctgaccgtgggcctgctggccgtggtggtgtacctgtacaccgtggtggccttcaacttcttcagaaagttctacaacaagagcgaggacgacgacgagcccgacatgaagtgcgacgacatgatgacctgctacctgttccacatgtacgtgggcgtgagagccggcggcggcatcggcgacgagatcgaggaccccgccggcgacccctacgagatgtacagaatcgtgttcgacatcaccttcttcttcttcgtgatcgtgatcctgctggccatcatccagggcctgatcatcgacgccttcggcgagctgagagaccagcaggagcaggtgagagaggacatggagaccaagtgcttcatctgcggcatcggcaacgactacttcgacaccaccccccacggcttcgagacccacaccctgcaggagcacaacctggccaactacctgttcttcctgatgtacctgatcaacaaggacgagaccgagcacaccggccaggagagctacgtgtggaagatgtaccaggagagatgctgggacttcttccccgccggcgactgcttcagaaagcagtacgaggaccagctgggctag

SEQ ID NO: 87190 - DNA, 14598 bp, Artificial Sequence
  derived and/or modified sequence
atggccgagggcggcgagggcggcgaggacgagatccagttcctgagaaccgaggacgaggtggtgctgcagtgcatcgccaccatccacaaggagcagagaaagttctgcctggccgccgagggcctgggcaacagactgtgcttcctggagcccaccagcgaggccaagtacatcccccccgacctgtgcgtgtgcaacttcgtgctggagcagagcctgagcgtgagagccctgcaggagatgctggccaacaccggcgagaacggcggcgagggcgccgcccagggcggcggccacagaaccctgctgtacggccacgccgtgctgctgagacacagcttcagcggcatgtacctgacctgcctgaccaccagcagaagccagaccgacaagctggccttcgacgtgggcctgagagagcacgccaccggcgaggcctgctggtggaccatccaccccgccagcaagcagagaagcgagggcgagaaggtgagaatcggcgacgacctgatcctggtgagcgtgagcagcgagagatacctgcacctgagcgtgagcaacggcaacatccaggtggacgccagcttcatgcagaccctgtggaacgtgcaccccacctgcagcggcagcagcatcgaggagggctacctgctgggcggccacgtggtgagactgttccacggccacgacgagtgcctgaccatccccagcaccgaccagaacgacagccagcacagaagaatcttctacgaggccggcggcgccggcaccagagccagaagcctgtggagagtggagcccctgagaatcagctggagcggcagcaacatcagatggggccaggccttcagactgagacacctgaccaccggccactacctggccctgaccgaggaccagggcctgatcctgcaggacagagccaagagcgacaccaagagcaccgccttcagcttcagagccagcaaggagctgaaggagaagctggacagcagccacaagagagacatcgagggcatgggcgtgcccgagatcaagtacggcgacagcgtgtgcttcgtgcagcacatcgccagcggcctgtgggtgacctacaaggcccaggacgccaagaccagcagactgggccccctgaagagaaaggtgatcctgcaccaggagggccacatggacgacggcctgaccctgcagagatgccagagagaggagagccaggccgccagaatcatcagaaacaccaccgccctgttcagccagttcgtgagcggcaacaacagaaccgccgcccccatcaccctgcccatcgaggaggtgctgcagaccctgcaggacctgatcgcctacttccagccccccgaggaggagatgagacacgaggacaagcagaacaagctgagaagcctgaagaacagacagaacctgttcaaggaggagggcatgctggccctggtgctgaactgcatcgacagactgaacgtgtacaacagcgtggcccacttcgccggcatcgccagagaggagagcggcatggcctggaaggagatcctgaacctgctgtacaagctgctggccgccctgatcagaggcaacagaaacaactgcgcccagttcagcaacaacctggactggctgatcagcaagctggacagactggagagcagcagcggcatcctggaggtgctgcactgcatcctgaccgagagccccgaggccctgaacctgatcgccgagggccacatcaagagcatcatcagcctgctggacaagcacggcagaaaccacaaggtgctggacatcctgtgcagcctgtgcctgtgcaacggcgtggccgtgagagccaaccagaacctgatctgcgacaacctgctgcccagaagaaacctgctgctgcagaccagactgatcaacgacgtgaccagcatcagacccaacatcttcctgggcgtggccgagggcagcgcccagtacaagaagtggtacttcgagctgatcatcgaccaggtggaccccttcctgaccgccgagcccacccacctgagagtgggctgggccagcagcagcggctacgccccctaccccggcggcggcgagggctggggcggcaacggcgtgggcgacgacctgtacagctacggcttcgacggcctgcacctgtggagcggcagaatccccagagccgtggccagcatcaaccagcacctgctgagaagcgacgacgtggtgagctgctgcctggacctgggcgtgcccagcatcagcttcagaatcaacggccagcccgtgcagggcatgttcgagaacttcaacaccgacggcctgttcttccccgtgatgagcttcagcgccggcgtgaaggtgagattcctgatgggcggcagacacggcgagttcaagttcctgccccccagcggctacgccccctgctacgaggccctgctgcccaaggagaagatgagactggagcccgtgaaggagtacaagagagacgccgacggcatcagagacctgctgggcaccacccagttcctgagccaggccagcttcatcccctgccccgtggacaccagccaggtgatcctgcccccccacctggagaagatcagagacagactggccgagaacatccacgagctgtggggcatgaacaagatcgagctgggctggaccttcggcaagatcagagacgacaacaagagacagcacccctgcctggtggagttcagcaagctgcccgagaccgagaagaactacaacctgcagatgagcaccgagaccctgaagaccctgctggccctgggctgccacatcgcccacgtgaaccccgccgccgaggaggacctgaagaaggtgaagctgcccaagaactacatgatgagcaacggctacaagcccgcccccctggacctgagcgacgtgaagctgctgcccccccaggagatcctggtggacaagctggccgagaacgcccacaacgtgtgggccaaggacagaatcaagcagggctggacctacggcatccagcaggacctgaagaacaagagaaaccccagactggtgccctacgccctgctggacgagagaaccaagaagagcaacagagacagcctgagagaggccgtgagaaccttcgtgggctacggctacaacatcgagcccagcgaccaggagctggccgacagcgccgtggagaaggtgagcatcgacaagatcagattcttcagagtggagagaagctacgccgtgagaagcggcaagtggtacttcgagttcgaggtggtgaccggcggcgacatgagagtgggctgggccagacccggctgcagacccgacgtggagctgggcgccgacgaccaggccttcgtgttcgagggcaacagaggccagagatggcaccagggcagcggctacttcggcagaacctggcagcccggcgacgtggtgggctgcatgatcaacctggacgacgccagcatgatcttcaccctgaacggcgagctgctgatcaccaacaagggcagcgagctggccttcgccgactacgagatcgagaacggcttcgtgcccatctgctgcctgggcctgagccagatcggcagaatgaacctgggcaccgacgccagcaccttcaagttctacaccatgtgcggcctgcaggagggcttcgagcccttcgccgtgaacatgaacagagacgtggccatgtggttcagcaagagactgcccaccttcgtgaacgtgcccaaggaccacccccacatcgaggtgatgagaatcgacggcaccatggacagccccccctgcctgaaggtgacccacaagaccttcggcacccagaacagcaacgccgacatgatctactgcagactgagcatgcccgtggagtgccacagcagcttcagccacagcccctgcctggacagcgaggccttccagaagagaaagcagatgcaggagatcctgagccacaccaccacccagtgctactacgccatcagaatcttcgccggccaggaccccagctgcgtgtgggtgggctgggtgacccccgactaccacctgtacagcgagaagttcgacctgaacaagaactgcaccgtgaccgtgaccctgggcgacgagagaggcagagtgcacgagagcgtgaagagaagcaactgctacatggtgtggggcggcgacatcgtggccagcagccagagaagcaacagaagcaacgtggacctggagatcggctgcctggtggacctggccatgggcatgctgagcttcagcgccaacggcaaggagctgggcacctgctaccaggtggagcccaacaccaaggtgttccccgccgtgttcctgcagcccaccagcaccagcctgttccagttcgagctgggcaagctgaagaacgccatgcccctgagcgccgccatcttcagaagcgaggagaagaaccccgtgccccagtgcccccccagactggacgtgcagaccatccagcccgtgctgtggagcagaatgcccaacagcttcctgaaggtggagaccgagagagtgagcgagagacacggctgggtggtgcagtgcctggagcccctgcagatgatggccctgcacatccccgaggagaacagatgcgtggacatcctggagctgtgcgagcaggaggacctgatgagattccactaccacaccctgagactgtacagcgccgtgtgcgccctgggcaacagcagagtggcctacgccctgtgcagccacgtggacctgagccagctgttctacgccatcgacaacaagtacctgcccggcctgctgagaagcggcttctacgacctgctgatcagcatccacctggccagcgccaaggagagaaagctgatgatgaagaacgagtacatcatccccatcaccagcaccaccagaaacatcagactgttccccgacgagagcaagagacacggcctgcccggcgtgggcctgagaacctgcctgaagcccggcttcagattcagcaccccctgcttcgtggtgaccggcgaggaccaccagaagcagagccccgagatccccctggagagcctgagaaccaaggccctgagcatgctgaccgaggccgtgcagtgcagcggcgcccacatcagagaccccgtgggcggcagcgtggagttccagttcgtgcccgtgctgaagctgatcggcaccctgctggtgatgggcgtgttcgacgacgacgacgtgagacagatcctgctgctgatcgaccccagcgtgttcggcgagcacagcgccggcaccgaggagggcgccgagaaggaggaggtgacccaggtggaggagaaggccgtggaggccggcgagaaggccggcaaggaggcccccgtgaagggcctgctgcagaccagactgcccgagagcgtgaagctgcagatgtgcgagctgctgagctacctgtgcgactgcgagctgcagcacagagtggaggccatcgtggccttcggcgacatctacgtgagcaagctgcaggccaaccagaagttcagatacaacgagctgatgcaggccctgaacatgagcgccgccctgaccgccagaaagaccaaggagttcagaagccccccccaggagcagatcaacatgctgctgaacttccagctgggcgagaactgcccctgccccgaggagatcagagaggagctgtacgacttccacgaggacctgctgctgcactgcggcgtgcccctggaggaggaggaggaggaggaggaggacaccagctggaccggcaagctgtgcgccctggtgtacaagatcaagggcccccccaagcccgagaaggagcagcccaccgaggaggaggagagatgccccaccaccctgaaggagctgatcagccagaccatgatctgctgggcccaggaggaccagatccaggacagcgagctggtgagaatgatgttcaacctgctgagaagacagtacgacagcatcggcgagctgctgcaggccctgagaaagacctacaccatcagccacaccagcgtgagcgacaccatcaacctgctggccgccctgggccagatcagaagcctgctgagcgtgagaatgggcaaggaggaggagctgctgatgatcaacggcctgggcgacatcatgaacaacaaggtgttctaccagcaccccaacctgatgagagtgctgggcatgcacgagaccgtgatggaggtgatggtgaacgtgctgggcaccgagaagagccagatcgccttccccaagatggtggccagctgctgcagattcctgtgctacttctgcagaatcagcagacagaaccagaaggccatgttcgagcacctgagctacctgctggagaacagcagcgtgggcctggccagccccagcatgagaggcagcacccccctggacgtggccgccagcagcgtgatggacaacaacgagctggccctgagcctggaggagcccgacctggagaaggtggtgacctacctggccggctgcggcctgcagagctgccccatgctgctggccaagggctaccccgacgtgggctggaaccccatcgagggcgagagatacctgagcttcctgagattcgccgtgttcgtgaacagcgagagcgtggaggagaacgccagcgtggtggtgaagctgctgatcagaagacccgagtgcttcggccccgccctgagaggcgagggcggcaacggcctgctggccgccatgcagggcgccatcaagatcagcgagaaccccgccctggacctgcccagccagggctacaagagagaggtgagcaccggcgacgacgaggaggaggaggagatcgtgcacatgggcaacgccatcatgagcttctacagcgccctgatcgacctgctgggcagatgcgcccccgagatgcacctgatccagaccggcaagggcgaggccatcagaatcagaagcatcctgagaagcctggtgcccaccgaggacctggtgggcatcatcagcatccccctgaagctgcccagcctgaacaaggacggcagcgtgagcgagcccgacatggccgccaacttctgccccgaccacaaggcccccatggtgctgttcctggacagagtgtacggcatcaaggaccagaccttcctgctgcacctgctggaggtgggcttcctgcccgacctgagagccagcgccagcctggacaccgtgagcctgagcaccaccgaggccgccctggccctgaacagatacatctgcagcgccgtgctgcccctgctgaccagatgcgcccccctgttcgccggcaccgagcactgcaccagcctgatcgacagcaccctgcagaccatctacagactgagcaagggcagaagcctgaccaaggcccagagagacaccatcgaggagtgcctgctggccatctgcaaccacctgagacccagcatgctgcagcagctgctgagaagactggtgttcgacgtgccccagctgaacgagtactgcaagatgcccctgaagctgctgaccaaccactacgagcagtgctggaagtactactgcctgcccagcggctggggcagctacggcctggccgtggaggaggagctgcacctgaccgagaagctgttctggggcatcttcgacagcctgagccacaagaagtacgaccccgacctgttcagaatggccctgccctgcctgagcgccatcgccggcgccctgccccccgactacctggacaccagaatcaccgccaccctggagaagcagatcagcgtggacgccgacggcaacttcgaccccaagcccatcaacaccatgaacttcagcctgcccgagaagctggagtacatcgtgaccaagtacgccgagcacagccacgacaagtgggcctgcgacaagagccagagcggctggaagtacggcatcagcctggacgagaacgtgaagacccaccccctgatcagacccttcaagaccctgaccgagaaggagaaggagatctacagatggcccgccagagagagcctgaagaccatgctggccgtgggctggaccgtggagagaaccaaggagggcgaggccctggtgcagcagagagagaacgagaagctgagaagcgtgagccaggccaaccagggcaacagctacagccccgcccccctggacctgagcaacgtggtgctgagcagagagctgcagggcatggtggaggtggtggccgagaactaccacaacatctgggccaagaagaagaagctggagctggagagcaagggcggcggcagccaccccctgctggtgccctacgacaccctgaccgccaaggagaagttcaaggacagagagaaggcccaggacctgttcaagttcctgcaggtgaacggcatcatcgtgagcagaggcatgaaggacatggagctggacgccagcagcatggagaagagattcgcctacaagttcctgaagaagatcctgaagtacgtggacagcgcccaggagttcatcgcccacctggaggccatcgtgagcagcggcaagaccgagaagagccccagagaccaggagatcaagttcttcgccaaggtgctgctgcccctggtggaccagtacttcaccagccactgcctgtacttcctgagcagccccctgaagcccctgagcagcagcggctacgccagccacaaggagaaggagatggtggccggcctgttctgcaagctggccgccctggtgagacacagaatcagcctgttcggcagcgacagcaccaccatggtgagctgcctgcacatcctggcccagaccctggacaccagaaccgtgatgaagagcggcagcgagctggtgaaggccggcctgagagccttcttcgagaacgccgccgaggacctggagaagaccagcgagaacctgaagctgggcaagttcacccacagcagaacccagatcaagggcgtgagccagaacatcaactacaccaccgtggccctgctgcccatcctgaccagcatcttcgagcacgtgacccagcaccagttcggcatggacctgctgctgggcgacgtgcagatcagctgctaccacatcctgtgcagcctgtacagcctgggcaccggcaagaacatctacgtggagagacagagacccgccctgggcgagtgcctggccagcctggccgccgccatccccgtggccttcctggagcccaccctgaacagatacaaccccctgagcgtgttcaacaccaagacccccagagagagaagcatcctgggcatgcccgacaccgtggaggacatgtgccccgacatcccccagctggagggcctgatgaaggagatcaacgacctggccgagagcggcgccagatacaccgagatgccccacgtgatcgaggtgatcctgcccatgctgtgcaactacctgagctactggtgggagagaggccccgagaacctgccccccagcaccggcccctgctgcaccaaggtgaccagcgagcacctgagcctgatcctgggcaacatcctgaagatcatcaacaacaacctgggcatcgacgaggccagctggatgaagagaatcgccgtgtacgcccagcccatcatcagcaaggccagacccgacctgctgagaagccacttcatccccaccctggagaagctgaagaagaaggccgtgaagaccgtgcaggaggaggagcagctgaaggccgacggcaagggcgacacccaggaggccgagctgctgatcctggacgagttcgccgtgctgtgcagagacctgtacgccttctaccccatgctgatcagatacgtggacaacaacagaagcaactggctgaagagccccgacgccgacagcgaccagctgttcagaatggtggccgaggtgttcatcctgtggtgcaagagccacaacttcaagagagaggagcagaacttcgtgatccagaacgagatcaacaacctggccttcctgaccggcgacagcaagagcaagatgagcaagagcggcggccaggaccaggagagaaagaagaccaagagaagaggcgacctgtacagcatccagaccagcctgatcgtggccgccctgaagaagatgctgcccatcggcctgaacatgtgcacccccggcgaccaggagctgatcagcctggccaagagcagatacagccacagagacaccgacgaggaggtgagagagcacctgagaaacaacctgcacctgcaggagaagagcgacgaccccgccgtgaagtggcagctgaacctgtacaaggacgtgctgaagagcgaggagcccttcaaccccgagaagaccgtggagagagtgcagagaatcagcgccgccgtgttccacctggagcaggtggagcagcccctgagaagcaagaaggccgtgtggcacaagctgctgagcaagcagagaaagagagccgtggtggcctgcttcagaatggcccccctgtacaacctgcccagacacagaagcatcaacctgttcctgcacggctaccagagattctggatcgagaccgaggagtacagcttcgaggagaagctggtgcaggacctggccaagagccccaaggtggaggaggaggaggaggaggagaccgagaagcagcccgaccccctgcaccagatcatcctgtacttcagcagaaacgccctgaccgagagaagcaagctggaggacgaccccctgtacaccagctacagcagcatgatggccaagagctgccagagcggcgaggacgaggaggaggacgaggacaaggagaagaccttcgaggagaaggagatggagaagcagaagaccctgtaccagcaggccagactgcacgagagaggcgccgccgagatggtgctgcagatgatcagcgccagcaagggcgagatgagccccatggtggtggagaccctgaagctgggcatcgccatcctgaacggcggcaacgccggcgtgcagcagaagatgctggactacctgaaggagaagaaggacgccggcttcttccagagcctgagcggcctgatgcagagctgcagcgtgctggacctgaacgccttcgagagacagaacaaggccgagggcctgggcatggtgaccgaggagggcaccctgatcgtgagagagagaggcgagaaggtgctgcagaacgacgagttcaccagagacctgttcagattcctgcagctgctgtgcgagggccacaacagcgacttccagaacttcctgagaacccagatgggcaacaccaccaccgtgaacgtgatcatcagcaccgtggactacctgctgagactgcaggagagcatcagcgacttctactggtactacagcggcaaggacatcatcgacgagagcggccagcacaacttcagcaaggccctggccgtgaccaagcagatcttcaacagcctgaccgagtacatccagggcccctgcatcggcaaccagcagagcctggcccacagcagactgtgggacgccgtggtgggcttcctgcacgtgttcgccaacatgcagatgaagctgagccaggacagcagccagatcgagctgctgaaggagctgctggacctgctgcaggacatggtggtgatgctgctgagcctgctggagggcaacgtggtgaacggcaccatcggcaagcagatggtggacaccctggtggagagcagcaccaacgtggagatgatcctgaagttcttcgacatgttcctgaagctgaaggacctgaccagcagcgacaccttcaaggagtacgaccccgacggcaagggcatcatcagcaagaaggagttccagaaggccatggagggccagaagcagtacacccagagcgagatcgacttcctgctgagctgcgccgaggccgacgagaacgacatgttcaactacgtggacttcgtggacagattccacgagcccgccaaggacatcggcttcaacgtggccgtgctgctgaccaacctgagcgagcacatgcccaacgacagcagactgaagtgcctgctggaccccgccgagagcgtgctgaactacttcgagccctacctgggcagaatcgagatcatgggcggcgccaagaagatcgagagagtgtacttcgagatcagcgagagcagcagaacccagtgggagaagccccaggtgaaggagagcaagagacagttcatcttcgacgtggtgaacgagggcggcgagcaggagaagatggagctgttcgtgaacttctgcgaggacaccatcttcgagatgcagctggccagccagatcagcgagagcgacagcgccgacagacccgaggaggaggaggaggacgaggacagcagctacgtgctggagatcgccggcgaggaggaggaggacggcagcctggagcccgccagcgccttcgccatggcctgcgccagcgtgaagagaaacgtgaccgacttcctgaagagagccaccctgaagaacctgagaaagcagtacagaaacgtgaagaagatgaccgccaaggagctggtgaaggtgctgttcagcttcttctggatgctgttcgtgggcctgttccagctgctgttcaccatcctgggcggcatcttccagatcctgtggagcaccgtgttcggcggcggcctggtggagggcgccaagaacatcagagtgaccaagatcctgggcgacatgcccgaccccacccagttcggcatccacgacgacaccatggaggccgagagagccgaggtgatggagcccggcatcaccaccgagctggtgcacttcatcaagggcgagaagggcgacaccgacatcatgagcgacctgttcggcctgcaccccaagaaggagggcagcctgaagcacggccccgaggtgggcctgggcgacctgagcgagatcatcggcaaggacgagccccccaccctggagagcaccgtgcagaagaagagaaaggcccaggccgccgagatgaaggccgccaacgaggccgagggcaaggtggagagcgagaaggccgacatggaggacggcgagaaggaggacaaggacaaggaggaggagcaggccgagtacctgtggaccgaggtgaccaagaagaagaagagaagatgcggccagaaggtggagaagcccgaggccttcaccgccaacttcttcaagggcctggagatctaccagaccaagctgctgcactacctggccagaaacttctacaacctgagattcctggccctgttcgtggccttcgccatcaacttcatcctgctgttctacaaggtgaccgaggagcccctggaggaggagaccgaggacgtggccaacctgtggaacagcttcaacgacgaggaggaggaggaggccatggtgttcttcgtgctgcaggagagcaccggctacatggcccccaccctgagagccctggccatcatccacaccatcatcagcctggtgtgcgtggtgggctactactgcctgaaggtgcccctggtggtgttcaagagagagaaggagatcgccagaaagctggagttcgacggcctgtacatcaccgagcagcccagcgaggacgacatcaagggccagtgggacagactggtgatcaacacccccagcttccccaacaactactgggacaagttcgtgaagagaaaggtgatcaacaagtacggcgacctgtacggcgccgagagaatcgccgagctgctgggcctggacaagaacgccctggacttcagccccgtggaggagaccaaggccgaggccgccagcctggtgagctggctgagcagcatcgacatgaagtaccacatctggaagctgggcgtggtgttcaccgacaacagcttcctgtacctggcctggtacaccaccatgagcgtgctgggccactacaacaacttcttcttcgccgcccacctgctggacatcgccatgggcttcaagaccctgagaaccatcctgagcagcgtgacccacaacggcaagcagctggtgctgaccgtgggcctgctggccgtggtggtgtacctgtacaccgtggtggccttcaacttcttcagaaagttctacaacaagagcgaggacgacgacgagcccgacatgaagtgcgacgacatgatgacctgctacctgttccacatgtacgtgggcgtgagagccggcggcggcatcggcgacgagatcgaggaccccgccggcgacccctacgagatgtacagaatcgtgttcgacatcaccttcttcttcttcgtgatcgtgatcctgctggccatcatccagggcctgatcatcgacgccttcggcgagctgagagaccagcaggagcaggtgagagaggacatggagaccaagtgcttcatctgcggcatcggcaacgactacttcgacaccaccccccacggcttcgagacccacaccctgcaggagcacaacctggccaactacctgttcttcctgatgtacctgatcaacaaggacgagaccgagcacaccggccaggagagctacgtgtggaagatgtaccaggagagatgctgggacttcttccccgccggcgactgcttcagaaagcagtacgaggaccagctgggctag

SEQ ID NO: 87191 - protein, 171 aa, Artificial Sequence
  derived and/or modified sequence
MASSMTWTAASIPATLIQRGLLTLVPPAYAPYPSPVLSEEEDLPLDSPALEVSDSESDEALVAGPEGKGSEAGTRKKLRLYQFLLGLLTRGDMRECVWWVEPGAGVFQFSSKHKELLARRWGQQKGNRKRMTYQKLARALRNYAKTGEIRKVKRKLTYQFDSALLPAVRRA

SEQ ID NO: 87192 - DNA, 516 bp, Artificial Sequence
  derived and/or modified sequence
atggccagcagcatgacctggaccgccgccagcatccccgccaccctgatccagagaggcctgctgaccctggtgccccccgcctacgccccctaccccagccccgtgctgagcgaggaggaggacctgcccctggacagccccgccctggaggtgagcgacagcgagagcgacgaggccctggtggccggccccgagggcaagggcagcgaggccggcaccagaaagaagctgagactgtaccagttcctgctgggcctgctgaccagaggcgacatgagagagtgcgtgtggtgggtggagcccggcgccggcgtgttccagttcagcagcaagcacaaggagctgctggccagaagatggggccagcagaagggcaacagaaagagaatgacctaccagaagctggccagagccctgagaaactacgccaagaccggcgagatcagaaaggtgaagagaaagctgacctaccagttcgacagcgccctgctgcccgccgtgagaagagcctag

SEQ ID NO: 87193 - DNA, 516 bp, Artificial Sequence
  derived and/or modified sequence
atggcctctagtatgacatggacggccgccagcatacctgcaacgctcattcagagaggcctcctgaccctggtcccacctgcctatgccccatatccatcaccggtcctttcggaagaggaagacctccccctggatagccccgccctggaggtgtcagattccgagtctgacgaagcactggtggccggtcccgaaggaaaggggagcgaagccgggacgagaaagaaattaagactttaccagtttcttttgggattattaacgaggggggacatgcgtgagtgcgtctggtgggtcgagccaggggccggggtgttccagttctccagcaaacacaaagaactcctcgctagacgatgggggcagcagaaaggcaatcgcaagagaatgacatatcagaagcttgcacgggctttaagaaattacgccaaaacgggcgagatacggaaagtgaaaagaaagctgacataccagttcgactccgcactgcttcccgccgttcggagggcgtag

SEQ ID NO: 87194 - DNA, 516 bp, Artificial Sequence
  derived and/or modified sequence
atggccagctccatgacctggacagctgccagcatcccagccaccctcatccagaggggcctgctgaccctggtgcccccagcctatgccccctaccccagccctgtgctgtctgaggaggaggacctgcccctggacagccctgccctggaggtgtctgattctgagagtgatgaggccctggtggccggccctgagggcaagggcagcgaggccggcaccaggaagaagctgcggctgtaccagttcctgctgggcctgctgaccaggggggacatgagagaatgtgtgtggtgggtggagcccggggccggggtcttccagttcagcagcaagcacaaggagctgctggcccggcgctggggccagcagaagggcaacaggaagaggatgacctaccagaagctggcccgggccctgagaaattatgccaagacaggagagatcaggaaggtgaagaggaagctgacctaccagtttgacagcgccctgctgcctgctgtgagaagagcctag

SEQ ID NO: 87195 - DNA, 516 bp, Artificial Sequence
  derived and/or modified sequence
atggccagcagcatgacctggaccgccgccagcatccccgccaccttaattcagcgaggattgctgaccctggtgccaccagcctacgccccatatccttcaccagttctgagtgaagaggaagatctgccccttgattctccggccttggaggtgtcagacagcgaatccgacgaggctttggtggctggtcccgaggggaaaggcagcgaggccgggacacgaaaaaagttacgcctgtaccagttcctgctcgggctgctgacccgcggcgacatgcgggaatgcgtatggtgggtggaaccaggcgcgggcgtttttcagttcagctccaagcataaagagctgctcgcacgacgatggggacagcagaagggcaaccggaaaagaatgacctaccagaagttggcccgagctttgcgaaactatgctaagaccggggagattcgcaaagtgaagcgaaaattgacttatcagttcgacagcgcactgttacctgccgtgcgaagggcctag

SEQ ID NO: 87196 - DNA, 516 bp, Artificial Sequence
  derived and/or modified sequence
atggcctcatccatgacttggaccgctgcctcaatacccgcaactctgattcagcggggactgcttaccctcgtccctcctgcatacgctccctacccttccccagtattgtccgaggaggaggacttgccccttgattcccctgccctggaggtatctgactccgagagcgacgaagccctggtggccggtcccgaaggcaaaggatccgaggctggaacccgcaaaaaacttcgcttatatcagtttctcctaggattgctcactcgcggagacatgcgcgagtgcgtgtggtgggtggaacccggagctggcgtgtttcagttctcttctaagcacaaggagttgttagccagacggtggggtcagcagaagggaaacagaaaaaggatgacgtaccagaaactggccagagctcttagaaactacgcgaagactggtgaaattcggaaggtgaaacgaaagttgacttatcagttcgattcggcacttctgccagccgtcaggagggcatag

SEQ ID NO: 87197 - DNA, 847 bp, Artificial Sequence
  derived and/or modified sequence
aaacagcccgcccggcaccaccatgctcgccctggaggctgcacagctcgacgggccacacttcagctgtctgtacccagatggcgtcttctatgacctggacagctgcaagcattccagctaccctgattcagagggggctcctgaccctggttcccccggcatatgccccgtaccccagccctgtgctatcagaggaggaagacttaccgttggacagccctgccctggaggtctcggacagcgagtcggatgaggccctcgtggctggccccgaggggaagggatccgaggcagggactcgcaagaagctgcgcctgtaccagttcctgctggggctactgacgcgcggggacatgcgtgagtgcgtgtggtgggtggagccaggcgccggcgtcttccagttctcctccaagcacaaggaactcctggcgcgccgctggggccagcagaaggggaaccgcaagcgcatgacctaccagaagctggcgcgcgccctccgaaactacgccaagaccggcgagatccgcaaggtcaagcgcaagctcacctaccagttcgacagcgcgctgctgcctgcagtccgccgggcctgagcacacccgaggctcccacctgcggagccgctgggggacctcacgtcccagccaggatccccctggaagaaaaagggcgtccccacactctaggtgataggacttacgcatccccaccttttggggtaaggggagtgctgccctgccataatccccaagcccagcccgggcctgtctgggattccccacttgtgcctggggtcctctgggatttctttgtcatgtacagactccctgggatcctcatgttt

SEQ ID NO: 87198 - protein, 1791 aa, Artificial Sequence
  derived and/or modified sequence
MAGASVKVAVRVRPFNSREMSRDSKCIIQMSGSTTTIVNPKQPKETPKSFSFDYSYWSHTSPEDINYASQKQVYRDIGEEMLQHAFEGYNVCIFAYGQTGAGKSYTMMGKQEKDQQGIIPQLCEDLFSRINDTTNDNMSYSVEVSYMEIYCERVRDLLNPKNKGNLRVREHPLLGPYVEDLSKLAVTSYNDIQDLMDSGNKARTVAATNMNETSSRSHAVFNIIFTQKRHDAETNITTEKVSKISLVDLAGSERADSTGAKGTRLKEGANINKSLTTLGKVISALAEMDSGPNKNKKKKKTDFIPYRDSVLTWLLRENLGGNSRTAMVAALSPADINYDETLSTLRYADRAKQIRCNAVINEDPNNKLIRELKDEVTRLRDLLYAQGLGDITDTNTVPGGPKLTNALVGMSPSSSLSALSSRAASVSSLHERILFAPGSEEAIERLKETEKIIAELNETWEEKLRRTEAIRMEREALLAEMGVAMREDGGTLGVFSPKKTPHLVNLNEDPLMSECLLYYIKDGITRVGREDGERRQDIVLSGHFIKEEHCVFRSDSRGGSEAVVTLEPCEGADTYVNGKKVTEPSILRSGNRIIMGKSHVFRFNHPEQARQERERTPCAETPAEPVDWAFAQRELLEKQGIDMKQEMEQRLQELEDQYRREREEATYLLEQQRLDYESKLEALQKQMDSRYYPEVNEEEEEPEDEVQWTERECELALWAFRKWKWYQFTSLRDLLWGNAIFLKEANAISVELKKKVQFQFVLLTDTLYSPLPPDLLPPEAAKDRETRPFPRTIVAVEVQDQKNGATHYWTLEKLRQRLDLMREMYDRAAEVPSSVIEDCDNVVTGGDPFYDRFPWFRLVGSSAISGCNSYPLLNTCMSERMAALTPSPTFSSPDSDATEPAEEQSVGEEEEEEEEEEDEEEEDLEDDVFPEHALCDGRDPFYDRPPLFSLVGRAFVYLSNLLYPVPLVHRVAIVSEKGEVKGFLRVAVQAISADEEAPDYGSGVRQSGTAKISFDDQHFEKFQSESCPVVGMSRSGTSQEELRIVEGQGQGADVGPSADEVNNNTCSAVPPEGLLLDSSEKAALDGPLDAALDHLRLGNTFTFRVTVLQASSISAEYADIFCQFNFIHRHDEAFSTEPLKNTGRGPPLGFYHVQNIAVEVTKSFIEYIKSQPIVFEVFGHYQQHPFPPLCKDVLSPLRPSRRHFPRVMPLSKPVPATKLSTLTRPCPGPCHCKYDLLVYFEICELEANGDYIPAVVDHRGGMPCMGTFLLHQGIQRRITVTLLHETGSHIRWKEVRELVVGRIRNTPETDESLIDPNILSLNILSSGYIHPAQDDRTFYQFEAAWDSSMHNSLLLNRVTPYREKIYMTLSAYIEMENCTQPAVVTKDFCMVFYSRDAKLPASRSIRNLFGSGSLRASESNRVTGVYELSLCHVADAGSPGMQRRRRRVLDTSVAYVRGEENLAGWRPRSDSLILDHQWELEKLSLLQEVEKTRHYLLLREKLETAQRPVPEALSPAFSEDSESHGSSSASSPLSAEGRPSPLEAPNERQRELAVKCLRLLTHTFNREYTHSHVCVSASESKLSEMSVTLLRDPSMSPLGVATLTPSSTCPSLVEGRYGATDLRTPQPCSRPASPEPELLPEADSKKLPSPARATETDKEPQRLLVPDIQEIRVSPIVSKKGYLHFLEPHTSGWARRFVVVRRPYAYMYNSDKDTVERFVLNLATAQVEYSEDQQAMLKTPNTFAVCTEHRGILLQAASDKDMHDWLYAFNPLLAGTIRSKLSRRRSAQMRV

SEQ ID NO: 87199 - DNA, 5376 bp, Artificial Sequence
  derived and/or modified sequence
atggcaggcgcctctgtcaaagtcgctgtccgggtgcgtcctttcaactccagagaaatgtcaagagactcaaaatgtatcatccagatgagtggcagcacaactactatagtgaaccccaagcagcctaaagagacgcctaaatccttcagctttgactatagctactggtctcacacctcgcctgaagatattaattacgcctcacaaaagcaggtttacagagatattggcgaggagatgttgcagcatgcctttgagggctataatgtatgtattttcgcctacggtcagaccggtgctggcaagtcatataccatgatgggcaagcaggagaaggatcagcagggcataatccctcagctatgtgaagatctcttctcccggattaatgacaccaccaatgacaacatgagttattcagtggaggtctcatacatggaaatttactgtgagcgagtccgtgacctactgaatcctaagaataaagggaacctgcgcgtcagggaacaccccctccttggcccctatgtagaggacttgtccaaattggccgtcacaagttataatgacatacaggatctgatggatagcggcaataaggcccggactgtggcagctacaaacatgaacgagacatcttctcgaagtcatgctgttttcaacatcattttcacccagaagaggcatgacgccgaaacgaatatcactaccgagaaagtgagcaagatctctcttgtcgatctcgccgggtcagagagagccgattccacgggcgctaaggggactcggttgaaggagggggcaaatattaacaagtccttgactacactggggaaggtgatcagcgcactggcggaaatggattccggccccaacaagaataaaaaaaagaagaagacagactttatcccttatagggactccgtactgacatggctgctccgtgagaaccttggaggcaattcaagaacagccatggtggcagccctgagccctgcggacattaattatgacgagaccctgtcaacccttcggtacgcagatcgagctaagcagatcagatgcaatgccgtcatcaatgaagaccctaacaacaagctgatccgagagctcaaagatgaagtgacaaggctccgcgacctgctatacgctcaaggtctgggcgacattacagacacgaataccgtgcctggcgggcctaaactaacaaacgcccttgtggggatgagcccaagctctagcttatcggctctgtcaagccgagccgcatccgtctcatccttgcatgaacgcatactattcgctccgggctctgaggaggccatagagcgactgaaagaaaccgagaaaatcattgcagaattgaatgagacatgggaggagaaactaagacgcactgaggctatcaggatggagcgggaggctctgctggcagagatgggggtcgccatgagagaggacggcggaacactgggcgtcttttcgccaaagaagacaccccacttggtcaacctcaatgaggaccccctcatgtcagagtgtctcctctattatattaaggatgggattacaagggtgggccgagaggatggggagagaagacaggacatagtgttgtccggacattttatcaaagaagagcactgcgtgtttaggagcgattccagagggggctctgaagcggttgttaccttagagccatgcgagggcgcagatacatatgtgaatggaaagaaagttaccgaaccttcaatactcagatctggcaataggataatcatgggaaagtcacatgtgttccggtttaatcaccctgagcaggcccgccaggagcgtgagagaactccttgtgctgagaccccagcggaacccgtggactgggcctttgcccagcgcgagcttctcgaaaagcaaggtatcgacatgaagcaggagatggagcagcgcctccaggagctcgaagatcagtatcggagagagcgtgaggaggcaacttatctgctcgagcagcagagactggactacgagagcaaactggaagctcttcagaagcagatggattctagatactacccagaagttaatgaggaggaggaggagccggaagacgaagtgcagtggaccgaaagagaatgtgagctggcgttgtgggcatttcggaaatggaagtggtaccaattcaccagtctgcgagatctcctatggggcaacgccatcttccttaaagaagctaatgccatcagcgtcgagctgaagaagaaagtacagttccagttcgtgctgttaactgacactctgtacagccctctccccccagacctgctccccccagaagctgctaaggacagagagacaagaccctttcctcggacaattgtggccgtggaggtgcaagaccaaaagaatggagctacacactattggacgctggaaaagttgcgtcagcgactagatttgatgcgggagatgtacgacagagctgctgaggttcccagttcagtcattgaggactgcgacaacgtggtgacagggggggatccgttttatgatcgcttcccatggtttcgcctcgtgggaagtagtgcaatcagcggctgcaatagctaccctctgcttaacacttgcatgagcgaaaggatggccgctctgacaccatctcctacctttagttccccagactccgatgctaccgagccggccgaggaacaaagtgtgggcgaagaagaggaagaagaggaggaggaggaagatgaagaagaagaggacctggaagacgacgtgttccccgaacatgccctgtgtgatgggcgtgaccccttctatgatcgcccccccctttttagcctcgtaggccgtgcgttcgtttatttgtcaaacctgttatacccagtccccctagtacacagggtggcaattgtaagtgagaaaggcgaggtaaaaggctttctccgagttgcagtgcaggccattagcgctgacgaagaagctcctgattatggcagcggggtgcggcaaagcggaaccgccaaaatctctttcgacgaccaacactttgagaagttccaatccgaaagttgtccagtggttgggatgtcacggtctggcacaagccaggaagaactgcggattgtcgaggggcaaggacagggtgccgatgttggacccagcgcagacgaagtaaataataacacgtgcagtgcagtcccccctgaagggcttctgctcgattcctccgagaaggccgcactcgacgggccccttgatgccgctctggatcacctccgcctaggaaacacatttacatttcgggtgaccgtattacaggcgagctccattagtgccgagtatgcggacattttctgccaatttaactttatccaccgccatgacgaggcattcagtacagaacctctaaagaacacaggcagagggccccccttgggcttttaccatgtgcaaaacattgccgtggaagtcactaagtcatttatcgagtacataaaatcccagccgattgttttcgaagtcttcggtcactatcagcagcacccatttcctccgctttgcaaagacgtgctgtcaccccttaggccctcccgccgccacttccccagagtaatgcctctgagcaaaccagtccccgcgacaaaactgtccaccctgacccggccatgccccgggccatgtcattgcaaatatgatctactggtctacttcgagatatgtgagctcgaagccaacggagattacatacctgcggttgtcgaccacagaggcggtatgccctgtatgggtaccttcctcctgcaccaaggaattcagcgccgcattacagtcaccctgctgcatgaaaccgggtcccatatccgttggaaggaggtccgcgaactggtcgtgggacggatccgcaacacaccggagacagacgagagcctgatcgaccccaatattctcagcctgaacatcctgtccagcggatacattcacccagcgcaggacgatcgcaccttttatcagtttgaggccgcctgggactcaagcatgcacaactcgctgcttctgaatagagtcaccccctacagagaaaagatctatatgactctgtcggcgtacattgagatggaaaattgcacacagcctgctgtggtgaccaaagatttttgcatggtcttttattccagagatgcaaaactgcctgcctcacggagcatccggaacttgttcggttctggctccctgagagcctctgagtcaaatagggtcaccggagtctacgagctgtctctctgtcacgtggccgatgcagggagcccagggatgcagcggcggagaaggcgcgtactggacacttctgttgcctatgtgagaggcgaagagaatctggcgggctggagacctcgaagtgattctctgatcttggaccaccagtgggagttggaaaaactgagccttctgcaggaagtggaaaagaccagacattacctcctgctgcgcgaaaagctcgagacagctcagcgccctgtccctgaggccctttccccagcattttctgaggactctgaatcgcatggctcgagcagcgccagtagtcccttgagcgcagaggggcggcccagtccactggaggcaccaaacgagcggcaaagggaacttgcagtgaagtgtctgcggctcctgacacacaccttcaacagggaatacactcacagccacgtctgtgtgagtgcctcagaaagcaagctctccgagatgtctgtgaccctcctcagggatcccagcatgtcacccctgggagttgctactctgactccatcttctacctgcccgagtcttgttgaggggaggtacggcgctactgatctgcgtaccccgcaaccttgctctcgaccagccagccccgaaccggagctgctgcctgaagcagatagcaagaaactcccgagtcccgccagagccacggaaaccgataaggagccacagcgcctcctggtgccagatatccaggagattagagtgagccctatagtctcaaaaaagggttacctgcacttcctggagccccacaccagtgggtgggccaggcggttcgtcgttgtgcggcgtccctatgcatatatgtataattccgacaaagacacggtggagcgatttgtgctaaacctggccaccgctcaggtcgagtattcagaagatcagcaggcaatgctaaaaacacccaacacattcgcagtttgtactgagcatcggggcattctcttacaagcggcaagtgataaagatatgcatgattggctctatgcattcaatcccctgctggccggaacaattcggtctaaactgtctcggaggagatcagctcagatgagggtctag

SEQ ID NO: 87200 - DNA, 9162 bp, Artificial Sequence
  derived and/or modified sequence
ggacgccgcgcgcagccaaccagcgcctcgggaggggcgcggggcggtccgggccgggggcgcgcagcccgtcacgcggcggcgccgtcacagcgcagagcagccggcgagcggcagcagctccgggctcgagagcccgcgcccatgccagtgcccatgcggggccgccgccagtgacgccggagaggtgttccccccacactggggctcccactactgcgaggagtgacccacgaaggccacagagatggccggggcttcggtgaaggtggcggtgcgggtccgccccttcaattcccgggaaatgagccgtgactccaagtgcatcattcagatgtctggaagcaccaccaccattgttaaccccaaacagcccaaggagacgcccaaaagcttcagctttgactactcctactggtcgcacacctcacctgaggacatcaactacgcgtcgcagaagcaggtgtaccgggacatcggcgaggagatgctgcagcatgcctttgagggatacaacgtgtgcatcttcgcctatgggcagacgggtgccggcaagtcctacaccatgatgggcaagcaggagaaggaccagcagggcatcatcccacagctctgcgaggacctcttctctcggatcaacgacacgaccaacgacaacatgtcctactccgtggaggtcagctacatggagatttactgtgagcgcgtccgtgacctcctgaaccccaagaacaagggcaaccttcgcgtgagggagcacccactgctggggccctacgtggaggacctctccaagctggctgtcacctcctacaatgacatccaggacctcatggactcagggaacaaggccaggaccgtggcggccaccaacatgaatgagaccagcagtcgctcccacgccgtcttcaacatcatcttcacccagaagcgccatgacgcagagaccaatatcaccacggagaaggtgagcaaaatcagcctggtggacctggctgggagcgagcgggctgactccacgggagccaagggcacgcgcctcaaggagggggccaacatcaacaagtcgctgaccaccctgggcaaggtcatctccgccctggctgaaatggactccggacccaacaagaacaagaaaaagaagaagacagatttcattccgtaccgagattccgtgttgacctggctcctccgggaaaacctgggcggtaactcaaggacagctatggtggcagccttgagtcctgcagacatcaactacgatgagacccttagcacgctgaggtatgctgaccgggccaagcagatccgctgcaatgctgtcatcaatgaggaccccaacaacaagctgatccgcgagctgaaggatgaggtgacccggctgcgggaccttctgtacgcccagggtcttggcgacatcactgacaccaacactgtgcctggaggacccaaattgaccaatgccctggtgggtatgagcccctcatcctcgctctcagccctgtccagccgcgcggcctccgtgtccagcctccacgagcgcatcttgtttgccccgggcagcgaggaggccattgaaagactgaaggaaacagagaagatcatagctgagctcaatgagacctgggaggagaagctgcggcggacagaagccatccggatggagagggaagccctgctggccgagatgggtgtggccatgagggaggatggcggcaccttgggcgtattctctcccaaaaagacaccacacctcgtcaacctgaacgaggacccgctgatgtctgagtgcctgctctactacatcaaggatgggatcaccagagtgggcagggaggatggcgagaggcggcaggacattgttctgagtgggcacttcatcaaggaggagcactgcgtcttccggagcgactccaggggaggcagcgaagctgtggtgaccttggagccctgtgagggggcagacacctacgtcaatggcaagaaagtcacagagcccagcatcctgcgttcaggaaaccgcatcatcatgggtaagagccatgtgttccggttcaaccaccccgagcaggcccggcaggagcgtgagcgcacgccttgtgcggagacgccagctgagcctgtggactgggccttcgcccagcgtgagctgctggagaagcagggcatcgacatgaagcaggagatggagcagaggctccaggaactggaggaccagtaccgccgcgagcgggaggaggccacctacctgctggagcagcagcggctggactatgagagcaagctggaggctctgcagaagcagatggactccaggtactacccggaggtgaacgaggaggaggaggagcccgaggatgaagtccagtggacagagcgggagtgtgagctggcgctctgggccttccggaagtggaagtggtaccagttcacgtctctgcgggacctgctgtggggcaacgccatcttcctcaaggaggccaatgccatcagcgtggagctgaaaaagaaggtacaattccagtttgtcctcctgacggacacactctactcccctctgccacccgacctgctgcccccagaggccgccaaagaccgagagacgcggcccttcccccgcaccattgtggccgtggaggtccaggaccagaagaacggggccacccactactggacgctggagaagctcaggcagcgtctggacctgatgcgggagatgtacgaccgcgctgcagaggtgccctccagtgtcatcgaggactgtgacaacgtggtgaccggcggagaccccttctatgaccgcttcccctggttccggctggtgggcagttcagccatctctggctgcaacagctaccctcttctcaacacatgcatgagcgagcgcatggctgctctcaccccctcccccaccttctcgagccccgactccgacgccaccgagcctgccgaggagcagagcgtgggggaggaggaggaggaggaggaggaggaggaggatgaggaggaggaggacctggaggacgacgtctttccggagcacgcgctgtgcgacggccgggacccgttttacgaccggccccccctgttcagtttagtaggaagggccttcgtgtacctgagcaacctgctgtaccccgttcccctggtacaccgtgtggcaatcgtcagcgagaagggcgaggtgaagggcttcctccgcgtggccgtccaggccatctcagccgatgaagaggcccctgattatggctctggcgtccgccagtcgggaactgctaaaatctcctttgatgaccagcattttgaaaagttccagtccgagtcttgccccgtggtggggatgtcccgctcgggaacctcccaggaagagcttcgcatcgtggagggccagggccagggtgcagacgtggggccctcagccgatgaagtcaacaacaacacctgttcagcagtgcccccagaaggcctcctcctagacagctctgagaaagccgccctggatgggcccctggatgctgccctggaccacctccgcctgggcaacaccttcaccttccgtgtgacagtcctgcaggcgtccagcatctctgccgaatatgccgacatcttctgccagttcaacttcatccaccgccacgacgaggccttctccacagagcccctgaagaacacaggcagaggccccccacttggcttctaccacgtccagaacatcgcagtggaggtgaccaagtccttcattgagtacatcaagagccagcccattgttttcgaggtctttggccactaccagcagcacccgttcccgcccctctgcaaggacgtgctcagccccctgaggccctcgcgccgccacttccctcgggtcatgccactgtccaagccagtgcccgccaccaagctcagcacactgacgcggccctgtccgggaccctgccactgcaagtacgacctgctggtctacttcgagatctgtgagctggaggccaacggcgattacatcccggccgtggtggaccaccgtgggggcatgccatgcatggggaccttcctcctccaccagggcatccagcgacggattacggtgacactactgcatgagacaggcagccatatccgctggaaggaagtgcgcgagctggtcgtgggccgcatccgaaacactccagagaccgacgagtccctgatcgaccccaacatcttgtctctcaacatcctctcttccggatacatccacccagcccaagatgaccggaccttttaccaatttgaggctgcgtgggacagctccatgcacaactctctcctgctgaaccgggtcaccccttatcgagagaaaatctacatgacactctccgcttatatcgagatggagaactgcacccagccggctgttgtcaccaaggacttctgcatggtcttctattcccgtgatgccaagctgccagcctcgcgctccatccgcaacctctttggcagtgggagccttcgggcctcagagagtaaccgtgtgactggtgtgtacgagctcagcctgtgccacgtggctgacgcgggcagcccagggatgcagcgccggcgccgacgagtcctggacacatctgtggcctatgtccggggcgaggagaacctggcaggctggaggccccggagtgacagtctcattctggaccaccagtgggagctggagaagctgagcctcctgcaggaggtggagaagactaggcactacctgctcctgcgggagaagctggagaccgcccagcggcctgtcccggaggcactgtccccggccttcagcgaggactctgagtcccatggctcctccagcgcctcctccccgctctcggctgagggccgcccatcacccctggaggctcccaacgagaggcagcgggagctggccgtcaagtgcttgcgcctgctcacgcacacattcaacagagagtacacacacagccacgtctgcgtcagtgccagcgagagcaagctctccgagatgtctgtcaccctgctccgggacccgtcgatgtcccctctaggggtggccactctcaccccctcctccacttgcccctctctggttgaagggcggtacggtgccactgacctgaggaccccgcagccctgctcccggccagccagcccagagcccgagctgctgccagaggccgactccaagaagctcccttcccctgcccgggcaacagagacagacaaggagccccagcgcctgctggtccctgacatccaggagatccgagtcagcccgatcgtttccaagaaggggtacctgcacttcctggagccgcacacgtcaggctgggccaggcgcttcgtggtggtgcggcgcccctatgcctacatgtacaacagcgacaaggacaccgtggagcggttcgtgctcaacctggccactgcccaggtggagtacagtgaggaccagcaggctatgctcaagacacccaacacattcgcggtgtgcacggaacaccgcggcatcctgctgcaggccgccagcgacaaggacatgcatgactggctgtacgccttcaaccccctcctggccgggaccatacggtccaagctctccagaaggaggtctgcccagatgcgggtctgaacctgagccctcccgtgacagccggcaggcccagcccatcccctccctcatcctcgtctgtcctgtcacctgccgcccagcccctctcctgccagacagcccacgaccgggtcgaccccccaggggacgcccatgccaggcccggggacctgtgccacacgaccagctgtgctcccagcagaggctgtgcgtgtcagttcttcttgcagaatgtgctctggtggaacaagttgggagaggctgggggggccaagggcacaggttacgggggttcttgctgccgttctaatatttttttaagcatagacagacttataattaatatacgttagttagtgacattgaaacagtcaactcggaaattaactataagacttgttctatttataagtatttatttctaatgcctccacatagccctgtaatattcagatggaacccccaaccacctccaccctgtttgttcccacatgtgtctcccaagcctgctagggacaggcagggcagggacagccaccttggaaggccgcagtgaggagctgtctggaccagtggggcaccttggggctagcacacgggtgtatcgcctgggccccaggcttctccatggccacatgggtcctgggtgtatgtgtgggagagtgggggggtgtctttggtgcctgaagtctgcgcggcatggagggtggtgtgagttcctctggtgggagggagaacgcacatctcttctgggcggccacctgaggagtgactccaagaagagttccggcagctttccccaggaaagggtgaggggtgacactcggctctggctctgagatgaggcagacggcacccaggctgtgatctgtcctgggcggggaccaggagggagcggggtcgggatcacctgccagtgtgcagactctgggactgcgtgctgtctccggaccatcagggtagggtggtgggttgagaccaggaagtcagggaagatcggaattcagggcgacggtctaggtgtcgagggctgtggcgcagcctcttcagctgcggcgagaaatggagtgagtcaaggtagcttctgggaagaaatgctgccattagcaggtttcttgcaaagactttcctctctttgttcccagggcagagagtttctgtgagtcccactgagaaaatcccatggggtgggggtatcctggtcggtcggcaatggagggtggctggcttggtggttattgtcttcaaggagctcttcgctgctgcatctgcggtgtccctttgttcttgtcccatttcaccccctctgcagacaccaatgtccgagggccacccaggacaggacgggggtcagccccaagctgagagtctggtcataggagtcatgtccagaggcctagggaggttttagggccctccccacccacacccacaggtcgatttggtctctttttagctcaaggaaagacagtagccaagcaacagagcccctctcccgccgtggcccgtgggagcagttacatcgggtctggtgctccagacctagggcccagcactttcatcagatcctgcctcctggagtgggggaaacgcagcaccccactggttctgaggcccctaccctcccaggctgtcccacgtgatgctgacatgagcctcagagaccccaatcccatgcctgggggagagacagcggctcaggagtgggggagcacgggccttctacaccacatgggaaggctctggcatgaggttttcctttgggaaggttgtttgggcccctgaagttccatctccgagagtggtgtgcagggcaggccagggcccatgctggctgcagtctctgtggctgcctgcctgggccagcctgtttgggagctgggactgtgggctcgccttttcgtacctgggctcaggtgcggtgtggccaccgccaccctcatcccctgcctgggaggctctcccaggggctgatgggggggttctgtgagggagaatcagggctcgggaagccacgcctgggaaggcaggacacaggacacagcagctttctttggaaatctcccaggtgaggattcacatcccaaaataaaattcagaagccaggtggcctgtgctccccatgggtgacctctggaggcagtggaccaagatgcagcaaggagaggatgcagaacagcttcttgcagaagcacctgctccggcatccagcgctgcctggaggcaggaaggagaggcagggcaggacacgctggtctgagatgagggggagccccacgggccccaggcaggctagaggaggcacaggccctgccacggccaactcaggtcagccagcctgaggctgtggcctccaaagggtctgggcgcaccccccaggtcgcaggtgtctgaggccagccaacctgcagagcactcgcggcgtgggtgggctgagtggaggtgcctgggagctgcctaaattcagaagcctccactgccatggagactgcctggctgtgtcctctcagccaggtgccgtgttggccttggctaggacccagagccacactgcagcctccgccgactccctccttccgggcctgctctagtgaggagtgcctaagccaggacccagaaactcagagttgatggtgagaggaggccgcctgagtcaggacacctggcttcttgaaaagttcgctctgccagaaaccacctagggaccacgttagctgccttccttgagctccccaggagtcggtttccacatctgtgaggtggagggctggtgtggaggtgctcatggggtgcggtgcttgggagacagccaggcccagggtggctgctgcttcctgctaagtgggggaggtgagacagatctggaaagccgtctccctcagatggtttcatttaatgctttatactgccgagtctgggggcttgttttggtttgggggcagccatcctccaccagaaagggggagctccttccgctgcggctccagatagatggggatgccgggctccaggccgaccagcacttgggatctgatgggacacggccagtgcctaggggtgccaagtccaaggcctcccactgggagtcatcgctgagaagatgccaatgtttcatccaccggctgcacaggcacaaactcccccacccaggacggctgtgatgaggtggccctccctgtcaaccctggtccctggagtccccagcacctggggccctggtggggctgatgtcacaggtgtttactgtgctgctgcactggtcctatgccagcctcacccatacggacagcagctgtggcgacctgcgtttctccctgggcctgtgcttcctgtagttagtccgtcccctggttcccctgtggctcagaggccgcgtccctggcttgtacatatgtgattgctgtgggcacaccccagaccccatgtcatagctgccgtcccgacgtcacgacgcctgtcccgatgtcttacacccgagtgttagccctaggctcctgtactgtgcgtgcacttgaggctctgtccaattaagaaataaatgtggctcttactcaacacag

SEQ ID NO: 87201 - DNA, 5376 bp, Artificial Sequence
  derived and/or modified sequence
atggccggggcctctgtgaaggtggccgtgcgggtgcggcccttcaacagccgggagatgagccgggacagcaagtgcatcatccagatgagcggcagcaccaccaccatcgtgaaccccaagcagcccaaggagacccccaagagcttctcctttgactacagctactggagccacaccagccctgaggacatcaactatgccagccagaagcaggtgtacagagacattggagaggagatgctgcagcacgcctttgagggctacaacgtgtgcatctttgcctacggccagacaggagctgggaagagctacaccatgatgggcaagcaggagaaggaccagcagggcatcatcccccagctgtgtgaggacctcttcagccgcatcaatgacaccaccaatgacaacatgagctacagcgtggaggtgtcctacatggagatctactgtgagcgggtgcgggacctgctgaaccccaagaacaagggcaacctgcgggtgcgggagcaccccctgctgggcccctacgtggaggacctgagcaagctggccgtgaccagctacaatgacatccaggacctgatggacagcggcaacaaggccaggacagtggccgccaccaacatgaatgagaccagcagccgcagccatgctgtgttcaacatcatcttcacccagaagagacatgatgctgagaccaacatcaccacagagaaggtgtccaagatcagcctggtggacctggccggcagcgagagagctgacagcactggagccaagggcacccggctgaaggagggcgccaacatcaacaagagcctgaccaccctgggcaaggtgatcagcgccctggccgagatggacagcggccccaacaagaacaagaagaagaagaagacagacttcatcccctacagagattctgtgctgacctggctgctgcgggagaacctgggcggcaacagcaggacagccatggtggccgccctgagccctgctgacatcaactatgatgagaccctgagcaccctgcgctatgctgaccgggccaagcagatccgctgcaatgctgtgatcaatgaagaccccaacaacaagctgatccgggagctgaaggatgaggtgacccggctgcgggacctgctgtatgcccagggcctgggggacatcacagacaccaacacagtgcctgggggccccaagctgaccaatgccctggtgggcatgagccccagcagcagcctgagcgccctgagcagcagagctgcctctgtgagcagcctgcacgagcgcatcctgtttgcccctggcagcgaggaggccatcgagcggctgaaggagacagagaagatcatcgccgagctgaatgagacctgggaggagaagctgcggaggacagaggccatccgcatggagcgggaggccctgctggccgagatgggcgtggccatgagagaagatggcggcaccctgggcgtcttcagccccaagaagaccccccacctggtgaacctgaatgaagaccccctgatgtctgagtgcctgctgtactacatcaaggatggcatcaccagggtgggccgggaggatggagagcggcggcaggacatcgtgctgagcggccacttcatcaaggaggagcactgtgtgttcagaagtgacagccggggcggcagcgaggccgtggtgaccctggagccctgtgagggcgctgacacctacgtgaatggcaagaaggtgacagagcccagcatcctgcggagcggcaaccgcatcatcatgggcaagagccacgtgttccgcttcaaccaccctgagcaggcccggcaggagcgggagaggaccccctgtgccgagaccccagctgagcctgtggactgggcctttgcccagcgggagctgctggagaagcagggcatcgacatgaagcaggagatggagcagaggctgcaggagctggaggaccagtacagaagagagcgggaggaggccacctacctgctggagcagcagaggctggactatgagagcaagctggaggccctgcagaagcagatggacagccgctactacccagaggtgaatgaggaggaggaggagccagaagatgaggtgcagtggacagagcgggagtgtgagctggccctgtgggccttcaggaagtggaagtggtaccagttcaccagcctgcgggacctgctgtggggcaatgccatcttcctgaaggaggccaatgccatctctgtggagctgaagaagaaggtgcagttccagtttgtgctgctgacagacaccctgtacagccccctgcccccagacctgctgcccccagaggccgccaaggaccgggagacccggcccttccccaggaccatcgtggccgtggaggtgcaggaccagaagaatggagccacccactactggaccctggagaagctgcggcagaggctggacctgatgagggagatgtatgacagagctgctgaggtgcccagctctgtgattgaggactgtgacaacgtggtgactggaggagaccccttctatgaccgcttcccctggttccggctggtgggcagcagcgccatcagcggctgcaacagctaccccctgctgaacacctgcatgtctgagaggatggccgccctgacccccagccccaccttcagcagcccagacagtgatgccacagagcctgctgaggagcagagcgtgggggaggaggaggaggaggaggaggaggaggaggatgaggaggaggaggacctggaggatgatgtgtttcctgagcacgccctgtgtgatggccgggaccccttctatgacaggcctcctctcttcagcctggtgggccgggcctttgtgtacctgagcaacctgctgtaccctgtgcccctggtgcaccgggtggccatcgtgtctgagaagggggaggtgaagggcttcctgcgggtggccgtgcaggccatctctgcagatgaggaggccccagactatggcagcggcgtgcggcagagcggcacagccaagatcagctttgatgaccagcactttgagaagttccagagcgagagctgccctgtggtgggcatgagccgcagcggcaccagccaggaggagctgcgcatcgtggagggccagggccagggcgcagatgtgggccccagcgcagatgaggtgaacaacaacacctgcagcgctgtgcccccagagggcctgctgctggacagcagcgagaaggccgccctggatggccccctggatgctgccctggaccacctgcggctgggcaacaccttcaccttccgggtgacagtgctgcaggccagcagcatctctgcagaatatgctgacatcttctgccagttcaacttcatccacagacatgatgaggccttcagcacagagcccctgaagaacacaggccggggcccccccctgggcttctaccacgtgcagaacattgctgtggaggtgaccaagagcttcatcgagtacatcaagagccagcccatcgtgtttgaggtgtttggccactaccagcagcaccccttcccccccctgtgcaaggatgtgctgagccccctgcggcccagcagaagacacttcccccgggtgatgcccctgagcaagcctgtgcctgccaccaagctgagcaccctgacccggccctgccccggcccctgccactgcaagtatgacctgctggtgtactttgagatctgtgagctggaggccaacggggactacatcccagctgtggtggaccaccggggcggcatgccctgcatgggcaccttcctgctgcaccagggcatccagaggcgcatcaccgtgaccctgctgcacgagaccggcagccacatccgctggaaggaggtgcgggagctggtggtgggccgcatccggaacaccccagagacagatgagagcctgattgaccccaacatcctgagcctgaacatcctgagcagcggctacatccacccagcccaggatgacaggaccttctaccagtttgaagctgcctgggacagctccatgcacaacagcctgctgctgaacagagtgaccccctaccgggagaagatctacatgaccctgagcgcctacatcgagatggagaactgcacccagcctgctgtggtgaccaaggacttctgcatggtgttctacagcagagatgccaagctgcctgccagccgcagcatccggaacctgtttggaagtggcagcctgcgggccagcgagagcaacagagtgactggagtgtatgagctgagcctgtgccacgtggctgatgctggcagccctggcatgcagaggagaagaagaagagtgctggacacctctgtggcctacgtgcggggggaggagaacctggccggctggaggcccaggagtgacagcctcatcctggaccaccagtgggagctggagaagctgagcctgctgcaggaggtggagaagaccaggcactacctgctgctgcgggagaagctggagacagcccagaggcctgtgcctgaggccctgagccctgccttctctgaagattctgagagccacggcagcagcagcgccagcagccccctgtctgctgagggccggcccagccccctggaggccccaaatgaaaggcagcgggagctggccgtgaagtgcctgcggctgctgacccacaccttcaaccgggagtacacccacagccacgtgtgtgtgtctgccagcgagagcaagctgtctgagatgtctgtgaccctgctgcgggaccccagcatgagccccctgggcgtggccaccctgacccccagcagcacctgccccagcctggtggagggccgctatggagccacagacctgcggaccccccagccctgcagcaggcctgccagccctgagcctgagctgctgcctgaggccgacagcaagaagctgcccagccctgcccgggccacagaaacagacaaggagccccagaggctgctggtgcctgacatccaggagatccgggtgagccccatcgtgtccaagaagggctacctgcacttcctggagccccacaccagcggctgggccaggagatttgtggtggtgagaagaccctatgcctacatgtacaacagcgacaaggacacagtggagagatttgtgctgaacctggccacagcccaggtggagtacagcgaggaccagcaggccatgctgaagacccccaacacctttgctgtgtgcacagagcaccggggcatcctgctgcaggccgccagtgacaaggacatgcatgactggctgtatgccttcaaccccctgctggccggcaccatccgcagcaagctgagcagaagaagaagtgcccagatgagggtgtag

SEQ ID NO: 87202 - DNA, 5376 bp, Artificial Sequence
  derived and/or modified sequence
atggccggcgccagcgtgaaggtggccgtgcgggtgcggcccttcaacagtagagaaatgagccgcgactctaagtgcatcattcagatgtctgggagcacaacgactatcgttaatcccaagcagcctaaagaaacaccaaaatccttcagctttgattactcatattggtcccacacctcccctgaggatattaattacgctagccaaaagcaggtgtatagggacatcggtgaggagatgctacagcatgcgtttgaggggtataacgtgtgtattttcgcgtacgggcagactggcgctggtaagtcctatactatgatggggaaacaggaaaaggatcaacagggaatcattccacagctgtgtgaggacctgttcagcaggatcaacgatacgacaaacgacaacatgtcttactctgttgaggtatcgtatatggagatttactgtgaaagggtgagagacctcctgaatcctaaaaacaagggtaatctgcgggtgagggaacatcccctgcttggcccttatgtcgaagatttgtccaaactggcggtgacgagctataatgacattcaggacctcatggactctggcaacaaagcccgaacggtggcagccaccaacatgaatgagacctccagcagaagccacgccgtgttcaatataattttcactcagaaacgccacgatgctgagacgaatataacaaccgagaaagtttcaaaaatctcccttgtggacctcgctgggagtgagagagctgactctacaggggcaaaaggcactcgcttgaaagaaggcgcaaacattaacaagagcctgaccacactggggaaagtgatctcggctctcgccgaaatggacagtgggccgaacaagaataagaaaaagaaaaaaacggattttatcccatatagagattccgtgctgacctggctcctgcgcgagaacctgggtggtaattcccgcaccgctatggttgccgcattatctccagcagatatcaattacgacgaaacccttagcacactcaggtatgcagatcgcgccaagcagattagatgcaatgcagtaattaacgaggatccaaacaacaagctaatacgcgaactgaaggacgaggtgacgcgcttgagagatcttctgtatgctcaggggttgggcgatatcaccgatactaacaccgtgcctgggggaccgaaactcacgaatgctctcgtcggcatgtcacccagcagctcattgagtgccctcagctcccgcgccgcatccgtgtcctctctccatgagcggattctgttcgcacccggcagcgaagaagctatcgagagactcaaagaaaccgagaagatcattgcggagttgaatgagacttgggaggagaagttgcgacggacagaggcgattcgcatggagcgggaggccctgcttgccgagatgggcgtggccatgagagaggacgggggaacattgggcgtcttctctccaaaaaagacacctcacctcgtcaacctcaatgaagacccgttaatgtctgaatgtctcctgtactatatcaaggacggcattacccgggttggcagggaggacggcgaacggcgccaggatatagtcctctccggtcacttcatcaaagaagaacattgtgttttccgcagcgacagccgcgggggaagcgaggccgtcgtaactctcgagccgtgtgaaggggcggacacctatgtgaacggtaaaaaagtcactgaaccttccatactgaggtccggcaatcgaatcataatgggaaagtctcatgttttccgctttaaccaccccgagcaggcccggcaggagcgcgagcgtaccccatgcgcagagaccccagcagagcccgtggactgggcttttgctcagcgggagctcctcgagaaacaaggaatcgatatgaaacaggagatggaacagcggctgcaggaactggaggaccaatacaggcgtgaacgagaggaggccacgtaccttcttgagcagcagcggctcgactacgagtctaagcttgaagctctgcagaaacagatggacagccggtattacccagaagtgaacgaagaggaggaagagccagaggacgaggtgcagtggacagagagggagtgtgaattagctctatgggctttcaggaaatggaaatggtatcagtttacctctctacgcgatctgttgtggggcaatgccattttcttaaaagaggccaacgccatctccgtggaactgaagaagaaggtgcagtttcagtttgtcctcctaacagatacactgtacagcccactgccacccgacttgctgccccctgaggctgccaaggatagggagactaggccctttccgaggacaattgttgctgtcgaggtgcaagatcagaagaacggggctacacactattggaccctggaaaaattacgccagcggctggatctcatgcgagaaatgtacgatcgagccgcagaggtgccctcgagcgttatcgaagattgcgataacgtggtaacgggtggtgatccattttatgatcggttcccctggtttagattggtggggagtagcgccatttctggttgtaactcttacccattgctcaacacctgtatgagcgagagaatggcggctctgaccccgagtccaactttcagcagcccagatagcgatgccactgagcccgccgaggagcagagtgttggagaggaagaggaggaggaggaagaggaggaggatgaggaagaggaggatctggaggatgatgtttttccagagcatgctctctgtgatgggagagacccattctatgaccgcccgccactgttcagtctggttggcagggcctttgtctatctcagcaatttactctacccggttccccttgtgcaccgtgtggcaattgtgagcgagaagggtgaggtaaaagggttcctgagagtggccgttcaggctatatctgccgatgaagaggctcctgattatggtagtggtgtgcggcagtccgggacggctaaaatttcctttgacgatcaacacttcgagaagtttcagtccgaatcctgccccgtggtgggaatgagccggtccggcacgagccaggaggaactgagaatagtggaaggacagggccagggcgcagatgtaggcccctctgccgacgaagtgaacaataacacctgctcggcagttccccccgaaggcttgcttttagactccagcgagaaggcggccctggatggtcccctggacgccgccctggatcacctaagactggggaatacatttacatttagagtgaccgtcctccaggcatcaagcatcagtgccgagtatgccgacattttctgtcagttcaatttcatccaccgccatgacgaggcttttagtacagagccattaaaaaacactggccgcggacccccgctcggtttctatcatgttcagaacattgctgttgaagtcacaaaatcattcatagagtatattaagagtcagcctatcgtattcgaagtgttcggccactatcagcaacacccgttccctcccctctgcaaagacgttctgtccccgctgaggccgagtagacgccacttccccagagtgatgccgctgagcaagcccgtccccgcaacgaagctttctactctgacaaggccatgccccggaccatgccattgtaaatacgacctgttagtttactttgaaatctgtgagctggaggcaaacggggattacatcccggctgtggttgatcatagggggggtatgccatgcatggggacattcttgctacaccaggggatccagcgcaggatcaccgtgactctgctccacgaaactggcagccacattaggtggaaggaggtgcgtgagctagtggttgggcgaatacgaaacacgcccgagactgacgagagtttaatagaccctaacatcctctcactgaacattctgtcttctggctacatacacccagcccaagatgatagaactttctaccagttcgaggcggcctgggatagcagcatgcacaactctttactgctgaaccgcgtcacgccttaccgcgagaaaatttacatgaccctgtccgcttatatcgaaatggaaaattgtactcagcctgcggtagtgactaaggatttttgcatggttttctacagccgggacgccaagctgccagctagtcgctccatccggaacctcttcggcagcggttctttgcgggcgtctgaaagcaatcgcgtaaccggagtttacgagttgtctctttgccatgtggccgatgccggcagccccggaatgcaaagacgcagaagacgcgtgcttgacacctctgtggcttatgtgaggggtgaggaaaacctggccggctggagacctcggagcgactcccttattctggaccatcaatgggagctggagaagctaagtctcttgcaagaggtggaaaagaccagacactatctcttgctccgcgagaaactggaaaccgctcaaaggcccgtacctgaagcactcagtcccgcattctctgaagactctgaatcccacggctcatcctcagcaagcagccccctgtctgctgagggccgccctagcccgttggaagctcccaatgaaaggcagagggagctagccgtgaaatgcctccgacttttaacacacacttttaatagagagtatacccatagtcacgtatgcgtgagcgccagcgagagcaagctttccgagatgtccgttaccctattgcgcgacccttcaatgtcaccccttggtgttgccactctgaccccttctagcacatgtccttctctggtggagggacgctatggtgcaactgatctgcggactcctcagccgtgtagtaggccggcctcccccgagccagagctgctccctgaggcagacagcaaaaaactgcctagccccgcccgagccactgagaccgataaagagcctcagcgcctgttagttcctgacatacaggagattcgggtaagccctattgttagtaaaaaggggtacctgcatttcctagagcctcacacctcggggtgggcacgccgcttcgtggtggttcgacgtccttatgcatatatgtacaactctgataaggatacggtcgagagattcgtgttgaacctggcgactgcgcaggtggaatactcagaagaccaacaagccatgttgaagacacctaacactttcgctgtctgcactgaacaccggggcattctgctccaggctgccagcgataaggacatgcacgactggctgtacgcattcaaccccctgctggctggtacaatcaggtctaagctcagcaggcggcggtctgcccaaatgcgggtctag

SEQ ID NO: 87203 - DNA, 5375 bp, Artificial Sequence
  derived and/or modified sequence
atggctggtgctagtgttaaggtcgcagttcgtgtacgtccatttaactcacgtgaaatgagccgggacagcaagtgcataatccagatgtcagggagtaccacaaccatcgtcaacccaaagcagcctaaggagacccctaaatctttctcatttgactacagctactggtctcatacgagccctgaggacataaattatgcctcccagaaacaagtctatcgggacattggcgaggaaatgcttcagcatgcctttgaaggctacaatgtgtgtatctttgcctatggtcaaaccggagctggcaagtcttataccatgatgggcaagcaggaaaaggaccagcaggggatcatcccacaattgtgcgaggatctgttcagcaggatcaacgacacgacaaatgacaacatgagctactccgtcgaggtgtcctacatggagatatactgcgagcgggttagggatctattaaacccaaagaacaaaggcaatttaagggtccgagaacaccccttgctgggcccatacgtggaggacctgtccaaattggcggtgacatcttacaatgatattcaagatctgatggattcaggtaacaaggctagaacagttgctgccaccaatatgaacgagactagtagcaggtcccacgccgtgtttaacatcatttttacccaaaagcgccatgacgcagagaccaatattaccactgaaaaggtgtccaagatcagtctggttgacctggcaggatctgagcgcgctgattcaaccggcgcaaagggcacacgcctgaaggagggggcaaacataaacaagtcactgaccaccctgggcaaagttatctccgcactggctgagatggattccggaccgaataagaataagaagaagaagaagactgacttcatcccctacagagactctgtcctcacctggctgctcagggagaacctgggaggcaacagtagaacagctatggttgccgctctgagccctgcagacatcaattacgacgagactctatccacattgcgctatgccgatagggctaagcaaattagatgcaacgccgtaatcaacgaggatccaaacaataagcttattcgtgaactgaaagacgaagtgacccgccttcgagacctcctttatgctcagggcctgggagacattaccgacaccaacaccgtgcccggaggcccaaagctgacgaacgccctggttggcatgagcccttctagctccctaagcgctctctcgagcagggcagcctcagtctcctctctgcacgagagaatcttatttgctcctggttcggaggaggctatcgaaagattaaaagagactgaaaagattatagccgagctcaatgaaacttgggaggagaaacttcgcagaaccgaagctattagaatggaacgtgaagctttacttgctgagatgggagttgccatgcgcgaggacggtggcaccctcggagtgtttagccctaagaagaccccccacctggtaaacctgaatgaagatccgctgatgtccgagtgcctgctgtactatatcaaggacgggattactcgagtcgggagagaggatggggagcgtaggcaggacattgttctatctgggcactttataaaagaggagcactgtgtctttcggagtgactctagaggaggcagcgaagccgtggtaacactggagccctgcgagggtgctgacacttatgtcaatggcaaaaaagttaccgagccatcaatcctacgttctgggaacagaatcattatgggcaagtcccacgtgttccgtttcaatcatcccgaacaggccaggcaggagcgggagagaactccatgtgctgagacaccggcagagcccgtggactgggcattcgcccaacgggaactcttggaaaagcagggaatcgacatgaaacaggaaatggagcaaaggctgcaggaactcgaggatcaatataggagagagcgcgaggaagctacgtatctgctggaacagcagagactcgactatgaaagcaaattggaagcacttcagaagcagatggactcccgctactatccagaggttaacgaagaagaagaggagcccgaagatgaggtgcagtggacagaacgggagtgtgaactggcgctgtgggcttttcgaaaatggaagtggtaccagtttacgagcctgagagaccttctgtggggcaatgccatcttcctcaaggaggctaacgccatctctgtagaactcaagaagaaagtgcagttccagttcgtgctgcttaccgacaccttgtactcaccgctcccgcctgacctgctgcctccagaggcagcaaaggaccgggagacccgaccctttccgaggacaatcgtcgcggtggaggttcaagatcagaagaacggcgcaacgcactattggaccttggagaagcttaggcaacggcttgacctgatgcgcgaaatgtatgacagagccgcagaagtccccagttcagtcatcgaagactgcgacaacgtcgtgaccgggggtgatcctttttacgatcggtttccatggttcaggttagtgggctcttccgcaataagcggctgcaatagttatccattgctcaatacctgtatgagtgagagaatggctgctctgacccctagcccaacattctcctcccccgattctgacgccactgagcctgccgaggaacagagcgtcggtgaagaagaggaggaggaagaggaggaggaggatgaggaggaagaagatttggaggacgatgtgttccctgaacacgccctgtgcgacggcagagaccctttctacgatcgtccccctctgttctccttggttggtagggctttcgtctacctcagtaacttactctaccctgtaccactcgtgcatagagtggccattgtatccgaaaagggcgaagtgaagggctttttgagagtcgcagtgcaggccattagtgcagacgaagaagctcccgactacggctccggcgtccggcaaagcgggactgctaagatatcctttgacgatcagcatttcgagaagtttcaatcagaatcctgtcccgttgtgggaatgagtagaagtggcacaagtcaggaggagctgcggattgttgagggacagggtcagggggcagacgtaggtcctagcgcagacgaggtcaacaataatacatgcagcgctgttccaccggagggtttgttacttgatagctccgaaaaggcagccctagacggaccattggacgccgcactggaccatttgcgtctggggaacacctttaccttccgggtcacggtgctgcaggccagttcaatctccgcggagtatgccgatatcttttgccaattcaatttcattcaccgccacgacgaagctttctccaccgagccactcaaaaatactgggagagggccacctttggggttctaccatgtccaaaatatcgcggtagaagtgaccaaaagctttatagagtatattaaaagccagcctatcgtgtttgaggtgttcggtcattatcaacagcacccatttcctcctctgtgcaaagacgtgctgagtccacttaggccatctcggaggcattttcccagggtgatgcccctttcaaagcccgtacctgcaaccaagctctccacactgactcggccatgccctggcccttgtcactgcaaatatgacctgctggtgtactttgaaatttgcgagttagaagccaacggtgactatattccggcagtcgtcgatcatcgaggtggtatgccttgcatgggtacttttctgctgcaccaaggcatccagaggcgtattacagtgacattactacatgagaccggaagccatattcggtggaaggaagtccgtgagctcgtggtggggagaattaggaacacgcccgaaacagatgagtctcttatcgatcccaacattctatcacttaatatactgagcagcgggtacatccaccctgctcaggatgataggaccttttatcagttcgaagcggcttgggactctagcatgcacaatagtctcctcttgaatagggtgaccccatacagagaaaaaatctatatgactttgtccgcatatatcgaaatggaaaactgcacacaaccagctgtagttacaaaggacttctgcatggtgttctactcaagagacgccaaattgcccgcaagccgcagcatcaggaacctctttgggtctggctccctacgggcttccgaatccaaccgggtgacaggagtctacgagctcagcctgtgccacgtagctgatgctggaagccctgggatgcaacggagacgcaggcgcgtgctagacacatcggtggcctacgtaaggggcgaggagaacctcgcgggatggcgacccaggagtgactcgctgatacttgatcaccagtgggagctagagaaactgagtctcctgcaagaggtcgaaaagactaggcactatttactgttaagagaaaaactggaaacagcccagcgacctgtgccagaagctctgagtcctgctttcagcgaagacagcgagtcacacggatctagctccgcatcatcccccctgtccgccgagggcagacccagccccctggaggccccaaatgagaggcaacgcgaactggccgtaaagtgcttgcgccttttaacccacacctttaacagagagtatactcatagccacgtatgtgtcagcgccagcgaatccaagttgagcgagatgtctgtgaccttgttgcgagatcctagcatgtctcctctgggcgtggccaccctgaccccatccagcacatgtccaagcctggtcgaaggcagatatggcgctacagacctgcggaccccccagccctgctcacgcccagcttctcccgagccagagctgttacccgaggcagacagtaagaaactgcctagccctgcacgggcaaccgagaccgacaaggagccacaacggcttctggtgcctgatattcaggaaattcgcgtgtccccaatcgtatcaaaaaaaggctatttgcattttctggagccccacacgagtggatgggcacgcagattcgtggtcgtgagacgcccttacgcatacatgtataactccgataaagataccgtggaaagattcgtgttaaatttggccaccgcgcaagttgagtattctgaagaccagcaggccatgctgaagacccctaacacttttgcagtgtgtaccgagcaccgcggaattctcttacaggccgcatctgacaaggacatgcacgattggctgtatgctttcaaccccttgctggcgggaaccattcggagcaagctttcccgcaggagatccgcgcagatgagagtcta

SEQ ID NO: 87204 - DNA, 5376 bp, Artificial Sequence
  derived and/or modified sequence
atggccggcgccagcgtgaaggtggccgtgagagtgagacccttcaacagcagagagatgagcagagacagcaagtgcatcatccagatgagcggcagcaccaccaccatcgtgaaccccaagcagcccaaggagacccccaagagcttcagcttcgactacagctactggagccacaccagccccgaggacatcaactacgccagccagaagcaggtgtacagagacatcggcgaggagatgctgcagcacgccttcgagggctacaacgtgtgcatcttcgcctacggccagaccggcgccggcaagagctacaccatgatgggcaagcaggagaaggaccagcagggcatcatcccccagctgtgcgaggacctgttcagcagaatcaacgacaccaccaacgacaacatgagctacagcgtggaggtgagctacatggagatctactgcgagagagtgagagacctgctgaaccccaagaacaagggcaacctgagagtgagagagcaccccctgctgggcccctacgtggaggacctgagcaagctggccgtgaccagctacaacgacatccaggacctgatggacagcggcaacaaggccagaaccgtggccgccaccaacatgaacgagaccagcagcagaagccacgccgtgttcaacatcatcttcacccagaagagacacgacgccgagaccaacatcaccaccgagaaggtgagcaagatcagcctggtggacctggccggcagcgagagagccgacagcaccggcgccaagggcaccagactgaaggagggcgccaacatcaacaagagcctgaccaccctgggcaaggtgatcagcgccctggccgagatggacagcggccccaacaagaacaagaagaagaagaagaccgacttcatcccctacagagacagcgtgctgacctggctgctgagagagaacctgggcggcaacagcagaaccgccatggtggccgccctgagccccgccgacatcaactacgacgagaccctgagcaccctgagatacgccgacagagccaagcagatcagatgcaacgccgtgatcaacgaggaccccaacaacaagctgatcagagagctgaaggacgaggtgaccagactgagagacctgctgtacgcccagggcctgggcgacatcaccgacaccaacaccgtgcccggcggccccaagctgaccaacgccctggtgggcatgagccccagcagcagcctgagcgccctgagcagcagagccgccagcgtgagcagcctgcacgagagaatcctgttcgcccccggcagcgaggaggccatcgagagactgaaggagaccgagaagatcatcgccgagctgaacgagacctgggaggagaagctgagaagaaccgaggccatcagaatggagagagaggccctgctggccgagatgggcgtggccatgagagaggacggcggcaccctgggcgtgttcagccccaagaagaccccccacctggtgaacctgaacgaggaccccctgatgagcgagtgcctgctgtactacatcaaggacggcatcaccagagtgggcagagaggacggcgagagaagacaggacatcgtgctgagcggccacttcatcaaggaggagcactgcgtgttcagaagcgacagcagaggcggcagcgaggccgtggtgaccctggagccctgcgagggcgccgacacctacgtgaacggcaagaaggtgaccgagcccagcatcctgagaagcggcaacagaatcatcatgggcaagagccacgtgttcagattcaaccaccccgagcaggccagacaggagagagagagaaccccctgcgccgagacccccgccgagcccgtggactgggccttcgcccagagagagctgctggagaagcagggcatcgacatgaagcaggagatggagcagagactgcaggagctggaggaccagtacagaagagagagagaggaggccacctacctgctggagcagcagagactggactacgagagcaagctggaggccctgcagaagcagatggacagcagatactaccccgaggtgaacgaggaggaggaggagcccgaggacgaggtgcagtggaccgagagagagtgcgagctggccctgtgggccttcagaaagtggaagtggtaccagttcaccagcctgagagacctgctgtggggcaacgccatcttcctgaaggaggccaacgccatcagcgtggagctgaagaagaaggtgcagttccagttcgtgctgctgaccgacaccctgtacagccccctgccccccgacctgctgccccccgaggccgccaaggacagagagaccagacccttccccagaaccatcgtggccgtggaggtgcaggaccagaagaacggcgccacccactactggaccctggagaagctgagacagagactggacctgatgagagagatgtacgacagagccgccgaggtgcccagcagcgtgatcgaggactgcgacaacgtggtgaccggcggcgaccccttctacgacagattcccctggttcagactggtgggcagcagcgccatcagcggctgcaacagctaccccctgctgaacacctgcatgagcgagagaatggccgccctgacccccagccccaccttcagcagccccgacagcgacgccaccgagcccgccgaggagcagagcgtgggcgaggaggaggaggaggaggaggaggaggaggacgaggaggaggaggacctggaggacgacgtgttccccgagcacgccctgtgcgacggcagagaccccttctacgacagaccccccctgttcagcctggtgggcagagccttcgtgtacctgagcaacctgctgtaccccgtgcccctggtgcacagagtggccatcgtgagcgagaagggcgaggtgaagggcttcctgagagtggccgtgcaggccatcagcgccgacgaggaggcccccgactacggcagcggcgtgagacagagcggcaccgccaagatcagcttcgacgaccagcacttcgagaagttccagagcgagagctgccccgtggtgggcatgagcagaagcggcaccagccaggaggagctgagaatcgtggagggccagggccagggcgccgacgtgggccccagcgccgacgaggtgaacaacaacacctgcagcgccgtgccccccgagggcctgctgctggacagcagcgagaaggccgccctggacggccccctggacgccgccctggaccacctgagactgggcaacaccttcaccttcagagtgaccgtgctgcaggccagcagcatcagcgccgagtacgccgacatcttctgccagttcaacttcatccacagacacgacgaggccttcagcaccgagcccctgaagaacaccggcagaggcccccccctgggcttctaccacgtgcagaacatcgccgtggaggtgaccaagagcttcatcgagtacatcaagagccagcccatcgtgttcgaggtgttcggccactaccagcagcaccccttcccccccctgtgcaaggacgtgctgagccccctgagacccagcagaagacacttccccagagtgatgcccctgagcaagcccgtgcccgccaccaagctgagcaccctgaccagaccctgccccggcccctgccactgcaagtacgacctgctggtgtacttcgagatctgcgagctggaggccaacggcgactacatccccgccgtggtggaccacagaggcggcatgccctgcatgggcaccttcctgctgcaccagggcatccagagaagaatcaccgtgaccctgctgcacgagaccggcagccacatcagatggaaggaggtgagagagctggtggtgggcagaatcagaaacacccccgagaccgacgagagcctgatcgaccccaacatcctgagcctgaacatcctgagcagcggctacatccaccccgcccaggacgacagaaccttctaccagttcgaggccgcctgggacagcagcatgcacaacagcctgctgctgaacagagtgaccccctacagagagaagatctacatgaccctgagcgcctacatcgagatggagaactgcacccagcccgccgtggtgaccaaggacttctgcatggtgttctacagcagagacgccaagctgcccgccagcagaagcatcagaaacctgttcggcagcggcagcctgagagccagcgagagcaacagagtgaccggcgtgtacgagctgagcctgtgccacgtggccgacgccggcagccccggcatgcagagaagaagaagaagagtgctggacaccagcgtggcctacgtgagaggcgaggagaacctggccggctggagacccagaagcgacagcctgatcctggaccaccagtgggagctggagaagctgagcctgctgcaggaggtggagaagaccagacactacctgctgctgagagagaagctggagaccgcccagagacccgtgcccgaggccctgagccccgccttcagcgaggacagcgagagccacggcagcagcagcgccagcagccccctgagcgccgagggcagacccagccccctggaggcccccaacgagagacagagagagctggccgtgaagtgcctgagactgctgacccacaccttcaacagagagtacacccacagccacgtgtgcgtgagcgccagcgagagcaagctgagcgagatgagcgtgaccctgctgagagaccccagcatgagccccctgggcgtggccaccctgacccccagcagcacctgccccagcctggtggagggcagatacggcgccaccgacctgagaaccccccagccctgcagcagacccgccagccccgagcccgagctgctgcccgaggccgacagcaagaagctgcccagccccgccagagccaccgagaccgacaaggagccccagagactgctggtgcccgacatccaggagatcagagtgagccccatcgtgagcaagaagggctacctgcacttcctggagccccacaccagcggctgggccagaagattcgtggtggtgagaagaccctacgcctacatgtacaacagcgacaaggacaccgtggagagattcgtgctgaacctggccaccgcccaggtggagtacagcgaggaccagcaggccatgctgaagacccccaacaccttcgccgtgtgcaccgagcacagaggcatcctgctgcaggccgccagcgacaaggacatgcacgactggctgtacgccttcaaccccctgctggccggcaccatcagaagcaagctgagcagaagaagaagcgcccagatgagagtgtag

SEQ ID NO: 87205 - protein, 1644 aa, Artificial Sequence
  derived and/or modified sequence
MFWCGTCFVTNNMKGSEVSLEKKKKIKMPVKRLREVVSQNHGDHLVLLKDELPCVPPALSANKRLPVGTGTSLNGTSRGSSDLTSARNCYQPLLENPMVSESDFSKDVAVQVLPLDKIEENNKQKANDIFISQYTMGQKDALRTVLKQNVSLCLTGWSDHSGVITTHCSLYLLRLMRSSHLSLPSSWDYRAQSMPVFKEVKVHLLEDAGIEKDAVTQETRISPSGIDSATTVAAATAAAIATAAPLIKVQSDLEAKVNSVTELLSKLQETDKHLQRVTEQQTSIQRKQEKLHCHDHEKQMNVFMEQHIRHLEKLQQQQIDIQTHFISAALKTSSFQPVSMPSSRAVEKYSVKPEHPNLGSCNPSLYNTFASKQAPLKEVEDTSFDKQKSPLETPAPRRFAPVPVSRDDELSKRENLLEEKENMEVSCHRGNVRLLEQILNNNDSLTRKSESSNTTSLTRSKIGWTPEKTNRFPSCEELETTKVTMQKSDDVLHDLGQKEKETNSMVQPKESLSMLKLPDLPQNSVKLQTTNTTRSVLKDAEKILRGVQNNKKVLEENLEAIIRAKDGAAMYSLINALSTNREMSEKIRIRKTVDEWIKTISAEIQDELSRTDYEQKRFDQKNQRTKKGQNMTKDIRTNTQDKTVNKSVIPRKHSQKQIEEHFRNLPMRGMPASSLQKERKEGLLKATTVIQDEDYMLQVYGKPVYQGHRSTLKKGPYLRFNSPSPKSRPQRPKVIERVKGTKVKSIRTQTDFYATKPKKMDSKMKHSVPVLPHGDQQYLFSPSREMPTFSGTLEGHLIPMAILLGQTQSNSDTMPPAGVIVSKPHPVTVTTSIPPSSRKVETGVKKPNIAIVEMKSEKKDPPQLTVQVLPSVDIDSISNSSADVLSPLSSPKEASLPPVQTWIKTPEIMKVDEEEVKFPGTNFDEIIDVIQEEEKCDEIPDSEPILEFNRSVKADSTKYNGPPFPPVASTFQPTADILDKVIERKETLENSLIQWVEQEIMSRIISGLFPVQQQIAPSISVSVSETSEPLTSDIVEGTSSGALQLFVDAGVPVNSNVIKHFVNEALAETIAVMLGDREAKKQGPVATGVSGDASTNETYLPARVCTPLPTPQPTPPCSPSSPAKECVLVKTPDSSPCDSDHDMAFPVKEICAEKGDDMPAIMLVNTPTVTPTTTPPPAAAVFTPTLSDISIDKLKVSSPELPKPWGDGDLPLEEENPNSPQEELHPRAIVMSVAKDEEPESMDFPAQPPPPEPVPFMPFPAGTKAPSPSQMPGSDSSTLESTLSVTVTETETLDKPISEGEILFSCGQKLAPKILEDIGLYLTNLNDSLSSTLHDAVEMEDDPPSEGQVIRMSHKKFHADAILSFAKQNQESAVSQQAVYHSEDLENSVGELSEGQRPQLTAAAENILMGHSLYMQPPVTNTQSLDQQCDPKPLSRQFDTVSGSIYEDSCASHGPMSLGELELEPNSKLVLPTTLLTAQENDVNLPVAAEDFSQYQLKQNQDVKQVEHKPSQSYLRVRNKSDIAPSQQQVSPGDMDRTQIELNPYLTCVFSGLGVHVKKVSCIGKLGLWRFVIQIISSPRWESSATLRFTDAPCQDVSDAAVSEPRGLLSVSESQHNAGGHGVFGGRYLLNGKRQPAQCLCHWF

SEQ ID NO: 87206 - DNA, 4935 bp, Artificial Sequence
  derived and/or modified sequence
atgttctggtgcggcacctgcttcgtgaccaacaacatgaagggcagcgaggtgagcctggagaagaagaagaagatcaagatgcccgtgaagagactgagagaggtggtgagccagaaccacggcgaccacctggtgctgctgaaggacgagctgccctgcgtgccccccgccctgagcgccaacaagagactgcccgtgggcaccggcaccagcctgaacggcaccagcagaggcagcagcgacctgaccagcgccagaaactgctaccagcccctgctggagaaccccatggtgagcgagagcgacttcagcaaggacgtggccgtgcaggtgctgcccctggacaagatcgaggagaacaacaagcagaaggccaacgacatcttcatcagccagtacaccatgggccagaaggacgccctgagaaccgtgctgaagcagaacgtgagcctgtgcctgaccggctggagcgaccacagcggcgtgatcaccacccactgcagcctgtacctgctgagactgatgagaagcagccacctgagcctgcccagcagctgggactacagagcccagagcatgcccgtgttcaaggaggtgaaggtgcacctgctggaggacgccggcatcgagaaggacgccgtgacccaggagaccagaatcagccccagcggcatcgacagcgccaccaccgtggccgccgccaccgccgccgccatcgccaccgccgcccccctgatcaaggtgcagagcgacctggaggccaaggtgaacagcgtgaccgagctgctgagcaagctgcaggagaccgacaagcacctgcagagagtgaccgagcagcagaccagcatccagagaaagcaggagaagctgcactgccacgaccacgagaagcagatgaacgtgttcatggagcagcacatcagacacctggagaagctgcagcagcagcagatcgacatccagacccacttcatcagcgccgccctgaagaccagcagcttccagcccgtgagcatgcccagcagcagagccgtggagaagtacagcgtgaagcccgagcaccccaacctgggcagctgcaaccccagcctgtacaacaccttcgccagcaagcaggcccccctgaaggaggtggaggacaccagcttcgacaagcagaagagccccctggagacccccgcccccagaagattcgcccccgtgcccgtgagcagagacgacgagctgagcaagagagagaacctgctggaggagaaggagaacatggaggtgagctgccacagaggcaacgtgagactgctggagcagatcctgaacaacaacgacagcctgaccagaaagagcgagagcagcaacaccaccagcctgaccagaagcaagatcggctggacccccgagaagaccaacagattccccagctgcgaggagctggagaccaccaaggtgaccatgcagaagagcgacgacgtgctgcacgacctgggccagaaggagaaggagaccaacagcatggtgcagcccaaggagagcctgagcatgctgaagctgcccgacctgccccagaacagcgtgaagctgcagaccaccaacaccaccagaagcgtgctgaaggacgccgagaagatcctgagaggcgtgcagaacaacaagaaggtgctggaggagaacctggaggccatcatcagagccaaggacggcgccgccatgtacagcctgatcaacgccctgagcaccaacagagagatgagcgagaagatcagaatcagaaagaccgtggacgagtggatcaagaccatcagcgccgagatccaggacgagctgagcagaaccgactacgagcagaagagattcgaccagaagaaccagagaaccaagaagggccagaacatgaccaaggacatcagaaccaacacccaggacaagaccgtgaacaagagcgtgatccccagaaagcacagccagaagcagatcgaggagcacttcagaaacctgcccatgagaggcatgcccgccagcagcctgcagaaggagagaaaggagggcctgctgaaggccaccaccgtgatccaggacgaggactacatgctgcaggtgtacggcaagcccgtgtaccagggccacagaagcaccctgaagaagggcccctacctgagattcaacagccccagccccaagagcagaccccagagacccaaggtgatcgagagagtgaagggcaccaaggtgaagagcatcagaacccagaccgacttctacgccaccaagcccaagaagatggacagcaagatgaagcacagcgtgcccgtgctgccccacggcgaccagcagtacctgttcagccccagcagagagatgcccaccttcagcggcaccctggagggccacctgatccccatggccatcctgctgggccagacccagagcaacagcgacaccatgccccccgccggcgtgatcgtgagcaagccccaccccgtgaccgtgaccaccagcatcccccccagcagcagaaaggtggagaccggcgtgaagaagcccaacatcgccatcgtggagatgaagagcgagaagaaggaccccccccagctgaccgtgcaggtgctgcccagcgtggacatcgacagcatcagcaacagcagcgccgacgtgctgagccccctgagcagccccaaggaggccagcctgccccccgtgcagacctggatcaagacccccgagatcatgaaggtggacgaggaggaggtgaagttccccggcaccaacttcgacgagatcatcgacgtgatccaggaggaggagaagtgcgacgagatccccgacagcgagcccatcctggagttcaacagaagcgtgaaggccgacagcaccaagtacaacggcccccccttcccccccgtggccagcaccttccagcccaccgccgacatcctggacaaggtgatcgagagaaaggagaccctggagaacagcctgatccagtgggtggagcaggagatcatgagcagaatcatcagcggcctgttccccgtgcagcagcagatcgcccccagcatcagcgtgagcgtgagcgagaccagcgagcccctgaccagcgacatcgtggagggcaccagcagcggcgccctgcagctgttcgtggacgccggcgtgcccgtgaacagcaacgtgatcaagcacttcgtgaacgaggccctggccgagaccatcgccgtgatgctgggcgacagagaggccaagaagcagggccccgtggccaccggcgtgagcggcgacgccagcaccaacgagacctacctgcccgccagagtgtgcacccccctgcccaccccccagcccacccccccctgcagccccagcagccccgccaaggagtgcgtgctggtgaagacccccgacagcagcccctgcgacagcgaccacgacatggccttccccgtgaaggagatctgcgccgagaagggcgacgacatgcccgccatcatgctggtgaacacccccaccgtgacccccaccaccacccccccccccgccgccgccgtgttcacccccaccctgagcgacatcagcatcgacaagctgaaggtgagcagccccgagctgcccaagccctggggcgacggcgacctgcccctggaggaggagaaccccaacagcccccaggaggagctgcaccccagagccatcgtgatgagcgtggccaaggacgaggagcccgagagcatggacttccccgcccagccccccccccccgagcccgtgcccttcatgcccttccccgccggcaccaaggcccccagccccagccagatgcccggcagcgacagcagcaccctggagagcaccctgagcgtgaccgtgaccgagaccgagaccctggacaagcccatcagcgagggcgagatcctgttcagctgcggccagaagctggcccccaagatcctggaggacatcggcctgtacctgaccaacctgaacgacagcctgagcagcaccctgcacgacgccgtggagatggaggacgacccccccagcgagggccaggtgatcagaatgagccacaagaagttccacgccgacgccatcctgagcttcgccaagcagaaccaggagagcgccgtgagccagcaggccgtgtaccacagcgaggacctggagaacagcgtgggcgagctgagcgagggccagagaccccagctgaccgccgccgccgagaacatcctgatgggccacagcctgtacatgcagccccccgtgaccaacacccagagcctggaccagcagtgcgaccccaagcccctgagcagacagttcgacaccgtgagcggcagcatctacgaggacagctgcgccagccacggccccatgagcctgggcgagctggagctggagcccaacagcaagctggtgctgcccaccaccctgctgaccgcccaggagaacgacgtgaacctgcccgtggccgccgaggacttcagccagtaccagctgaagcagaaccaggacgtgaagcaggtggagcacaagcccagccagagctacctgagagtgagaaacaagagcgacatcgcccccagccagcagcaggtgagccccggcgacatggacagaacccagatcgagctgaacccctacctgacctgcgtgttcagcggcctgggcgtgcacgtgaagaaggtgagctgcatcggcaagctgggcctgtggagattcgtgatccagatcatcagcagccccagatgggagagcagcgccaccctgagattcaccgacgccccctgccaggacgtgagcgacgccgccgtgagcgagcccagaggcctgctgagcgtgagcgagagccagcacaacgccggcggccacggcgtgttcggcggcagatacctgctgaacggcaagagacagcccgcccagtgcctgtgccactggttctag

SEQ ID NO: 87207 - DNA, 5226 bp, Artificial Sequence
  derived and/or modified sequence
aatttacctaatcccacgtccctaacggtcttcggaagcgaagcagtgtcaacagtccctggtaaacacaagtagtattacaagtcgggagctcttcaagtcttggatgagactgtagagcggtcttgtgcggcaatgtgctaccttaaaataaataaataaataaacccctgttatgtccggagtttgtttccacccggagaggaatggaagagcaccagagagcgcttagctttctggttggatgttttggtgtgggacttgttttgtgaccaacaatatgaaaggctctgaggtcagcttggagaagaaaaaaaagattaagatgccagtgaagagacttcgtgaggtagtttctcaaaatcatggagatcatttggttttgctgaaagatgagttgccctgtgttcctccggcattgtctgcaaataaacgtcttcctgttggaacggggactagtttgaatggaacatcacgtggttcatcagacttaacttctgctagaaattgttaccagcctctattagaaaatcccatggtgtcagaaagtgatttttctaaagacgttgcagtgcaagtgttgcctttggataaaatagaagagaacaacaagcaaaaagcaaatgacatcttcatttctcagtatacaatgggacagaaagatgctctaagaacagttttaaagcaaaatgtctcactttgtctcacaggctggagtgatcacagtggggtgatcacaactcactgcagtctctacctcctcaggctcatgagatcctcccacctcagcctcccgagtagctgggactacagagctcaaagcatgcctgtttttaaggaagtaaaggtacatctgttagaagatgcaggcatagagaaggatgctgttactcaggagactagaatttcacccagtggaattgattcagctacaaccgtggctgcagcaactgctgctgccattgcaaccgcagctccgttgataaaggtgcagagtgatttggaagcaaaagtcaattctgttacagaattacttagtaaattacaggagactgataaacacctgcaacgtgttacagagcagcaaacaagcattcagaggaaacaagagaaattacattgtcatgatcacgaaaagcaaatgaatgtgtttatggagcagcacataaggcatcttgaaaagttacaacaacaacaaatagatattcagactcattttattagtgctgcactcaagactagtagttttcagcctgttagtatgccctcctccagagcagtggaaaagtattccgtaaaaccagaacaccctaatcttggtagctgtaatccatctttatataacacatttgcttccaaacaagcacctttaaaagaagttgaagatacgagttttgataaacagaaatctcctttggagacaccagcacctcgcagatttgctcctgtacctgtttcaagggatgatgaactatcaaagagggaaaatcttttggaagaaaaagaaaatatggaagtgtcgtgtcacagaggaaatgtaagactattggaacaaattttgaataataatgattctttgacaagaaaaagtgaatcatcaaacaccacctcactaactaggtcaaaaataggatggactcctgagaaaacaaacagatttccttcctgtgaagagctagaaacaactaaagtgactatgcagaagtctgatgatgttcttcatgaccttggccaaaaagagaaagaaacaaatagcatggtccagccaaaagaatctctgagtatgttgaagcttccagatcttccacagaattctgttaagcttcaaacaaccaatacaacaagatctgtattgaaagatgctgagaagattttgagaggagtacaaaacaataaaaaagtacttgaagaaaacctggaagctattattcgtgcaaaagatggagctgccatgtattcgcttatcaatgctttatctaccaacagagagatgtcagagaaaattaggatcagaaagacagtggatgaatggattaaaactatttctgcagaaattcaggatgaactgtcaagaacagattatgaacaaaaaagatttgatcagaagaatcagagaaccaagaaaggtcagaatatgactaaagatattagaaccaacacacaagataaaactgtcaacaaatctgtaattccaagaaaacattctcaaaagcaaatagaagagcattttagaaatctacctatgaggggcatgcctgcttcaagtttacagaaagagagaaaggaagggcttttgaaagcaaccacagtaatacaagatgaagattatatgttacaagtctatggaaagccagtttatcagggccatcgaagcactcttaaaaaaggaccatatctcagatttaattctccatctcctaagtccagaccacagagaccaaaagtaatagaacgagttaaaggcactaaggtaaagtcaataagaacacagactgacttctatgcaacaaaacctaagaagatggattctaaaatgaaacattctgttcctgtgttacctcatggcgatcagcaatatttgttcagcccaagtagagaaatgcctactttttcaggtacattggaaggtcatctgattcctatggcaattcttttaggacaaacccaaagtaatagtgataccatgccacctgctggagtgattgtcagcaagccacaccctgtaactgtgactacttctattcctccatcatctcgaaaagtagaaactggagtaaagaaacctaacatagccattgtagaaatgaagtcagaaaaaaaggatcctcctcagcttactgtgcaggtattacccagtgtagatattgacagcatttcaaatagtagtgctgatgtcctttcacctctgtctagccccaaagaagcatctcttcctcctgtgcaaacttggataaagactccagaaattatgaaggtagatgaagaagaggtgaagtttccaggaactaactttgatgaaataatcgatgtcatacaggaagaagaaaaatgtgatgaaattccagactctgaaccaattctggagtttaacagaagtgttaaagctgattctacaaaatataatggtcctccatttccgccagttgcttctacttttcagcccactgctgatattctggataaagtaattgagagaaaagaaacactggaaaatagcttaattcaatgggtagagcaagaaataatgtcaagaattatctctgggctctttccagtccagcaacagattgcacctagtatcagtgtttcagtcagtgagacaagtgaaccactgacttctgacattgtggaaggaacaagcagtggcgccctccagctttttgttgatgctggtgttcctgtgaactcaaatgtgattaaacattttgttaacgaagctcttgctgagaccattgctgtcatgctgggtgacagagaagcaaagaagcaaggtcctgttgctacaggtgtttctggggatgcttcaacaaatgaaacatatttgccggcaagagtgtgcaccccactgcctaccccacagcctacgcctccttgctcaccttcatcacctgctaaggagtgtgttttggtaaagactccagattcttctccctgtgattcggatcatgatatggcttttcctgtgaaagaaatatgtgctgaaaaaggagatgatatgcctgccatcatgcttgttaatactccaacagttacccctactactacacctcctccagcggcggcagtttttaccccaactttgtcagatatttccattgataaattgaaggtatcaagcccagagcttcccaagccatggggtgatggagacctgccactggaagaagagaaccctaactcacctcaagaagaacttcatccaagagctattgtaatgtctgtggctaaggatgaagaaccagagagtatggatttccctgctcagcctccacctccagagccagttccctttatgccatttcctgccggcaccaaggccccttccccctcacagatgccaggttctgattcatcaacactggagagcacattgagtgttactgtcactgaaactgaaactttagataaacccatctctgaaggagagattttatttagctgtggtcaaaaattggcccccaagattttagaagatataggactgtacctgacaaaccttaatgatagcttatccagcactctgcatgatgccgttgaaatggaggatgatcctcctagtgaagggcaagtgattaggatgtcccataaaaaatttcatgcagatgcaattctttcttttgctaaacaaaaccaggagtcagcagtttcccagcaagcagtctatcattcagaggacttggaaaacagtgtgggtgaacttagtgaaggacaaagaccccagctaacagcggcagcagagaacatcttaatgggacattctctctatatgcagccacctgtcactaatacacagtctttggatcaacaatgtgatcctaaaccattatctcggcaatttgacacagtttcaggtagtatttatgaagattcatgtgctagtcatggtccaatgagtttgggagaattggagttggagccaaattctaagctggttcttcccacaacacttctgacagcacaagaaaatgatgttaatttaccagtagccgctgaagatttttcccagtaccaactaaagcaaaatcaggatgttaagcaagttgaacacaaaccatcacaaagttacctacgtgttagaaataaatctgatattgcaccttcacagcaacaagtttcaccaggtgatatggatcggacacaaattgagcttaatccgtacctcacatgtgtattttcaggtttgggggtacatgtgaagaaggtttcctgtataggtaaactcgggctgtggaggtttgtcatacagattatttcatcacccaggtgggaaagcagtgccactctccgcttcacagatgccccctgccaagatgtcagtgatgctgccgtcagtgaacctcgaggactgctctcagtctctgagtctcagcacaatgcaggaggacatggagtcttcgggggcagataccttctgaacgggaagagacagccagcacagtgtttatgccactggttttaaagtcattttaccttggcttaaaaccctctctcagactgtttggtttt

SEQ ID NO: 87208 - DNA, 4935 bp, Artificial Sequence
  derived and/or modified sequence
atgttctggtgcggcacatgctttgttacaaacaatatgaaaggcagcgaagtctctctggaaaagaagaagaagatcaagatgcctgtgaaacggctacgcgaagtggtaagccaaaatcacggagatcatttagtgctgcttaaggacgagctgccatgtgtcccacctgcactgtccgctaacaagcgcctccccgtcgggactggaacttccctgaatggtacttctagaggttccagcgatctgacctctgccaggaactgttaccagcctctgttggaaaatccaatggtctctgaatcagacttttccaaagatgtagccgtccaggtgctgcctctcgacaaaattgaagaaaacaacaaacaaaaggctaacgacattttcatctcacagtacacaatgggacagaaggatgcactaagaacagtcctgaaacaaaacgtttccctgtgcctcaccggctggagcgaccactccggtgtgatcacaacccattgtagcctgtacctgctgagacttatgcgatcctcacacttgtctctgccgtcttcctgggattaccgggcccagagcatgcccgtcttcaaagaggtgaaggtccatctccttgaggacgcggggattgagaaggacgcggtgactcaagagacgcggatctctcctagcggcatcgactcagctaccactgtcgccgccgcaaccgccgccgctatcgccactgctgccccccttatcaaggttcagtccgacctcgaagccaaagtaaactctgtgaccgagttactgagcaaacttcaggagacagataagcatctgcagagggtgaccgagcaacagacttcaatccagagaaagcaggagaagctgcactgccacgatcacgagaaacagatgaatgtcttcatggagcagcatatcaggcatctggaaaaactgcagcagcagcaaatcgatatccagactcatttcatcagcgctgctctgaaaacctcgtcattccagccagtaagtatgccatcttctagagcagtcgaaaagtattctgtgaaaccggaacaccctaacctgggatcctgcaatcctagcctgtataacactttcgctagcaaacaggcacctttgaaggaggtggaagacacctccttcgataagcagaagtcgcccctcgagacccctgcacctcgccgattcgctccagtccccgtgtccagggatgatgaactgagcaagcgcgagaacttgcttgaggaaaaggagaatatggaagtttcctgccatcgaggcaacgttcggcttctggaacagatcctgaataataacgactccttaaccagaaaaagcgaatcttctaacactacctctctgacaagaagcaagattggctggacacccgaaaagacgaaccggttcccttcctgcgaggagctggagacgaccaaagtaaccatgcagaagagcgacgatgtgttgcatgatctcggccagaaagaaaaggagaccaactccatggtccagcccaaggagagtctgtcaatgctgaaactgccggatctgccacagaatagtgttaaactgcagaccaccaataccacgcggtctgtgctgaaggatgcagagaagattctgcggggagtgcagaacaataagaaagtcctggaagagaacttggaggctattattcgagcgaaagacggagctgctatgtacagtctgattaatgccctgtctactaaccgagaaatgtccgagaagatacgcattcgcaagacggttgacgaatggataaagaccattagcgccgagatccaggatgaactatcccgcaccgattacgaacagaagcggtttgaccagaaaaatcagcgaactaaaaaggggcagaatatgacaaaggacatccgtaccaatacgcaggacaagaccgtcaataagagcgtcattcccaggaaacatagccagaagcaaattgaagagcattttagaaatctccccatgagaggcatgcccgcttcttcactgcagaaggagaggaaagaaggactgctcaaagccaccacggtcatccaggatgaagattatatgcttcaggtttatggtaagcctgtttatcagggccataggtctacccttaagaaagggccatacttgcgcttcaacagtccctctcccaagagccgcccccagcggcctaaagtcatcgagcgtgttaagggaactaaagtgaaatccattaggacacagacagacttttacgccaccaaacctaaaaaaatggactctaagatgaaacactccgtacctgtgcttcctcatggggatcagcagtacctcttttccccatctagggaaatgcctaccttcagcggtaccctcgagggccatctgattcccatggctattctgcttggccaaacgcaaagtaatagtgacaccatgccgcctgccggcgtgattgtcagcaagcctcaccctgttaccgttactacatctattccaccttcttctcgaaaagtggaaaccggcgtgaaaaaaccaaacatcgcaatcgtggagatgaaaagtgagaagaaggatcccccccagctaaccgtacaggtgttgccctccgtggacattgactcaatcagcaattcttctgccgacgtccttagccctctaagcagcccaaaagaggctagcttaccacccgtgcagacctggatcaagacacctgaaatcatgaaggtggacgaggaagaggtgaagtttccggggactaactttgacgagatcatagatgtaatccaagaggaggagaaatgtgacgagatccccgattcagagcccatcctggaattcaatcgaagcgtgaaagccgattccactaagtataacgggcccccgttccccccagtagctagtacttttcagcccactgccgacattctcgacaaggtgatcgaaagaaaggagacattagaaaacagcctcatacaatgggtggagcaggagattatgagtcgcataatcagcgggctcttccccgtccaacagcagattgcacctagcatctcagtctctgtgtccgagactagcgaacccctcacttctgacatcgtggagggtactagtagtggagctctccaattgttcgtggacgcaggcgtccctgtcaatagcaatgtgatcaaacattttgtgaacgaagctcttgccgaaacgatcgccgtgatgctgggcgaccgggaggccaagaaacaaggcccagtcgccactggcgtctccggcgacgccagtacaaacgagacctacctgcccgcgagggtgtgcacacccttacccaccccacaaccaacaccaccgtgtagtccaagcagtcctgccaaggaatgcgtattggttaagacaccagactcctctccttgtgacagtgaccacgatatggcttttcccgtgaaggaaatatgcgccgagaagggggacgacatgccagccataatgctggtgaacacaccaactgtgacgccaaccactacacccccacctgcagctgcagtgtttacacctactctgtctgatatctcgattgacaagctgaaggtctcatcacccgaattgcctaagccctggggtgacggcgacctcccgcttgaagaggagaaccctaactctccgcaggaggaattgcacccccgggccatcgtgatgagtgtggctaaggatgaagaaccagagtctatggactttcccgcccagcctccacccccagagccggttccctttatgcctttcccagcaggcacaaaggctccgagtccaagccaaatgcctgggtctgacagttcaacactggagtcaacactgtctgtaacggtaacagaaacagagactctggacaaacctatatcagaaggagagatcttgttctcatgcggccagaaactggcgcccaagatccttgaggatatcggcttgtacctgaccaatttaaatgactcgttatcctccacactccacgatgcagtcgaaatggaggatgatcctcctagcgaagggcaggtgatccgaatgtcccacaagaagttccacgccgatgccattttgtcctttgcgaaacagaatcaggagagtgctgtgtcgcagcaagctgtgtaccacagtgaagacttagagaactctgtgggggagctgtcagagggtcagcgcccccagttgaccgctgccgccgaaaatatactgatggggcattcactgtacatgcaacccccggtaactaatactcaatccctggaccagcagtgtgacccaaagccactgagtaggcagttcgataccgtttccggcagcatatacgaagatagctgcgcaagccacggacccatgtctctgggggagctggaactggaacccaatagcaaattggtgctgcctacaacactgttgacagcacaggaaaacgacgtgaatctacccgtcgcagccgaggacttctctcagtatcagctgaaacaaaaccaagacgtgaaacaggttgagcacaagcccagccagagctacctgcgcgtgcgcaacaaatccgacatcgccccatctcaacagcaggtgagccctggcgacatggaccggacccagatcgagctgaatccgtacctgacctgcgtgttttctggattgggcgtgcatgtgaaaaaggtgtcgtgcatcggaaagctcgggctttggcgctttgtgatccagattatatccagcccccggtgggagtcatccgctacccttcgattcacagatgccccctgtcaagatgtctctgatgccgccgtctctgaacccagggggctcctcagcgtgagcgagagccaacacaacgccgggggccacggggtgttcggaggaaggtatttgctcaatgggaaaaggcagccggcccaatgcttatgtcactggttttag

SEQ ID NO: 87209 - DNA, 4935 bp, Artificial Sequence
  derived and/or modified sequence
atgttctggtgtggcacctgctttgtgaccaacaacatgaagggcagcgaggtgtccctggagaagaagaagaagatcaagatgcctgtgaagaggctgcgggaggtggtgtcccagaaccacggggaccacctggtgctgctgaaggatgagctgccctgtgtgcccccagccctgagcgccaacaagaggctgcctgtgggcaccggcaccagcctgaatggcaccagccggggcagcagtgacctgaccagcgccaggaactgctaccagcccctgctggagaaccccatggtgtctgagagtgacttcagcaaggatgtggccgtgcaggtgctgcccctggacaagattgaggagaacaacaagcagaaggccaatgacatcttcatcagccagtacaccatgggccagaaggatgccctgaggacagtgctgaagcagaatgtgtccctgtgcctgaccggctggagcgaccacagcggggtcatcaccacccactgcagcctgtacctgctgcggctgatgaggagcagccacctgagcctgcccagctcctgggactaccgggcccagagcatgcctgtgttcaaggaggtgaaggtgcacctgctggaggatgctggcatcgagaaggatgctgtgacccaggagacccgcatcagccccagcggcatcgacagcgccaccaccgtggccgccgccacagctgctgccatcgccacagctgcccccctcatcaaggtgcagagcgacctggaggccaaggtgaacagcgtgacagagctgctgagcaagctgcaggagacagacaagcacctgcagagggtgacagagcagcagaccagcatccagaggaagcaggagaagctgcactgccacgaccacgagaagcagatgaatgtgttcatggagcagcacatccgccacctggagaagctgcagcagcagcagattgacatccagacccacttcatctctgctgccctgaagaccagcagcttccagcctgtgtccatgcccagcagcagagctgtggagaagtacagcgtgaagccagagcaccccaacctgggcagctgcaaccccagcctgtacaacacctttgccagcaagcaggcccccctgaaggaggtggaggacaccagctttgacaagcagaagagccccctggagaccccagcccccaggagatttgcccctgtgcctgtgtccagagatgatgagctgagcaagcgggagaacctgctggaggagaaggagaacatggaggtgtcctgccacagaggaaatgtgcggctgctggagcagatcctgaacaacaatgacagcctgaccaggaagtctgagagcagcaacaccaccagcctgaccaggagcaagattggctggaccccagagaagaccaaccgcttccccagctgtgaggagctggagaccaccaaggtgaccatgcagaagagtgatgatgtgctgcatgacctgggccagaaggagaaggagaccaacagcatggtgcagcccaaggagagcctgtccatgctgaagctgcctgacctgccccagaacagcgtgaagctgcagaccaccaacaccaccaggtctgtgctgaaggatgctgagaagatcctgcggggcgtgcagaacaacaagaaggtgctggaggagaacctggaggccatcatccgggccaaggatggagctgccatgtacagcctcatcaatgccctgagcaccaaccgggagatgtctgagaagatccgcatcaggaagacagtggatgagtggatcaagaccatctctgctgagatccaggatgagctgagcaggacagattatgagcagaagagatttgaccagaagaaccagaggaccaagaagggccagaacatgaccaaggacatccgcaccaacacccaggacaagacagtgaacaagagcgtcatccccaggaagcacagccagaagcagatcgaggagcacttcaggaacctgcccatgaggggcatgcctgccagcagcctgcagaaggagaggaaggagggcctgctgaaggccaccaccgtcatccaggatgaggactacatgctgcaggtgtatggcaagcctgtgtaccagggccacaggagcaccctgaagaagggcccctacctgcgcttcaacagccccagccccaagagccggccccagaggcccaaggtgattgagcgggtgaagggcaccaaggtgaagagcatccgcacccagacagacttctacgccaccaagcccaagaagatggacagcaagatgaagcacagcgtgcctgtgctgccccatggagaccagcagtacctgttcagccccagccgggagatgcccaccttcagcggcaccctggagggccacctgatccccatggccatcctgctgggccagacccagagcaacagcgacaccatgcctcctgctggggtcatcgtgtccaagccccaccctgtgacagtgaccaccagcatcccccccagcagcaggaaggtggagaccggggtgaagaagcccaacatcgccatcgtggagatgaagtctgagaagaaggaccccccccagctgactgtgcaggtgctgcccagcgtggacatcgacagcatcagcaacagcagcgcagatgtgctgagccccctgagcagccccaaggaggccagcctgccccctgtgcagacctggatcaagaccccagagatcatgaaggtggatgaggaggaggtgaagtttcctggcaccaactttgatgagatcattgatgtgatccaggaggaggagaagtgtgatgagatcccagacagcgagcccatcctggagttcaacagatctgtgaaggctgacagcaccaagtacaacggcccccccttcccccctgtggccagcaccttccagcccacagctgacatcctggacaaggtgattgaaaggaaggagaccctggagaacagcctcatccagtgggtggagcaggagatcatgagccgcatcatcagcggcctcttccctgtgcagcagcagatcgcccccagcatctctgtgtctgtgtctgagaccagcgagcccctgaccagtgacatcgtggagggcaccagcagcggggccctgcagctgtttgtggatgctggggtgcctgtgaacagcaatgtcatcaagcactttgtgaatgaggccctggccgagaccatcgctgtgatgctgggggaccgggaggccaagaagcagggccctgtggccactggagtgtctggagatgccagcaccaatgagacctacctgcctgcccgggtgtgcacccccctgcccaccccccagcccaccccaccctgcagccccagcagccctgccaaggaatgtgtgctggtgaagaccccagacagcagcccctgtgacagcgaccatgacatggccttccctgtgaaggagatctgtgccgagaagggagatgacatgcctgccatcatgctggtgaacacccccaccgtgacccccaccaccaccccacctcctgctgctgctgtgttcacccccaccctgagtgacatcagcattgacaagctgaaggtgagcagccctgagctgcccaagccctggggagatggagacctgcccctggaggaggagaaccccaacagcccccaggaggagctgcacccccgggccatcgtgatgtctgtggccaaggatgaggagcctgagagcatggacttccctgcccagcccccacctcctgagcctgtgcccttcatgcccttccctgctggcaccaaggcccccagccccagccagatgcctggcagtgacagcagcaccctggagagcaccctgtctgtgacagtgacagaaacagagaccctggacaagcccatcagcgagggggagatcctcttcagctgtggccagaagctggcccccaagatcctggaggacatcggcctgtacctgaccaacctgaatgacagcctgagcagcaccctgcatgatgctgtggagatggaggatgatcctccttctgagggccaggtgatccgcatgagccacaagaagttccacgcagatgccatcctgagctttgccaagcagaaccaggagagcgctgtgtcccagcaggccgtgtaccacagcgaggacctggagaacagcgtgggggagctgtctgagggccagaggccccagctgacagctgctgctgagaacatcctgatgggccacagcctgtacatgcagccccctgtgaccaacacccagagcctggaccagcagtgtgaccccaagcccctgagccggcagtttgacacagtgtctggcagcatctatgaggacagctgtgccagccacggccccatgagcctgggggagctggagctggagcccaacagcaagctggtgctgcccaccaccctgctgacagcccaggagaatgatgtgaacctgcctgtggccgctgaggacttcagccagtaccagctgaagcagaaccaggatgtgaagcaggtggagcacaagcccagccagagctacctgcgggtgaggaacaagagtgacatcgcccccagccagcagcaggtgtcccctggggacatggacaggacccagatcgagctgaacccctacctgacctgtgtgttttctggcctgggcgtgcacgtgaagaaggtgtcctgcatcggcaagctgggcctgtggaggtttgtgatccagatcatcagcagcccccgctgggagagcagcgccaccctgcgcttcacagatgccccctgccaggatgtgtctgatgctgctgtgtctgagccccggggcctgctgtctgtgtctgagagccagcacaatgctgggggccatggagtgtttggaggccgctacctgctgaatggcaagaggcagcctgcccagtgcctgtgccactggttctag

SEQ ID NO: 87210 - DNA, 4935 bp, Artificial Sequence
  derived and/or modified sequence
atgttctggtgcggcacctgcttcgtgaccaacaacatgaagggctccgaagtgtccctggaaaaaaagaaaaagattaagatgcccgtgaaaagactccgagaagtggtctcccagaatcatggtgatcacttggttctgctcaaggacgagctgccttgcgtgcctccggcactcagtgcaaacaagaggctgcccgttggcacagggacttccctgaacggcacttcaagagggagctccgacctgacgtccgcacgaaattgttaccagccactattggagaacccaatggtgtccgagtccgatttttctaaggacgtggctgttcaagtgctgccacttgacaagatcgaagagaataacaaacagaaggcgaacgacatcttcattagtcagtacacgatgggtcagaaggatgcactgcggaccgtgcttaagcagaatgtgtcactctgcctcacagggtggtctgaccactctggggtgattaccacacactgctccctatatttactcaggctgatgcgcagcagccacttgtcactgccctcatcttgggactacagagcccagagcatgccggttttcaaagaagtgaaagtgcatctcttggaagacgccggcattgagaaagacgctgtcacccaggaaacccggatcagtccatccggcatagactcggccaccactgtggctgccgccacagccgctgcgatcgctacagctgcacctttgattaaggtgcagtcagacctagaggcaaaagtgaacagcgttacagaactgttgagtaagctgcaagaaacagacaaacacctccaaagagtgaccgagcaacaaacttctatacaaagaaaacaggaaaagttacactgccacgatcacgaaaaacagatgaacgtttttatggagcagcacatccgccacctggaaaagctgcagcaacagcaaatcgatattcagacacacttcatctctgccgctctgaagacgtcgtcgttccagcctgtctctatgcccagcagccgcgccgtggaaaaatactcagtgaaacccgagcaccctaatctgggatcatgtaaccccagcctgtataacacgtttgcttctaaacaggccccactcaaagaagttgaagacactagctttgataagcagaaatctcctctcgagactccggcccccagacgcttcgccccggttcccgtgtctcgggatgatgagctgtctaagcgggaaaatctgttggaggagaaagagaatatggaggtaagctgtcaccggggaaatgtgcgcctcctagagcagattctgaacaacaacgatagtctgactaggaaatcggaatcaagcaataccactagtctgaccaggagcaagattggctggaccccggaaaaaacaaatcggttcccctcgtgtgaagagttggaaacaaccaaggttacgatgcagaagtccgatgacgtgcttcatgatttgggacagaaggagaaggagacaaactcaatggtccagcctaaggaatccctttccatgctcaaactcccagatctccctcagaactcagtgaagctgcagaccacaaataccaccaggtccgtgctcaaagacgccgaaaaaatcctcaggggcgtccaaaacaacaagaaggttctcgaagagaacctggaggctatcattcgcgccaaagacggggcagcaatgtattctctgataaatgccctgtccacgaaccgcgagatgtctgagaagatacgaataagaaagactgtcgacgaatggatcaagactatctccgcagaaattcaagatgaattgtcacggactgactacgagcagaaacgatttgaccagaagaatcaaagaacaaagaaagggcagaacatgactaaagatatacggacaaacactcaggacaaaacagttaacaagagcgttattccgcggaaacacagtcagaagcagatagaagagcacttccggaacctccctatgcgagggatgcccgcgagctcattgcaaaaggaacgcaaagaaggactcctgaaggccaccaccgtgattcaggacgaagattatatgctgcaagtgtacggtaaacccgtctatcagggacaccgatccactctcaaaaaagggccatatctcaggtttaactctccctctcccaagagcagaccgcagcgaccaaaggttatcgagcgcgttaaaggaacaaaagtgaagtctatccgcacacagactgatttctatgctaccaagcctaagaagatggattccaagatgaaacacagcgttccagtccttccccacggggaccaacagtacctgttctctccatcaagggagatgccaacattctccggcacgctggaaggccacctgattcccatggcaatcctgttgggtcagactcagtcaaactcagatacaatgcctcccgcaggtgtgatcgtgagcaagccgcaccctgtcacagttacaacatcgatcccccccagcagcaggaaggtggaaactggagtcaagaagcccaacattgctattgtggaaatgaagtccgaaaaaaaggatcccccccagctcaccgttcaagttctcccttctgtggatatcgacagcatctctaactcctccgccgatgtgctgtctccgctgtcatctcccaaagaggctagtctgccccccgtacagacttggatcaagacccccgaaattatgaaggtggatgaggaggaggtaaagttccctgggacaaatttcgatgaaataatagatgtcattcaggaggaggagaagtgtgatgagatcccggattccgaacccattctcgagttcaacaggtccgtcaaagccgactccacaaagtataacggcccaccctttcccccggtggcatctactttccagcctaccgcagatatcctggacaaggtcatcgagcgtaaagaaaccctggaaaattcattaattcaatgggtggagcaagagatcatgtccagaatcatctcgggactgtttccagtgcagcagcaaatcgctccctctattagcgtaagcgtgtcagaaacctctgagcccctgactagtgacatagtggaaggtacctcctctggcgcgttgcagctgttcgtggacgctggtgtacctgtgaattccaacgttattaaacatttcgtgaacgaagccttagccgaaactatcgcggtgatgttaggagacagggaggctaagaaacaaggcccagttgcaacaggcgtgtctggggatgctagcaccaatgagacctatctgcccgctagagtgtgtacccccctcccgacgccccagcccacaccaccatgtagtccgtcttcccctgctaaggaatgcgtgctcgtcaagactccagattcttccccttgcgatagtgatcacgatatggccttcccagtgaaggagatctgtgccgaaaagggggacgatatgccagctattatgctggtaaatacacctacggtcacccccacaaccacaccacccccagccgctgccgtgttcaccccgacattgagcgacatcagcatagacaaactgaaagtttccagcccggaactgcccaaaccatggggtgacggagacctgccactcgaggaagaaaatcccaacagtcctcaggaggagctgcacccaagagcaattgtgatgtccgtggctaaggatgaagagccagagagtatggacttcccagcacagccccccccgcccgagcctgtcccattcatgcccttccctgccggtaccaaagctccttccccttcccaaatgcccgggtccgattctagtactttagagagtactttgagtgtgaccgtgaccgagaccgaaaccctcgataagcctatttcagaaggcgagatcctgttttcttgcgggcagaagctggcccccaaaattctggaggacattggactgtacctcacgaatctgaatgatagtctatctagtaccctccacgacgccgttgaaatggaggacgatcctccttccgagggtcaggtcattcggatgtctcataagaagttccacgccgacgctattctctcttttgctaaacagaaccaggagagcgccgtgagtcagcaagccgtctaccacagtgaagatctggaaaacagcgttggcgaattatctgaaggtcaacgcccccagctcactgctgcggctgagaatatactcatgggacacagcctctatatgcaaccccccgtcacaaacactcagtccctggaccaacaatgcgatccaaaacccttgagccgacaattcgacaccgtgtcaggctcaatctacgaggattcttgcgcttctcatggacccatgtctctgggagaattagagttggaaccaaactctaaactggtcttgcctaccacattactgaccgctcaggaaaacgacgttaacctgcccgttgcggcagaagacttttctcaatatcaactgaagcagaaccaggatgttaaacaggtggaacacaagccctctcagagttatcttcgagttcgcaacaagtctgacattgcgcccagccaacagcaggtctctcctggagatatggacaggactcagatcgagctaaacccgtaccttacctgtgtgttttccggacttggcgtacatgtgaagaaagtcagctgcataggaaagctggggctctggaggttcgtaatacagattatcagcagtcccagatgggagagctccgccaccctgcggtttacagatgctccgtgccaagacgtttcggatgcagctgtctccgagccccgcggactgctgagtgtgagcgaaagccagcacaacgccggaggtcacggggtttttgggggaaggtatcttctgaacggcaagcgtcaacccgcgcagtgtttgtgtcattggttttag

SEQ ID NO: 87211 - DNA, 4935 bp, Artificial Sequence
  derived and/or modified sequence
atgttctggtgcgggacatgttttgttaccaataatatgaagggaagcgaagtgagcctcgaaaaaaaaaaaaagataaagatgcccgtgaagcgcctgagagaggtggtgtcacagaatcacggcgatcacctcgtgctgctgaaagatgagttgccttgcgtgcctcctgcactctccgcaaacaagcgtctgcctgttggaaccggcacctcactgaatggcaccagtcgaggctcatccgatctgacaagcgcacgcaactgttatcagcccctgctggagaaccccatggtgtccgaaagcgacttcagcaaggatgtggctgttcaggtgctaccattagataagatcgaggagaataacaaacagaaagccaatgacattttcatcagccagtacacaatggggcagaaggacgccttgaggacggtgttaaaacagaatgtgtccctttgcctcaccggttggtctgaccacagtggtgtgattaccacccactgttctctctacctcttgcgcctgatgcgctcatctcacttgtccctcccttcatcctgggattatcgggcacagagcatgcccgtgtttaaggaagtgaaagtgcatcttctcgaggacgctggtatcgagaaagacgcagtgacccaagaaacccggatctcaccctccggcatcgatagtgctacaacagtggctgccgctactgcagccgcaatagcaaccgccgcacctcttatcaaggtccagagcgatctggaggcaaaagttaattccgtgacggagctcctatccaagctgcaggaaacagataagcatctgcagagagtaaccgagcagcaaacttctatccaaagaaagcaggagaagctacactgccatgatcacgagaaacaaatgaatgttttcatggaacaacacatacgtcatctggaaaaactgcagcaacaacagatcgatatccagacgcactttatcagtgctgccctcaagaccagtagctttcaaccagtatcaatgcctagcagcagggctgtcgaaaagtacagtgttaagcccgagcaccccaaccttgggtcgtgcaacccaagcttgtacaacacttttgccagtaagcaagctccgctcaaggaagttgaagacacaagctttgacaaacagaaaagtccattggaaacgccggctcctcgtcggtttgctccagtgcctgttagtagggatgacgagctgagcaagcgagaaaatctgctcgaagaaaaggaaaacatggaggtgtcttgccatcgaggtaacgtgcggcttctagagcagattcttaacaataatgactccctgacaaggaaatcggagtcctctaacaccacatctctgaccaggtctaagataggctggacccccgaaaagactaaccggtttcccagctgtgaggagctagaaaccaccaaagtgacaatgcagaagtcagacgatgtcctacatgacctcggccaaaaggagaaggaaacaaatagcatggtacaacccaaggaatctttaagcatgttaaaactacctgacctccctcagaattccgtgaagctgcagactacgaataccacacgatccgtcctcaaggatgctgagaagattctgcgaggggttcagaacaataagaaggtgttagaggaaaacttggaggcaatcattcgcgctaaggacggggcagccatgtactccctcatcaatgccctctccaccaatagggagatgtctgagaaaataagaatccgtaagactgttgatgagtggatcaaaacaatctctgccgagattcaagatgaactgagcagaacagactacgagcagaagcgctttgaccagaagaatcagcgcaccaaaaagggtcagaatatgaccaaggatatcagaacgaatacgcaagataagaccgttaacaagtctgtgatcccccgtaagcattcccaaaagcagattgaggaacactttagaaatcttcccatgagaggaatgccagcatccagcctgcagaaggagcgtaaggagggccttcttaaagccacaacagtgattcaggatgaggactatatgttgcaggtgtacggaaagcccgtttatcaggggcacaggagcaccttgaaaaaaggaccttatttgaggttcaacagccctagtccaaaatcccgccctcaacgaccaaaagtcattgagcgcgtaaaggggactaaagtcaagtcaattcgaactcagaccgacttttacgccactaagcccaagaaaatggactccaagatgaaacacagcgtccctgtccttcctcacggagaccagcagtacctcttctcccccagcagggagatgcccacattttcaggcacactggaaggtcatttgatccccatggcgattctgctcgggcaaacccagtccaactccgatacgatgcctcccgctggagtgattgttagcaagccccaccctgtcaccgtaactacaagcatcccccctagttccagaaaagtggagacaggagtaaagaaaccaaatatagctattgtagagatgaagtcagagaagaaagatcctccccagctgaccgttcaggtgctcccttcagtagatattgattcaatatccaattccagtgcagacgtgttgagccccttgtcaagtccaaaggaggccagtttgccccctgttcagacctggattaagaccccagagatcatgaaggtcgatgaagaagaagtaaagtttccagggactaatttcgatgaaattatcgacgtaatacaggaagaggagaaatgcgatgagatacccgactctgaacctattctggaatttaataggtccgtaaaggcagatagcaccaagtacaatggacctcccttcccaccagtcgcttccactttccagccaacggcagatattttagataaggtgatagaaaggaaggagactttggagaactctttgatccagtgggtcgaacaggaaatcatgagcaggatcataagcggcctgttccccgtgcagcagcagatagctccaagtatttcggtgtccgtcagcgagacctccgaaccccttacctctgacatcgtcgagggaactagttctggggcactgcagctcttcgtggacgcaggagttccagtcaatagcaacgtgattaagcacttcgttaacgaggccttagccgagacaatcgctgtgatgttgggggaccgagaggcaaaaaagcagggccctgtcgctaccggcgtcagcggggatgccagcactaacgagacctacctgcccgcaagagtctgcactccgttaccaaccccacagccaaccccgccttgctcaccaagcagtccggcaaaggaatgtgtgttggtcaaaacccccgattcttccccctgcgatagcgaccacgatatggcctttcccgtaaaagagatttgtgctgagaagggcgatgatatgcccgctattatgctggttaatacgcccacggttacccccactaccacaccccctcctgcggctgccgtgttcacccctaccctgtcggacatcagcatcgataagctcaaggtgtcttctccggagctgccaaaaccctggggagacggggacttaccgttggaggaagaaaatcccaacagccctcaagaagagctgcacccccgtgctatcgtgatgtccgtcgcaaaagatgaagagccggaatctatggacttcccagctcagccacctccaccggaacccgtgccattcatgccgtttccagctggtacgaaggccccatcaccttcccagatgcccggaagcgacagcagcacacttgaaagcacattatcagtgacggtcactgagacagaaaccttggataagcccatatccgagggcgagatcctgttctcctgtggccagaaactggcacccaagattttggaggacattgggctgtatttaaccaatctgaacgatagcctgtcctcaacgctgcatgatgccgtcgagatggaggacgatccaccatccgagggacaggtcatccgaatgtcacataagaagtttcatgcagatgctatcctgagcttcgctaagcagaatcaggaatctgcagtgtcacagcaagccgtttaccatagcgaggatctcgagaactctgttggagaactaagtgagggtcagaggcctcagctgactgccgcagccgagaatatcctgatgggtcattctctgtacatgcaaccccctgttacgaatacgcagtccctggatcagcagtgcgacccaaaacccctcagccggcagtttgatacggtttctggatcgatttatgaggattcctgtgcttcccacgggccaatgagtctcggagagctcgagcttgagccaaattccaaattggtgctgcctacaaccttgcttaccgcgcaggaaaatgatgttaatctgccagtagcagcggaagatttcagtcagtaccagctgaagcaaaaccaggatgttaagcaagtggaacacaagccatctcagagctatctccgggtgcgcaataaaagcgatattgcaccatcacagcagcaggtctctcccggagacatggatcgaacgcaaattgagctaaacccctatctaacctgcgtttttagcggtttgggcgttcacgtaaagaaagtcagctgcatcggtaaactcggcctctggaggtttgtcatccagattatctcttctcctagatgggaaagctccgcgacactccggtttacagatgccccttgtcaggacgttagcgacgcagcagtgtcagagccacgtgggttactgtccgtttccgagagtcagcataacgctggcggtcacggggtttttggaggcaggtatctgcttaacggtaagagacagcccgctcagtgcctgtgtcactggttctag

SEQ ID NO: 87212 - protein, 1533 aa, Artificial Sequence
  derived and/or modified sequence
MPVKRLREVVSQNHGDHLVLLKDELPCVPPALSANKRLPVGTGTSLNGTSRGSSDLTSARNCYQPLLENPMVSESDFSKDVAVQVLPLDKIEENNKQKANDIFISQYTMGQKDALRTVLKQKAQSMPVFKEVKVHLLEDAGIEKDAVTQETRISPSGIDSATTVAAATAAAIATAAPLIKVQSDLEAKVNSVTELLSKLQETDKHLQRVTEQQTSIQRKQEKLHCHDHEKQMNVFMEQHIRHLEKLQQQQIDIQTHFISAALKTSSFQPVSMPSSRAVEKYSVKPEHPNLGSCNPSLYNTFASKQAPLKEVEDTSFDKQKSPLETPAPRRFAPVPVSRDDELSKRENLLEEKENMEVSCHRGNVRLLEQILNNNDSLTRKSESSNTTSLTRSKIGWTPEKTNRFPSCEELETTKVTMQKSDDVLHDLGQKEKETNSMVQPKESLSMLKLPDLPQNSVKLQTTNTTRSVLKDAEKILRGVQNNKKVLEENLEAIIRAKDGAAMYSLINALSTNREMSEKIRIRKTVDEWIKTISAEIQDELSRTDYEQKRFDQKNQRTKKGQNMTKDIRTNTQDKTVNKSVIPRKHSQKQIEEHFRNLPMRGMPASSLQKERKEGLLKATTVIQDEDYMLQVYGKPVYQGHRSTLKKGPYLRFNSPSPKSRPQRPKVIERVKGTKVKSIRTQTDFYATKPKKMDSKMKHSVPVLPHGDQQYLFSPSREMPTFSGTLEGHLIPMAILLGQTQSNSDTMPPAGVIVSKPHPVTVTTSIPPSSRKVETGVKKPNIAIVEMKSEKKDPPQLTVQVLPSVDIDSISNSSADVLSPLSSPKEASLPPVQTWIKTPEIMKVDEEEVKFPGTNFDEIIDVIQEEEKCDEIPDSEPILEFNRSVKADSTKYNGPPFPPVASTFQPTADILDKVIERKETLENSLIQWVEQEIMSRIISGLFPVQQQIAPSISVSVSETSEPLTSDIVEGTSSGALQLFVDAGVPVNSNVIKHFVNEALAETIAVMLGDREAKKQGPVATGVSGDASTNETYLPARVCTPLPTPQPTPPCSPSSPAKECVLVKTPDSSPCDSDHDMAFPVKEICAEKGDDMPAIMLVNTPTVTPTTTPPPAAAVFTPTLSDISIDKLKVSSPELPKPWGDGDLPLEEENPNSPQEELHPRAIVMSVAKDEEPESMDFPAQPPPPEPVPFMPFPAGTKAPSPSQMPGSDSSTLESTLSVTVTETETLDKPISEGEILFSCGQKLAPKILEDIGLYLTNLNDSLSSTLHDAVEMEDDPPSEGQVIRMSHKKFHADAILSFAKQNQESAVSQQAVYHSEDLENSVGELSEGQRPQLTAAAENILMGHSLYMQPPVTNTQSLDQQCDPKPLSRQFDTVSGSIYEDSCASHGPMSLGELELEPNSKLVLPTTLLTAQENDVNLPVAAEDFSQYQLKQNQDVKQVEHKPSQSYLRVRNKSDIAPSQQQVSPGDMDRTQIELNPYLTCVFSGGKAVPLSASQMPPAKMSVMLPSVNLEDCSQSLSLSTMQEDMESSGADTF

SEQ ID NO: 87213 - DNA, 3111 bp, Artificial Sequence
  derived and/or modified sequence
atgcccgtgttcaaggaggtgaaggtgcacctgctggaggacgccggcatcgagaaggacgccgtgacccaggagaccagaatcagccccagcggcatcgacagcgccaccaccgtggccgccgccaccgccgccgccatcgccaccgccgcccccctgatcaaggtgcagagcgacctggaggccaaggtgaacagcgtgaccgagctgctgagcaagctgcaggagaccgacaagcacctgcagagagtgaccgagcagcagaccagcatccagagaaagcaggagaagctgcactgccacgaccacgagaagcagatgaacgtgttcatggagcagcacatcagacacctggagaagctgcagcagcagcagatcgacatccagacccacttcatcagcgccgccctgaagaccagcagcttccagcccgtgagcatgcccagcagcagagccgtggagaagtacagcgtgaagcccgagcaccccaacctgggcagctgcaaccccagcctgtacaacaccttcgccagcaagcaggcccccctgaaggaggtggaggacaccagcttcgacaagcagaagagccccctggagacccccgcccccagaagattcgcccccgtgcccgtgagcagagacgacgagctgagcaagagagagaacctgctggaggagaaggagaacatggaggtgagctgccacagaggcaacgtgagactgctggagcagatcctgaacaacaacgacagcctgaccagaaagagcgagagcagcaacaccaccagcctgaccagaagcaagatcggctggacccccgagaagaccaacagattccccagctgcgaggagctggagaccaccaaggtgaccatgcagaagagcgacgacgtgctgcacgacctgggccagaaggagaaggagaccaacagcatggtgcagcccaaggagagcctgagcatgctgaagctgcccgacctgccccagaacagcgtgaagctgcagaccaccaacaccaccagaagcgtgctgaaggacgccgagaagatcctgagaggcgtgcagaacaacaagaaggtgctggaggagaacctggaggccatcatcagagccaaggacggcgccgccatgtacagcctgatcaacgccctgagcaccaacagagagatgagcgagaagatcagaatcagaaagaccgtggacgagtggatcaagaccatcagcgccgagatccaggacgagctgagcagaaccgactacgagcagaagagattcgaccagaagaaccagagaaccaagaagggccagaacatgaccaaggacatcagaaccaacacccaggacaagaccgtgaacaagagcgtgatccccagaaagcacagccagaagcagatcgaggagcacttcagaaacctgcccatgagaggcatgcccgccagcagcctgcagaaggagagaaaggagggcctgctgaaggccaccaccgtgatccaggacgaggactacatgctgcaggtgtacggcaagcccgtgtaccagggccacagaagcaccctgaagaagggcccctacctgagattcaacagccccagccccaagagcagaccccagagacccaaggtgatcgagagagtgaagggcaccaaggtgaagagcatcagaacccagaccgacttctacgccaccaagcccaagaagatggacagcaagatgaagcacagcgtgcccgtgctgccccacggcgaccagcagtacctgttcagccccagcagagagatgcccaccttcagcggcaccctggagggccacctgatccccatggccatcctgctgggccagacccagagcaacagcgacaccatgccccccgccggcgtgatcgtgagcaagccccaccccgtgaccgtgaccaccagcatcccccccagcagcagaaaggtggagaccggcgtgaagaagcccaacatcgccatcgtggagatgaagagcgagaagaaggaccccccccagctgaccgtgcaggtgctgcccagcgtggacatcgacagcatcagcaacagcagcgccgacgtgctgagccccctgagcagccccaaggaggccagcctgccccccgtgcagacctggatcaagacccccgagatcatgaaggtggacgaggaggaggtgaagttccccggcaccaacttcgacgagatcatcgacgtgatccaggaggaggagaagtgcgacgagatccccgacagcgagcccatcctggagttcaacagaagcgtgaaggccgacagcaccaagtacaacggcccccccttcccccccgtggccagcaccttccagcccaccgccgacatcctggacaaggtgatcgagagaaaggagaccctggagaacagcctgatccagtgggtggagcaggagatcatgagcagaatcatcagcggcctgttccccgtgcagcagcagatcgcccccagcatcagcgtgagcgtgagcgagaccagcgagcccctgaccagcgacatcgtggagggcaccagcagcggcgccctgcagctgttcgtggacgccggcgtgcccgtgaacagcaacgtgatcaagcacttcgtgaacgaggccctggccgagaccatcgccgtgatgctgggcgacagagaggccaagaagcagggccccgtggccaccggcgtgagcggcgacgccagcaccaacgagacctacctgcccgccagagtgtgcacccccctgcccaccccccagcccacccccccctgcagccccagcagccccgccaaggagtgcgtgctggtgaagacccccgacagcagcccctgcgacagcgaccacgacatggccttccccgtgaaggagatctgcgccgagaagggcgacgacatgcccgccatcatgctggtgaacacccccaccgtgacccccaccaccacccccccccccgccgccgccgtgttcacccccaccctgagcgacatcagcatcgacaagctgaaggtgagcagccccgagctgcccaagccctggggcgacggcgacctgcccctggaggaggagaaccccaacagcccccaggaggagctgcaccccagagccatgtag

SEQ ID NO: 87214 - DNA, 4602 bp, Artificial Sequence
  derived and/or modified sequence
atgcccgtgaagagactgagagaggtggtgagccagaaccacggcgaccacctggtgctgctgaaggacgagctgccctgcgtgccccccgccctgagcgccaacaagagactgcccgtgggcaccggcaccagcctgaacggcaccagcagaggcagcagcgacctgaccagcgccagaaactgctaccagcccctgctggagaaccccatggtgagcgagagcgacttcagcaaggacgtggccgtgcaggtgctgcccctggacaagatcgaggagaacaacaagcagaaggccaacgacatcttcatcagccagtacaccatgggccagaaggacgccctgagaaccgtgctgaagcagaaggcccagagcatgcccgtgttcaaggaggtgaaggtgcacctgctggaggacgccggcatcgagaaggacgccgtgacccaggagaccagaatcagccccagcggcatcgacagcgccaccaccgtggccgccgccaccgccgccgccatcgccaccgccgcccccctgatcaaggtgcagagcgacctggaggccaaggtgaacagcgtgaccgagctgctgagcaagctgcaggagaccgacaagcacctgcagagagtgaccgagcagcagaccagcatccagagaaagcaggagaagctgcactgccacgaccacgagaagcagatgaacgtgttcatggagcagcacatcagacacctggagaagctgcagcagcagcagatcgacatccagacccacttcatcagcgccgccctgaagaccagcagcttccagcccgtgagcatgcccagcagcagagccgtggagaagtacagcgtgaagcccgagcaccccaacctgggcagctgcaaccccagcctgtacaacaccttcgccagcaagcaggcccccctgaaggaggtggaggacaccagcttcgacaagcagaagagccccctggagacccccgcccccagaagattcgcccccgtgcccgtgagcagagacgacgagctgagcaagagagagaacctgctggaggagaaggagaacatggaggtgagctgccacagaggcaacgtgagactgctggagcagatcctgaacaacaacgacagcctgaccagaaagagcgagagcagcaacaccaccagcctgaccagaagcaagatcggctggacccccgagaagaccaacagattccccagctgcgaggagctggagaccaccaaggtgaccatgcagaagagcgacgacgtgctgcacgacctgggccagaaggagaaggagaccaacagcatggtgcagcccaaggagagcctgagcatgctgaagctgcccgacctgccccagaacagcgtgaagctgcagaccaccaacaccaccagaagcgtgctgaaggacgccgagaagatcctgagaggcgtgcagaacaacaagaaggtgctggaggagaacctggaggccatcatcagagccaaggacggcgccgccatgtacagcctgatcaacgccctgagcaccaacagagagatgagcgagaagatcagaatcagaaagaccgtggacgagtggatcaagaccatcagcgccgagatccaggacgagctgagcagaaccgactacgagcagaagagattcgaccagaagaaccagagaaccaagaagggccagaacatgaccaaggacatcagaaccaacacccaggacaagaccgtgaacaagagcgtgatccccagaaagcacagccagaagcagatcgaggagcacttcagaaacctgcccatgagaggcatgcccgccagcagcctgcagaaggagagaaaggagggcctgctgaaggccaccaccgtgatccaggacgaggactacatgctgcaggtgtacggcaagcccgtgtaccagggccacagaagcaccctgaagaagggcccctacctgagattcaacagccccagccccaagagcagaccccagagacccaaggtgatcgagagagtgaagggcaccaaggtgaagagcatcagaacccagaccgacttctacgccaccaagcccaagaagatggacagcaagatgaagcacagcgtgcccgtgctgccccacggcgaccagcagtacctgttcagccccagcagagagatgcccaccttcagcggcaccctggagggccacctgatccccatggccatcctgctgggccagacccagagcaacagcgacaccatgccccccgccggcgtgatcgtgagcaagccccaccccgtgaccgtgaccaccagcatcccccccagcagcagaaaggtggagaccggcgtgaagaagcccaacatcgccatcgtggagatgaagagcgagaagaaggaccccccccagctgaccgtgcaggtgctgcccagcgtggacatcgacagcatcagcaacagcagcgccgacgtgctgagccccctgagcagccccaaggaggccagcctgccccccgtgcagacctggatcaagacccccgagatcatgaaggtggacgaggaggaggtgaagttccccggcaccaacttcgacgagatcatcgacgtgatccaggaggaggagaagtgcgacgagatccccgacagcgagcccatcctggagttcaacagaagcgtgaaggccgacagcaccaagtacaacggcccccccttcccccccgtggccagcaccttccagcccaccgccgacatcctggacaaggtgatcgagagaaaggagaccctggagaacagcctgatccagtgggtggagcaggagatcatgagcagaatcatcagcggcctgttccccgtgcagcagcagatcgcccccagcatcagcgtgagcgtgagcgagaccagcgagcccctgaccagcgacatcgtggagggcaccagcagcggcgccctgcagctgttcgtggacgccggcgtgcccgtgaacagcaacgtgatcaagcacttcgtgaacgaggccctggccgagaccatcgccgtgatgctgggcgacagagaggccaagaagcagggccccgtggccaccggcgtgagcggcgacgccagcaccaacgagacctacctgcccgccagagtgtgcacccccctgcccaccccccagcccacccccccctgcagccccagcagccccgccaaggagtgcgtgctggtgaagacccccgacagcagcccctgcgacagcgaccacgacatggccttccccgtgaaggagatctgcgccgagaagggcgacgacatgcccgccatcatgctggtgaacacccccaccgtgacccccaccaccacccccccccccgccgccgccgtgttcacccccaccctgagcgacatcagcatcgacaagctgaaggtgagcagccccgagctgcccaagccctggggcgacggcgacctgcccctggaggaggagaaccccaacagcccccaggaggagctgcaccccagagccatcgtgatgagcgtggccaaggacgaggagcccgagagcatggacttccccgcccagccccccccccccgagcccgtgcccttcatgcccttccccgccggcaccaaggcccccagccccagccagatgcccggcagcgacagcagcaccctggagagcaccctgagcgtgaccgtgaccgagaccgagaccctggacaagcccatcagcgagggcgagatcctgttcagctgcggccagaagctggcccccaagatcctggaggacatcggcctgtacctgaccaacctgaacgacagcctgagcagcaccctgcacgacgccgtggagatggaggacgacccccccagcgagggccaggtgatcagaatgagccacaagaagttccacgccgacgccatcctgagcttcgccaagcagaaccaggagagcgccgtgagccagcaggccgtgtaccacagcgaggacctggagaacagcgtgggcgagctgagcgagggccagagaccccagctgaccgccgccgccgagaacatcctgatgggccacagcctgtacatgcagccccccgtgaccaacacccagagcctggaccagcagtgcgaccccaagcccctgagcagacagttcgacaccgtgagcggcagcatctacgaggacagctgcgccagccacggccccatgagcctgggcgagctggagctggagcccaacagcaagctggtgctgcccaccaccctgctgaccgcccaggagaacgacgtgaacctgcccgtggccgccgaggacttcagccagtaccagctgaagcagaaccaggacgtgaagcaggtggagcacaagcccagccagagctacctgagagtgagaaacaagagcgacatcgcccccagccagcagcaggtgagccccggcgacatggacagaacccagatcgagctgaacccctacctgacctgcgtgttcagcggcggcaaggccgtgcccctgagcgccagccagatgccccccgccaagatgagcgtgatgctgcccagcgtgaacctggaggactgcagccagagcctgagcctgagcaccatgcaggaggacatggagagcagcggcgccgacaccttctag

SEQ ID NO: 87215 - DNA, 3111 bp, Artificial Sequence
  derived and/or modified sequence
atgccagtcttcaaggaagtgaaggtgcatctattagaggatgctggcatcgagaaagacgccgtgacccaggagacaagaatatccccttcggggatagactcggccactacggtggctgctgccactgcagcggccatagcgacagcagcacccctcatcaaagtgcaatcagatctggaagccaaagtcaactccgtgaccgagctcctgtccaagctgcaggaaacggacaagcatctacagagggtaaccgagcagcaaacaagcatccagaggaaacaggagaaactgcactgccacgatcacgaaaaacagatgaacgtctttatggaacagcacattagacatctggagaagctccagcagcagcagatcgacattcagacacacttcatctctgccgcactaaaaaccagttcattccagcctgtgtctatgccatcttctcgcgcggttgagaaatattccgttaaaccggaacacccaaacctggggtcttgtaatccctcgctctacaatacttttgcatctaagcaggcccccctgaaagaggtagaggatacttctttcgataaacagaagtctcccctagaaacacccgctccaaggagatttgcccctgttccagtgtctcgggacgacgagctgtccaagagagaaaatctgctggaggaaaaagagaatatggaggtgagctgccatagaggcaatgttaggctcctggagcagatcctgaataacaatgacagcctaacccggaagtcagaatcctcaaatactacctccctgactcgctctaagattgggtggactcccgaaaaaactaaccgatttccctcttgtgaagaacttgagactaccaaggtcaccatgcagaaatctgacgacgttttgcacgacttgggccagaaggaaaaagaaaccaacagcatggtccaaccaaaagagtctctgtccatgcttaagttacccgatctgccccagaatagcgtgaagctccaaactaccaacactactagatcagttctgaaggatgcggagaaaatccttcgcggggtacagaataacaagaaggttttagaggagaatctcgaggccattatccgggcaaaggacggcgctgccatgtactctttaatcaatgcactcagcacgaacagggaaatgagtgagaaaatccgcatccggaagaccgtagacgaatggattaagactatctccgctgagatccaggacgaactatcacgcaccgattacgagcagaaaaggttcgatcagaaaaaccagaggacgaagaaaggacagaatatgaccaaggatattagaactaacacccaggacaaaaccgtgaataaatcagtcatccctcgtaaacatagtcaaaagcagatcgaggagcacttcaggaacctgcccatgaggggcatgccagcttccagtctgcagaaagagcgaaaggagggactcctcaaagcaaccacagtgatccaggacgaggactacatgctgcaagtctacgggaagccggtgtaccaggggcatcgatccactttgaagaaaggaccgtatctccgattcaattcacccagtcccaagtcccggcctcagaggccgaaggtgatcgaacgggtcaagggaacaaaagtgaagagcatccgcacacagaccgacttctacgccacaaaacccaaaaaaatggactccaagatgaagcactccgtgcctgtactgcctcacggcgatcagcaatatctgttctctccttcccgggagatgcctactttttcgggcactctagaagggcatttgatccccatggccattctgctaggacagacacagtcgaattctgatacgatgccacctgccggggtgattgtctccaaacctcacccagtcaccgtaactacatctatccctccatccagtagaaaagttgaaaccggggtgaagaaacccaatattgcaatcgtcgagatgaaatctgagaaaaaagatccccctcaactgaccgtgcaggttttgccctccgtggacatcgatagcatcagcaacagcagtgccgacgtcctgtcgccactgtcctcacctaaggaggctagcttgcccccggtgcagacttggatcaaaaccccagagatcatgaaggtagacgaggaggaagtcaagtttcctggcaccaactttgacgaaattattgacgtcatccaggaagaggagaagtgtgacgagatcccagacagcgaaccaattctggagtttaacagatctgtaaaggcagattctaccaagtacaatggcccaccattccccccagtcgcctccaccttccaacctacggcagacatcctggataaagtcatagaaagaaaagagacacttgaaaatagtctgattcagtgggtggaacaggaaatcatgtcgaggattattagcggtctcttcccggtgcaacagcagatcgccccgagtatcagtgtctcagtgagcgagacgtcagagcctctgacatctgacatcgtggaaggtacaagctctggagccctgcagttgtttgtggacgctggcgtgcccgtcaattcgaatgtgatcaagcacttcgtcaacgaggccctggcagaaaccatcgccgttatgctaggcgatagagaagccaaaaaacagggtcccgtggccacaggggtgtctggagatgccagcacgaatgagacatacttacctgcccgcgtgtgcacgccattacccactccccagcccacaccaccttgctcgccaagctcacctgctaaagaatgcgtcttagtgaaaaccccggattcatcaccatgcgacagtgatcacgacatggccttccccgttaaggaaatctgcgccgaaaagggggacgatatgcccgctatcatgctggtcaacactccgactgttactcccacgaccacaccgccaccagccgctgctgtgtttacacccacactgtccgacatatcgatagacaaactgaaagtctctagcccagagcttcccaagccgtggggcgatggtgacttgccactagaagaagagaatccaaatagcccacaggaagagcttcaccctcgagccatgtag

SEQ ID NO: 87216 - DNA, 4602 bp, Artificial Sequence
  derived and/or modified sequence
atgcctgtgaaaagactacgagaagtcgtctctcagaaccatggagatcatttggtccttctgaaggatgaactcccttgcgtgccccctgcactaagtgccaataaaaggctgccggtgggaacgggcacctcgctcaacggtacatcacgagggagttccgatctcacatcggccagaaactgctaccaacccttgttggagaacccaatggtcagtgagtctgatttttccaaggacgtggcagtgcaggttctgcctctggacaagatagaggagaacaataaacagaaggctaacgacatttttatctcacagtacaccatgggacaaaaagacgccctccgtaccgttttgaagcaaaaagcccaaagtatgcctgtgtttaaagaggttaaggtgcatctgctcgaggacgctggcattgaaaaggacgccgtgacacaagagacacgcattagcccctctggtatcgattcggctactaccgtggcagcggctactgcggctgctatagcgactgccgccccactaattaaggtccaatcagatttggaagcgaaggtaaatagcgtaacagagcttctgagcaagctccaggagaccgacaaacatcttcagcgggtgacagagcagcaaacctcaatacagcggaagcaggagaagctgcattgtcatgatcacgagaaacagatgaacgtgtttatggagcagcacatcaggcacctcgagaaactgcaacagcagcagatagacattcagacacatttcatcagcgccgctcttaagacttcttcctttcagcctgtgagcatgccaagttcccgggccgttgaaaaatattctgtgaaacccgaacatccaaacctgggatcctgtaacccgtccttatacaacacttttgcctcgaagcaggcccccctgaaagaagtcgaggatactagtttcgacaaacagaagtctccattggaaactcccgccccgcgaaggttcgctcctgtgcctgtctccagggatgacgaactctccaagagagagaatctcctggaggagaaggagaacatggaagtgagctgccaccgcggtaacgttcgcctcctcgagcagattcttaataacaacgacagcctcacacgcaagagtgaatctagtaacactacgagtctcaccagatccaagatcggttggacacccgaaaagaccaacagattcccaagttgtgaagaactggagaccacgaaagtcacaatgcagaagtctgacgacgtcctacacgacttagggcagaaggaaaaagagaccaactctatggtgcagccgaaggaatcgttgtctatgctcaaactccccgatctcccgcagaattcggtgaaattacagacaaccaacaccacacgctccgtgcttaaagacgccgaaaaaatcttgcgaggggtgcagaataacaaaaaggtgcttgaggagaatctggaagccattatccgcgctaaggatggggcagccatgtattccttgataaatgcgctctccaccaaccgcgagatgagtgagaagatcagaattcgaaaaaccgtggacgaatggatcaagactatttcggcggagattcaagacgagctcagccggaccgattacgagcagaagaggtttgaccaaaaaaaccaacgcacaaaaaagggccagaatatgacaaaggacatcaggacgaacacgcaggacaagaccgtcaataagtccgtcattccaagaaagcactcacaaaaacagattgaggaacactttaggaatctccctatgagaggaatgccagcgtccagcctgcagaaggaacgtaaggaaggactcctcaaggctactactgtgattcaggatgaggactacatgctccaagtgtatggaaagcctgtgtaccagggacatagaagcacattaaaaaaggggccgtatctgagatttaattcacctagcccaaaatcccgccctcagagaccgaaggtcatagagagggtgaaaggcactaaggtcaagtctatcaggactcagacagatttttacgccacaaaaccaaagaagatggactctaagatgaagcatagtgtgcctgtccttccccacggcgatcaacagtacttgttctcgccaagtagagagatgccgacattttccggtacgttggaaggccacttgattcctatggcaattctcctgggccaaacacagtcaaacagcgatacgatgccgccagctggcgtgatagttagtaagccacacccagtaaccgttacaacatctatccctccctcatcccgcaaggtagaaacaggcgttaaaaagcccaacatcgctattgttgaaatgaagtccgaaaaaaaagaccctcctcagctgaccgtacaagtcttaccttctgtagatattgacagcatctcaaactcaagcgcagacgtactgtcaccactctcctcgcctaaggaagccagcctcccaccggtgcaaacctggatcaagactccagagattatgaaagtggatgaggaggaagtaaaattcccaggaaccaattttgatgaaatcatcgatgttattcaggaggaggaaaagtgcgatgaaataccagacagcgagcccatcctcgagttcaatagatcagtcaaggcagactccactaagtacaatggcccccctttcccccctgtagccagtacttttcagcccactgccgacatcttggacaaggttattgagcgaaaagagaccctggaaaactcccttatccagtgggttgagcaggaaattatgagtcggattataagcggactttttcctgtccaacagcaaattgccccttcgatctctgtgtccgtgagtgagacctcagagcctctaactagcgacattgtggaaggaacgagtagcggagcacttcaattgtttgtggacgccggtgttccagtgaactctaacgttattaaacactttgtgaatgaggcgctggctgagaccatagctgttatgctgggggacagagaagccaagaagcagggcccagtggccactggtgtgtctggagatgcaagcacgaacgaaacctacctcccggcccgcgtctgcacaccactcccaacgccgcagccaactccaccatgcagtccttcttcacctgctaaggagtgcgtgctcgtaaaaactcctgacagcagcccctgcgattctgatcacgatatggcattccctgttaaagagatttgcgccgagaaaggcgatgacatgcctgcgattatgctggtcaatacgcccacagtgacaccaacaacaacgccgccaccagccgcagccgtatttaccccaacgctgtctgacatctcaatcgataaacttaaggtgtcttcacccgaacttcctaaaccatggggcgacggcgacttgcctcttgaggaagaaaatcctaactccccccaggaagagctccatcccagggccatcgtcatgtctgtggccaaggatgaggaaccagagtcaatggatttcccggctcagcctcctccacccgagcctgttccgtttatgccattccctgccggaacgaaagcacctagcccctctcagatgccaggttcagactcttctacgctggagagtactttatctgtgacagtcactgagacagaaacacttgacaaacccatatctgagggcgagatcttgttcagttgtggacaaaaactcgctccaaaaatcttagaagacatcgggctgtacctaacaaacctcaacgattcactgtcgtctacattgcatgatgccgttgagatggaagatgaccctccctctgagggacaggttattcggatgagtcacaaaaagtttcacgccgacgccatcttgagcttcgcaaagcagaaccaggagagcgccgtgtcgcaacaggctgtgtaccactctgaggatctggagaattctgtgggagagttaagcgaagggcaacggccacagctcaccgcagccgccgagaacattttaatggggcactcactgtatatgcaacctccagtaaccaacacacaaagcctggatcagcaatgcgaccctaaacctctgtcccggcagttcgataccgtatcaggcagcatttacgaagattcttgcgcatcccacggacctatgtcactgggggagctagaactggagccaaactccaaactggtcctcccaacaaccttgctaaccgcacaagagaatgatgtcaacctgcctgttgcagcagaagatttctcccagtaccaacttaagcaaaaccaggacgtgaagcaggtcgaacacaaacctagccagtcttaccttagagtcagaaataaatcggatatcgcaccttcccagcagcaggtttcgcccggggatatggatagaacacagatcgagttaaatccgtatctaacatgcgtcttctcggggggtaaagcggtgccgctgtccgcctcgcagatgccgccggcaaaaatgagtgtgatgctgccgagtgtcaacctggaagactgttctcagagcttatccctcagcacaatgcaagaggacatggagtctagcggagcggatacattctag

SEQ ID NO: 87217 - DNA, 3111 bp, Artificial Sequence
  derived and/or modified sequence
atgcctgtgttcaaggaggtgaaggtgcacctgctggaggatgctggcatcgagaaggatgctgtgacccaggagacccgcatcagccccagcggcattgattctgccaccaccgtggccgccgccacagctgctgccatcgccacagctgcccccctcatcaaggtgcagagcgacctggaggccaaggtgaacagcgtgacagagctgctgagcaagctgcaggagacagacaagcacctgcagagggtgacagagcagcagaccagcatccagaggaagcaggagaagctgcactgccacgaccacgagaagcagatgaatgtgttcatggagcagcacatccgccacctggagaagctgcagcagcagcagattgacatccagacccacttcatctctgctgccctgaagaccagcagcttccagcctgtgtccatgcccagcagcagagctgtggagaagtacagcgtgaagccagagcaccccaacctgggcagctgcaaccccagcctgtacaacacctttgccagcaagcaggcccccctgaaggaggtggaggacaccagctttgacaagcagaagagccccctggagaccccagcccccaggagatttgcccctgtgcctgtgtccagagatgatgagctgagcaagcgggagaacctgctggaggagaaggagaacatggaggtgtcctgccacagaggaaatgtgcggctgctggagcagatcctgaacaacaatgacagcctgaccaggaagtctgagagcagcaacaccaccagcctgaccaggagcaagattggctggaccccagagaagaccaaccgcttccccagctgtgaggagctggagaccaccaaggtgaccatgcagaagagtgatgatgtgctgcatgacctgggccagaaggagaaggagaccaacagcatggtgcagcccaaggagagcctgtccatgctgaagctgcctgacctgccccagaacagcgtgaagctgcagaccaccaacaccaccaggtctgtgctgaaggatgctgagaagatcctgcggggcgtgcagaacaacaagaaggtgctggaggagaacctggaggccatcatccgggccaaggatggagctgccatgtacagcctcatcaatgccctgagcaccaaccgggagatgtctgagaagatccgcatcaggaagacagtggatgagtggatcaagaccatctctgctgagatccaggatgagctgagcaggacagattatgagcagaagagatttgaccagaagaaccagaggaccaagaagggccagaacatgaccaaggacatccgcaccaacacccaggacaagacagtgaacaagagcgtcatccccaggaagcacagccagaagcagatcgaggagcacttcaggaacctgcccatgaggggcatgcctgccagcagcctgcagaaggagaggaaggagggcctgctgaaggccaccaccgtcatccaggatgaggactacatgctgcaggtgtatggcaagcctgtgtaccagggccacaggagcaccctgaagaagggcccctacctgcgcttcaacagccccagccccaagagccggccccagaggcccaaggtgattgaaagagtgaagggcaccaaggtgaagagcatccgcacccagacagacttctacgccaccaagcccaagaagatggacagcaagatgaagcacagcgtgcctgtgctgccccacggggaccagcagtacctgttcagccccagccgggagatgcccaccttcagcggcaccctggagggccacctgatccccatggccatcctgctgggccagacccagagcaacagcgacaccatgcccccagctggggtgattgtgtccaagccccaccctgtgacagtgaccaccagcatcccccccagcagcaggaaggtggagactggagtgaagaagcccaacatcgccatcgtggagatgaagtctgagaagaaggaccccccccagctgactgtgcaggtgctgcccagcgtggacatcgacagcatcagcaacagcagcgcagatgtgctgagccccctgagcagccccaaggaggccagcctgccccctgtgcagacctggatcaagaccccagagatcatgaaggtggatgaggaggaggtgaagtttcctggcaccaactttgatgagatcattgatgtgatccaggaggaggagaagtgtgatgagatcccagattctgagcccatcctggagttcaacagatctgtgaaggctgacagcaccaagtacaatggaccacccttcccccctgtggccagcaccttccagcccacagctgacatcctggacaaggtgattgaaaggaaggagaccctggagaacagcctcatccagtgggtggagcaggagatcatgagccgcatcatcagcggcctcttccctgtgcagcagcagatcgcccccagcatctctgtgtctgtgtctgagaccagcgagcccctgaccagtgacatcgtggagggcaccagcagcggggccctgcagctgtttgtggatgctggggtgcctgtgaacagcaatgtcatcaagcactttgtgaatgaggccctggccgagaccatcgctgtgatgctgggggaccgggaggccaagaagcagggccctgtggccaccggggtgtctggagatgccagcaccaatgagacctacctgcctgcccgggtgtgcacccccctgcccaccccccagcccaccccaccctgcagccccagcagccctgccaaggaatgtgtgctggtgaagaccccagacagcagcccctgtgacagcgaccatgacatggccttccctgtgaaggagatctgtgccgagaagggagatgacatgcctgccatcatgctggtgaacacccccaccgtgacccccaccaccaccccacctcctgctgctgctgtgttcacccccaccctgagtgacatcagcattgacaagctgaaggtgagcagccctgagctgcccaagccctggggagatggagacctgcccctggaggaggagaaccccaacagcccccaggaggagctgcacccccgggccatgtag

SEQ ID NO: 87218 - DNA, 4602 bp, Artificial Sequence
  derived and/or modified sequence
atgcctgtgaagaggctgcgggaggtggtgtcccagaaccacggggaccacctggtgctgctgaaggatgagctgccctgtgtgcccccagccctgagcgccaacaagaggctgcctgtgggcaccggcaccagcctgaatggcaccagccggggcagcagtgacctgaccagcgccaggaactgctaccagcccctgctggagaaccccatggtgtctgagagtgacttcagcaaggatgtggccgtgcaggtgctgcccctggacaagattgaggagaacaacaagcagaaggccaatgacatcttcatcagccagtacaccatgggccagaaggatgccctgaggacagtgctgaagcagaaggcccagagcatgcctgtgttcaaggaggtgaaggtgcacctgctggaggatgctggcatcgagaaggatgctgtgacccaggagacccgcatcagccccagcggcatcgacagcgccaccaccgtggccgccgccacagctgctgccatcgccacagctgcccccctcatcaaggtgcagagcgacctggaggccaaggtgaacagcgtgacagagctgctgagcaagctgcaggagacagacaagcacctgcagagggtgacagagcagcagaccagcatccagaggaagcaggagaagctgcactgccacgaccacgagaagcagatgaatgtgttcatggagcagcacatccgccacctggagaagctgcagcagcagcagattgacatccagacccacttcatctctgctgccctgaagaccagcagcttccagcctgtgtccatgcccagcagcagagctgtggagaagtacagcgtgaagccagagcaccccaacctgggcagctgcaaccccagcctgtacaacacctttgccagcaagcaggcccccctgaaggaggtggaggacaccagctttgacaagcagaagagccccctggagaccccagcccccaggagatttgcccctgtgcctgtgtccagagatgatgagctgagcaagcgggagaacctgctggaggagaaggagaacatggaggtgtcctgccacagaggaaatgtgcggctgctggagcagatcctgaacaacaatgacagcctgaccaggaagtctgagagcagcaacaccaccagcctgaccaggagcaagattggctggaccccagagaagaccaaccgcttccccagctgtgaggagctggagaccaccaaggtgaccatgcagaagagtgatgatgtgctgcatgacctgggccagaaggagaaggagaccaacagcatggtgcagcccaaggagagcctgtccatgctgaagctgcctgacctgccccagaacagcgtgaagctgcagaccaccaacaccaccaggtctgtgctgaaggatgctgagaagatcctgcggggcgtgcagaacaacaagaaggtgctggaggagaacctggaggccatcatccgggccaaggatggagctgccatgtacagcctcatcaatgccctgagcaccaaccgggagatgtctgagaagatccgcatcaggaagacagtggatgagtggatcaagaccatctctgctgagatccaggatgagctgagcaggacagattatgagcagaagagatttgaccagaagaaccagaggaccaagaagggccagaacatgaccaaggacatccgcaccaacacccaggacaagacagtgaacaagagcgtcatccccaggaagcacagccagaagcagatcgaggagcacttcaggaacctgcccatgaggggcatgcctgccagcagcctgcagaaggagaggaaggagggcctgctgaaggccaccaccgtcatccaggatgaggactacatgctgcaggtgtatggcaagcctgtgtaccagggccacaggagcaccctgaagaagggcccctacctgcgcttcaacagccccagccccaagagccggccccagaggcccaaggtgattgagcgggtgaagggcaccaaggtgaagagcatccgcacccagacagacttctacgccaccaagcccaagaagatggacagcaagatgaagcacagcgtgcctgtgctgccccatggagaccagcagtacctgttcagccccagccgggagatgcccaccttcagcggcaccctggagggccacctgatccccatggccatcctgctgggccagacccagagcaacagcgacaccatgcctcctgctggggtcatcgtgtccaagccccaccctgtgacagtgaccaccagcatcccccccagcagcaggaaggtggagaccggggtgaagaagcccaacatcgccatcgtggagatgaagtctgagaagaaggaccccccccagctgactgtgcaggtgctgcccagcgtggacatcgacagcatcagcaacagcagcgcagatgtgctgagccccctgagcagccccaaggaggccagcctgccccctgtgcagacctggatcaagaccccagagatcatgaaggtggatgaggaggaggtgaagtttcctggcaccaactttgatgagatcattgatgtgatccaggaggaggagaagtgtgatgagatcccagacagcgagcccatcctggagttcaacagatctgtgaaggctgacagcaccaagtacaacggcccccccttcccccctgtggccagcaccttccagcccacagctgacatcctggacaaggtgattgaaaggaaggagaccctggagaacagcctcatccagtgggtggagcaggagatcatgagccgcatcatcagcggcctcttccctgtgcagcagcagatcgcccccagcatctctgtgtctgtgtctgagaccagcgagcccctgaccagtgacatcgtggagggcaccagcagcggggccctgcagctgtttgtggatgctggggtgcctgtgaacagcaatgtcatcaagcactttgtgaatgaggccctggccgagaccatcgctgtgatgctgggggaccgggaggccaagaagcagggccctgtggccactggagtgtctggagatgccagcaccaatgagacctacctgcctgcccgggtgtgcacccccctgcccaccccccagcccaccccaccctgcagccccagcagccctgccaaggaatgtgtgctggtgaagaccccagacagcagcccctgtgacagcgaccatgacatggccttccctgtgaaggagatctgtgccgagaagggagatgacatgcctgccatcatgctggtgaacacccccaccgtgacccccaccaccaccccacctcctgctgctgctgtgttcacccccaccctgagtgacatcagcattgacaagctgaaggtgagcagccctgagctgcccaagccctggggagatggagacctgcccctggaggaggagaaccccaacagcccccaggaggagctgcacccccgggccatcgtgatgtctgtggccaaggatgaggagcctgagagcatggacttccctgcccagcccccacctcctgagcctgtgcccttcatgcccttccctgctggcaccaaggcccccagccccagccagatgcctggcagtgacagcagcaccctggagagcaccctgtctgtgacagtgacagaaacagagaccctggacaagcccatcagcgagggggagatcctcttcagctgtggccagaagctggcccccaagatcctggaggacatcggcctgtacctgaccaacctgaatgacagcctgagcagcaccctgcatgatgctgtggagatggaggatgatcctccttctgagggccaggtgatccgcatgagccacaagaagttccacgcagatgccatcctgagctttgccaagcagaaccaggagagcgctgtgtcccagcaggccgtgtaccacagcgaggacctggagaacagcgtgggggagctgtctgagggccagaggccccagctgacagctgctgctgagaacatcctgatgggccacagcctgtacatgcagccccctgtgaccaacacccagagcctggaccagcagtgtgaccccaagcccctgagccggcagtttgacacagtgtctggcagcatctatgaggacagctgtgccagccacggccccatgagcctgggggagctggagctggagcccaacagcaagctggtgctgcccaccaccctgctgacagcccaggagaatgatgtgaacctgcctgtggccgctgaggacttcagccagtaccagctgaagcagaaccaggatgtgaagcaggtggagcacaagcccagccagagctacctgcgggtgaggaacaagagtgacatcgcccccagccagcagcaggtgtcccctggggacatggacaggacccagatcgagctgaacccctacctgacctgtgtgttttctgggggcaaggctgtgcccctgagcgccagccagatgcccccagccaagatgtctgtgatgctgcccagcgtgaacctggaggactgcagccagagcctgagcctgagcaccatgcaggaggacatggagagcagcggggctgacaccttctag

SEQ ID NO: 87219 - DNA, 3111 bp, Artificial Sequence
  derived and/or modified sequence
atgcccgtgttcaaggaggtgaaggtgcacctgctggaggacgccgggattgagaaagacgctgtcacccaggagacacgaatcagccctagcgggatcgattccgccactacagtggcagcagccactgccgcagccattgccactgctgcaccattgattaaggtgcaaagtgacctcgaggctaaggtaaattcggttacagagctgctctccaagcttcaggaaactgacaagcacctgcagagggttactgagcagcagaccagcatccagagaaaacaggagaagctccactgtcatgatcacgaaaaacaaatgaatgtgtttatggaacaacacatcagacatctcgagaaactgcagcagcagcagatagatattcagacgcactttatttcagcagctctgaaaactagttcgttccagccggtatccatgcccagtagcagagcagtggaaaagtattccgtgaagccggagcaccccaacttgggcagttgcaatccatctctctacaatacgtttgcaagtaaacaggcccccctcaaggaggtcgaagacacctcatttgacaaacagaaatctcccctggagacacctgcacctcggcggttcgcacccgtgccagtctcacgcgatgatgagctgtcaaaaagagagaatctgcttgaagaaaaggagaacatggaggtctcatgccatcgcggaaacgtgcgattactagagcagatcctaaataataatgactcattaacacgaaaatccgaatcttctaatactaccagcttgacacgaagcaaaatcggctggacacctgaaaagacaaataggtttccgtcatgcgaagaactagagactaccaaagtaacaatgcagaagagcgatgatgttctgcatgatctggggcagaaggagaaagaaaccaactcaatggtgcagcccaaagaatcactatcgatgcttaaactacctgatctgccgcagaacagtgtaaagctgcagacaacaaacaccacacgcagcgtcttgaaggatgcagagaagattctgcgcggcgtgcagaacaataaaaaggtgttggaggaaaaccttgaagcgattatcagggctaaagacggggccgccatgtacagtttaatcaacgctctgagtaccaatagggagatgtccgagaaaatacgaatacggaagaccgtagacgaatggattaaaactatcagcgcagagattcaggacgagctgtccaggacagactacgagcaaaagagatttgatcagaagaaccagaggaccaaaaagggtcagaatatgaccaaagacatcagaacaaacacgcaggacaagaccgtaaataaaagcgtgatcccacgcaaacactcgcagaaacagatcgaggagcatttccgaaatctgccaatgaggggcatgcctgcaagcagcctgcagaaggagcggaaagagggcctgctgaaagctacaaccgtcattcaagacgaagactacatgttacaagtctatggtaaaccagtctatcagggccatcggtccacacttaaaaaaggcccatacctcagattcaactctccttcccctaagagtagaccccagcgcccgaaagtaattgagagagtcaaaggtacaaaggtgaagagcatcaggacacagacagatttctatgccactaaacccaagaaaatggattctaaaatgaaacacagcgtaccagtcctgccccatggcgatcagcagtacctgttttcaccctccagagagatgcccacctttagcgggacacttgagggtcacttgatcccgatggccatcctgctcggccagacacagtctaatagcgacactatgccccccgcaggcgtgatcgtgtcaaagcctcatcccgttactgttaccacaagcattccaccttcgagtcgcaaagttgaaaccggcgtaaaaaaaccaaatatcgcaatcgtggaaatgaagtccgagaagaaagacccaccgcaactgacagtgcaagtactgccgtctgtggatattgattcaattagcaactcatccgccgacgtgctgagtccactctcatcccccaaagaagcaagcttgcctccagtccagacctggattaagacgcctgaaataatgaaagtggatgaggaagaggttaaatttcctggaacgaactttgatgaaatcattgatgtaatccaggaagaggagaaatgcgacgagatcccagatagtgagcctattctcgagttcaaccgttccgttaaggctgatagcaccaagtacaatggtcctccgttcccaccggtcgcttctaccttccagcccactgctgacatactagataaggtgattgaacgcaaggaaaccctggaaaatagcctaatccagtgggttgaacaagagatcatgagccgaattatcagtggcctgtttcccgttcagcagcagatagctccctcaattagtgtgtctgtgagtgaaacctcagaacctctgacttctgatattgtggaaggcacttcatcgggtgctcttcagctgtttgtggacgcaggggtgcctgtaaactcaaacgtcataaaacatttcgtgaacgaagccctggcggagacaatcgcggtgatgctcggagatcgcgaggctaagaaacaaggcccagtggctacaggggtctctggggatgcctcgacgaacgaaacctatctgccagccagagtatgcactccccttcccacacctcaacccacccctccttgcagcccatccagtcccgccaaagaatgtgttttggtcaagacccccgatagtagtccatgtgattcagaccatgacatggcttttcctgtaaaggagatctgtgcagaaaaaggggacgatatgcctgctattatgcttgttaacacccctacagtgacacccactaccactcctcccccagccgcagccgtgttcacccccaccctttctgatatttcaatcgataagttgaaggtcagctccccggagctgccgaaaccatggggcgacggtgacctgccattagaggaagagaatcctaattctccacaggaagagttacaccctagggcgatgtag

SEQ ID NO: 87220 - DNA, 4602 bp, Artificial Sequence
  derived and/or modified sequence
atgcccgtgaagcggctgcgggaggtggtgagccagaaccacggcgaccacctggtcttactaaaggacgagctgccatgcgttccccctgccctgtctgctaataagcgcttgcccgttgggactggtacctctctgaacggcaccagcagggggtcatctgatctgacatcggcaaggaactgttaccagcctctattggaaaaccccatggtgtctgaatccgatttttctaaggatgttgccgtccaggttcttcctctcgataaaatcgaggagaacaacaagcagaaagcaaatgacatcttcatctcccagtataccatgggacagaaagacgctttgagaaccgtgctgaagcagaaggcacaatccatgcccgtgtttaaagaagtcaaagtgcacctactggaagacgcgggtatcgaaaaggacgctgtcacccaggaaacccgaatctccccctctggaattgattccgcgactaccgtcgcagccgctaccgccgcagccattgccaccgctgctcccttaattaaggttcagagcgacttagaggctaaagtcaactctgtcacggaacttcttagtaagctgcaggaaaccgacaagcacctacaacgcgtcaccgagcaacagacatcgattcaaagaaagcaggagaaactgcactgccacgaccatgagaaacagatgaatgtatttatggaacagcatatccgtcatttggaaaagttgcagcaacaacaaatcgatatacaaacacacttcatcagcgcagccctgaagacatcctcatttcagcccgtctccatgccatcatcccgggctgttgagaagtatagtgtaaaacccgagcatcctaatttgggcagctgtaatcctagcctttacaataccttcgcctctaaacaagcacccctcaaagaggtggaggacacatcgttcgacaaacagaaatccccccttgagactccagcaccccggagattcgctcccgtcccagtcagccgcgacgatgagttgtccaagagagagaacctcctggaggaaaaagagaatatggaggtgtcatgccatcggggcaatgtccgtctcctggaacaaattttaaataacaacgattctttgactagaaaatccgaaagtagcaacacaacttccctgacccggagcaaaattggctggaccccagagaagaccaaccggtttccatcatgcgaagagttggagaccacaaaggtaacgatgcagaaaagcgacgacgtacttcacgatttagggcagaaagagaaggagaccaattccatggttcagcccaaagagtccttgagtatgttaaaactgcctgacctgccacagaactccgtcaagcttcagactaccaacaccactcggagcgtgctgaaagatgccgaaaagatcctgcgcggagtgcagaataacaaaaaagtgctggaagagaacctagaagcaattataagagccaaagatggcgccgccatgtattctctgatcaatgccctgtcgacaaaccgcgaaatgtcggaaaaaattcgaatcagaaaaaccgttgacgagtggatcaagaccattagtgccgagattcaagacgagctctcccggaccgattacgagcaaaagaggttcgaccagaagaaccagagaaccaagaaaggccagaacatgaccaaagacatccgaacaaacacccaggataagactgttaataaatccgttatcccacgtaaacactcacaaaaacagatagaagagcacttccggaacttgcccatgcgggggatgcctgcctcttcacttcagaaagagaggaaagagggtttgctaaaagcaacaaccgttatccaagatgaagactatatgctccaggtatatggtaagccagtgtaccaaggacaccggagtactttaaagaagggaccatacctgagattcaacagcccaagtccgaaatcccgccctcaacgacccaaagtcatcgaacgcgtcaagggcaccaaggtgaagagcatcagaactcagacagacttttacgccactaaacccaagaagatggacagcaaaatgaaacactcagttcccgtgctgcctcatggggaccagcagtaccttttcagcccttccagagaaatgcccactttttccggcactctagaaggtcaccttattcctatggcaattcttctgggccagactcagtctaactccgacactatgcctcccgcaggggtgatagtgtctaagccccaccctgtgacagtcaccacaagcatccctccttcatctcgcaaggttgaaaccggggtgaagaagccgaacatcgccattgtggaaatgaagtccgagaagaaagatcctcctcaattgacggtccaggtcctcccatccgtggatatagatagtatttcaaattcatcggcagacgtcctctctcccctttccagccctaaggaagcgtctttgccacccgtccagacatggatcaagacgcccgaaataatgaaggttgacgaggaggaagttaagttccctggtacaaacttcgacgaaataatcgacgttattcaagaagaggagaaatgcgatgagatccccgattctgaacctattctagagtttaatcgctcggtgaaggcagacagcaccaaatataatgggcccccatttcccccagtagcatctaccttccaaccaaccgctgacattctggacaaagtcattgagagaaaggagacgctagagaactcactgatccagtgggtggaacaggagattatgtctcgaatcattagcggccttttccctgtgcagcagcagatagccccgtccatcagtgtctctgtcagtgaaacgtcggaacctctgacctctgacatcgtggaaggcacttcctccggtgcgttgcaactttttgtagatgcaggggtgccagtgaacagcaacgtgataaaacattttgttaacgaagcgcttgccgagacaattgccgtaatgctgggtgaccgcgaagccaagaaacagggcccggttgcgaccggggtctcaggggatgctagtacaaacgaaacgtaccttcctgccagagtctgtacccccttgccgactcctcagccaacaccaccatgttctccttcaagtcccgccaaggaatgcgttctggtcaaaacacccgactcttcaccttgtgattcagatcacgacatggcttttccagttaaggagatctgtgcagaaaagggtgacgacatgcctgcaattatgctcgtcaacacccccacagtaacgcctactaccactccgcctccagcggcggccgtgtttaccccaacactgtctgacattagcatcgataaactgaaagtgtcatccccggagctgcctaagccctggggggatggtgacctgcccctcgaagaggagaaccccaatagtccgcaggaggaactacacccacgcgcgatcgttatgagtgtagccaaagacgaggagcctgaatccatggatttcccagctcaaccacccccccccgaaccagtaccattcatgccgttcccggcaggcactaaggccccctccccgagccagatgcccggttcagacagctctacgctagaatccactctgtcagtcaccgtcactgaaacagaaacgctcgataagcccatatcggagggcgagatcttattcagctgcggacaaaagctcgcaccaaaaatcctggaagacatcggtttgtatttgacaaacttgaatgatagcctgagtagcaccctccacgacgccgtcgaaatggaggatgacccaccttctgagggccaggttatcaggatgtctcacaagaaatttcacgccgatgctatcctgagctttgctaaacagaaccaggaatcggctgtgtcgcaacaagctgtgtatcatagcgaggacctcgagaacagcgtgggtgaactgagtgaaggacagcgtccacagctcacggccgccgccgagaacattctcatgggccatagcctgtacatgcagccaccagtcacaaacactcaatccttggatcaacaatgtgaccccaagccccttagccgacagtttgatactgtgagcggatctatttacgaggatagttgcgcctctcacggcccaatgagcctcggcgagcttgagctggagcccaacagtaagctagtgttaccaacaacccttctaacagcccaggagaacgatgtgaatcttccggtggcggcagaagacttcagccagtaccagctgaaacagaaccaggacgtgaagcaagtggagcataaaccatcccagagctacctgagagtgcgcaataagagcgatattgctccaagccagcagcaggtctcacctggcgacatggaccgtacccagatcgaactgaacccctacctgacatgcgtgttctcaggtggtaaggcggtgccgctgtcggcatcacagatgccaccagccaagatgtccgtgatgctcccatctgtcaatctggaagactgcagtcagtctttatccttgtcaactatgcaagaggatatggagtctagtggagccgacacgttttag

SEQ ID NO: 87221 - DNA, 3111 bp, Artificial Sequence
  derived and/or modified sequence
atgcccgtcttcaaagaggtgaaggtgcacctcttggaagatgccggaattgaaaaggacgcggtgactcaggaaacacggatcagcccctccggcatagactccgcgacgaccgttgcagccgctacagcggcagcaatcgccacggctgctcctctgataaaggtgcagtcggatctggaggccaaggtcaattcagttaccgagctgctttctaaacttcaggagacagataagcacctgcagcgagttactgagcagcagacgtccattcaaaggaagcaggaaaaactccattgtcacgaccacgaaaagcagatgaatgtgttcatggagcagcacattaggcacttagagaagttacagcagcagcaaatagacattcagacacacttcataagtgcggctctgaagacatcctcttttcagccagtatcaatgcctagctcccgggcagttgagaagtacagtgtgaagccagagcatccgaatctggggtcctgcaatccctcactgtataatacattcgcgagcaagcaggccccactgaaggaagtggaggacacctcattcgacaagcagaagagtccacttgaaacccccgctcctagaagatttgctcctgttcctgtgtctagggacgacgagctgagtaaaagggagaatcttctggaagagaaggagaatatggaggtgtcgtgtcacaggggtaacgttcggctgctggagcagatcctgaataataatgatagtttaactagaaagtccgaatcaagtaataccacgtctttgacacgctcaaaaatcgggtggacccctgagaagacgaataggtttcccagctgcgaggagctcgagactaccaaagtgacaatgcagaagtccgatgacgttctgcacgatcttggtcagaaagaaaaagaaactaattcaatggttcagccaaaagagtctctgtctatgctcaaacttcccgatctgcctcaaaactcagtgaagcttcaaaccactaacacaacccgctcggttctaaaagacgctgaaaagatccttcgcggagttcagaacaataagaaggttctagaggaaaaccttgaagccatcatccgggcaaaggatggggctgccatgtattccctgatcaatgccctttctacgaacagggagatgagcgagaaaataaggatcaggaaaaccgttgacgagtggattaagacgataagcgctgagatacaggatgagctctctcggaccgactatgaacaaaagagattcgaccagaaaaatcagaggaccaaaaagggacaaaatatgactaaagatattcggacgaatacacaggacaaaactgtaaataagagtgtgattccacgcaagcacagccaaaagcagatcgaagagcacttccgaaacctgcccatgaggggcatgcccgcaagctctctgcagaaagaacgcaaagaaggcctgctcaaagccacaacggtcatccaggacgaagactacatgctgcaggtttatggaaaaccagtttatcagggccatcgcagtactctaaaaaaagggccatacctgaggttcaactctccctcccctaaaagcagaccccagcggcctaaggtgatcgaacgagtgaagggcaccaaggtcaagtcgattcgaacccagactgacttctatgccaccaagccgaagaagatggattccaagatgaaacacagcgtgccagttctaccacatggtgatcagcaatatctcttctccccatcccgagagatgccaactttttctggcacacttgaaggacacctgattcccatggcaatcttgttggggcagacacaaagtaattctgatacgatgccgccagcaggggtgatcgtgagtaagcctcatcctgtgaccgttacaacttctatccccccatcttccagaaaggtcgagactggcgtgaagaaacctaatatcgccatcgttgaaatgaaatcagagaagaaagatcctccccaattaacagtgcaggtactgccgtctgtagacattgactcaatctctaactcgtccgccgatgtcctgagcccactgtcgtctcctaaggaggccagtctgccacccgtgcagacgtggatcaaaacgcctgagataatgaaggtggacgaagaagaggtgaagtttcctggcaccaacttcgatgaaatcattgacgtgatacaggaagaggagaaatgtgacgaaattcccgactccgagcccattctagagtttaatcgatctgtgaaggccgactcaacgaagtacaatgggcctccttttccgcctgtggcctcaacttttcagcctaccgcagatatcctggacaaggttatcgaaagaaaggagacacttgaaaacagcctgatacagtgggtggagcaggaaattatgtccaggattatctcaggtctgttccccgtgcagcaacagatcgcgcctagtatcagcgtgtccgtgagcgagacatccgaaccacttacctcagatattgtagagggaacgtcttcaggtgccttgcaactcttcgtggatgcaggtgtgccagtgaatagcaacgtcatcaagcacttcgtgaacgaggcattagccgaaacaatcgccgtgatgcttggcgacagggaggcaaaaaagcaagggcctgttgccaccggagtaagcggcgacgcctctacaaacgaaacgtacctccctgcacgagtgtgcacaccactccccacgccccagcctactcccccttgcagccccagttctcccgcaaaggaatgcgttcttgtgaaaaccccagatagttcaccgtgcgactccgaccatgacatggcatttcccgttaaagaaatttgtgcagagaagggagatgatatgcctgcaattatgctggtgaacactcctacagtgactccgaccaccacaccccctcccgcagctgccgtgtttactccaacattaagtgatatctccattgacaagctaaaggtttcatcacctgaactgcccaagccatggggtgatggtgacttaccccttgaggaagaaaatccaaactcccctcaagaagagttacaccccagagctatgtag

SEQ ID NO: 87222 - DNA, 4602 bp, Artificial Sequence
  derived and/or modified sequence
atgcctgttaagcgattgcgtgaagtggtatctcagaatcacggagatcacctggttctgctcaaggatgaactgccatgtgtgcccccagccctgtccgccaacaagaggcttcccgtgggcaccggcacctccttgaacggaacatcccggggtagcagcgacctgacgagtgctaggaattgctaccagcctctcctagaaaatcccatggtcagcgaaagtgacttctctaaggacgtggctgttcaggtgcttcctcttgacaaaatagaagagaataataaacaaaaagccaatgatatattcatttcacagtacaccatgggtcagaaagatgcgcttagaacggttctaaaacagaaagcccagtcaatgcctgtgtttaaagaggttaaagtccacctgctcgaagatgcgggaattgagaaggatgcagtgacacaagagacccggatttctcccagcggcatcgatagtgctactaccgtcgccgcagctaccgccgctgccatcgctactgccgcacccctcatcaaggtgcagtccgatttagaggcgaaggtgaattctgttactgagttgctgtcaaaactgcaggaaaccgacaagcacctccagagagtgaccgaacagcagacgtctattcaaagaaaacaggaaaaactccattgtcatgaccatgagaagcagatgaatgtgttcatggaacagcatattaggcatctggaaaaactgcagcagcaacagatcgacatacagacccacttcatttccgcggctctaaaaacatcctcctttcagcccgtgagtatgccatcctcccgagccgttgaaaagtactccgtcaaacccgaacaccctaatctgggctcttgcaacccaagcctatacaatacttttgcgagtaagcaagctcctttgaaggaggtcgaagacaccagcttcgataagcagaagtcgcctttggagacccctgccccaaggcgatttgccccagtaccagtgagcagagacgacgagctctctaaaagggagaacttgctggaggagaaagaaaatatggaagtgagctgccatcggggtaatgttcgactcctggaacagattcttaacaacaacgactcactcactaggaaatcagagtcctcgaacactaccagtcttacacgctcaaaaatagggtggacccctgagaaaacaaatcgatttcctagctgtgaggagcttgaaaccacaaaagtgacaatgcagaagagtgacgacgtgcttcacgatctagggcagaaagaaaaggaaactaatagtatggtgcagccgaaggagtccctatctatgctgaagctaccagacctgccccagaacagtgtcaaattacagaccacaaacacaacgcggagcgttctaaaagacgcggaaaaaatacttagaggggtgcagaacaataaaaaggtgttagaagagaacttggaggccattatcagggcaaaagatggggctgctatgtattcattgatcaatgccttaagcacaaaccgggagatgtccgaaaaaattagaataaggaagacggtcgatgagtggattaaaacgatttctgccgagatccaagatgagttgtcacgcaccgactatgaacagaaacgatttgatcagaaaaatcaaagaactaaaaaggggcaaaatatgactaaggatatcagaacgaatactcaggacaagactgtgaataaatcagtgatcccgcgaaaacactcccagaagcagattgaagagcacttcagaaaccttccgatgcggggaatgcccgctagcagcctacagaaggagagaaaggagggacttctgaaagcaaccactgtcattcaggatgaggattacatgctgcaggtgtatgggaaacctgtgtatcaaggtcaccgtagtaccttgaagaaggggccatatctccggttcaactccccttcccctaagtccaggccacagcgcccaaaggtcattgagcgcgttaaaggcaccaaggtgaagagcatcaggacgcagactgacttctacgccacgaagcctaagaaaatggattcgaagatgaaacactcagtacccgtcctcccccacggtgaccagcagtatctgttcagcccttcccgcgagatgccaacattctctggaaccctggagggacacctgatccctatggccattttactgggtcagacacagagcaactcagacaccatgcctccagcaggagtgatagtatcaaaaccccacccggttaccgtcactacctctattcctccatcgagtagaaaggtggagactggggtgaagaagccgaatattgcaatcgtcgagatgaaaagtgagaaaaaggaccctcctcaactcacagtgcaggttctgcccagcgtagacattgatagcatctccaattccagtgctgatgtgctgtccccgctgtctagccctaaggaggcatcattgccaccagtgcagacctggatcaagacaccagaaatcatgaaggtggacgaagaggaggtcaaattccctggcactaacttcgacgaaatcatcgacgtgattcaggaggaagagaagtgcgatgagattccggattctgaacccatcttagagttcaaccgctcagtgaaagcagattcaaccaaatataacggacctccgttcccgccagtcgcctccacctttcaacccacagctgacatcttggataaagttatcgagcgtaaagagacactggaaaattctctgatccagtgggttgagcaggaaattatgtctcggatcatctcaggcctgttcccagtgcagcagcaaattgccccttcaatcagcgtgagtgtaagcgagaccagcgagccattgactagcgacatagtggagggtacctcaagtggggcactgcaactctttgttgacgcaggagtacccgtgaacagcaatgtgattaagcactttgtcaatgaagcactggctgaaaccattgctgtcatgctgggcgacagggaggctaagaaacaagggcctgtggcaacaggcgtttccggcgatgccagcacaaacgaaacataccttccagctcgcgtgtgcacacccttgcctactccccagcctacacctccttgctctccctcatcccctgcaaaagaatgtgtgctggtcaaaacccccgactcgtccccctgcgactctgaccacgacatggcctttccagtaaaggagatttgtgctgaaaaaggggacgatatgcctgccataatgttggtgaataccccgaccgtcacacccacaactaccccgccacccgcagcagccgtgtttactcctacgctctcagatatctccatcgataagctgaaggtttcgtcaccagagctccccaaaccctggggggacggagatctacccttagaggaggaaaatcctaactccccccaagaagagttgcacccacgggcaattgtgatgtctgtagccaaggacgaggaacccgaaagcatggattttccagctcagccacctccaccagaacctgtacccttcatgccctttcccgcaggtaccaaggccccatccccatcacagatgccgggatcggactcatcgacactggagtcaacactgtcagtgaccgtgacagagactgaaacactcgataagccgatcagcgagggcgaaatcctgtttagctgtgggcaaaagctcgcacccaagatattagaagacattgggttatatctgactaacctgaacgatagcctaagcagtactttgcacgacgccgttgaaatggaggatgacccccctagcgagggccaggtgatccggatgagccataagaagtttcacgcggacgctatcctcagctttgctaaacaaaaccaggagagcgcagtgagccagcaagcggtctatcattcggaggacctggaaaactccgtgggcgagctgtctgagggccagcgtcctcaattgaccgccgcagccgagaatatcctaatggggcactctctgtatatgcagcctccggtgaccaatacgcagtccctggaccagcagtgtgaccctaagccactttcccgacagttcgacaccgtctctggcagtatctacgaagattcttgcgccagccatggaccaatgtctcttggcgaactcgagttggagcccaatagcaaactcgtgctgcctactacccttcttaccgcacaggagaacgatgtcaatcttcccgttgccgctgaagactttagccaataccagcttaagcagaatcaggacgtaaaacaggtcgagcataaaccctcccaatcctatctgagagtgcggaataaaagcgatattgccccatcccagcagcaggtctccccaggagacatggatcgtactcagattgaactgaacccgtatctcacatgtgtgtttagtggcggaaaggccgtacctctatcagcctctcagatgcctccagctaagatgtccgtcatgctgcccagcgtcaacctcgaggattgcagtcagagcctttccctgtcaacgatgcaggaagatatggagtcatctggtgcggacaccttttag

SEQ ID NO: 87223 - DNA, 5064 bp, Artificial Sequence
  derived and/or modified sequence
gtccctaacggtcttcggaagcgaagcagtgtcaacagtccctggtaaacacaagtagtattacaagtcgggagctcttcaagtcttggatgagactgtagagcggtcttgtgcggcaatgtgctaccttaaaataaataaataaataaacccctgttatgtccggagtttgtttccacccggagaggaatggaagagcaccagagagcgcttagctttctggttggatgttttgggctctgaggtcagcttggagaagaaaaaaaagattaagatgccagtgaagagacttcgtgaggtagtttctcaaaatcatggagatcatttggttttgctgaaagatgagttgccctgtgttcctccggcattgtctgcaaataaacgtcttcctgttggaacggggactagtttgaatggaacatcacgtggttcatcagacttaacttctgctagaaattgttaccagcctctattagaaaatcccatggtgtcagaaagtgatttttctaaagacgttgcagtgcaagtgttgcctttggataaaatagaagagaacaacaagcaaaaagcaaatgacatcttcatttctcagtatacaatgggacagaaagatgctctaagaacagttttaaagcaaaaagctcaaagcatgcctgtttttaaggaagtaaaggtacatctgttagaagatgcaggcatagagaaggatgctgttactcaggagactagaatttcacccagtggaattgattcagctacaaccgtggctgcagcaactgctgctgccattgcaaccgcagctccgttgataaaggtgcagagtgatttggaagcaaaagtcaattctgttacagaattacttagtaaattacaggagactgataaacacctgcaacgtgttacagagcagcaaacaagcattcagaggaaacaagagaaattacattgtcatgatcacgaaaagcaaatgaatgtgtttatggagcagcacataaggcatcttgaaaagttacaacaacaacaaatagatattcagactcattttattagtgctgcactcaagactagtagttttcagcctgttagtatgccctcctccagagcagtggaaaagtattccgtaaaaccagaacaccctaatcttggtagctgtaatccatctttatataacacatttgcttccaaacaagcacctttaaaagaagttgaagatacgagttttgataaacagaaatctcctttggagacaccagcacctcgcagatttgctcctgtacctgtttcaagggatgatgaactatcaaagagggaaaatcttttggaagaaaaagaaaatatggaagtgtcgtgtcacagaggaaatgtaagactattggaacaaattttgaataataatgattctttgacaagaaaaagtgaatcatcaaacaccacctcactaactaggtcaaaaataggatggactcctgagaaaacaaacagatttccttcctgtgaagagctagaaacaactaaagtgactatgcagaagtctgatgatgttcttcatgaccttggccaaaaagagaaagaaacaaatagcatggtccagccaaaagaatctctgagtatgttgaagcttccagatcttccacagaattctgttaagcttcaaacaaccaatacaacaagatctgtattgaaagatgctgagaagattttgagaggagtacaaaacaataaaaaagtacttgaagaaaacctggaagctattattcgtgcaaaagatggagctgccatgtattcgcttatcaatgctttatctaccaacagagagatgtcagagaaaattaggatcagaaagacagtggatgaatggattaaaactatttctgcagaaattcaggatgaactgtcaagaacagattatgaacaaaaaagatttgatcagaagaatcagagaaccaagaaaggtcagaatatgactaaagatattagaaccaacacacaagataaaactgtcaacaaatctgtaattccaagaaaacattctcaaaagcaaatagaagagcattttagaaatctacctatgaggggcatgcctgcttcaagtttacagaaagagagaaaggaagggcttttgaaagcaaccacagtaatacaagatgaagattatatgttacaagtctatggaaagccagtttatcagggccatcgaagcactcttaaaaaaggaccatatctcagatttaattctccatctcctaagtccagaccacagagaccaaaagtaatagaacgagttaaaggcactaaggtaaagtcaataagaacacagactgacttctatgcaacaaaacctaagaagatggattctaaaatgaaacattctgttcctgtgttacctcatggcgatcagcaatatttgttcagcccaagtagagaaatgcctactttttcaggtacattggaaggtcatctgattcctatggcaattcttttaggacaaacccaaagtaatagtgataccatgccacctgctggagtgattgtcagcaagccacaccctgtaactgtgactacttctattcctccatcatctcgaaaagtagaaactggagtaaagaaacctaacatagccattgtagaaatgaagtcagaaaaaaaggatcctcctcagcttactgtgcaggtattacccagtgtagatattgacagcatttcaaatagtagtgctgatgtcctttcacctctgtctagccccaaagaagcatctcttcctcctgtgcaaacttggataaagactccagaaattatgaaggtagatgaagaagaggtgaagtttccaggaactaactttgatgaaataatcgatgtcatacaggaagaagaaaaatgtgatgaaattccagactctgaaccaattctggagtttaacagaagtgttaaagctgattctacaaaatataatggtcctccatttccgccagttgcttctacttttcagcccactgctgatattctggataaagtaattgagagaaaagaaacactggaaaatagcttaattcaatgggtagagcaagaaataatgtcaagaattatctctgggctctttccagtccagcaacagattgcacctagtatcagtgtttcagtcagtgagacaagtgaaccactgacttctgacattgtggaaggaacaagcagtggcgccctccagctttttgttgatgctggtgttcctgtgaactcaaatgtgattaaacattttgttaacgaagctcttgctgagaccattgctgtcatgctgggtgacagagaagcaaagaagcaaggtcctgttgctacaggtgtttctggggatgcttcaacaaatgaaacatatttgccggcaagagtgtgcaccccactgcctaccccacagcctacgcctccttgctcaccttcatcacctgctaaggagtgtgttttggtaaagactccagattcttctccctgtgattcggatcatgatatggcttttcctgtgaaagaaatatgtgctgaaaaaggagatgatatgcctgccatcatgcttgttaatactccaacagttacccctactactacacctcctccagcggcggcagtttttaccccaactttgtcagatatttccattgataaattgaaggtatcaagcccagagcttcccaagccatggggtgatggagacctgccactggaagaagagaaccctaactcacctcaagaagaacttcatccaagagctattgtaatgtctgtggctaaggatgaagaaccagagagtatggatttccctgctcagcctccacctccagagccagttccctttatgccatttcctgccggcaccaaggccccttccccctcacagatgccaggttctgattcatcaacactggagagcacattgagtgttactgtcactgaaactgaaactttagataaacccatctctgaaggagagattttatttagctgtggtcaaaaattggcccccaagattttagaagatataggactgtacctgacaaaccttaatgatagcttatccagcactctgcatgatgccgttgaaatggaggatgatcctcctagtgaagggcaagtgattaggatgtcccataaaaaatttcatgcagatgcaattctttcttttgctaaacaaaaccaggagtcagcagtttcccagcaagcagtctatcattcagaggacttggaaaacagtgtgggtgaacttagtgaaggacaaagaccccagctaacagcggcagcagagaacatcttaatgggacattctctctatatgcagccacctgtcactaatacacagtctttggatcaacaatgtgatcctaaaccattatctcggcaatttgacacagtttcaggtagtatttatgaagattcatgtgctagtcatggtccaatgagtttgggagaattggagttggagccaaattctaagctggttcttcccacaacacttctgacagcacaagaaaatgatgttaatttaccagtagccgctgaagatttttcccagtaccaactaaagcaaaatcaggatgttaagcaagttgaacacaaaccatcacaaagttacctacgtgttagaaataaatctgatattgcaccttcacagcaacaagtttcaccaggtgatatggatcggacacaaattgagcttaatccgtacctcacatgtgtattttcaggtgggaaagcagtgccactctccgcttcacagatgccccctgccaagatgtcagtgatgctgccgtcagtgaacctcgaggactgctctcagtctctgagtctcagcacaatgcaggaggacatggagtcttcgggggcagataccttctgaacgggaagagacagccagcacagtgtttatgccactggttttaaagtcattttaccttggcttaaaaccctctctcagactgtttggtttttgagcatattctgaaaaaaaaattccaatattttaaaataaaacaaaaagcataatttgggtatttaaagtttttaaataaaataagtataagtcat

SEQ ID NO: 87224 - protein, 1036 aa, Artificial Sequence
  derived and/or modified sequence
MPVFKEVKVHLLEDAGIEKDAVTQETRISPSGIDSATTVAAATAAAIATAAPLIKVQSDLEAKVNSVTELLSKLQETDKHLQRVTEQQTSIQRKQEKLHCHDHEKQMNVFMEQHIRHLEKLQQQQIDIQTHFISAALKTSSFQPVSMPSSRAVEKYSVKPEHPNLGSCNPSLYNTFASKQAPLKEVEDTSFDKQKSPLETPAPRRFAPVPVSRDDELSKRENLLEEKENMEVSCHRGNVRLLEQILNNNDSLTRKSESSNTTSLTRSKIGWTPEKTNRFPSCEELETTKVTMQKSDDVLHDLGQKEKETNSMVQPKESLSMLKLPDLPQNSVKLQTTNTTRSVLKDAEKILRGVQNNKKVLEENLEAIIRAKDGAAMYSLINALSTNREMSEKIRIRKTVDEWIKTISAEIQDELSRTDYEQKRFDQKNQRTKKGQNMTKDIRTNTQDKTVNKSVIPRKHSQKQIEEHFRNLPMRGMPASSLQKERKEGLLKATTVIQDEDYMLQVYGKPVYQGHRSTLKKGPYLRFNSPSPKSRPQRPKVIERVKGTKVKSIRTQTDFYATKPKKMDSKMKHSVPVLPHGDQQYLFSPSREMPTFSGTLEGHLIPMAILLGQTQSNSDTMPPAGVIVSKPHPVTVTTSIPPSSRKVETGVKKPNIAIVEMKSEKKDPPQLTVQVLPSVDIDSISNSSADVLSPLSSPKEASLPPVQTWIKTPEIMKVDEEEVKFPGTNFDEIIDVIQEEEKCDEIPDSEPILEFNRSVKADSTKYNGPPFPPVASTFQPTADILDKVIERKETLENSLIQWVEQEIMSRIISGLFPVQQQIAPSISVSVSETSEPLTSDIVEGTSSGALQLFVDAGVPVNSNVIKHFVNEALAETIAVMLGDREAKKQGPVATGVSGDASTNETYLPARVCTPLPTPQPTPPCSPSSPAKECVLVKTPDSSPCDSDHDMAFPVKEICAEKGDDMPAIMLVNTPTVTPTTTPPPAAAVFTPTLSDISIDKLKVSSPELPKPWGDGDLPLEEENPNSPQEELHPRAM

SEQ ID NO: 87225 - protein, 1504 aa, Artificial Sequence
  derived and/or modified sequence
MVSESDFSKDVAVQVLPLDKIEENNKQKANDIFISQYTMGQKDALRTVLKQNVSLCLTGWSDHSGVITTHCSLYLLRLMRSSHLSLPSSWDYRAQSMPVFKEVKVHLLEDAGIEKDAVTQETRISPSGIDSATTVAAATAAAIATAAPLIKVQSDLEAKVNSVTELLSKLQETDKHLQRVTEQQTSIQRKQEKLHCHDHEKQMNVFMEQHIRHLEKLQQQQIDIQTHFISAALKTSSFQPVSMPSSRAVEKYSVKPEHPNLGSCNPSLYNTFASKQAPLKEVEDTSFDKQKSPLETPAPRRFAPVPVSRDDELSKRENLLEEKENMEVSCHRGNVRLLEQILNNNDSLTRKSESSNTTSLTRSKIGWTPEKTNRFPSCEELETTKVTMQKSDDVLHDLGQKEKETNSMVQPKESLSMLKLPDLPQNSVKLQTTNTTRSVLKDAEKILRGVQNNKKVLEENLEAIIRAKDGAAMYSLINALSTNREMSEKIRIRKTVDEWIKTISAEIQDELSRTDYEQKRFDQKNQRTKKGQNMTKDIRTNTQDKTVNKSVIPRKHSQKQIEEHFRNLPMRGMPASSLQKERKEGLLKATTVIQDEDYMLQVYGKPVYQGHRSTLKKGPYLRFNSPSPKSRPQRPKVIERVKGTKVKSIRTQTDFYATKPKKMDSKMKHSVPVLPHGDQQYLFSPSREMPTFSGTLEGHLIPMAILLGQTQSNSDTMPPAGVIVSKPHPVTVTTSIPPSSRKVETGVKKPNIAIVEMKSEKKDPPQLTVQVLPSVDIDSISNSSADVLSPLSSPKEASLPPVQTWIKTPEIMKVDEEEVKFPGTNFDEIIDVIQEEEKCDEIPDSEPILEFNRSVKADSTKYNGPPFPPVASTFQPTADILDKVIERKETLENSLIQWVEQEIMSRIISGLFPVQQQIAPSISVSVSETSEPLTSDIVEGTSSGALQLFVDAGVPVNSNVIKHFVNEALAETIAVMLGDREAKKQGPVATGVSGDASTNETYLPARVCTPLPTPQPTPPCSPSSPAKECVLVKTPDSSPCDSDHDMAFPVKEICAEKGDDMPAIMLVNTPTVTPTTTPPPAAAVFTPTLSDISIDKLKVSSPELPKPWGDGDLPLEEENPNSPQEELHPRAIVMSVAKDEEPESMDFPAQPPPPEPVPFMPFPAGTKAPSPSQMPGSDSSTLESTLSVTVTETETLDKPISEGEILFSCGQKLAPKILEDIGLYLTNLNDSLSSTLHDAVEMEDDPPSEGQVIRMSHKKFHADAILSFAKQNQESAVSQQAVYHSEDLENSVGELSEGQRPQLTAAAENILMGHSLYMQPPVTNTQSLDQQCDPKPLSRQFDTVSGSIYEDSCASHGPMSLGELELEPNSKLVLPTTLLTAQENDVNLPVAAEDFSQYQLKQNQDVKQVEHKPSQSYLRVRNKSDIAPSQQQVSPGDMDRTQIELNPYLTCVFSGGKAVPLSASQMPPAKMSVMLPSVNLEDCSQSLSLSTMQEDMESSGADTF

SEQ ID NO: 87226 - DNA, 4515 bp, Artificial Sequence
  derived and/or modified sequence
atggtgagcgagagcgacttcagcaaggacgtggccgtgcaggtgctgcccctggacaagatcgaggagaacaacaagcagaaggccaacgacatcttcatcagccagtacaccatgggccagaaggacgccctgagaaccgtgctgaagcagaacgtgagcctgtgcctgaccggctggagcgaccacagcggcgtgatcaccacccactgcagcctgtacctgctgagactgatgagaagcagccacctgagcctgcccagcagctgggactacagagcccagagcatgcccgtgttcaaggaggtgaaggtgcacctgctggaggacgccggcatcgagaaggacgccgtgacccaggagaccagaatcagccccagcggcatcgacagcgccaccaccgtggccgccgccaccgccgccgccatcgccaccgccgcccccctgatcaaggtgcagagcgacctggaggccaaggtgaacagcgtgaccgagctgctgagcaagctgcaggagaccgacaagcacctgcagagagtgaccgagcagcagaccagcatccagagaaagcaggagaagctgcactgccacgaccacgagaagcagatgaacgtgttcatggagcagcacatcagacacctggagaagctgcagcagcagcagatcgacatccagacccacttcatcagcgccgccctgaagaccagcagcttccagcccgtgagcatgcccagcagcagagccgtggagaagtacagcgtgaagcccgagcaccccaacctgggcagctgcaaccccagcctgtacaacaccttcgccagcaagcaggcccccctgaaggaggtggaggacaccagcttcgacaagcagaagagccccctggagacccccgcccccagaagattcgcccccgtgcccgtgagcagagacgacgagctgagcaagagagagaacctgctggaggagaaggagaacatggaggtgagctgccacagaggcaacgtgagactgctggagcagatcctgaacaacaacgacagcctgaccagaaagagcgagagcagcaacaccaccagcctgaccagaagcaagatcggctggacccccgagaagaccaacagattccccagctgcgaggagctggagaccaccaaggtgaccatgcagaagagcgacgacgtgctgcacgacctgggccagaaggagaaggagaccaacagcatggtgcagcccaaggagagcctgagcatgctgaagctgcccgacctgccccagaacagcgtgaagctgcagaccaccaacaccaccagaagcgtgctgaaggacgccgagaagatcctgagaggcgtgcagaacaacaagaaggtgctggaggagaacctggaggccatcatcagagccaaggacggcgccgccatgtacagcctgatcaacgccctgagcaccaacagagagatgagcgagaagatcagaatcagaaagaccgtggacgagtggatcaagaccatcagcgccgagatccaggacgagctgagcagaaccgactacgagcagaagagattcgaccagaagaaccagagaaccaagaagggccagaacatgaccaaggacatcagaaccaacacccaggacaagaccgtgaacaagagcgtgatccccagaaagcacagccagaagcagatcgaggagcacttcagaaacctgcccatgagaggcatgcccgccagcagcctgcagaaggagagaaaggagggcctgctgaaggccaccaccgtgatccaggacgaggactacatgctgcaggtgtacggcaagcccgtgtaccagggccacagaagcaccctgaagaagggcccctacctgagattcaacagccccagccccaagagcagaccccagagacccaaggtgatcgagagagtgaagggcaccaaggtgaagagcatcagaacccagaccgacttctacgccaccaagcccaagaagatggacagcaagatgaagcacagcgtgcccgtgctgccccacggcgaccagcagtacctgttcagccccagcagagagatgcccaccttcagcggcaccctggagggccacctgatccccatggccatcctgctgggccagacccagagcaacagcgacaccatgccccccgccggcgtgatcgtgagcaagccccaccccgtgaccgtgaccaccagcatcccccccagcagcagaaaggtggagaccggcgtgaagaagcccaacatcgccatcgtggagatgaagagcgagaagaaggaccccccccagctgaccgtgcaggtgctgcccagcgtggacatcgacagcatcagcaacagcagcgccgacgtgctgagccccctgagcagccccaaggaggccagcctgccccccgtgcagacctggatcaagacccccgagatcatgaaggtggacgaggaggaggtgaagttccccggcaccaacttcgacgagatcatcgacgtgatccaggaggaggagaagtgcgacgagatccccgacagcgagcccatcctggagttcaacagaagcgtgaaggccgacagcaccaagtacaacggcccccccttcccccccgtggccagcaccttccagcccaccgccgacatcctggacaaggtgatcgagagaaaggagaccctggagaacagcctgatccagtgggtggagcaggagatcatgagcagaatcatcagcggcctgttccccgtgcagcagcagatcgcccccagcatcagcgtgagcgtgagcgagaccagcgagcccctgaccagcgacatcgtggagggcaccagcagcggcgccctgcagctgttcgtggacgccggcgtgcccgtgaacagcaacgtgatcaagcacttcgtgaacgaggccctggccgagaccatcgccgtgatgctgggcgacagagaggccaagaagcagggccccgtggccaccggcgtgagcggcgacgccagcaccaacgagacctacctgcccgccagagtgtgcacccccctgcccaccccccagcccacccccccctgcagccccagcagccccgccaaggagtgcgtgctggtgaagacccccgacagcagcccctgcgacagcgaccacgacatggccttccccgtgaaggagatctgcgccgagaagggcgacgacatgcccgccatcatgctggtgaacacccccaccgtgacccccaccaccacccccccccccgccgccgccgtgttcacccccaccctgagcgacatcagcatcgacaagctgaaggtgagcagccccgagctgcccaagccctggggcgacggcgacctgcccctggaggaggagaaccccaacagcccccaggaggagctgcaccccagagccatcgtgatgagcgtggccaaggacgaggagcccgagagcatggacttccccgcccagccccccccccccgagcccgtgcccttcatgcccttccccgccggcaccaaggcccccagccccagccagatgcccggcagcgacagcagcaccctggagagcaccctgagcgtgaccgtgaccgagaccgagaccctggacaagcccatcagcgagggcgagatcctgttcagctgcggccagaagctggcccccaagatcctggaggacatcggcctgtacctgaccaacctgaacgacagcctgagcagcaccctgcacgacgccgtggagatggaggacgacccccccagcgagggccaggtgatcagaatgagccacaagaagttccacgccgacgccatcctgagcttcgccaagcagaaccaggagagcgccgtgagccagcaggccgtgtaccacagcgaggacctggagaacagcgtgggcgagctgagcgagggccagagaccccagctgaccgccgccgccgagaacatcctgatgggccacagcctgtacatgcagccccccgtgaccaacacccagagcctggaccagcagtgcgaccccaagcccctgagcagacagttcgacaccgtgagcggcagcatctacgaggacagctgcgccagccacggccccatgagcctgggcgagctggagctggagcccaacagcaagctggtgctgcccaccaccctgctgaccgcccaggagaacgacgtgaacctgcccgtggccgccgaggacttcagccagtaccagctgaagcagaaccaggacgtgaagcaggtggagcacaagcccagccagagctacctgagagtgagaaacaagagcgacatcgcccccagccagcagcaggtgagccccggcgacatggacagaacccagatcgagctgaacccctacctgacctgcgtgttcagcggcggcaaggccgtgcccctgagcgccagccagatgccccccgccaagatgagcgtgatgctgcccagcgtgaacctggaggactgcagccagagcctgagcctgagcaccatgcaggaggacatggagagcagcggcgccgacaccttctag

SEQ ID NO: 87227 - DNA, 4515 bp, Artificial Sequence
  derived and/or modified sequence
atggtgtcagagagcgatttttccaaggacgtggcagtgcaagtgctgcctttagataaaattgaggagaataacaagcagaaagctaatgacattttcatatcacagtacaccatgggtcagaaggatgccctgagaaccgtactgaaacaaaacgtgagtctgtgtctgactgggtggtccgaccattctggcgtcatcactacccactgctcactctatttgcttcgcctgatgagatctagccacttgtcgttgccatccagctgggactatcgggctcagtctatgcccgtgtttaaggaggtaaaagtgcatctgctggaagacgcagggattgaaaaggatgccgttacgcaggagacccgcatcagccccagcggaattgattccgcgaccaccgtggctgctgccaccgccgccgccattgcaactgccgccccgctgatcaaggtccagtcagatcttgaagccaaggttaatagtgtaacggaactgttgtccaagttacaggaaacagacaaacacctccagcgggtaactgagcagcaaaccagtattcagagaaagcaggaaaagttgcattgccacgatcacgagaagcaaatgaacgtgtttatggagcaacacataaggcaccttgagaaactccagcagcagcaaattgatatccagacccacttcataagtgcagccctgaagactagtagcttccagcccgtcagtatgccatcatcaagggccgtggagaagtactctgtgaaaccagagcatcccaatctcggctcatgtaacccatctctgtataatacattcgcttctaaacaggcaccactgaaggaagtggaggacacatccttcgataagcagaagtctccgcttgaaactcccgcaccacgtagattcgcccctgtaccagttagccgagacgacgagttatctaaacgagaaaatctcctggaggagaaggagaacatggaagttagctgtcatagaggaaatgtgcgcttgctcgagcagatactgaataataacgattctctgacccggaaaagtgaaagctcgaacacaacaagtcttactagatccaagattggatggacccctgagaagacaaaccgatttcctagctgtgaagagctggagaccacaaaagtgacgatgcaaaagagcgacgatgtccttcatgacctgggacagaaagagaaggagacgaatagcatggtacaacctaaggagtctctgagtatgctcaagttgcctgatctgccccagaacagcgtgaaactgcaaactaccaacacaacgcgaagcgtccttaaggacgcagagaagattcttcgaggggtccagaacaataagaaggttttggaggaaaatctcgaggccatcatccgtgcaaaggacggagcggcaatgtattctctgattaacgcactgtccaccaaccgtgaaatgtccgaaaagataagaattaggaagaccgtcgatgagtggatcaagaccatcagtgctgaaattcaggatgagctgtcccgcaccgactacgaacagaagagattcgatcagaagaaccagagaaccaaaaaggggcagaacatgactaaagatatccgaaccaacacccaagataagaccgtgaacaagtctgtgataccacggaaacattcccagaaacaaattgaagagcactttcgcaacctacccatgaggggtatgcctgcatcttctctgcagaaagaaaggaaagaaggcctcctaaaagctaccactgtcattcaagatgaggactatatgctccaggtgtatggtaagcctgtgtaccagggacatagatctaccctcaagaaaggcccatacctgcgctttaactcgccttcccctaagtctcggcctcaaaggccgaaggtgatcgagagagtcaaagggaccaaggtcaagtctatacgaactcagaccgacttctatgcgactaagccaaaaaagatggactccaaaatgaagcattcagtgcccgtgttaccccatggcgatcagcaatatctattttcaccctcccgggaaatgccaactttttcgggcacccttgaaggacatctgatccctatggccatccttctgggacaaacccagagcaattccgacaccatgcctcccgctggagtcatagtgagtaagccgcaccccgttactgtgacgacaagcattcctccttcctcgagaaaggtggagacaggagttaagaaacctaatatcgccatagtggagatgaaatctgagaaaaaagaccccccccagctgacagtgcaggtcctgccctctgtagatatcgactccatctcaaattcaagtgccgatgttctttctcccctcagttctccaaaggaagcgtcgctccctccagtccagacctggattaaaactcctgaaatcatgaaggtggacgaagaggaggttaagttcccaggcacaaactttgatgagattatagacgtgatccaggaagaggaaaaatgcgatgaaatccccgacagcgagccaatcctggagtttaatcgcagtgtcaaggcagatagcacaaaatataatggccccccatttccgccagtcgcatctacgtttcagcccaccgccgacatcctcgataaggttattgagcgcaaagaaacactggaaaatagtctgatccaatgggttgagcaagaaataatgagcaggatcattagtggacttttccccgtgcaacagcagatcgcaccttctattagcgtgtctgtttctgagactagtgagccgctgacctctgatattgttgagggcactagctctggagcactgcaactcttcgtggatgcgggggtccccgtgaactctaacgtgatcaaacacttcgtgaatgaagccctagcagaaacaatcgcagtgatgctgggggatcgcgaagctaagaaacagggaccagtagcaacaggcgtcagcggcgacgccagcacaaatgagacctaccttcccgcccgagtgtgtaccccacttccaacacctcagcccacccccccttgcagcccctctagtccggccaaggagtgtgtgttagtaaagacgccagacagcagcccttgtgattcggatcacgacatggctttccccgtgaaggaaatttgtgccgaaaagggcgatgacatgccagctataatgttggtaaatacccccacagttacccccacaaccacccccccaccagccgctgccgtgttcactcccaccctttccgatatctctatagataaactgaaggtgagcagtccggaactgccgaagccatggggcgatggagacctccctttagaagaggaaaaccctaacagcccccaggaagagcttcatccacgggccatagttatgagcgtcgcgaaagatgaggagcctgaatccatggactttccagcccagcctcctcccccggagccagtacccttcatgccatttcccgccgggacgaaggcaccaagcccctcccagatgccgggctccgatagttctacactcgagtccaccctctctgtgacagtgaccgaaaccgaaacactggacaaacctatctcagagggagagattctgtttagctgcggacagaagcttgccccgaaaatcctcgaagatatcggcctgtacctcacaaatctcaacgattcactcagtagcaccctccacgatgccgtggaaatggaagacgatccacctagtgaaggacaggttattaggatgagccacaagaaattccatgccgacgctatcctatcctttgccaaacagaatcaggagagtgccgtcagccagcaggcggtttaccactccgaagatctggaaaatagcgttggagaactctctgagggccagaggccccagctaaccgctgcagctgagaacatcctaatgggtcactccctgtatatgcagcccccggtcacaaacacccagtctctagatcagcaatgcgatccgaagccccttagtcgccaattcgacacagtgtcaggcagcatatacgaagatagttgtgcatctcatggacctatgtcattaggtgagttagagctcgaacccaatagcaagctggttcttcctaccacattgttaaccgctcaggagaacgacgtgaacctaccagtcgctgccgaggatttttcccagtaccagcttaagcagaaccaagatgtgaagcaagtggaacacaaaccgtcccagtcctacctgagagtcagaaacaagagtgatatcgcacccagccagcagcaggtgtcacccggagacatggatcgaacgcagatcgagctgaacccctatctgacttgtgtctttagcggtgggaaggccgtcccactgtcagcttcccagatgccaccggccaagatgtccgtcatgcttcccagcgtgaatctcgaggattgctcccaatctttgagtcttagcacgatgcaagaggatatggaaagtagtggcgccgacaccttctag

SEQ ID NO: 87228 - DNA, 4515 bp, Artificial Sequence
  derived and/or modified sequence
atggtgtctgagagtgacttcagcaaggatgtggccgtgcaggtgctgcccctggacaagattgaggagaacaacaagcagaaggccaatgacatcttcatcagccagtacaccatgggccagaaggatgccctgaggacagtgctgaagcagaatgtgtccctgtgcctgaccggctggagcgaccacagcggggtcatcaccacccactgcagcctgtacctgctgcggctgatgaggagcagccacctgagcctgcccagctcctgggactaccgggcccagagcatgcctgtgttcaaggaggtgaaggtgcacctgctggaggatgctggcatcgagaaggatgctgtgacccaggagacccgcatcagccccagcggcattgattctgccaccaccgtggccgccgccacagctgctgccatcgccacagctgcccccctcatcaaggtgcagagcgacctggaggccaaggtgaacagcgtgacagagctgctgagcaagctgcaggagacagacaagcacctgcagagggtgacagagcagcagaccagcatccagaggaagcaggagaagctgcactgccacgaccacgagaagcagatgaatgtgttcatggagcagcacatccgccacctggagaagctgcagcagcagcagattgacatccagacccacttcatctctgctgccctgaagaccagcagcttccagcctgtgtccatgcccagcagcagagctgtggagaagtacagcgtgaagccagagcaccccaacctgggcagctgcaaccccagcctgtacaacacctttgccagcaagcaggcccccctgaaggaggtggaggacaccagctttgacaagcagaagagccccctggagaccccagcccccaggagatttgcccctgtgcctgtgtccagagatgatgagctgagcaagcgggagaacctgctggaggagaaggagaacatggaggtgtcctgccacagaggaaatgtgcggctgctggagcagatcctgaacaacaatgacagcctgaccaggaagtctgagagcagcaacaccaccagcctgaccaggagcaagattggctggaccccagagaagaccaaccgcttccccagctgtgaggagctggagaccaccaaggtgaccatgcagaagagtgatgatgtgctgcatgacctgggccagaaggagaaggagaccaacagcatggtgcagcccaaggagagcctgtccatgctgaagctgcctgacctgccccagaacagcgtgaagctgcagaccaccaacaccaccaggtctgtgctgaaggatgctgagaagatcctgcggggcgtgcagaacaacaagaaggtgctggaggagaacctggaggccatcatccgggccaaggatggagctgccatgtacagcctcatcaatgccctgagcaccaaccgggagatgtctgagaagatccgcatcaggaagacagtggatgagtggatcaagaccatctctgctgagatccaggatgagctgagcaggacagattatgagcagaagagatttgaccagaagaaccagaggaccaagaagggccagaacatgaccaaggacatccgcaccaacacccaggacaagacagtgaacaagagcgtcatccccaggaagcacagccagaagcagatcgaggagcacttcaggaacctgcccatgaggggcatgcctgccagcagcctgcagaaggagaggaaggagggcctgctgaaggccaccaccgtcatccaggatgaggactacatgctgcaggtgtatggcaagcctgtgtaccagggccacaggagcaccctgaagaagggcccctacctgcgcttcaacagccccagccccaagagccggccccagaggcccaaggtgattgaaagagtgaagggcaccaaggtgaagagcatccgcacccagacagacttctacgccaccaagcccaagaagatggacagcaagatgaagcacagcgtgcctgtgctgccccacggggaccagcagtacctgttcagccccagccgggagatgcccaccttcagcggcaccctggagggccacctgatccccatggccatcctgctgggccagacccagagcaacagcgacaccatgcccccagctggggtgattgtgtccaagccccaccctgtgacagtgaccaccagcatcccccccagcagcaggaaggtggagactggagtgaagaagcccaacatcgccatcgtggagatgaagtctgagaagaaggaccccccccagctgactgtgcaggtgctgcccagcgtggacatcgacagcatcagcaacagcagcgcagatgtgctgagccccctgagcagccccaaggaggccagcctgccccctgtgcagacctggatcaagaccccagagatcatgaaggtggatgaggaggaggtgaagtttcctggcaccaactttgatgagatcattgatgtgatccaggaggaggagaagtgtgatgagatcccagattctgagcccatcctggagttcaacagatctgtgaaggctgacagcaccaagtacaatggaccacccttcccccctgtggccagcaccttccagcccacagctgacatcctggacaaggtgattgaaaggaaggagaccctggagaacagcctcatccagtgggtggagcaggagatcatgagccgcatcatcagcggcctcttccctgtgcagcagcagatcgcccccagcatctctgtgtctgtgtctgagaccagcgagcccctgaccagtgacatcgtggagggcaccagcagcggggccctgcagctgtttgtggatgctggggtgcctgtgaacagcaatgtcatcaagcactttgtgaatgaggccctggccgagaccatcgctgtgatgctgggggaccgggaggccaagaagcagggccctgtggccaccggggtgtctggagatgccagcaccaatgagacctacctgcctgcccgggtgtgcacccccctgcccaccccccagcccaccccaccctgcagccccagcagccctgccaaggaatgtgtgctggtgaagaccccagacagcagcccctgtgacagcgaccatgacatggccttccctgtgaaggagatctgtgccgagaagggagatgacatgcctgccatcatgctggtgaacacccccaccgtgacccccaccaccaccccacctcctgctgctgctgtgttcacccccaccctgagtgacatcagcattgacaagctgaaggtgagcagccctgagctgcccaagccctggggagatggagacctgcccctggaggaggagaaccccaacagcccccaggaggagctgcacccccgggccatcgtgatgtctgtggccaaggatgaggagcctgagagcatggacttccctgcccagcccccacctcctgagcctgtgcccttcatgcccttccctgctggcaccaaggcccccagccccagccagatgcctggcagtgacagcagcaccctggagagcaccctgtctgtgacagtgacagaaacagagaccctggacaagcccatcagcgagggggagatcctcttcagctgtggccagaagctggcccccaagatcctggaggacatcggcctgtacctgaccaacctgaatgacagcctgagcagcaccctgcatgatgctgtggagatggaggatgacccccccagcgagggccaggtgatccgcatgagccacaagaagttccacgcagatgccatcctgagctttgccaagcagaaccaggagagcgctgtgtcccagcaggccgtgtaccacagcgaggacctggagaacagcgtgggggagctgtctgagggccagaggccccagctgacagctgctgctgagaacatcctgatgggccacagcctgtacatgcagccccctgtgaccaacacccagagcctggaccagcagtgtgaccccaagcccctgagccggcagtttgacacagtgtctggcagcatctatgaggacagctgtgccagccacggccccatgagcctgggggagctggagctggagcccaacagcaagctggtgctgcccaccaccctgctgacagcccaggagaatgatgtgaacctgcctgtggccgctgaggacttcagccagtaccagctgaagcagaaccaggatgtgaagcaggtggagcacaagcccagccagagctacctgcgggtgaggaacaagagtgacatcgcccccagccagcagcaggtgtcccctggggacatggacaggacccagatcgagctgaacccctacctgacctgtgtgttcagcggcggcaaggctgtgcccctgagcgccagccagatgcccccagccaagatgtctgtgatgctgcccagcgtgaacctggaggactgcagccagagcctgagcctgagcaccatgcaggaggacatggagagcagtggagctgacaccttctag

SEQ ID NO: 87229 - DNA, 4515 bp, Artificial Sequence
  derived and/or modified sequence
atggtgagcgagagcgacttcagcaaggacgtggccgtgcaggtgctccccctggacaagattgaagagaataacaagcagaaagctaacgacatattcatcagtcagtacactatgggacagaaggacgccctgcgaactgtgcttaagcagaatgtttctctgtgtctgaccgggtggagcgatcacagtggagtgattaccacccactgttctctctatctattacgtctcatgcgctcgagtcacttatccttgccatcttcttgggactacagagcgcagtccatgcctgtgttcaaagaggttaaagttcatcttttggaggatgccggcatcgaaaaagacgccgtgacgcaggagactagaatttcacctagtggcatcgacagcgcaacaactgtcgccgccgccactgcagccgctatcgcgacagccgcccccctgattaaggtgcaatccgatctggaggccaaggttaatagcgtaacagaattgttgtcaaagctccaggaaaccgacaagcaccttcagcgggtgacagaacagcagacatccatccagcgcaaacaggagaaactgcattgccacgatcatgagaagcaaatgaacgtatttatggagcaacatattagacaccttgagaagctccaacagcaacagatagatattcaaacccactttatttccgcagccctgaaaaccagctcctttcagccagtatcaatgccctctagcagagcagtggaaaagtatagtgtgaagcctgagcacccaaacttaggcagctgcaatccaagcctgtataacacattcgcctctaaacaggctcccctgaaagaggtggaagatacctcctttgataaacaaaagtctccactcgaaacacctgccccgcgccgcttcgcaccagtcccagttagtcgcgatgacgaactttcaaagagggaaaacctactggaggaaaaagagaacatggaggtgtcatgccacagggggaacgtgcgattgctggagcagattctcaataataacgacagcctcaccaggaagagtgaaagctctaataccacatctcttacccgcagtaaaatcggatggaccccagagaagactaacagattcccttcgtgcgaggaactggaaactacaaaggtgactatgcagaagagcgatgatgtgctccatgacctgggtcagaaagaaaaggagaccaacagtatggtccagccaaaagagtctctgagcatgctgaagctgcctgatctaccacaaaattctgtcaagcttcaaaccactaatacaacaagaagcgttctgaaggacgctgagaagatattgagaggggtgcagaataataagaaggtactcgaagagaacctagaagccattattagagctaaggacggagcggcgatgtactctctgataaacgccttgtcgaccaacagggaaatgtctgaaaaaatccgtattaggaagactgtggacgagtggatcaaaacaatcagcgcagagatccaagatgagctttctaggacagactatgaacagaaacgattcgaccagaaaaatcagcgcaccaagaagggacaaaatatgactaaggatattagaaccaacactcaggataaaaccgttaataaatcagttataccaaggaaacactctcagaaacagattgaggaacatttccggaatctccccatgcgagggatgccagcgagttcactgcaaaaggaaagaaaagaaggccttctgaaggctaccactgtgattcaggacgaggactacatgttgcaggtgtacgggaagcctgtgtaccagggacaccggtccacactgaagaaggggccctacttgaggtttaactccccctccccaaaaagccgcccacagcgacctaaggtgattgaacgcgttaagggtactaaggtgaaatctattagaactcaaacagatttctacgccactaagcccaaaaagatggattcgaagatgaagcacagtgtgcccgtgttgcctcacggagaccagcagtatctgttcagtcccagcagggaaatgccaacgttttccggaaccttagaaggccacctgatcccaatggccatcctacttggccagacccagtctaactccgacaccatgcctcctgcgggtgttatcgtgtcaaagccccaccctgtgactgttacaaccagcattccaccctcctctagaaaggtggaaaccggagtaaaaaaaccgaatatagccatcgtggagatgaagagcgagaagaaggaccctccacagctcacggtgcaagtacttccgtccgtggacattgactcaattagcaactcgagcgccgacgtgctcagccccctctcctctcctaaggaggcttctttaccccctgtgcaaacatggatcaagaccccagaaattatgaaagtcgacgaggaggaggtgaagttccctgggacaaacttcgacgagatcatcgacgtaattcaggaagaggagaagtgtgacgagatccctgactcagagcctatactggagttcaataggtcagtgaaagcggactctaccaagtacaacggaccccctttccctccagtcgctagcacattccaacccactgcagatattcttgataaggtgattgaaagaaaggagactctggagaactctctgattcagtgggtggagcaggagattatgagtaggattatctctggactctttccagtacagcagcagattgctcctagcatatccgttagcgtgagtgaaactagcgaacctctaacttccgacatagtggagggcacgagctctggcgctttacaattatttgtggatgccggcgtgcctgtaaacagcaacgtgataaaacactttgtgaatgaggcactggccgaaacaatcgcggtgatgcttggagatagggaggctaaaaagcagggtcctgtagctacgggcgtctccggagacgccagcaccaacgagacgtacctccctgcccgagtctgcacccctctaccgacaccacagccgactcccccctgctcccccagttcaccagctaaggaatgtgttctggtgaagacaccagactctagtccatgtgatagcgatcacgatatggctttccccgtgaaggaaatttgcgcggaaaaaggcgacgacatgccagccatcatgctggtaaacaccccaaccgtgactccaactacgacaccacccccggcagccgctgtcttcactccgactctgtccgacatctctatcgataagttgaaagtgtcctcacccgaactgccaaagccttggggagatggagatctaccactggaagaggagaatcctaattcaccccaagaagaactccacccccgggcgatcgttatgtcggtggccaaagacgaagagcctgagagtatggatttccccgcacaacccccgccacccgagccagtgcccttcatgccctttcccgccgggaccaaggccccttccccaagtcaaatgccaggatccgactcttccaccctcgagagtaccctaagcgtgacagtcacagaaactgagacacttgacaaacctatatcagaaggagagatcctgttttcgtgtggacaaaaacttgctcccaagatactcgaagatattggtctttacctgacaaatctgaacgatagcctgtcctctacccttcacgatgcagttgaaatggaagatgaccctccgagtgaaggtcaagtaattagaatgtctcacaaaaagtttcacgccgacgcaattttgagtttcgctaagcaaaatcaagaaagcgccgtctcacagcaagccgtctatcacagtgaagatttagaaaatagtgtaggagagctgtcagagggtcagcggccccagttgacagcggcagcagagaacatcctgatgggccatagcctttatatgcagccacccgtgaccaatactcagagtctcgaccagcaatgtgaccccaagcccctgagccggcagtttgataccgtttcaggctctatttatgaggactcctgcgccagccatggaccaatgagccttggcgaactggaactagagcccaatagcaagttagtccttcctacaacactgctgacagctcaggagaacgatgtaaacttgcctgtggcggctgaagatttttctcagtaccagctgaagcaaaatcaagacgtcaaacaggtggagcataaaccatcccagagttacttgagagtgcgaaataagtccgatattgcaccgagtcagcagcaagtcagtcccggggacatggacaggacccaaatcgagttgaacccttatttgacttgtgtgttctcggggggaaaggccgtgcccctatcagcatcccaaatgccaccggctaagatgagcgttatgttaccatctgtgaacttagaggactgctcacagagcctgagcttgtcaacaatgcaagaggatatggaaagctcgggagccgacacgttctag

SEQ ID NO: 87230 - DNA, 5339 bp, Artificial Sequence
  derived and/or modified sequence
acagtccctggtaaacacaagtagtattacaagtcgggagctcttcaagtcttggatgagactgtagagcggtcttgtgcggcaatgtgctaccttaaaataaataaataaataaacccctgttatgtccggagtttgtttccacccggagaggaatggaagagcaccagagagcgcttagctttctggttggatgttttgggttcatcagacttaacttctgctagaaattgttaccagcctctattagaaaatcccatggtgtcagaaagtgatttttctaaagacgttgcagtgcaagtgttgcctttggataaaatagaagagaacaacaagcaaaaagcaaatgacatcttcatttctcagtatacaatgggacagaaagatgctctaagaacagttttaaagcaaaatgtctcactttgtctcacaggctggagtgatcacagtggggtgatcacaactcactgcagtctctacctcctcaggctcatgagatcctcccacctcagcctcccgagtagctgggactacagagctcaaagcatgcctgtttttaaggaagtaaaggtacatctgttagaagatgcaggcatagagaaggatgctgttactcaggagactagaatttcacccagtggaattgattcagctacaaccgtggctgcagcaactgctgctgccattgcaaccgcagctccgttgataaaggtgcagagtgatttggaagcaaaagtcaattctgttacagaattacttagtaaattacaggagactgataaacacctgcaacgtgttacagagcagcaaacaagcattcagaggaaacaagagaaattacattgtcatgatcacgaaaagcaaatgaatgtgtttatggagcagcacataaggcatcttgaaaagttacaacaacaacaaatagatattcagactcattttattagtgctgcactcaagactagtagttttcagcctgttagtatgccctcctccagagcagtggaaaagtattccgtaaaaccagaacaccctaatcttggtagctgtaatccatctttatataacacatttgcttccaaacaagcacctttaaaagaagttgaagatacgagttttgataaacagaaatctcctttggagacaccagcacctcgcagatttgctcctgtacctgtttcaagggatgatgaactatcaaagagggaaaatcttttggaagaaaaagaaaatatggaagtgtcgtgtcacagaggaaatgtaagactattggaacaaattttgaataataatgattctttgacaagaaaaagtgaatcatcaaacaccacctcactaactaggtcaaaaataggatggactcctgagaaaacaaacagatttccttcctgtgaagagctagaaacaactaaagtgactatgcagaagtctgatgatgttcttcatgaccttggccaaaaagagaaagaaacaaatagcatggtccagccaaaagaatctctgagtatgttgaagcttccagatcttccacagaattctgttaagcttcaaacaaccaatacaacaagatctgtattgaaagatgctgagaagattttgagaggagtacaaaacaataaaaaagtacttgaagaaaacctggaagctattattcgtgcaaaagatggagctgccatgtattcgcttatcaatgctttatctaccaacagagagatgtcagagaaaattaggatcagaaagacagtggatgaatggattaaaactatttctgcagaaattcaggatgaactgtcaagaacagattatgaacaaaaaagatttgatcagaagaatcagagaaccaagaaaggtcagaatatgactaaagatattagaaccaacacacaagataaaactgtcaacaaatctgtaattccaagaaaacattctcaaaagcaaatagaagagcattttagaaatctacctatgaggggcatgcctgcttcaagtttacagaaagagagaaaggaagggcttttgaaagcaaccacagtaatacaagatgaagattatatgttacaagtctatggaaagccagtttatcagggccatcgaagcactcttaaaaaaggaccatatctcagatttaattctccatctcctaagtccagaccacagagaccaaaagtaatagaacgagttaaaggcactaaggtaaagtcaataagaacacagactgacttctatgcaacaaaacctaagaagatggattctaaaatgaaacattctgttcctgtgttacctcatggcgatcagcaatatttgttcagcccaagtagagaaatgcctactttttcaggtacattggaaggtcatctgattcctatggcaattcttttaggacaaacccaaagtaatagtgataccatgccacctgctggagtgattgtcagcaagccacaccctgtaactgtgactacttctattcctccatcatctcgaaaagtagaaactggagtaaagaaacctaacatagccattgtagaaatgaagtcagaaaaaaaggatcctcctcagcttactgtgcaggtattacccagtgtagatattgacagcatttcaaatagtagtgctgatgtcctttcacctctgtctagccccaaagaagcatctcttcctcctgtgcaaacttggataaagactccagaaattatgaaggtagatgaagaagaggtgaagtttccaggaactaactttgatgaaataatcgatgtcatacaggaagaagaaaaatgtgatgaaattccagactctgaaccaattctggagtttaacagaagtgttaaagctgattctacaaaatataatggtcctccatttccgccagttgcttctacttttcagcccactgctgatattctggataaagtaattgagagaaaagaaacactggaaaatagcttaattcaatgggtagagcaagaaataatgtcaagaattatctctgggctctttccagtccagcaacagattgcacctagtatcagtgtttcagtcagtgagacaagtgaaccactgacttctgacattgtggaaggaacaagcagtggcgccctccagctttttgttgatgctggtgttcctgtgaactcaaatgtgattaaacattttgttaacgaagctcttgctgagaccattgctgtcatgctgggtgacagagaagcaaagaagcaaggtcctgttgctacaggtgtttctggggatgcttcaacaaatgaaacatatttgccggcaagagtgtgcaccccactgcctaccccacagcctacgcctccttgctcaccttcatcacctgctaaggagtgtgttttggtaaagactccagattcttctccctgtgattcggatcatgatatggcttttcctgtgaaagaaatatgtgctgaaaaaggagatgatatgcctgccatcatgcttgttaatactccaacagttacccctactactacacctcctccagcggcggcagtttttaccccaactttgtcagatatttccattgataaattgaaggtatcaagcccagagcttcccaagccatggggtgatggagacctgccactggaagaagagaaccctaactcacctcaagaagaacttcatccaagagctattgtaatgtctgtggctaaggatgaagaaccagagagtatggatttccctgctcagcctccacctccagagccagttccctttatgccatttcctgccggcaccaaggccccttccccctcacagatgccaggttctgattcatcaacactggagagcacattgagtgttactgtcactgaaactgaaactttagataaacccatctctgaaggagagattttatttagctgtggtcaaaaattggcccccaagattttagaagatataggactgtacctgacaaaccttaatgatagcttatccagcactctgcatgatgccgttgaaatggaggatgatcctcctagtgaagggcaagtgattaggatgtcccataaaaaatttcatgcagatgcaattctttcttttgctaaacaaaaccaggagtcagcagtttcccagcaagcagtctatcattcagaggacttggaaaacagtgtgggtgaacttagtgaaggacaaagaccccagctaacagcggcagcagagaacatcttaatgggacattctctctatatgcagccacctgtcactaatacacagtctttggatcaacaatgtgatcctaaaccattatctcggcaatttgacacagtttcaggtagtatttatgaagattcatgtgctagtcatggtccaatgagtttgggagaattggagttggagccaaattctaagctggttcttcccacaacacttctgacagcacaagaaaatgatgttaatttaccagtagccgctgaagatttttcccagtaccaactaaagcaaaatcaggatgttaagcaagttgaacacaaaccatcacaaagttacctacgtgttagaaataaatctgatattgcaccttcacagcaacaagtttcaccaggtgatatggatcggacacaaattgagcttaatccgtacctcacatgtgtattttcaggtgggaaagcagtgccactctccgcttcacagatgccccctgccaagatgtcagtgatgctgccgtcagtgaacctcgaggactgctctcagtctctgagtctcagcacaatgcaggaggacatggagtcttcgggggcagataccttctgaacgggaagagacagccagcacagtgtttatgccactggttttaaagtcattttaccttggcttaaaaccctctctcagactgtttggtttttgagcatattctgaaaaaaaaattccaatattttaaaataaaacaaaaagcataatttgggtatttaaagtttttaaataaaataagtataagtcattataagtctgattgtgagttgtttcttagaatcctgagatagcatagagtagtgaaagggcatggcttttgacatctaggcatttaatctataggtgtaattatctgtatgtatttataaaattatgtagctcaaggttattcattctaacatttttataacagcaaatagaaaaaatcaaatgtctatcaataatagactggttttaaagtgatggtacatcagtacaatggaatactatgtattacaaaaaaaaatttaaaaagtttattgatatggaataatctttgagatgcactgttaaagtgaaaaaagccatgtgcaaaatagtgtgtgaactatgcagttgttgaaattatttaaaatggggtggggagg

SEQ ID NO: 87231 - DNA, 4515 bp, Artificial Sequence
  derived and/or modified sequence
atggtgagcgagagcgatttctctaaggacgtggctgtccaggtactccctctggacaagatcgaggagaataataagcagaaagctaatgacatcttcatctcccagtacaccatgggtcaaaaggacgccttgcgaaccgttctcaaacagaacgtgtccctctgcttaaccggctggtccgatcactcaggcgttatcaccacgcactgcagtctttatttgctgcggcttatgcgttcatcccacttgagtctgcccagttcttgggattatcgcgcacagtctatgcctgtgtttaaggaagtaaaagtgcatctgttagaagatgcagggatcgagaaagacgcagtgactcaggagacaagaatctctcccagcggcatcgatagtgcaaccacggtggcggcagcaacagcggctgctatagcaacagcagcaccgctgatcaaggttcaatccgacctcgaagcaaaggtgaatagcgtgacggaattgcttagtaagctccaggaaacagataagcacctgcagagggtgaccgagcaacagacatctattcaacgcaagcaggagaagcttcattgccacgaccacgaaaaacagatgaatgttttcatggaacagcatatccggcacttagaaaagctgcagcaacagcagattgatatccagactcattttatctctgctgctttaaagacaagttcatttcaacctgtatcaatgccttctagcagggccgtagaaaagtactcggtgaagccagaacatcccaacctgggttcttgcaatcccagcctgtacaacacctttgccagcaaacaggctcctctgaaggaagtggaagatactagcttcgataagcaaaaaagccctcttgagacaccagccccaagaagatttgctcctgtccctgtgtcacgcgacgatgagctcagtaagcgggagaatctgcttgaagagaaagagaacatggaggttagctgtcacagaggcaacgtgaggcttctcgagcagatcctcaataataatgattccttgacccggaagtctgagtctagcaacacaactagcttgactagatcgaaaatcggctggacccctgaaaagactaatcgattcccttcctgcgaggagctggaaactactaaggtcactatgcagaaatcagatgacgtactccatgatctcgggcaaaaagagaaggaaactaacagcatggtgcagcccaaggaaagcttaagcatgttaaagctgcctgacctcccccagaatagcgtgaagctgcagaccactaatactacacgttccgtcttgaaggatgccgagaaaatcttgagaggcgtgcagaataacaaaaaggtgttagaggagaacctggaagccattattcgggcaaaagacggcgctgccatgtactcactcatcaatgcgctctcaaccaatagggagatgtcagagaagatcagaattagaaaaaccgtggacgaatggattaaaacaatatctgcggagatacaagacgaattgagccgcactgactacgagcagaagaggttcgatcaaaagaaccagaggactaaaaaaggacagaacatgaccaaagacatccggaccaacacacaggacaagaccgtcaataaatccgtgatccctcggaagcactctcagaaacagatcgaagaacacttccggaatctgcctatgcggggaatgcctgcctcgtccctacaaaaggagaggaaggagggtcttctgaaggcaaccaccgtcatacaggatgaggactatatgctgcaggtctacggaaaaccagtgtatcaaggtcaccgtagcacactgaaaaaaggtccttatcttaggttcaattccccttctccaaagagcaggccacaaaggccgaaagttatcgagcgggttaagggcacaaaagtgaaatccatcagaactcagactgacttctacgcaaccaagccaaagaagatggattctaaaatgaagcatagtgtgcccgttctgcctcatggggaccagcagtacctcttctcccccagcagggaaatgccaaccttttccggtacactggagggacacctgatacccatggccatcctgcttgggcagacccagtctaactcagacacaatgccccctgcgggtgtcattgttagcaagcctcaccctgttacagtcaccacttccatacctccctccagtcgaaaagtcgaaaccggggttaaaaaacctaatatcgcaatcgtggaaatgaaatctgaaaaaaaagatccacctcaactgactgttcaagttctgcctagtgtagacattgactccatatctaactcctcggcggacgtgctgtcacctctgagctcgcctaaggaggctagcttgccaccagtacagacctggatcaagacaccagagattatgaaagtagacgaggaggaggtgaagtttcccggtactaatttcgacgaaataatagacgtaatacaggaggaggagaaatgcgacgagatacccgactcggagccgattctggagttcaacagatctgtgaaagcagatagcactaagtacaacgggccacccttcccaccggtggcctcaacatttcagccgactgctgatattctggataaggtaatcgaacgcaaagaaaccctagagaatagtttaatccagtgggtcgagcaggagatcatgagccggattatctcaggtttgttccctgtccagcagcagatcgccccttccatctcggtgtcagtgtcagagacaagtgagcctctcacctctgatatcgtggaggggacttcatctggagcattgcagctgtttgtggacgcaggcgtaccagtcaatagcaatgttatcaagcactttgtgaatgaagccctggcagagacaattgctgtgatgctcggagacagggaagcaaaaaaacaaggcccagttgcgacaggggtatccggcgatgcttcaaccaatgaaacatatctgcctgcgagagtctgtactccactgcccaccccccagccaacccccccttgcagccccagtagcccggcaaaagaatgcgttttggtaaagacccctgacagttcaccctgtgattccgaccatgacatggctttccccgttaaggaaatatgcgctgagaaaggcgatgacatgcccgctatcatgctggtaaacacaccaaccgtgaccccaactaccacgccgcctcccgcagcagcagtatttacacctaccctatctgacatcagtatagacaaactgaaagtcagctcccctgaactgccaaaaccttggggtgatggagatctacccttggaggaggaaaaccccaactctccacaagaggaactgcaccccagggcaatcgtcatgagtgttgccaaagatgaagagccagaatccatggattttcctgcacagcctcccccacccgaacctgttccgttcatgccattccctgccggaacgaaagccccatcaccttcccagatgcccggatccgattctagcaccctagagtcaacgctttctgtaacagtgactgagactgaaaccttagataagccaatttcagagggagagattctcttctcctgcggccagaaactggcccctaaaatacttgaagacatcggcctgtacctcacaaacttgaacgatagtctgagctcaaccttgcatgacgctgtagagatggaggacgacccaccatccgaaggccaagtcattagaatgtcacataagaagttccacgccgacgccatccttagcttcgccaaacaaaaccaggaaagcgccgtctcacaacaagccgtgtaccactccgaggatctggaaaattcagtgggcgagctttcagagggccaaagaccacagctgactgccgcagccgaaaacatcttgatggggcacagcctgtatatgcaaccacctgtgaccaacacccaatctctcgatcagcagtgtgacccaaagcctctgtcccgccagttcgatacggtatccggcagtatatatgaagactcctgcgcttcacatggcccaatgagcctcggcgaactggaactggaaccgaactccaaattggtactgccaacaaccctccttaccgcacaggagaacgacgtcaatcttcccgtggccgctgaggatttttctcagtaccagctgaaacagaatcaggatgtgaagcaagtcgaacacaagcccagtcagtcgtacctgcgggtcaggaacaagtccgacatcgctccaagccagcaacaggtaagccctggcgatatggaccgcacccagatagagctgaatccatatttgacttgcgtgttttcaggaggtaaggccgtgcccctgtccgcctcacagatgcctcctgctaaaatgtcagtgatgctgccttcggttaatctggaggactgtagccagtccttaagtctcagtacgatgcaggaagatatggagagttctggcgctgacacgttctag

SEQ ID NO: 87232 - DNA, 3476 bp, Artificial Sequence
  derived and/or modified sequence
aaaaatgttattcttagtagaaatggggaaatatcaaagaggagtaagtttaagagttctgtgatgcccttaaaagtcgacggggaagtccagcagctggagatgagctcaaagcatgcctgtttttaaggaagtaaaggtacatctgttagaagatgcaggcatagagaaggatgctgttactcaggagactagaatttcacccagtggaattgattcagctacaaccgtggctgcagcaactgctgctgccattgcaaccgcagctccgttgataaaggtgcagagtgatttggaagcaaaagtcaattctgttacagaattacttagtaaattacaggagactgataaacacctgcaacgtgttacagagcagcaaacaagcattcagaggaaacaagagaaattacattgtcatgatcacgaaaagcaaatgaatgtgtttatggagcagcacataaggcatcttgaaaagttacaacaacaacaaatagatattcagactcattttattagtgctgcactcaagactagtagttttcagcctgttagtatgccctcctccagagcagtggaaaagtattccgtaaaaccagaacaccctaatcttggtagctgtaatccatctttatataacacatttgcttccaaacaagcacctttaaaagaagttgaagatacgagttttgataaacagaaatctcctttggagacaccagcacctcgcagatttgctcctgtacctgtttcaagggatgatgaactatcaaagagggaaaatcttttggaagaaaaagaaaatatggaagtgtcgtgtcacagaggaaatgtaagactattggaacaaattttgaataataatgattctttgacaagaaaaagtgaatcatcaaacaccacctcactaactaggtcaaaaataggatggactcctgagaaaacaaacagatttccttcctgtgaagagctagaaacaactaaagtgactatgcagaagtctgatgatgttcttcatgaccttggccaaaaagagaaagaaacaaatagcatggtccagccaaaagaatctctgagtatgttgaagcttccagatcttccacagaattctgttaagcttcaaacaaccaatacaacaagatctgtattgaaagatgctgagaagattttgagaggagtacaaaacaataaaaaagtacttgaagaaaacctggaagctattattcgtgcaaaagatggagctgccatgtattcgcttatcaatgctttatctaccaacagagagatgtcagagaaaattaggatcagaaagacagtggatgaatggattaaaactatttctgcagaaattcaggatgaactgtcaagaacagattatgaacaaaaaagatttgatcagaagaatcagagaaccaagaaaggtcagaatatgactaaagatattagaaccaacacacaagataaaactgtcaacaaatctgtaattccaagaaaacattctcaaaagcaaatagaagagcattttagaaatctacctatgaggggcatgcctgcttcaagtttacagaaagagagaaaggaagggcttttgaaagcaaccacagtaatacaagatgaagattatatgttacaagtctatggaaagccagtttatcagggccatcgaagcactcttaaaaaaggaccatatctcagatttaattctccatctcctaagtccagaccacagagaccaaaagtaatagaacgagttaaaggcactaaggtaaagtcaataagaacacagactgacttctatgcaacaaaacctaagaagatggattctaaaatgaaacattctgttcctgtgttacctcatggcgatcagcaatatttgttcagcccaagtagagaaatgcctactttttcaggtacattggaaggtcatctgattcctatggcaattcttttaggacaaacccaaagtaatagtgataccatgccacctgctggagtgattgtcagcaagccacaccctgtaactgtgactacttctattcctccatcatctcgaaaagtagaaactggagtaaagaaacctaacatagccattgtagaaatgaagtcagaaaaaaaggatcctcctcagcttactgtgcaggtattacccagtgtagatattgacagcatttcaaatagtagtgctgatgtcctttcacctctgtctagccccaaagaagcatctcttcctcctgtgcaaacttggataaagactccagaaattatgaaggtagatgaagaagaggtgaagtttccaggaactaactttgatgaaataatcgatgtcatacaggaagaagaaaaatgtgatgaaattccagactctgaaccaattctggagtttaacagaagtgttaaagctgattctacaaaatataatggtcctccatttccgccagttgcttctacttttcagcccactgctgatattctggataaagtaattgagagaaaagaaacactggaaaatagcttaattcaatgggtagagcaagaaataatgtcaagaattatctctgggctctttccagtccagcaacagattgcacctagtatcagtgtttcagtcagtgagacaagtgaaccactgacttctgacattgtggaaggaacaagcagtggcgccctccagctttttgttgatgctggtgttcctgtgaactcaaatgtgattaaacattttgttaacgaagctcttgctgagaccattgctgtcatgctgggtgacagagaagcaaagaagcaaggtcctgttgctacaggtgtttctggggatgcttcaacaaatgaaacatatttgccggcaagagtgtgcaccccactgcctaccccacagcctacgcctccttgctcaccttcatcacctgctaaggagtgtgttttggtaaagactccagattcttctccctgtgattcggatcatgatatggcttttcctgtgaaagaaatatgtgctgaaaaaggagatgatatgcctgccatcatgcttgttaatactccaacagttacccctactactacacctcctccagcggcggcagtttttaccccaactttgtcagatatttccattgataaattgaaggtatcaagcccagagcttcccaagccatggggtgatggagacctgccactggaagaagagaaccctaactcacctcaagaagaacttcatccaagagctatgtaaatgagaacatactcactagtaactgtacatttcaacttatgtttgacttatgtgatccattgaaaacatagaaatattatacaaagctttataaaccacagactaccttatactttgaaagaaagaactttcataagtgttgagttttgaaaaattatcaaattataccttcaccttttttcttaaaaggtttgaaatagctagaaataaaggtatctattatattgttaataaaatagaaaacaatttc

SEQ ID NO: 87233 - DNA, 582 bp, Artificial Sequence
  derived and/or modified sequence
atgaacatcttcatgaccttcgtgatcaacgtgctgcggaagaacctgttccatgggttcatggtgatcacacaggccccagttagaattcttcccagtcaggagagaattagaactccatgccacagccccgcaatcctattgtctagttgccgggtgctaagtggaaataattgtataatggccgctcttacaagtgtcatcaaacgcaatctccttttctttcgccttgatttgtttccactatggctgatctttctgtacattgttaaaatgggagacttcccctccgcccccactcatcttaacactgccgccatttgcacatgtctgctgcctatccccctgggcacgcatagcgacctgctttcagtgtcctgcagttggtttcacctgtttgagaaaggtccccctctttcgtataagcatcttgttcgacaggtgcatcctctaatgaatgctgacacggccgccggaggctttgtatatacttgcaaggacaagctcaggagcctgctcttcggcgaggtaaaggaggacggcaacgggtgcttcatatgcatgtccttggagcagtgctag

SEQ ID NO: 87234 - protein, 514 aa, Artificial Sequence
  derived and/or modified sequence
MVWEVKTNQMPNAVQKLLLVMDKRASGMNDSLELLQCNENLPSSPGYNSCDEHMELDDLPELQAVQSDPTQSGMYQLSSDVSHQEYPRSSWNQNTSDIPETTYRENEVDWLTELANIATSPQSPLMQCSFYNRSSPVHIIATSKSLHSYARPPPVSSSSKSEPAFPHHHWKEETPVRHERANSESESGIFCMSSLSDDDDLGWCNSWPSTVWHCFLKGTRLCFHKGSNKEWQDVEDFARAEGCDNEEDLQMGIHKGYGSDGLKLLSHEESVSFGESVLKLTFDPGTVEDGLLTVECKLDHPFYVKNKGWSSFYPSLTVVQHGIPCCEVHIGDVCLPPGHPDAINFDDSGVFDTFKSYDFTPMDSSAVYVLSSMARQRRASLSCGGPGGQDFARSGFSKNCGSPGSSQLSSNSLYAKAVKNHSSGTVSATSPNKCKRPMNAFMLFAKKYRVEYTQMYPGKDNRAISVILGDRWKKMKNEERRMYTLEAKALAEEQKRLNPDCWKRKRTNSGSQQH

SEQ ID NO: 87235 - protein, 124 aa, Artificial Sequence
  derived and/or modified sequence
MVWEVKTNQMPNAVQKLLLVMDKRASGMNDSLELLQCNENLPSSPGYNSCDEHMELDDLPELQAVQSDPTQSGMYQLSSDVSHQEYPRSSWNQNTSDIPETTYRENEVDWLTELANIATSPQSP

SEQ ID NO: 87236 - protein, 70 aa, Artificial Sequence
  derived and/or modified sequence
MVWEVKTNQMPNAVQKLLLVMDKRASGMNDSLELLQCNENLPSSPGYNSCDEHMELDDLPELQAVQSDPT

SEQ ID NO: 87237 - protein, 108 aa, Artificial Sequence
  derived and/or modified sequence
MVWEVKTNQMPNAVQKLLLVMDKRASGMNDSLELLQCNENLPSSPGYNSCDEHMELDDLPELQAVQSDPTQSGMYQLSSDVSHQEYPRSSWNQNTSDIPETTYRENEV

SEQ ID NO: 87238 - protein, 454 aa, Artificial Sequence
  derived and/or modified sequence
QMPNAVQKLLLVMDKRASGMNDSLELLQCNENLPSSPGYNSCDEHMELDDLPELQAVQSDPTQSGMYQLSSDVSHQEYPRSSWNQNTSDIPETTYRENEVDWLTELANIATSPQSPLMQCSFYNRSSPVHIIATSKSLHSYARPPPVSSSSKSEPAFPHHHWKEETPVRHERANSESESGIFCMSSLSDDDDLGWCNSWPSTVWHCFLKGTRLCFHKGSNKEWQDVEDFARAEGCDNEEDLQMGIHKGYGSDGLKLLSHEESVSFGESVLKLTFDPGTVEDGLLTVECKLDHPFYVKNKGWSSFYPSLTVVQHGIPCCEVHIGDVCLPPGHPDAINFDDSGVFDTFKSYDFTPMDSSAVYVLSSMARQRRASLSCGGPGGQDFARSGFSKNCGSPGSSQLSSNSLYAKAVKNHSSGTVSATSPNKCKRPMNAFMLFAKKYRVEYTQMYPGKDNR

SEQ ID NO: 87239 - DNA, 87 bp, Artificial Sequence
  derived and/or modified sequence
atggtctgggaggtgaaaacaaaccagatgcccaacgcagtgcagaagctgctcctcgtcatggataagagagcatctggcatgtag

SEQ ID NO: 87240 - DNA, 87 bp, Artificial Sequence
  derived and/or modified sequence
atggtgtgggaggtgaagaccaaccagatgcccaatgctgtgcagaagctgctgctggtgatggacaagagggccagcggcatgtag

SEQ ID NO: 87241 - DNA, 87 bp, Artificial Sequence
  derived and/or modified sequence
atggtgtgggaggtgaagaccaaccagatgcccaacgccgtgcagaaattgctcctcgtgatggacaagcgggctagcggcatgtag

SEQ ID NO: 87242 - DNA, 87 bp, Artificial Sequence
  derived and/or modified sequence
atggtatgggaagttaagacaaaccagatgccgaacgctgtacagaaactgctacttgtgatggacaagagagcctctggcatgtag

SEQ ID NO: 87243 - DNA, 87 bp, Artificial Sequence
  derived and/or modified sequence
atggtgtgggaggtgaagaccaaccagatgcccaacgccgtgcagaagctgctgctggtgatggacaagagagccagcggcatgtag

SEQ ID NO: 87244 - DNA, 2829 bp, Artificial Sequence
  derived and/or modified sequence
ggcgacgggtttggtaagtaggaaagtttcggttgaggagtaagagctgccgcgggagcagtaacccgcgcgggggaggccgacgtcggtcggagagggggtacgagagctgctggtggtgttgtcgtggccggagcggcccgcgcctgggctgccggcacttcgcggcagtcagagcaccataacatggtgtgggaagtgaagacaaatcagatgcctaatgcagtacagaaactcctgttggtgatggacaagagagcctcaggaatgaatgactcattggagttgctgcagtgtaatgagaatttgccatcttcacctggatataactcctgtgatgaacacatggagcttgatgaccttcctgaacttcaggcagttcaaagtgatcctacccaatctggcatgtaccagctgagttcagatgtttcacatcaagaatacccaagatcatcttggaaccaaaatacctcagacataccagaaactacttaccgtgaaaatgaggtggactggctaacagaattggcaaatatcgcgaccagtccacaaagtccactgatgcagtgctcattttacaatagatcatctcctgtacacatcatagccactagcaaaagtttacattcctatgcacgccctccaccagtgtcctcttcttcgaagagtgaaccagccttccctcatcaccattggaaggaggaaacaccagtaagacacgaaagggcaaatagtgagtcagaatctggcattttctgcatgtcctccctgtcagatgatgatgatttgggatggtgcaattcctggccttcaactgtctggcactgttttttgaaaggcacacgactgtgctttcataagggaagcaataaggaatggcaagatgttgaagattttgctagagctgaaggctgtgataatgaggaagatcttcaaatgggcattcacaagggctatggttctgatggtctaaagttgttatcacatgaagaaagtgtatcatttggcgagtctgtactgaagttgacttttgatcctggtacagtagaagatggtttacttaccgtagagtgtaagctggaccaccctttctatgttaaaaataaaggttggtcatcattttatccaagcttgactgtggtacagcatggcattccatgttgtgaagttcatattggcgatgtatgtctacctcctggacaccccgatgccattaattttgatgattcaggtgtttttgatacatttaaaagctatgacttcacacctatggattcttctgcagtttatgtgttaagtagtatggctcgccagcgtcgtgcatctttgtcttgtggaggacctggtggtcaagactttgcaagatctggattcagtaaaaactgtggctcacctggatcatcacagctctcttccaattctttgtatgctaaagctgtcaaaaaccacagctcagggactgtgagtgccacttctcctaataagtgcaaaagaccaatgaatgccttcatgctttttgccaaaaaatacagagttgaatatactcagatgtatccagggaaagataacagagccataagtgtgatccttggtgacaggtggaagaaaatgaagaatgaagagagaagaatgtacacattagaagcaaaggctttggctgaagaacagaaacgtttaaatcctgactgttggaagaggaaaagaaccaattcaggctcacaacaacattaaaccaggatgcttatgttcttaagtctatatttgcatatacattgactcttgatggaaagacttaagaagatcaaggtctcaccatttgtcctcaattcgtgtgaccataagatactgatagcattgagtcttgaaatgatttaataatatgagtgaggatttgctttctccattagagcattaagctaaaactatcaacattttaaaccaaattgccttatttttcttccaaacttcatatatgtctatcaggtaataataggcttgaaaattgatatcctgtggtgctaaagtacagtagaaagagaggagaagtgtatacatgttttattttaaattgtacgaaaggggaatttaaaaaatatgtaactgctgtttatacattggctccttactgcttattaatctgtattgtacacatgatgaaatgaagcagaagctgggagtcggcctttcctctagtaaccaccacatggctcagcatctgtgccaaacataggcgctcctagtctggtcagtgccaagaggctaccagaacatggggcaggtggctggtgttggtgtcccagcctaagagccacctgctgcagttaccatggcatgctgagttgatgcaccaggtggcagcagccatccgttattatttccaatggagacctagcccaggccaaggtaaagttagttaatagcattgggatatagtcactgtaatggtgctattaacaaacagtcaacaccattgtattttttaacttcgtgttctgtatctcctcagccatgtatcttaaatatattttgtcatcataatctttatggtgggggcagactttgcacttactgcagtgcaacacttgcactttaattttcctccaactgtctaaaattagagcaaatacattggcaatacagctgcttttgctctgagctacaatcatggcttttcatgttacttaccaagtggtgtttctggttaggaatcacagctgtaaaattgatttcagttcatcacacttcttcatgatgttgcccctaaattttgcacactatattcttgtatattatttcaaataaatggaaaaaaaagttgcttatctctga

SEQ ID NO: 87245 - DNA, 478 bp, Artificial Sequence
  derived and/or modified sequence
gaaagacttggtaatggcgacgggtttggtttgtgtactgcccaaattgcatggcttgacatcatttcttaatgtcgtttttattttaagtcagagcaccataacatggtgtgggaagtgaagacaaatcagatgcctaatgcagtacagaaactcctgttggtgatggacaagagagcctcaggaatgaatgactcattggagttgctgcagtgtaatgagaatttgccatcttcacctggatataactcctgtgatgaacacatggagcttgatgaccttcctgaacttcaggcagttcaaagtgatcctacccaatctggcatgtaccagctgagttcagatgtttcacatcaagaatacccaagatcatcttggaaccaaaatacctcagacataccagaaactacttaccgtgaaaatgaggtggactggctaacagaattggcaaatatcgcgaccagtccacaaagtccac

SEQ ID NO: 87246 - DNA, 573 bp, Artificial Sequence
  derived and/or modified sequence
agttcgaatgaatgggctcccaggcgcctgcgcgctggggctgagccgaggggaaaaacaagcccggagtccgggctgcggtcacatgatggggggaagggaggggaacgcgatgaatggcgaaagagggtgggggatggacttggcgtgaaccgggaggcaccgctctgtgtgacccaaagaggaggcttggcaggcgattccagtctccgcctttcaacctatgctgccaccgcaggccgattgaaacaaaacaaaacaaaccaggcgaagtggacagccaggtttttgtagctttaaatgctgcgtgctgtctagggtgtttcactctccgctgtgcactctacactcgagttcattcttagggagttttcagctacagtcgtttttagaaggagcactgacagcgaggtttgtgtactgcccaaattgcatggcttgacatcatttcttaatgtcgtttttattttaagtcagagcaccataacatggtgtgggaagtgaagacaaatcagatgcctaatgcagtacagaaactcctgttggtgatggacaagagagcctcaggaatga

SEQ ID NO: 87247 - DNA, 2704 bp, Artificial Sequence
  derived and/or modified sequence
aacccccagggggttgaggggagggggaagacgaagcttgaaagacttggtaatggcgacgggtttgtcagagcaccataacatggtgtgggaagtgaagacaaatcagatgcctaatgcagtacagaaactcctgttggtgatggacaagagagcctcaggaatgaatgactcattggagttgctgcagtgtaatgagaatttgccatcttcacctggatataactcctgtgatgaacacatggagcttgatgaccttcctgaacttcaggcagttcaaagtgatcctacccaatctggcatgtaccagctgagttcagatgtttcacatcaagaatacccaagatcatcttggaaccaaaatacctcagacataccagaaactacttaccgtgaaaatgaggtggactggctaacagaattggcaaatatcgcgaccagtccacaaagtccactgatgcagtgctcattttacaatagatcatctcctgtacacatcatagccactagcaaaagtttacattcctatgcacgccctccaccagtgtcctcttcttcgaagagtgaaccagccttccctcatcaccattggaaggaggaaacaccagtaagacacgaaagggcaaatagtgagtcagaatctggcattttctgcatgtcctccctgtcagatgatgatgatttgggatggtgcaattcctggccttcaactgtctggcactgttttttgaaaggcacacgactgtgctttcataagggaagcaataaggaatggcaagatgttgaagattttgctagagctgaaggctgtgataatgaggaagatcttcaaatgggcattcacaagggctatggttctgatggtctaaagttgttatcacatgaagaaagtgtatcatttggcgagtctgtactgaagttgacttttgatcctggtacagtagaagatggtttacttaccgtagagtgtaagctggaccaccctttctatgttaaaaataaaggttggtcatcattttatccaagcttgactgtggtacagcatggcattccatgttgtgaagttcatattggcgatgtatgtctacctcctggacaccccgatgccattaattttgatgattcaggtgtttttgatacatttaaaagctatgacttcacacctatggattcttctgcagtttatgtgttaagtagtatggctcgccagcgtcgtgcatctttgtcttgtggaggacctggtggtcaagactttgcaagatctggattcagtaaaaactgtggctcacctggatcatcacagctctcttccaattctttgtatgctaaagctgtcaaaaaccacagctcagggactgtgagtgccacttctcctaataagtgcaaaagaccaatgaatgccttcatgctttttgccaaaaaatacagagttgaatatactcagatgtatccagggaaagataacagagccataagtgtgatccttggtgacaggtggaagaaaatgaagaatgaagagagaagaatgtacacattagaagcaaaggctttggctgaagaacagaaacgtttaaatcctgactgttggaagaggaaaagaaccaattcaggctcacaacaacattaaaccaggatgcttatgttcttaagtctatatttgcatatacattgactcttgatggaaagacttaagaagatcaaggtctcaccatttgtcctcaattcgtgtgaccataagatactgatagcattgagtcttgaaatgatttaataatatgagtgaggatttgctttctccattagagcattaagctaaaactatcaacattttaaaccaaattgccttatttttcttccaaacttcatatatgtctatcaggtaataataggcttgaaaattgatatcctgtggtgctaaagtacagtagaaagagaggagaagtgtatacatgttttattttaaattgtacgaaaggggaatttaaaaaatatgtaactgctgtttatacattggctccttactgcttattaatctgtattgtacacatgatgaaatgaagcagaagctgggagtcggcctttcctctagtaaccaccacatggctcagcatctgtgccaaacataggcgctcctagtctggtcagtgccaagaggctaccagaacatggggcaggtggctggtgttggtgtcccagcctaagagccacctgctgcagttaccatggcatgctgagttgatgcaccaggtggcagcagccatccgttattatttccaatggagacctagcccaggccaaggtaaagttagttaatagcattgggatatagtcactgtaatggtgctattaacaaacagtcaacaccattgtattttttaacttcgtgttctgtatctcctcagccatgtatcttaaatatattttgtcatcataatctttatggtgggggcagactttgcacttactgcagtgcaacacttgcactttaattttcctccaactgtctaaaattagagcaaatacattggcaatacagctgcttttgctctgagctacaatcatggcttttcatgttacttaccaagtggtgtttctggttaggaatcacagctgtaaaattgatttcagttcatcacacttcttcatgatgttgcccctaaattttgcacactatattcttgtatattatttcaaataaatggaa

SEQ ID NO: 87248 - DNA, 563 bp, Artificial Sequence
  derived and/or modified sequence
gacgaagcttgaaagacttggtaatggcgacgggtttggagttttgggatggtggttgataactaagacaaagtgctgaagaaatgatagaagttgcaaagagacgttagtgtactatacttggtgaatgttggaaactgcaggacctgctgtagggaagaaaaaagttctagctggaaagaatgaggaaaccaaagagctctgcagagggagggggaagacaagacagactgcagctgtgcttctgtggaccccaagaacagcactgttcatacacagaggatagctctgaagagagatacctgtgtagtgcagcttctaaatttcataataaagtcagagcaccataacatggtgtgggaagtgaagacaaatcagatgcctaatgcagtacagaaactcctgttggtgatggacaagagagcctcaggaatgaatgactcattggagttgctgcagtgtaatgagaatttgccatcttcacctggatataactcctgtgatgaacacatggagcttgatgaccttcctgaacttcaggcagttcaaagtgatcctaccca

SEQ ID NO: 87249 - DNA, 601 bp, Artificial Sequence
  derived and/or modified sequence
gctcggcgtggtggcatgtgcctgtaatcccccctacttaggtggctgaggcgggagaatcgcttgaacccaggaggtggagtttgcagtgagccgagatcacgccactgcactgcagtctgggtgacagagtgtgactatgtctcaaaaaaaaaacaaaacaacattgtcatgtctctgatttattttaggtttgtgtactgcccaaattgcatggcttgacatcatttcttaatgtcgtttttattttaagtcagagcaccataacatggtgtgggaagtgaagacaaatcagatgcctaatgcagtacagaaactcctgttggtgatggacaagagagcctcaggaatgaatgactcattggagttgctgcagtgtaatgagaatttgccatcttcacctggatataactcctgtgatgaacacatggagcttgatgaccttcctgaacttcaggcagttcaaagtgatcctacccaatctggcatgtaccagctgagttcagatgtttcacatcaagaatacccaagatcatcttggaaccaaaatacctcagacataccagaaactacttaccgtgaaaatgaggtggactggcta

SEQ ID NO: 87250 - DNA, 2420 bp, Artificial Sequence
  derived and/or modified sequence
aaaaacaagcccggagtccgggctgcggtcacatgatggggggaagggaggggaacgcgatgaatggcgaaagagggtgggggatggacttggcgtgaaccgggaggcaccgctctgtgtgacccaaagaggaggcttggcaggcgattccagtctccgcctttcaacctatgctgccaccgcaggccgattgaaacaaaacaaaacaaaccaggcgaagtggacagccaggtttttgtagctttaaatgctgcgtgctgtctagggtgtttcactctccgctgtgcactctacactcgagttcattcttagggagttttcagctacagtcgtttttagaaggagcactgacagcgaggagttttgggatggtggttgataactaagacaaagtgctgaagaaatgatagaagttgcaaagagacgttagtgtactatacttggtgaatgttggaaactgcaggacctgctgtagggaagaaaaaagttctagctggaaagaatgaggaaaccaaagagctctgcagagggagggggaagacaagacagactgcagctgtgcttctgtggaccccaagaacagcactgttcatacacagaggatagctctgaagagagatacctgtgtagtgcagcttctaaatttcataataaagtcagagcaccataacatggtgtgggaagtgaagacaaatcagatgcctaatgcagtacagaaactcctgttggtgatggacaagagagcctcaggaatgaatgactcattggagttgctgcagtgtaatgagaatttgccatcttcacctggatataactcctgtgatgaacacatggagcttgatgaccttcctgaacttcaggcagttcaaagtgatcctacccaatctggcatgtaccagctgagttcagatgtttcacatcaagaatacccaagatcatcttggaaccaaaatacctcagacataccagaaactacttaccgtgaaaatgaggtggactggctaacagaattggcaaatatcgcgaccagtccacaaagtccactgatgcagtgctcattttacaatagatcatctcctgtacacatcatagccactagcaaaagtttacattcctatgcacgccctccaccagtgtcctcttcttcgaagagtgaaccagccttccctcatcaccattggaaggaggaaacaccagtaagacacgaaagggcaaatagtgagtcagaatctggcattttctgcatgtcctccctgtcagatgatgatgatttgggatggtgcaattcctggccttcaactgtctggcactgttttttgaaaggcacacgactgtgctttcataagggaagcaataaggaatggcaagatgttgaagattttgctagagctgaaggctgtgataatgaggaagatcttcaaatgggcattcacaagggctatggttctgatggtctaaagttgttatcacatgaagaaagtgtatcatttggcgagtctgtactgaagttgacttttgatcctggtacagtagaagatggtttacttaccgtagagtgtaagctggaccaccctttctatgttaaaaataaaggttggtcatcattttatccaagcttgactgtggtacagcatggcattccatgttgtgaagttcatattggcgatgtatgtctacctcctggacaccccgatgccattaattttgatgattcaggtgtttttgatacatttaaaagctatgacttcacacctatggattcttctgcagtttatgtgttaagtagtatggctcgccagcgtcgtgcatctttgtcttgtggaggacctggtggtcaagactttgcaagatctggattcagtaaaaactgtggctcacctggatcatcacagctctcttccaattctttgtatgctaaagctgtcaaaaaccacagctcagggactgtgagtgccacttctcctaataagtgcaaaagaccaatgaatgccttcatgctttttgccaaaaaatacagagttgaatatactcagatgtatccagggaaagataacagagccataagtgtgatccttggtgacaggtggaagaaaatgaagaatgaagagagaagaatgtacacattagaagcaaaggctttggctgaagaacagaaacgtttaaatcctgactgttggaagaggaaaagaaccaattcaggctcacaacaacattaaaccaggatgcttatgttcttaagtctatatttgcatatacattgactcttgatggaaagacttaagaagatcaaggtctcaccatttgtcctcaattcgtgtgaccataagatactgatagcattgagtcttgaaatgatttaataatatgagtgaggatttgctttctccattagagcattaagctaaaactatcaacatttt

SEQ ID NO: 87251 - DNA, 702 bp, Artificial Sequence
  derived and/or modified sequence
ggggaaaaacaagcccggagtccgggctgcggtcacatgatggggggaagggaggggaacgcgatgaatggcgaaagagggtgggggatggacttggcgtgaaccgggaggcaccgctctgtgtgacccaaagaggaggcttggcaggcgattccagtctccgcctttcaacctatgctgccaccgcaggccgattgaaacaaaacaaaacaaaccaggcgaagtggacagccaggtttttgtagctttaaatgctgcgtgctgtctagggtgtttcactctccgctgtgcactctacactcgagttcattcttagggagttttcagctacagtcgtttttagaaggagcactgacagcgagtcagagcaccataacatggtgtgggaagtgaagacaaatcagatgcctaatgcagtacagaaactcctgttggtgatggacaagagagcctcaggaatgaatgactcattggagttgctgcagtgtaatgagaatttgccatcttcacctggatataactcctgtgatgaacacatggagcttgatgaccttcctgaacttcaggcagttcaaagtgatcctacccaatctggcatgtaccagctgagttcagatgtttcacatcaagaatacccaagatcatcttggaaccaaaatacctcagacataccagaaactacttaccgtgaaaatgaggtgg

SEQ ID NO: 87252 - protein, 330 aa, Artificial Sequence
  derived and/or modified sequence
MSAKSRTIGIIGAPFSKGQPRGGVEEGPTVLRKAGLLEKLKEQVTQNFLILECDVKDYGDLPFADIPNDSPFQIVKNPRSVGKASEQLAGKVAEVKKNGRISLVLGGDHSLAIGSISGHARVHPDLGVIWVDAHTDINTPLTTTSGNLHGQPVSFLLKELKGKIPDVPGFSWVTPCISAKDIVYIGLRDVDPGEHYILKTLGIKYFSMTEVDRLGIGKVMEETLSYLLGRKKRPIHLSFDVDGLDPSFTPATGTPVVGGLTYREGLYITEEIYKTGLLSGLDIMEVNPSLGKTPEEVTRTVNTAVAITLACFGLAREGNHKPIDYLNPPK

SEQ ID NO: 87253 - DNA, 993 bp, Artificial Sequence
  derived and/or modified sequence
atgagcgccaagagcagaaccatcggcatcatcggcgcccccttcagcaagggccagcccagaggcggcgtggaggagggccccaccgtgctgagaaaggccggcctgctggagaagctgaaggagcaggtgacccagaacttcctgatcctggagtgcgacgtgaaggactacggcgacctgcccttcgccgacatccccaacgacagccccttccagatcgtgaagaaccccagaagcgtgggcaaggccagcgagcagctggccggcaaggtggccgaggtgaagaagaacggcagaatcagcctggtgctgggcggcgaccacagcctggccatcggcagcatcagcggccacgccagagtgcaccccgacctgggcgtgatctgggtggacgcccacaccgacatcaacacccccctgaccaccaccagcggcaacctgcacggccagcccgtgagcttcctgctgaaggagctgaagggcaagatccccgacgtgcccggcttcagctgggtgaccccctgcatcagcgccaaggacatcgtgtacatcggcctgagagacgtggaccccggcgagcactacatcctgaagaccctgggcatcaagtacttcagcatgaccgaggtggacagactgggcatcggcaaggtgatggaggagaccctgagctacctgctgggcagaaagaagagacccatccacctgagcttcgacgtggacggcctggaccccagcttcacccccgccaccggcacccccgtggtgggcggcctgacctacagagagggcctgtacatcaccgaggagatctacaagaccggcctgctgagcggcctggacatcatggaggtgaaccccagcctgggcaagacccccgaggaggtgaccagaaccgtgaacaccgccgtggccatcaccctggcctgcttcggcctggccagagagggcaaccacaagcccatcgactacctgaacccccccaagtag

SEQ ID NO: 87254 - DNA, 1468 bp, Artificial Sequence
  derived and/or modified sequence
tgtcactgagggttgactgactggagagctcaagtgcagcaaagagaagtgtcagagcatgagcgccaagtccagaaccatagggattattggagctcctttctcaaagggacagccacgaggaggggtggaagaaggccctacagtattgagaaaggctggtctgcttgagaaacttaaagaacaagtaactcaaaactttttaattttagagtgtgatgtgaaggattatggggacctgccctttgctgacatccctaatgacagtccctttcaaattgtgaagaatccaaggtctgtgggaaaagcaagcgagcagctggctggcaaggtggcagaagtcaagaagaacggaagaatcagcctggtgctgggcggagaccacagtttggcaattggaagcatctctggccatgccagggtccaccctgatcttggagtcatctgggtggatgctcacactgatatcaacactccactgacaaccacaagtggaaacttgcatggacaacctgtatctttcctcctgaaggaactaaaaggaaagattcccgatgtgccaggattctcctgggtgactccctgtatatctgccaaggatattgtgtatattggcttgagagacgtggaccctggggaacactacattttgaaaactctaggcattaaatacttttcaatgactgaagtggacagactaggaattggcaaggtgatggaagaaacactcagctatctactaggaagaaagaaaaggccaattcatctaagttttgatgttgacggactggacccatctttcacaccagctactggcacaccagtcgtgggaggtctgacatacagagaaggtctctacatcacagaagaaatctacaaaacagggctactctcaggattagatataatggaagtgaacccatccctggggaagacaccagaagaagtaactcgaacagtgaacacagcagttgcaataaccttggcttgtttcggacttgctcgggagggtaatcacaagcctattgactaccttaacccacctaagtaaatgtggaaacatccgatataaatctcatagttaatggcataattagaaagctaatcattttcttaagcatagagttatccttctaaagacttgttctttcagaaaaatgtttttccaattagtataaactctacaaattccctcttggtgtaaaattcaagatgtggaaattctaacttttttgaaatttaaaagcttatattttctaacttggcaaaagacttatccttagaaagagaagtgtacattgatttccaattaaaaatttgctggcattaaaaataagcacacttacataagcccccatacatagagtgggactcttggaatcaggagacaaagctaccacatgtggaaaggtactatgtgtccatgtcattcaaaaaatgtgattttttataataaactctttataac

SEQ ID NO: 87255 - DNA, 993 bp, Artificial Sequence
  derived and/or modified sequence
atgagtgcaaaaagtaggaccattggcataatcggagcccccttttccaagggacaacctagagggggagtagaagagggccccaccgtcttacgtaaagctggcctgctcgagaaactcaaggaacaggtgactcagaactttctgattctggagtgtgacgtaaaggattatggagacctgccattcgcagatattccaaacgacagcccatttcagatcgttaaaaaccctagaagtgtaggtaaggcctccgaacagctcgccggcaaggtcgccgaggtcaagaaaaatgggcggatttctctcgtgttaggaggagatcactccttggctataggcagtatctcaggccatgctagagtgcaccctgacttgggtgtgatttgggtggatgcacacactgacatcaatacacccctcaccacaaccagcggaaacctacacgggcagccagtaagttttctgctcaaagagttgaaaggcaaaatcccagacgtacccggctttagctgggtgaccccctgtattagtgccaaggacatcgtctacatcggcctgagggacgttgatcctggggagcactacattctgaaaactctgggaatcaaatatttctcgatgaccgaggtggatcgattgggcattgggaaagtgatggaggagaccttgtcttatctgctcggtaggaagaagaggccaatacacctgtctttcgatgtcgacggtttggaccccagcttcacaccggccactgggacacctgtggttggcggacttacctacagggaaggcctgtatattactgaggagatatacaagaccgggctgctgtctggccttgatataatggaggtcaatccaagcctcgggaaaaccccggaagaggtgacacgcaccgtaaacactgctgttgcgatcactctggcgtgcttcgggttagcccgagagggcaaccacaagccgatagactaccttaaccccccgaaatag

SEQ ID NO: 87256 - DNA, 993 bp, Artificial Sequence
  derived and/or modified sequence
atgtctgccaagagcaggaccatcggcatcattggagcccccttcagcaagggccagccccggggcggcgtggaggagggccccaccgtgctgaggaaggccggcctgctggagaagctgaaggagcaggtgacccagaacttcctgatcctggagtgtgatgtgaaggactatggagacctgccctttgctgacatccccaatgacagccccttccagatcgtgaagaaccccaggtctgtgggcaaggccagcgagcagctggccggcaaggtggccgaggtgaagaagaatggccgcatcagcctggtgctgggcggggaccacagcctggccatcggcagcatcagcggccacgcccgggtgcacccagacctgggcgtcatctgggtggatgcccacacagacatcaacacccccctgaccaccaccagcggcaacctgcacggccagcctgtgtccttcctgctgaaggagctgaagggcaagatcccagatgtgcccggcttctcctgggtgaccccctgcatcagcgccaaggacatcgtgtacatcggcctgagagatgtggaccccggggagcactacatcctgaagaccctgggcatcaagtacttctccatgacagaggtggaccggctgggcatcggcaaggtgatggaggagaccctgagctacctgctgggcaggaagaagaggcccatccacctgagctttgatgtggatggcctggaccccagcttcaccccagccaccggcacccctgtggtgggcggcctgacctaccgggagggcctgtacatcacagaggagatctacaagacaggcctgctgagcggcctggacatcatggaggtgaaccccagcctgggcaagaccccagaggaggtgaccaggacagtgaacacagctgtggccatcaccctggcctgcttcggcctggcccgggagggcaaccacaagcccatcgactacctgaacccccccaagtag

SEQ ID NO: 87257 - DNA, 993 bp, Artificial Sequence
  derived and/or modified sequence
atgagcgccaagagccggaccatcggcatcatcggcgcccccttcagtaaggggcagcctcggggaggcgtggaagaaggacctacagtgctccgaaaggcaggcttactggagaagctaaaggagcaggttacgcaaaatttcctcattcttgaatgcgacgtgaaggattacggcgatctgccctttgccgatatccctaatgacagcccattccagatagtgaagaatccacgtagtgtggggaaagccagtgaacagttggctggaaaggttgctgaagttaaaaaaaacggacgcatttctctggtactggggggggatcactccctggccattggctctatctctggacatgctagagtgcaccctgatttaggcgtgatttgggttgacgcgcacacagatatcaatactcccctgactacaacgtccggcaacttgcacggccaaccagtttcctttctccttaaggagctgaaaggcaaaattcccgatgtcccggggttcagctgggtgacaccatgcatcagcgctaaggatatagtgtacattggactccgggatgtagacccaggggagcattatatactgaagaccctgggcatcaagtatttctccatgaccgaggtagatcgcctcggaatcggcaaggtcatggaggaaaccctgagctatttactgggtagaaaaaaaagacccatccatctgtcattcgatgtggatgggctcgatccgtccttcactccggctaccggtacaccagttgtaggcggcctgacatatagagaggggctatacattaccgaagagatatataagaccggcctgctgtcaggcctggacataatggaagtgaatccatctcttggcaagaccccggaagaggtcacacggacagtcaacactgcagtggctattacactcgcatgttttgggctcgccagagaaggcaaccataaaccgatagattacctgaatcccccgaagtag

SEQ ID NO: 87258 - DNA, 993 bp, Artificial Sequence
  derived and/or modified sequence
atgtcggccaaatccagaactattggaatcattggggctccttttagcaaaggccaaccaagagggggtgtcgaagagggcccaacagttttacggaaggcaggacttctcgagaaattgaaagagcaggtgacgcagaacttcctcattctcgagtgcgacgtcaaggactacggggaccttccattcgcggatatccccaacgactctccctttcaaattgtgaagaaccccagaagtgtgggcaaggccagtgagcagctcgctggcaaagtggcagaagtgaaaaagaacggtcgtattagcctggtgctcggcggagatcattcattagcgattgggagcataagtgggcacgctagggtccatccggatttgggcgttatctgggtggacgcacataccgatatcaatacaccgctaacaactaccagtgggaatctgcacgggcagccggtgtctttcctattgaaggaactgaaggggaaaattccggacgttccgggattttcttgggtgacgccgtgcatttctgcaaaggacattgtctacattggactgagggatgtagatcctggtgaacactacattttgaaaacccttggaattaagtacttctctatgaccgaggtggacaggctgggcattggtaaggtgatggaagagaccctatcttacctgctcggacgtaagaagcgacccatccacctcagctttgacgtggacgggctggatcccagttttacaccagccaccgggacccccgtggtgggcggtctgacctacagggaagggttatatatcaccgaagaaatatataagactgggctgttgtcaggccttgacatcatggaggtcaatccttccctcgggaagacccctgaagaagttaccagaacggtaaatactgctgtggcgatcacactggcctgctttggcctggctcgggaaggtaaccacaagcctatagactatctcaatccccctaaatag

SEQ ID NO: 87259 - DNA, 300 bp, Artificial Sequence
  derived and/or modified sequence
atggaccggtctattccccccggcttagtcaacggcttggcgttacaactgcgcaacacttcacgaagcgaggaagaccggaaccgtgacctggcaaccgccctcgaacagctgcttcaggcatacccccgcgacatggagaaagagaaaaccatgctggtcttggcactcttactggcaaaaaaagttgcatctcatacaccgtccctgctcagagatgttttccatacgaccgtcaacttcattaatcagaatcttcgaacctatgttcggagtttagccagaaacgggatggattag

SEQ ID NO: 87260 - DNA, 300 bp, Artificial Sequence
  derived and/or modified sequence
atggacaggtccataccaccagggctcgttaatggacttgcgctccaactcaggaataccagtaggtctgaggaggaccgtaaccgagacctggctacagctttggagcaactgctccaagcctacccacgagatatggaaaaggagaagaccatgctcgtcttagccttgctgcttgctaaaaaagtagctagtcataccccttcactgctgagggatgtgtttcacaccactgtgaacttcattaatcaaaatctgaggacgtatgtcagaagcctcgcgagaaatggaatggactag

SEQ ID NO: 87261 - DNA, 300 bp, Artificial Sequence
  derived and/or modified sequence
atggacaggagcatccccccaggcctggtgaatggcctggccctgcagctgaggaacaccagccgctcagaagaagatagaaacagagacctggccacagccctggagcagctgctgcaggcctacccccgggacatggagaaggagaagaccatgctggtgctggccctgctgctggccaagaaggtggccagccacacccccagcctgctgagagatgtgttccacaccaccgtgaacttcatcaaccagaacctgcggacctacgtgcgcagcctggccagaaatggcatggactag

SEQ ID NO: 87262 - DNA, 300 bp, Artificial Sequence
  derived and/or modified sequence
atggaccggagcatcccccccggcctggtgaacggcctggccctgcaactgcggaatacttcaaggtcagaagaggacagaaaccgcgacctcgctacagccctcgagcaactgctccaggcgtacccccgcgatatggagaaagaaaagaccatgcttgttctggccttgttgttggccaagaaggtggcatcccatactccttctttgctgcgcgatgtgttccacaccacggtcaattttattaatcagaacctacgcacttatgtgaggtcgctggcaagaaatggcatggattag

SEQ ID NO: 87263 - DNA, 300 bp, Artificial Sequence
  derived and/or modified sequence
atggaccggagcatcccccccggcctggtgaacggcctggccctgcaactgcgaaatacctccagaagcgaagaagacaggaatagagacttagccacagccctcgaacagctgctccaggcctaccctcgggacatggaaaaagagaaaaccatgctggtgctcgccttactgctggcaaaaaaagtcgcgtcccacaccccttccctcttaagggatgtcttccatactactgtgaactttatcaaccaaaacttaaggacgtacgtgaggtcccttgccagaaacggaatggattag

SEQ ID NO: 87264 - DNA, 300 bp, Artificial Sequence
  derived and/or modified sequence
atggacaggtccattcctccaggactggtgaatggcctagcgctgcagttgagaaatacaagtagatccgaggaggacaggaatagagatctggccaccgccctcgagcagctgctgcaagcatatcctagagacatggagaaggagaagacaatgctcgttcttgccctgttgctcgccaaaaaagtggcgtcccacactcctagcttgctcagggatgtgttccataccaccgtgaacttcatcaatcagaatttgcgcacctacgtgcgcagcctggcaagaaatggtatggactag

SEQ ID NO: 87265 - DNA, 300 bp, Artificial Sequence
  derived and/or modified sequence
atggatagatcgatacctccaggcctcgtgaacgggttagccctacagctgcgaaacacctctcgtagtgaggaagaccggaacagagacttggctaccgcgctggaacagctcctccaggcctatcctagggacatggaaaaagaaaagacaatgctcgtgttggcccttctcctggccaagaaagtagcatcacacaccccctcactcctgcgggatgtatttcacacgactgttaacttcatcaaccagaatttgcggacctacgtccgttccctggctaggaatggaatggactag

SEQ ID NO: 87266 - DNA, 300 bp, Artificial Sequence
  derived and/or modified sequence
atggacagaagcatcccccccggcctggtgaacggcctggccctgcagctgagaaacaccagcagaagcgaggaggacagaaacagagacctggccaccgccctggagcagctgctgcaggcctaccccagagacatggagaaggagaagaccatgctggtgctggccctgctgctggccaagaaggtggccagccacacccccagcctgctgagagacgtgttccacaccaccgtgaacttcatcaaccagaacctgagaacctacgtgagaagcctggccagaaacggcatggactag

SEQ ID NO: 87267 - protein, 3859 aa, Artificial Sequence
  derived and/or modified sequence
MAFVATQGATVVDQTTLMKKYLQFVAALTDVNTPDETKLKMMQEVSENFENVTSSPQYSTFLEHIIPRFLTFLQDGEVQFLQEKPAQQLRKLVLEIIHRIPTNEHLRPHTKNVLSVMFRFLETENEENVLICLRIIIELHKQFRPPITQEIHHFLDFVKQIYKELPKVVNRYFENPQVIPENTVPPPEMVGMITTIAVKVNPEREDSETRTHSIIPRGSLSLKVLAELPIIVVLMYQLYKLNIHNVVAEFVPLIMNTIAIQVSAQARQHKLYNKELYADFIAAQIKTLSFLAYIIRIYQELVTKYSQQMVKGMLQLLSNCPAETAHLRKELLIAAKHILTTELRNQFIPCMDKLFDESILIGSGYTARETLRPLAYSTLADLVHHVRQHLPLSDLSLAVQLFAKNIDDESLPSSIQTMSCKLLLNLVDCIRSKSEQESGNGRDVLMRMLEVFVLKFHTIARYQLSAIFKKCKPQSELGAVEAALPGVPTAPAAPGPAPSPAPVPAPPPPPPPPPPATPVTPAPVPPFEKQGEKDKEDKQTFQVTDCRSLVKTLVCGVKTITWGITSCKAPGEAQFIPNKQLQPKETQIYIKLVKYAMQALDIYQVQIAGNGQTYIRVANCQTVRMKEEKEVLEHFAGVFTMMNPLTFKEIFQTTVPYMVERISKNYALQIVANSFLANPTTSALFATILVEYLLDRLPEMGSNVELSNLYLKLFKLVFGSVSLFAAENEQMLKPHLHKIVNSSMELAQTAKEPYNYFLLLRALFRSIGGGSHDLLYQEFLPLLPNLLQGLNMLQSGLHKQHMKDLFVELCLTVPVRLSSLLPYLPMLMDPLVSALNGSQTLVSQGLRTLELCVDNLQPDFLYDHIQPVRAELMQALWRTLRNPADSISHVAYRVLGKFGGSNRKMLKESQKLHYVVTEVQGPSITVEFSDCKASLQLPMEKAIETALDCLKSANTEPYYRRQAWEVIKCFLVAMMSLEDNKHALYQLLAHPNFTEKTIPNVIISHRYKAQDTPARKTFEQALTGAFMSAVIKDLRPSALPFVASLIRHYTMVAVAQQCGPFLLPCYQVGSQPSTAMFHSEENGSKGMDPLVLIDAIAICMAYEEKELCKIGEVALAVIFDVASIILGSKERACQLPLFSYIVERLCACCYEQAWYAKLGGVVSIKFLMERLPLTWVLQNQQTFLKALLFVMMDLTGEVSNGAVAMAKTTLEQLLMRCATPLKDEERAEEIVAAQEKSFHHVTHDLVREVTSPNSTVRKQAMHSLQVLAQVTGKSVTVIMEPHKEVLQDMVPPKKHLLRHQPANAQIGLMEGNTFCTTLQPRLFTMDLNVVEHKVFYTELLNLCEAEDSALTKLPCYKSLPSLVPLRIAALNALAACNYLPQSREKIIAALFKALNSTNSELQEAGEACMRKFLEGATIEVDQIHTHMRPLLMMLGDYRSLTLNVVNRLTSVTRLFPNSFNDKFCDQMMQHLRKWMEVVVITHKGGQRSDGNESISECGRCPLSPFCQFEEMKICSAIINLFHLIPAAPQTLVKPLLEVVMKTERAMLIEAGSPFREPLIKFLTRHPSQTVELFMMEATLNDPQWSRMFMSFLKHKDARPLRDVLAANPNRFITLLLPGGAQTAVRPGSPSTSTMRLDLQFQAIKIISIIVKNDDSWLASQHSLVSQLRRVWVSENFQERHRKENMAATNWKEPKLLAYCLLNYCKRNYGDIELLFQLLRAFTGRFLCNMTFLKEYMEEEIPKNYSIAQKRALFFRFVDFNDPNFGDELKAKVLQHILNPAFLYSFEKGEGEQLLGPPNPEGDNPESITSVFITKVLDPEKQADMLDSLRIYLLQYATLLVEHAPHHIHDNNKNRNSKLRRLMTFAWPCLLSKACVDPACKYSGHLLLAHIIAKFAIHKKIVLQVFHSLLKAHAMEARAIVRQAMAILTPAVPARMEDGHQMLTHWTRKIIVEEGHTVPQLVHILHLIVQHFKVYYPVRHHLVQHMVSAMQRLGFTPSVTIEQRRLAVDLSEVVIKWELQRIKDQQPDSDMDPNSSGEGVNSVSSSIKRGLSVDSAQEVKRFRTATGAISAVFGRSQSLPGADSLLAKPIDKQHTDTVVNFLIRVACQVNDNTNTAGSPGEVLSRRCVNLLKTALRPDMWPKSELKLQWFDKLLMTVEQPNQVNYGNICTGLEVLSFLLTVLQSPAILSSFKPLQRGIAACMTCGNTKVLRAVHSLLSRLMSIFPTEPSTSSVASKYEELECLYAAVGKVIYEGLTNYEKATNANPSQLFGTLMILKSACSNNPSYIDRLISVFMRSLQKMVREHLNPQAASGSTEATSGTSELVMLSLELVKTRLAVMSMEMRKNFIQAILTSLIEKSPDAKILRAVVKIVEEWVKNNSPMAANQTPTLREKSILLVKMMTYIEKRFPEDLELNAQFLDLVNYVYRDETLSGSELTAKLEPAFLSGLRCAQPLIRAKFFEVFDNSMKRRVYERLLYVTCSQNWEAMGNHFWIKQCIELLLAVCEKSTPIGTSCQGAMLPSITNVINLADSHDRAAFAMVTHVKQEPRERENSESKEEDVEIDIELAPGDQTSTPKTKELSEKDIGNQLHMLTNRHDKFLDTLREVKTGALLSAFVQLCHISTTLAEKTWVQLFPRLWKILSDRQQHALAGEISPFLCSGSHQVQRDCQPSALNCFVEAMSQCVPPIPIRPCVLKYLGKTHNLWFRSTLMLEHQAFEKGLSLQIKPKQTTEFYEQESITPPQQEILDSLAELYSLLQEEDMWAGLWQKRCKYSETATAIAYEQHGFFEQAQESYEKAMDKAKKEHERSNASPAIFPEYQLWEDHWIRCSKELNQWEALTEYGQSKGHINPYLVLECAWRVSNWTAMKEALVQVEVSCPKEMAWKVNMYRGYLAICHPEEQQLSFIERLVEMASSLAIREWRRLPHVVSHVHTPLLQAAQQIIELQEAAQINAGLQPTNLGRNNSLHDMKTVVKTWRNRLPIVSDDLSHWSSIFMWRQHHYQGKPTWSGMHSSSIVTAYENSSQHDPSSNNAMLGVHASASAIIQYGKIARKQGLVNVALDILSRIHTIPTVPIVDCFQKIRQQVKCYLQLAGVMGKNECMQGLEVIESTNLKYFTKEMTAEFYALKGMFLAQINKSEEANKAFSAAVQMHDVLVKAWAMWGDYLENIFVKERQLHLGVSAITCYLHACRHQNESKSRKYLAKVLWLLSFDDDKNTLADAVDKYCIGVPPIQWLAWIPQLLTCLVGSEGKLLLNLISQVGRVYPQAVYFPIRTLYLTLKIEQRERYKSDPGPIRATAPMWRCSRIMHMQRELHPTLLSSLEGIVDQMVWFRENWHEEVLRQLQQGLAKCYSVAFEKSGAVSDAKITPHTLNFVKKLVSTFGVGLENVSNVSTMFSSAASESLARRAQATAQDPVFQKLKGQFTTDFDFSVPGSMKLHNLISKLKKWIKILEAKTKQLPKFFLIEEKCRFLSNFSAQTAEVEIPGEFLMPKPTHYYIKIARFMPRVEIVQKHNTAARRLYIRGHNGKIYPYLVMNDACLTESRREERVLQLLRLLNPCLEKRKETTKRHLFFTVPRVVAVSPQMRLVEDNPSSLSLVEIYKQRCAKKGIEHDNPISRYYDRLATVQARGTQASHQVLRDILKEVQSNMVPRSMLKEWALHTFPNATDYWTFRKMFTIQLALIGFAEFVLHLNRLNPEMLQIAQDTGKLNVAYFRFDINDATGDLDANRPVPFRLTPNISEFLTTIGVSGPLTASMIAVARCFAQPNFKVDGILKTVLRDEIIAWHKKTQEDTSSPLSAAGQPENMDSQQLVSLVQKAVTAIMTRLHNLAQFEGGESKVNTLVAAANSLDNLCRMDPAWHPWL

SEQ ID NO: 87268 - DNA, 11580 bp, Artificial Sequence
  derived and/or modified sequence
atggccttcgtggccacccagggcgccaccgtggtggaccagaccaccctgatgaagaagtacctgcagttcgtggccgccctgaccgacgtgaacacccccgacgagaccaagctgaagatgatgcaggaggtgagcgagaacttcgagaacgtgaccagcagcccccagtacagcaccttcctggagcacatcatccccagattcctgaccttcctgcaggacggcgaggtgcagttcctgcaggagaagcccgcccagcagctgagaaagctggtgctggagatcatccacagaatccccaccaacgagcacctgagaccccacaccaagaacgtgctgagcgtgatgttcagattcctggagaccgagaacgaggagaacgtgctgatctgcctgagaatcatcatcgagctgcacaagcagttcagaccccccatcacccaggagatccaccacttcctggacttcgtgaagcagatctacaaggagctgcccaaggtggtgaacagatacttcgagaacccccaggtgatccccgagaacaccgtgcccccccccgagatggtgggcatgatcaccaccatcgccgtgaaggtgaaccccgagagagaggacagcgagaccagaacccacagcatcatccccagaggcagcctgagcctgaaggtgctggccgagctgcccatcatcgtggtgctgatgtaccagctgtacaagctgaacatccacaacgtggtggccgagttcgtgcccctgatcatgaacaccatcgccatccaggtgagcgcccaggccagacagcacaagctgtacaacaaggagctgtacgccgacttcatcgccgcccagatcaagaccctgagcttcctggcctacatcatcagaatctaccaggagctggtgaccaagtacagccagcagatggtgaagggcatgctgcagctgctgagcaactgccccgccgagaccgcccacctgagaaaggagctgctgatcgccgccaagcacatcctgaccaccgagctgagaaaccagttcatcccctgcatggacaagctgttcgacgagagcatcctgatcggcagcggctacaccgccagagagaccctgagacccctggcctacagcaccctggccgacctggtgcaccacgtgagacagcacctgcccctgagcgacctgagcctggccgtgcagctgttcgccaagaacatcgacgacgagagcctgcccagcagcatccagaccatgagctgcaagctgctgctgaacctggtggactgcatcagaagcaagagcgagcaggagagcggcaacggcagagacgtgctgatgagaatgctggaggtgttcgtgctgaagttccacaccatcgccagataccagctgagcgccatcttcaagaagtgcaagccccagagcgagctgggcgccgtggaggccgccctgcccggcgtgcccaccgcccccgccgcccccggccccgcccccagccccgcccccgtgcccgccccccccccccccccccccccccccccccccgccacccccgtgacccccgcccccgtgccccccttcgagaagcagggcgagaaggacaaggaggacaagcagaccttccaggtgaccgactgcagaagcctggtgaagaccctggtgtgcggcgtgaagaccatcacctggggcatcaccagctgcaaggcccccggcgaggcccagttcatccccaacaagcagctgcagcccaaggagacccagatctacatcaagctggtgaagtacgccatgcaggccctggacatctaccaggtgcagatcgccggcaacggccagacctacatcagagtggccaactgccagaccgtgagaatgaaggaggagaaggaggtgctggagcacttcgccggcgtgttcaccatgatgaaccccctgaccttcaaggagatcttccagaccaccgtgccctacatggtggagagaatcagcaagaactacgccctgcagatcgtggccaacagcttcctggccaaccccaccaccagcgccctgttcgccaccatcctggtggagtacctgctggacagactgcccgagatgggcagcaacgtggagctgagcaacctgtacctgaagctgttcaagctggtgttcggcagcgtgagcctgttcgccgccgagaacgagcagatgctgaagccccacctgcacaagatcgtgaacagcagcatggagctggcccagaccgccaaggagccctacaactacttcctgctgctgagagccctgttcagaagcatcggcggcggcagccacgacctgctgtaccaggagttcctgcccctgctgcccaacctgctgcagggcctgaacatgctgcagagcggcctgcacaagcagcacatgaaggacctgttcgtggagctgtgcctgaccgtgcccgtgagactgagcagcctgctgccctacctgcccatgctgatggaccccctggtgagcgccctgaacggcagccagaccctggtgagccagggcctgagaaccctggagctgtgcgtggacaacctgcagcccgacttcctgtacgaccacatccagcccgtgagagccgagctgatgcaggccctgtggagaaccctgagaaaccccgccgacagcatcagccacgtggcctacagagtgctgggcaagttcggcggcagcaacagaaagatgctgaaggagagccagaagctgcactacgtggtgaccgaggtgcagggccccagcatcaccgtggagttcagcgactgcaaggccagcctgcagctgcccatggagaaggccatcgagaccgccctggactgcctgaagagcgccaacaccgagccctactacagaagacaggcctgggaggtgatcaagtgcttcctggtggccatgatgagcctggaggacaacaagcacgccctgtaccagctgctggcccaccccaacttcaccgagaagaccatccccaacgtgatcatcagccacagatacaaggcccaggacacccccgccagaaagaccttcgagcaggccctgaccggcgccttcatgagcgccgtgatcaaggacctgagacccagcgccctgcccttcgtggccagcctgatcagacactacaccatggtggccgtggcccagcagtgcggccccttcctgctgccctgctaccaggtgggcagccagcccagcaccgccatgttccacagcgaggagaacggcagcaagggcatggaccccctggtgctgatcgacgccatcgccatctgcatggcctacgaggagaaggagctgtgcaagatcggcgaggtggccctggccgtgatcttcgacgtggccagcatcatcctgggcagcaaggagagagcctgccagctgcccctgttcagctacatcgtggagagactgtgcgcctgctgctacgagcaggcctggtacgccaagctgggcggcgtggtgagcatcaagttcctgatggagagactgcccctgacctgggtgctgcagaaccagcagaccttcctgaaggccctgctgttcgtgatgatggacctgaccggcgaggtgagcaacggcgccgtggccatggccaagaccaccctggagcagctgctgatgagatgcgccacccccctgaaggacgaggagagagccgaggagatcgtggccgcccaggagaagagcttccaccacgtgacccacgacctggtgagagaggtgaccagccccaacagcaccgtgagaaagcaggccatgcacagcctgcaggtgctggcccaggtgaccggcaagagcgtgaccgtgatcatggagccccacaaggaggtgctgcaggacatggtgccccccaagaagcacctgctgagacaccagcccgccaacgcccagatcggcctgatggagggcaacaccttctgcaccaccctgcagcccagactgttcaccatggacctgaacgtggtggagcacaaggtgttctacaccgagctgctgaacctgtgcgaggccgaggacagcgccctgaccaagctgccctgctacaagagcctgcccagcctggtgcccctgagaatcgccgccctgaacgccctggccgcctgcaactacctgccccagagcagagagaagatcatcgccgccctgttcaaggccctgaacagcaccaacagcgagctgcaggaggccggcgaggcctgcatgagaaagttcctggagggcgccaccatcgaggtggaccagatccacacccacatgagacccctgctgatgatgctgggcgactacagaagcctgaccctgaacgtggtgaacagactgaccagcgtgaccagactgttccccaacagcttcaacgacaagttctgcgaccagatgatgcagcacctgagaaagtggatggaggtggtggtgatcacccacaagggcggccagagaagcgacggcaacgagagcatcagcgagtgcggcagatgccccctgagccccttctgccagttcgaggagatgaagatctgcagcgccatcatcaacctgttccacctgatccccgccgccccccagaccctggtgaagcccctgctggaggtggtgatgaagaccgagagagccatgctgatcgaggccggcagccccttcagagagcccctgatcaagttcctgaccagacaccccagccagaccgtggagctgttcatgatggaggccaccctgaacgacccccagtggagcagaatgttcatgagcttcctgaagcacaaggacgccagacccctgagagacgtgctggccgccaaccccaacagattcatcaccctgctgctgcccggcggcgcccagaccgccgtgagacccggcagccccagcaccagcaccatgagactggacctgcagttccaggccatcaagatcatcagcatcatcgtgaagaacgacgacagctggctggccagccagcacagcctggtgagccagctgagaagagtgtgggtgagcgagaacttccaggagagacacagaaaggagaacatggccgccaccaactggaaggagcccaagctgctggcctactgcctgctgaactactgcaagagaaactacggcgacatcgagctgctgttccagctgctgagagccttcaccggcagattcctgtgcaacatgaccttcctgaaggagtacatggaggaggagatccccaagaactacagcatcgcccagaagagagccctgttcttcagattcgtggacttcaacgaccccaacttcggcgacgagctgaaggccaaggtgctgcagcacatcctgaaccccgccttcctgtacagcttcgagaagggcgagggcgagcagctgctgggcccccccaaccccgagggcgacaaccccgagagcatcaccagcgtgttcatcaccaaggtgctggaccccgagaagcaggccgacatgctggacagcctgagaatctacctgctgcagtacgccaccctgctggtggagcacgccccccaccacatccacgacaacaacaagaacagaaacagcaagctgagaagactgatgaccttcgcctggccctgcctgctgagcaaggcctgcgtggaccccgcctgcaagtacagcggccacctgctgctggcccacatcatcgccaagttcgccatccacaagaagatcgtgctgcaggtgttccacagcctgctgaaggcccacgccatggaggccagagccatcgtgagacaggccatggccatcctgacccccgccgtgcccgccagaatggaggacggccaccagatgctgacccactggaccagaaagatcatcgtggaggagggccacaccgtgccccagctggtgcacatcctgcacctgatcgtgcagcacttcaaggtgtactaccccgtgagacaccacctggtgcagcacatggtgagcgccatgcagagactgggcttcacccccagcgtgaccatcgagcagagaagactggccgtggacctgagcgaggtggtgatcaagtgggagctgcagagaatcaaggaccagcagcccgacagcgacatggaccccaacagcagcggcgagggcgtgaacagcgtgagcagcagcatcaagagaggcctgagcgtggacagcgcccaggaggtgaagagattcagaaccgccaccggcgccatcagcgccgtgttcggcagaagccagagcctgcccggcgccgacagcctgctggccaagcccatcgacaagcagcacaccgacaccgtggtgaacttcctgatcagagtggcctgccaggtgaacgacaacaccaacaccgccggcagccccggcgaggtgctgagcagaagatgcgtgaacctgctgaagaccgccctgagacccgacatgtggcccaagagcgagctgaagctgcagtggttcgacaagctgctgatgaccgtggagcagcccaaccaggtgaactacggcaacatctgcaccggcctggaggtgctgagcttcctgctgaccgtgctgcagagccccgccatcctgagcagcttcaagcccctgcagagaggcatcgccgcctgcatgacctgcggcaacaccaaggtgctgagagccgtgcacagcctgctgagcagactgatgagcatcttccccaccgagcccagcaccagcagcgtggccagcaagtacgaggagctggagtgcctgtacgccgccgtgggcaaggtgatctacgagggcctgaccaactacgagaaggccaccaacgccaaccccagccagctgttcggcaccctgatgatcctgaagagcgcctgcagcaacaaccccagctacatcgacagactgatcagcgtgttcatgagaagcctgcagaagatggtgagagagcacctgaacccccaggccgccagcggcagcaccgaggccaccagcggcaccagcgagctggtgatgctgagcctggagctggtgaagaccagactggccgtgatgagcatggagatgagaaagaacttcatccaggccatcctgaccagcctgatcgagaagagccccgacgccaagatcctgagagccgtggtgaagatcgtggaggagtgggtgaagaacaacagccccatggccgccaaccagacccccaccctgagagagaagagcatcctgctggtgaagatgatgacctacatcgagaagagattccccgaggacctggagctgaacgcccagttcctggacctggtgaactacgtgtacagagacgagaccctgagcggcagcgagctgaccgccaagctggagcccgccttcctgagcggcctgagatgcgcccagcccctgatcagagccaagttcttcgaggtgttcgacaacagcatgaagagaagagtgtacgagagactgctgtacgtgacctgcagccagaactgggaggccatgggcaaccacttctggatcaagcagtgcatcgagctgctgctggccgtgtgcgagaagagcacccccatcggcaccagctgccagggcgccatgctgcccagcatcaccaacgtgatcaacctggccgacagccacgacagagccgccttcgccatggtgacccacgtgaagcaggagcccagagagagagagaacagcgagagcaaggaggaggacgtggagatcgacatcgagctggcccccggcgaccagaccagcacccccaagaccaaggagctgagcgagaaggacatcggcaaccagctgcacatgctgaccaacagacacgacaagttcctggacaccctgagagaggtgaagaccggcgccctgctgagcgccttcgtgcagctgtgccacatcagcaccaccctggccgagaagacctgggtgcagctgttccccagactgtggaagatcctgagcgacagacagcagcacgccctggccggcgagatcagccccttcctgtgcagcggcagccaccaggtgcagagagactgccagcccagcgccctgaactgcttcgtggaggccatgagccagtgcgtgccccccatccccatcagaccctgcgtgctgaagtacctgggcaagacccacaacctgtggttcagaagcaccctgatgctggagcaccaggccttcgagaagggcctgagcctgcagatcaagcccaagcagaccaccgagttctacgagcaggagagcatcacccccccccagcaggagatcctggacagcctggccgagctgtacagcctgctgcaggaggaggacatgtgggccggcctgtggcagaagagatgcaagtacagcgagaccgccaccgccatcgcctacgagcagcacggcttcttcgagcaggcccaggagagctacgagaaggccatggacaaggccaagaaggagcacgagagaagcaacgccagccccgccatcttccccgagtaccagctgtgggaggaccactggatcagatgcagcaaggagctgaaccagtgggaggccctgaccgagtacggccagagcaagggccacatcaacccctacctggtgctggagtgcgcctggagagtgagcaactggaccgccatgaaggaggccctggtgcaggtggaggtgagctgccccaaggagatggcctggaaggtgaacatgtacagaggctacctggccatctgccaccccgaggagcagcagctgagcttcatcgagagactggtggagatggccagcagcctggccatcagagagtggagaagactgccccacgtggtgagccacgtgcacacccccctgctgcaggccgcccagcagatcatcgagctgcaggaggccgcccagatcaacgccggcctgcagcccaccaacctgggcagaaacaacagcctgcacgacatgaagaccgtggtgaagacctggagaaacagactgcccatcgtgagcgacgacctgagccactggagcagcatcttcatgtggagacagcaccactaccagggcaagcccacctggagcggcatgcacagcagcagcatcgtgaccgcctacgagaacagcagccagcacgaccccagcagcaacaacgccatgctgggcgtgcacgccagcgccagcgccatcatccagtacggcaagatcgccagaaagcagggcctggtgaacgtggccctggacatcctgagcagaatccacaccatccccaccgtgcccatcgtggactgcttccagaagatcagacagcaggtgaagtgctacctgcagctggccggcgtgatgggcaagaacgagtgcatgcagggcctggaggtgatcgagagcaccaacctgaagtacttcaccaaggagatgaccgccgagttctacgccctgaagggcatgttcctggcccagatcaacaagagcgaggaggccaacaaggccttcagcgccgccgtgcagatgcacgacgtgctggtgaaggcctgggccatgtggggcgactacctggagaacatcttcgtgaaggagagacagctgcacctgggcgtgagcgccatcacctgctacctgcacgcctgcagacaccagaacgagagcaagagcagaaagtacctggccaaggtgctgtggctgctgagcttcgacgacgacaagaacaccctggccgacgccgtggacaagtactgcatcggcgtgccccccatccagtggctggcctggatcccccagctgctgacctgcctggtgggcagcgagggcaagctgctgctgaacctgatcagccaggtgggcagagtgtacccccaggccgtgtacttccccatcagaaccctgtacctgaccctgaagatcgagcagagagagagatacaagagcgaccccggccccatcagagccaccgcccccatgtggagatgcagcagaatcatgcacatgcagagagagctgcaccccaccctgctgagcagcctggagggcatcgtggaccagatggtgtggttcagagagaactggcacgaggaggtgctgagacagctgcagcagggcctggccaagtgctacagcgtggccttcgagaagagcggcgccgtgagcgacgccaagatcaccccccacaccctgaacttcgtgaagaagctggtgagcaccttcggcgtgggcctggagaacgtgagcaacgtgagcaccatgttcagcagcgccgccagcgagagcctggccagaagagcccaggccaccgcccaggaccccgtgttccagaagctgaagggccagttcaccaccgacttcgacttcagcgtgcccggcagcatgaagctgcacaacctgatcagcaagctgaagaagtggatcaagatcctggaggccaagaccaagcagctgcccaagttcttcctgatcgaggagaagtgcagattcctgagcaacttcagcgcccagaccgccgaggtggagatccccggcgagttcctgatgcccaagcccacccactactacatcaagatcgccagattcatgcccagagtggagatcgtgcagaagcacaacaccgccgccagaagactgtacatcagaggccacaacggcaagatctacccctacctggtgatgaacgacgcctgcctgaccgagagcagaagagaggagagagtgctgcagctgctgagactgctgaacccctgcctggagaagagaaaggagaccaccaagagacacctgttcttcaccgtgcccagagtggtggccgtgagcccccagatgagactggtggaggacaaccccagcagcctgagcctggtggagatctacaagcagagatgcgccaagaagggcatcgagcacgacaaccccatcagcagatactacgacagactggccaccgtgcaggccagaggcacccaggccagccaccaggtgctgagagacatcctgaaggaggtgcagagcaacatggtgcccagaagcatgctgaaggagtgggccctgcacaccttccccaacgccaccgactactggaccttcagaaagatgttcaccatccagctggccctgatcggcttcgccgagttcgtgctgcacctgaacagactgaaccccgagatgctgcagatcgcccaggacaccggcaagctgaacgtggcctacttcagattcgacatcaacgacgccaccggcgacctggacgccaacagacccgtgcccttcagactgacccccaacatcagcgagttcctgaccaccatcggcgtgagcggccccctgaccgccagcatgatcgccgtggccagatgcttcgcccagcccaacttcaaggtggacggcatcctgaagaccgtgctgagagacgagatcatcgcctggcacaagaagacccaggaggacaccagcagccccctgagcgccgccggccagcccgagaacatggacagccagcagctggtgagcctggtgcagaaggccgtgaccgccatcatgaccagactgcacaacctggcccagttcgagggcggcgagagcaaggtgaacaccctggtggccgccgccaacagcctggacaacctgtgcagaatggaccccgcctggcacccctggctgtag

SEQ ID NO: 87269 - DNA, 11580 bp, Artificial Sequence
  derived and/or modified sequence
atggcgttcgtcgccacccagggagctactgtggtcgaccaaaccaccctcatgaagaaataccttcagtttgttgcagcactgacagacgttaatactcctgatgagaccaagctgaaaatgatgcaggaagtcagcgagaattttgaaaacgtcacaagctctcctcagtattctacgttcctcgagcacataattcctaggtttctgacttttctacaggatggcgaagtccagtttttgcaggaaaaacccgcccaacagctaagaaagctcgtgctcgagataattcataggataccaaccaatgagcacttgcgtccccacacaaaaaacgtgctgtcggtgatgtttaggttcctcgagactgagaacgaggagaacgtgctcatttgtcttaggataatcatcgagctacacaagcagttcagaccgcccatcacccaggaaattcaccattttctggactttgtcaagcaaatctataaagagctccctaaagtggtcaaccggtacttcgaaaacccccaagtgataccagagaacaccgtcccccccccggaaatggtggggatgataaccacaattgctgtaaaagtgaatcccgagagggaagactccgaaaccaggacccacagcattatcccccgcgggtcactttcgctgaaggtattggccgagcttcccattattgtagtgcttatgtaccagctctacaagttaaatatacataacgtcgtggctgagttcgtccccctgatcatgaataccattgctattcaggtcagtgctcaggcgcgccaacataagctgtataacaaggaattatacgcggatttcatagccgcgcagatcaaaacactctccttccttgcatatatcattcgcatctatcaagagctggtaacaaagtatagccaacagatggttaagggtatgctgcagctgttgagcaactgtcccgcagaaaccgcgcatctgaggaaagaactgctgatcgccgccaaacatatactgactactgagttaagaaaccaatttatcccttgtatggacaagctgttcgacgagtccattcttataggctcggggtacacagctcgcgaaaccttaagacctctagcctacagcaccctcgccgacctggtgcatcatgtccggcaacatctccctctgtctgatctatctctggcggttcagctttttgccaagaatattgacgatgagtcgcttccatcctctatccagaccatgtcgtgtaagctgctcctcaatctggtcgactgcatccgatcaaagtcagaacaggaatccggtaacggtcgcgatgtgttgatgcggatgctggaggtgtttgtgctgaagtttcacactatcgcccggtaccagcttagcgctatattcaaaaaatgcaagcctcagtctgagttaggcgcggtggaggccgcgctgccaggggtgcccactgccccagccgcaccaggcccagccccctcacccgcacctgtgcccgccccgcctccaccccctccacccccaccaccagccacacctgtgacccctgcacccgttccaccatttgagaaacagggcgaaaaggataaggaagacaagcaaacctttcaggtgactgactgcaggtctttagtcaaaacactggtctgcggagtgaagactataacttggggcataacctcctgtaaggcacctggcgaggctcagtttatccccaacaaacagctgcagcctaaagaaacccagatttacatcaaactcgtcaagtatgctatgcaagccctggacatttaccaggtgcagatagcggggaatggccaaacatatattcgagttgcaaactgtcagactgtacgcatgaaagaggagaaggaggtgcttgaacacttcgcgggagtatttaccatgatgaacccactcacctttaaagagatatttcagacaacagtgccctacatggttgagcgaatcagcaaaaattacgcgctgcagatagtggccaactctttcttagctaaccctacaacctcagccctgttcgccactatcctggtggaatacctgctggacaggctgcccgagatgggctcaaatgtggagttatcaaatctgtatttgaagctgtttaaattagtattcggatctgtctccctttttgccgcagagaacgagcaaatgctgaagccccatctgcacaaaatcgtgaactcatccatggagctagcccagacagctaaagagccctacaattatttcctccttttgcgggcactctttcgcagcatcggaggcgggtctcacgacctgttgtatcaggagtttctacctctcttgccaaacttgctgcaggggctgaatatgctccagtccggcctgcataagcagcatatgaaggatctcttcgttgaattatgtctaactgttcctgtgcggctctcctcactactgccatatctcccaatgctgatggacccgctcgtgtcagcactgaatggctcccaaaccctggtgagccaaggactccggacactggaactttgtgtggacaatctgcagcctgacttcttgtatgatcacatacaaccggtgagggccgagctgatgcaggccttgtggcggacacttcgcaatccagcggactctatctctcacgtcgcgtaccgagttttaggcaagttcggaggctcaaataggaaaatgctaaaagagagccaaaagcttcattatgtggtaaccgaggttcaggggccttctatcactgtggaattttctgactgtaaagcctccctccaactccctatggaaaaagccattgagacggctctggactgtttgaagtctgccaataccgaaccttactaccgccgccaagcctgggaggttatcaagtgtttcctggtagccatgatgagcctcgaggataataaacatgccctctatcagttactggcccaccctaactttactgagaagaccattccaaacgtgatcatcagtcaccggtataaagcacaagacactcctgctagaaagaccttcgagcaggcactcactggggcatttatgagcgccgtgattaaggacctgcggccctccgctctaccgtttgtggccagcctgattcgccactatacaatggtcgcagtcgcccagcagtgtggtcctttcctgctgccatgttaccaggttgggtcgcagcctagcaccgctatgttccactctgaagagaacggatctaagggaatggatcctttggtgctaatcgatgcaatcgccatttgtatggcttatgaagagaaagagctgtgcaagatcggcgaggtggctctggccgtgatttttgacgtagcaagtataatactcggtagtaaggagagagcttgtcagctgcccctgttcagttatatcgttgagaggttgtgcgcttgctgttatgagcaggcttggtatgctaagcttgggggtgtggtgtcaattaagttccttatggaaaggctcccactgacctgggtgcttcagaaccagcagaccttcctcaaggcgctgctgttcgttatgatggatttgaccggtgaggtgagcaatggggcagtggctatggccaagactacactggaacagcttcttatgcggtgtgccacacccctcaaagacgaggaaagggccgaagagatagtggccgcccaggaaaagtctttccatcatgttacacatgacttagtacgggaagtgacctccccaaacagcaccgttagaaagcaggccatgcattcccttcaggtccttgcccaagtgacaggaaagagcgtgacggtaattatggagccccacaaagaggtgttgcaggacatggttccacctaagaagcatctgctccgtcaccagccagctaacgcccaaatcgggttgatggaagggaatacattttgcacaactctacagcctcggcttttcactatggatcttaacgttgtggaacacaaggtgttctacacagagcttttaaacctgtgcgaagctgaagattccgcattaactaagctgccctgctataaaagccttccgtccctggttccgctgcgcatcgccgctctgaacgcgctggccgcgtgcaattatctgccccagagtcgtgagaagatcattgccgccctgtttaaagctctcaattctacgaactctgagctgcaggaggctggcgaggcttgcatgcgcaaattcctcgaaggcgctacaatcgaggtggatcagattcatactcatatgcgccctctgttaatgatgttgggagactatcggagtctgaccctgaacgtggtgaatcgactgacttcggttactaggttgttcccgaattcttttaacgacaaattctgcgaccagatgatgcagcacctgaggaaatggatggaagtcgtggtcataacccataagggtggccagcgatccgacgggaatgaaagtatcagcgagtgtggcaggtgcccactgagtccattctgccagttcgaagaaatgaaaatatgttccgcaatcatcaatctgtttcatctcatcccggccgccccacagacgctggtgaagccactgctggaggtggttatgaagaccgagagggcaatgctgatcgaggcaggatctccctttcgcgagccgcttattaagttcctgacgcgacacccaagtcaaaccgtggagctgttcatgatggaggccacattgaatgacccacaatggagccgaatgtttatgagctttctcaagcacaaggacgcccgcccgctgagagacgttttggctgcaaatccaaaccgttttatcaccctgctactgcccggtggtgcacagacagctgtgaggcccggctccccttcaacttcaaccatgcgactggatctgcagttccaggcaattaaaataatttcaatcattgtaaagaacgatgactcttggcttgccagtcagcactccctcgtgtcccagctgcgcagagtatgggtgtcagagaacttccaggagcgccaccggaaagagaatatggcggcaactaattggaaagagcctaagctgctcgcctactgcctgcttaattattgcaagcgcaactatggagacattgagcttctgtttcagttgctgcgcgcattcaccggtcgcttcctctgcaatatgacgttcctgaaggagtacatggaggaggagattcctaagaattattccattgcgcagaagagggcactgttttttcggtttgtcgatttcaacgacccgaactttggcgatgagctgaaggcgaaagtgctgcagcacattctgaacccagcgttcctatacagttttgaaaaaggagaaggggaacaactgctggggccccccaatcccgagggcgacaatccagagtcgattacttctgtgtttattactaaggtcctggatccagaaaagcaagcggacatgctggactcactgcgaatttacttgttgcagtacgcgacgctgctggtcgagcatgcgccacatcatatccatgacaataataagaatcgcaatagtaagttgcggagactgatgaccttcgcctggccctgcctgttgagtaaggcatgcgttgaccccgcctgcaaatattcaggacacttactcctggcccacatcatcgccaaattcgccatccacaagaagatagttctgcaggtttttcactctctcctgaaggcccatgcaatggaagcgcgcgccatagtcaggcaggccatggctatcctaaccccggccgtaccagctcggatggaggacggtcatcagatgctgacacattggactcggaagatcatagtggaagaagggcacactgtgccccaattggtgcacatcctgcacctcattgtgcaacatttcaaagtgtactaccctgttcgccaccatcttgtccagcacatggtatctgctatgcaacggctgggcttcaccccctcagttacgatcgaacagcgccgcctagccgtggacctaagcgaagttgtgatcaagtgggagctacagcgcatcaaggatcaacaaccagattcagatatggacccaaattccagtggagagggtgtcaattccgtgtcctcatctatcaaaaggggcctgagcgtggattccgcccaggaggtgaagaggttccggacagcaaccggcgccatatctgccgtcttcggccgaagccaatcgctcccaggggctgattccctgctggccaagcctatcgacaaacaacacacagacacagtggtgaatttcctgatacgcgtggcctgtcaggtgaacgacaacacgaacaccgcgggtagccccggcgaggtgctatctaggcggtgtgtgaacctgctgaaaacagcgctgcgaccggatatgtggccaaagtctgagcttaagctgcagtggttcgacaaacttctgatgaccgtagagcagcctaatcaggttaattacggtaacatctgtacaggtctggaggtactgtcctttctcctcacggtgctacagtcgcctgccatcttgtcttccttcaagccactccagcgcggtatcgctgcctgcatgacttgcggaaataccaaggtcctaagagcagtacactccctcctgtccaggctgatgagtatcttccctacagagccttccacatcttccgttgcctccaaatatgaggagcttgaatgtctgtatgcagctgtggggaaagttatatatgagggcctcactaattacgaaaaagccacgaacgccaaccccagccaactgttcggcaccctaatgattctgaagtccgcctgttcaaataaccctagttacatagatagactaattagtgtgttcatgagatccctacagaagatggtgagagaacacctgaacccacaggctgcaagtggctcaaccgaagctacctctggcactagcgaactggtaatgctgagcctagagctggtgaaaacaaggctggcagtgatgtcgatggagatgcggaagaacttcatccaggccatcctcacatcattgattgaaaaaagtccggatgcaaagattcttagagctgtggtaaagattgtggaagaatgggtgaaaaataatagccccatggctgcgaatcagacgccgacccttcgggaaaagtccatcttattggttaagatgatgacttacattgagaagcgcttcccagaggatcttgagctgaacgcgcaatttctggacctggttaattacgtctacagagatgagacattgtctgggtctgagctcaccgctaaactcgagcctgcctttctaagcggcctacggtgcgcccagcctctcatcagagctaagttcttcgaggtgttcgataacagtatgaaacgacgcgtctatgagaggttactgtacgttacctgctcgcagaactgggaggccatgggaaaccatttttggattaagcagtgtatagaactacttttggcagtgtgcgaaaagagcacaccgatcggcaccagctgccagggtgcaatgttgccaagcataactaatgtgataaacctggctgattcacatgatcgcgctgccttcgcgatggtcactcacgtgaagcaggagccccgggagcgagaaaacagtgaatctaaagaagaagacgtggagatcgatatcgagctagcaccaggcgatcagaccagtacacccaaaaccaaagagctcagtgagaaagacatcggaaaccagttgcatatgctcactaaccggcacgacaagtttcttgatacattacgtgaagtgaagactggagccctgttgtcagccttcgttcaactctgccacataagtaccacactggccgaaaagacctgggtccagctatttccacgattgtggaagatcctgtctgacaggcaacagcatgctttggcaggggagatctccccattcctgtgttcaggcagccatcaggtgcagcgcgactgccagccctccgcactgaattgctttgtggaagcaatgtctcagtgcgtcccccccatacccataaggccatgcgtcctcaagtacctgggcaaaacacacaatctctggtttaggagtacactcatgctggagcaccaggcctttgagaaaggcttatccctgcagatcaaacccaagcaaacaactgaattctatgaacaagaaagtataactcctccacagcaagaaatcctggacagtcttgctgaactgtacagcctgctgcaagaggaggacatgtgggccgggctatggcagaagcgttgcaaatattcagagactgccacagccattgcgtatgaacaacacggattcttcgagcaggcccaggagagctacgaaaaggccatggataaggctaagaaggagcatgagcggagcaacgcgtcacccgctatcttcccagagtaccagctgtgggaggaccactggatccggtgcagtaaggagctgaatcagtgggaggcactgaccgaatacgggcagtcaaaggggcacatcaatccatatctggttcttgagtgcgcctggcgtgtcagtaattggacagcaatgaaggaagccctggtccaagtggaagtttcttgtcctaaagagatggcctggaaggttaacatgtacaggggctacctagcaatctgtcatcccgaagagcaacaacttagcttcattgagaggttggtggagatggcatcctctcttgccatccgtgaatggcgaagattgccccatgtggtgtcccacgtacacactcccctcctgcaggccgcccaacagatcattgaacttcaagaagccgcccagattaacgcaggcctgcagcctaccaatctgggaagaaataactccttgcatgatatgaagacagttgttaagacttggagaaacagactgccaattgttagcgatgacctgtctcattggagctccatttttatgtggcggcaacaccattaccagggtaagccaacttggagcggaatgcattcctcctctattgtgaccgcctatgaaaattccagtcagcatgacccttctagtaacaatgccatgctgggagtacacgcctctgccagcgctattattcagtacggaaagatcgcacgcaagcagggtcttgtcaacgttgcgctggacatcctctcgagaatacacacgattccaacggtgcctatagttgactgcttccaaaaaatacggcagcaggtgaagtgttatctgcagcttgcaggagtaatggggaaaaatgaatgtatgcaagggctggaagtaatcgagagcaccaacctgaaatattttactaaggaaatgaccgccgaattctatgccttgaaggggatgttcttagcgcagataaacaagtccgaggaagcaaataaagccttttcggctgccgtgcagatgcatgacgtcctggtgaaggcgtgggcgatgtggggagattacctggagaacatcttcgtcaaggagcggcagctgcatctgggggtgtcagccatcacatgctatctgcatgcatgtcgccaccagaacgagtccaagtcgaggaaatatttggccaaggtattgtggttgttatcattcgacgacgacaaaaatacgctagccgatgctgtcgataagtactgcattggtgtcccgcccatacagtggcttgcatggattccccaactgctgacatgccttgtgggaagtgaaggtaaactgctcctcaacctgatctctcaggtggggcgggtctaccctcaagccgtctacttccctatacggactctttaccttaccctaaagattgaacaacgggagcgctacaagagtgacccagggcccattcgggcaaccgccccaatgtggcgatgcagccgtatcatgcatatgcagcgggaactgcaccccacattactttccagcctggagggcatagtcgaccaaatggtctggtttagggaaaactggcatgaggaggttctgagacaactccaacaaggactggctaagtgttactccgtggcctttgagaagagcggcgccgtgtccgatgccaaaataaccccccacacgctgaatttcgtcaagaaactggtaagcaccttcggggtgggtctagaaaatgtttccaatgtcagtactatgttcagctcagctgcttccgaatcactggcccgccgggcgcaagccacagcccaggatcccgtgttccagaagcttaaaggacagtttactaccgactttgacttcagcgtacctggttcaatgaaacttcacaatctcatctccaagttgaaaaaatggatcaagatcctggaagctaagaccaagcagctacccaagttctttctgatagaggagaaatgcaggtttcttagtaacttcagcgcccaaactgctgaagtcgaaatccccggggagttcttgatgcccaaacccacgcattattatatcaaaatcgcacggtttatgccccgcgtggagattgtgcagaagcataatacagccgcaaggcggctatacatccgaggtcacaacggaaaaatttacccgtacttggtgatgaacgatgcttgtctgacagaaagtaggcgcgaagaaagagtgctgcagcttctgcggctgctcaatccatgtctggagaaaaggaaagaaaccacaaaacgtcatcttttcttcactgtccctcgtgtagtggctgtatcccctcaaatgcgcctcgtcgaggacaatccgtcctcactttcgttagttgaaatatacaagcagcgttgcgccaagaagggcatcgagcatgataatcccatatcacgttactatgacaggctagccacagtgcaggctcggggtacgcaggcctcacaccaggtccttcgggacatactgaaagaggtgcaaagcaacatggttcctcggtcaatgttaaaggaatgggctctacacacctttcccaatgctaccgactactggaccttccgcaagatgttcaccattcagctagccttaatcgggttcgccgaattcgtgctgcaccttaaccgcttgaaccccgagatgctgcagatcgctcaagacaccgggaagctcaacgtagcatacttccggttcgatatcaatgatgccacaggggacctggacgctaatagacccgtgccctttagactgacacctaacatctctgagtttctgaccacaatcggggtctccgggccactgaccgcaagcatgatcgcagtggcccgatgttttgcacagccgaatttcaaagttgatggaattctgaagacagtgctccgggacgagattatcgcgtggcataagaagacccaggaagatacatcaagccccctatccgccgccggacaacccgagaacatggattcacaacagttggtaagtttagtgcagaaggctgtgaccgcgatcatgaccaggctgcataatttggcacagtttgagggtggcgagagtaaagtaaacacgttggtggcagctgccaattcactggataacctgtgcaggatggatcccgcatggcacccatggctgtag

SEQ ID NO: 87270 - DNA, 11580 bp, Artificial Sequence
  derived and/or modified sequence
atggcctttgtggccacccagggcgccaccgtggtggaccagaccaccctgatgaagaagtacctgcagtttgtggccgccctgacagatgtgaacaccccagatgagaccaagctgaagatgatgcaggaggtgtctgaaaattttgaaaatgtgaccagcagcccccagtacagcaccttcctggagcacatcatcccccgcttcctgaccttcctgcaggatggagaggtgcagttcctgcaggagaagccagcccagcagctgaggaagctggtgctggagatcatccaccgcatccccaccaatgagcacctgcggccccacaccaagaatgtgctgtctgtgatgttccgcttcctggagacagaaaatgaagaaaatgtgctgatctgcctgcgcatcatcatcgagctgcacaagcagttccggccccccatcacccaggagatccaccacttcctggactttgtgaagcagatctacaaggagctgcccaaggtggtgaaccgctactttgagaacccccaggtgatcccagaaaatacagtgcccccacctgagatggtgggcatgatcaccaccatcgctgtgaaggtgaaccctgagagagaagattctgagaccaggacccacagcatcatcccccggggcagcctgagcctgaaggtgctggccgagctgcccatcatcgtggtgctgatgtaccagctgtacaagctgaacatccacaacgtggtggccgagtttgtgcccctcatcatgaacaccatcgccatccaggtgtctgcccaggcccggcagcacaagctgtacaacaaggagctgtatgctgacttcatcgccgcccagatcaagaccctgtccttcctggcctacatcatccgcatctaccaggagctggtgaccaagtacagccagcagatggtgaagggcatgctgcagctgctgagcaactgcccagctgagacagcccacctgaggaaggagctgctgattgctgccaagcacatcctgaccacagagctgaggaaccagttcatcccctgcatggacaagctgtttgatgagagcatcctgattggcagcggctacacagcccgggagaccctgcggcccctggcctacagcaccctggccgacctggtgcaccacgtgcggcagcacctgcccctgagtgacctgagcctggccgtgcagctgtttgccaagaacattgatgatgagagcctgcccagcagcatccagaccatgagctgcaagctgctgctgaacctggtggactgcatccgcagcaagtctgagcaggagagcggaaatggaagagatgtgctgatgaggatgctggaggtgtttgtgctgaagttccacaccatcgcccgctaccagctgagcgccatcttcaagaagtgcaagccccagagcgagctgggcgctgtggaggccgccctgcccggggtgcccacagccccagctgcccctggccctgcccccagccctgcccctgtgcctgcccctcctcctcctcctcctcctcctcctccagccacccctgtgaccccagcccctgtgcccccatttgagaagcagggcgagaaggacaaggaggacaagcagaccttccaggtgacagactgccgcagcctggtgaagaccctggtgtgtggggtgaagaccatcacctggggcatcaccagctgcaaggcccctggagaggcccagttcatccccaacaagcagctgcagcccaaggagacccagatctacatcaagctggtgaagtatgccatgcaggccctggacatctaccaggtgcagattgctggaaatggccagacctacatccgggtggccaactgccagacagtgaggatgaaggaggagaaggaggtgctggagcactttgctggggtcttcaccatgatgaaccccctgaccttcaaggagatcttccagaccaccgtgccctacatggtggagcgcatcagcaagaactatgccctgcagatcgtggccaacagcttcctggccaaccccaccaccagcgccctgtttgccaccatcctggtggagtacctgctggaccggctgcctgagatgggcagcaatgtggagctgagcaacctgtacctgaagctgttcaagctggtgtttggatctgtgtccctgtttgctgctgaaaatgagcagatgctgaagccccacctgcacaagatcgtgaacagctccatggagctggcccagacagccaaggagccctacaactacttcctgctgctgcgggccctcttccgcagcattggaggcggcagccatgacctgctgtaccaggagttcctgcccctgctgcccaacctgctgcagggcctgaacatgctgcagagcggcctgcacaagcagcacatgaaggacctgtttgtggagctgtgcctgactgtgcctgtgcggctgagcagcctgctgccctacctgcccatgctgatggaccccctggtgtctgccctgaatggcagccagaccctggtgtcccagggcctgcggaccctggagctgtgtgtggacaacctgcagcctgacttcctgtatgaccacatccagcctgtgcgggcagagctgatgcaggccctgtggaggaccctgagaaatcctgctgacagcatcagccacgtggcctacagagtgctgggcaagtttggaggcagcaacaggaagatgctgaaggagagccagaagctgcactacgtggtgacagaggtgcagggccccagcatcaccgtggagttcagtgactgcaaggccagcctgcagctgcccatggagaaggccattgaaacagccctggactgcctgaagagcgccaacacagagccctactaccgccggcaggcctgggaggtgatcaagtgcttcctggtggccatgatgagcctggaggacaacaagcacgccctgtaccagctgctggcccaccccaacttcacagagaagaccatccccaacgtcatcatcagccaccgctacaaggcccaggacaccccagccaggaagacctttgagcaggccctgactggagccttcatgtctgctgtgatcaaggacctgcggcccagcgccctgccctttgtggccagcctcatccgccactacaccatggtggccgtggcccagcagtgtggccccttcctgctgccctgctaccaggtgggcagccagcccagcacagccatgttccacagtgaagaaaatggcagcaagggcatggaccccctggtgctgattgatgccatcgccatctgcatggcctatgaggagaaggagctgtgcaagatcggggaggtggccctggccgtcatctttgatgtggccagcatcatcctgggcagcaaggagcgggcctgccagctgcccctcttctcctacatcgtggagcggctgtgtgcctgctgctatgagcaggcctggtacgccaagctgggcggcgtggtgtccatcaagttcctgatggagcggctgcccctgacctgggtgctgcagaaccagcagaccttcctgaaggccctgctgtttgtgatgatggacctgactggagaggtgtccaatggagctgtggccatggccaagaccaccctggagcagctgctgatgagatgtgccacccccctgaaggatgaggagagagctgaggagatcgtggccgcccaggagaagagcttccaccacgtgacccatgacctggtgcgggaggtgaccagccccaacagcacagtgaggaagcaggccatgcacagcctgcaggtgctggcccaggtgacaggcaagtctgtgaccgtcatcatggagccccacaaggaggtgctgcaggacatggtgccccccaagaagcacctgctgcggcaccagcctgccaatgcccagatcggcctgatggagggcaacaccttctgcaccaccctgcagcccaggctcttcaccatggacctgaatgtggtggagcacaaggtgttctacacagagctgctgaacctgtgtgaggccgaggacagcgccctgaccaagctgccctgctacaagagcctgcccagcctggtgcccctgagaattgctgccctgaatgccctggccgcctgcaactacctgccccagagccgggagaagatcatcgccgccctcttcaaggccctgaacagcaccaacagcgagctgcaggaggccggggaggcctgcatgaggaagttcctggagggcgccaccatcgaggtggaccagatccacacccacatgaggcccctgctgatgatgctgggggactaccgcagcctgaccctgaatgtggtgaaccggctgacctctgtgaccaggctcttccccaacagcttcaatgacaagttctgtgaccagatgatgcagcacctgaggaagtggatggaggtggtggtgatcacccacaagggcggccagaggagtgatggaaatgaaagcatcagtgaatgtggccgctgccccctgagccccttctgccagtttgaggagatgaagatctgcagcgccatcatcaacctcttccacctgatcccagctgccccccagaccctggtgaagcccctgctggaggtggtgatgaagacagagcgggccatgctgattgaggccggcagccccttccgggagcccctcatcaagttcctgaccaggcaccccagccagacagtggagctgttcatgatggaggccaccctgaatgacccccagtggagcaggatgttcatgtccttcctgaagcacaaggatgcccggcccctgagagatgtgctggccgccaaccccaaccgcttcatcaccctgctgctgcctggaggagcccagacagctgtgcggcccggcagccccagcaccagcaccatgaggctggacctgcagttccaggccatcaagatcatcagcatcatcgtgaagaatgatgacagctggctggccagccagcacagcctggtgtcccagctgcggcgggtgtgggtgtctgagaacttccaggagcggcacaggaaagaaaacatggccgccaccaactggaaggagcccaagctgctggcctactgcctgctgaactactgcaagaggaactacggggacatcgagctgctcttccagctgctgcgggccttcaccggccgcttcctgtgcaacatgaccttcctgaaggagtacatggaggaggagatccccaagaactacagcatcgcccagaagagggccctcttcttccgctttgtggacttcaatgaccccaactttggagatgagctgaaggccaaggtgctgcagcacatcctgaacccagccttcctgtacagctttgagaagggggagggggagcagctgctgggcccccccaaccctgagggggacaaccctgagagcatcacctctgtgttcatcaccaaggtgctggaccctgagaagcaggccgacatgctggacagcctgcgcatctacctgctgcagtatgccaccctgctggtggagcacgccccccaccacatccatgacaacaacaagaacagaaacagcaagctgcggcggctgatgacctttgcctggccctgcctgctgagcaaggcctgtgtggaccctgcctgcaagtacagcggccacctgctgctggcccacatcatcgccaagtttgccatccacaagaagatcgtgctgcaggtgttccacagcctgctgaaggcccacgccatggaggcccgggccatcgtgcggcaggccatggccatcctgaccccagctgtgcctgccaggatggaggatggccaccagatgctgacccactggaccaggaagatcatcgtggaggagggccacacagtgccccagctggtgcacatcctgcacctgattgtgcagcacttcaaggtgtactaccctgtgcgccaccacctggtgcagcacatggtgtctgccatgcagaggctgggcttcaccccatctgtgaccatcgagcagaggcggctggccgtggacctgtctgaggtggtgatcaagtgggagctgcagaggatcaaggaccagcagcctgacagcgacatggaccccaacagcagtggagagggcgtgaacagcgtgagcagcagcatcaagaggggcctgtctgtggacagcgcccaggaggtgaagcgcttcagaacagccactggagccatctctgctgtgtttggccgcagccagagcctgcctggagctgacagcctgctggccaagcccatcgacaagcagcacacagacacagtggtgaacttcctgatccgggtggcctgccaggtgaatgacaacaccaacacagctggcagccctggagaggtgctgagccgccgctgtgtgaacctgctgaagacagccctgcggccagacatgtggcccaagtctgagctgaagctgcagtggtttgacaagctgctgatgacagtggagcagcccaaccaggtgaactacggcaacatctgcaccggcctggaggtgctgtccttcctgctgactgtgctgcagagccctgccatcctgagcagcttcaagcccctgcagaggggcattgctgcctgcatgacctgtggcaacaccaaggtgctgcgggctgtgcacagcctgctgagccggctgatgagcatcttccccacagagcccagcaccagctctgtggccagcaaatatgaggagctggagtgcctgtatgctgctgtgggcaaggtgatctatgagggcctgaccaactatgagaaggccaccaatgccaaccccagccagctgtttggcaccctgatgatcctgaagagcgcctgcagcaacaaccccagctacatcgacaggctcatctctgtgttcatgaggagcctgcagaagatggtgcgggagcacctgaacccccaggccgccagcggcagcacagaggccaccagcggcaccagcgagctggtgatgctgagcctggagctggtgaagacccggctggccgtgatgtccatggagatgaggaagaacttcatccaggccatcctgaccagcctgattgagaagagcccagatgccaagatcctgcgggctgtggtgaagatcgtggaggagtgggtgaagaacaacagccccatggccgccaaccagacccccaccctgcgggagaagagcatcctgctggtgaagatgatgacctacatcgagaagcgcttccctgaggacctggagctgaatgcccagttcctggacctggtgaactacgtgtacagagatgagaccctgagcggcagcgagctgacagccaagctggagcccgccttcctgagcggcctgcgctgtgcccagcccctcatccgggccaagttctttgaggtgtttgacaacagcatgaagagaagagtgtatgagcggctgctgtatgtgacctgcagccagaactgggaggccatgggcaaccacttctggatcaagcagtgcatcgagctgctgctggccgtgtgtgagaagagcacccccatcggcaccagctgccagggcgccatgctgcccagcatcaccaacgtcatcaacctggccgacagccatgaccgggccgcctttgccatggtgacccacgtgaagcaggagccccgggagcgggagaacagcgagagcaaggaggaggatgtggagattgatattgagctggcccctggggaccagaccagcacccccaagaccaaggagctgtctgagaaggacatcggcaaccagctgcacatgctgaccaacagacatgacaagttcctggacaccctgcgggaggtgaagacaggagccctgctgagcgcctttgtgcagctgtgccacatcagcaccaccctggccgagaagacctgggtgcagctgttcccccggctgtggaagatcctgagtgaccggcagcagcacgccctggccggggagatcagccccttcctgtgcagcggcagccaccaggtgcagagggactgccagcccagcgccctgaactgctttgtggaggccatgagccagtgtgtgccccccatccccatccggccctgtgtgctgaagtacctgggcaagacccacaacctgtggttccgcagcaccctgatgctggagcaccaggcctttgagaagggcctgagcctgcagatcaagcccaagcagaccacagagttctatgagcaggagagcatcaccccaccccagcaggagatcctggacagcctggccgagctgtacagcctgctgcaggaggaggacatgtgggccggcctgtggcagaagcgctgcaagtacagcgagacagccacagccatcgcctatgagcagcacggcttctttgagcaggcccaggagagctatgagaaggccatggacaaggccaagaaggagcacgagaggagcaatgccagccctgccatcttccctgagtaccagctgtgggaggaccactggatccgctgcagcaaggagctgaaccagtgggaggccctgacagaatatggccagagcaagggccacatcaacccctacctggtgctggagtgtgcctggagggtgagcaactggacagccatgaaggaggccctggtgcaggtggaggtgtcctgccccaaggagatggcctggaaggtgaacatgtaccggggctacctggccatctgccaccctgaggagcagcagctgtccttcatcgagcggctggtggagatggccagcagcctggccatccgggagtggaggcggctgccccacgtggtgagccacgtgcacacccccctgctgcaggccgcccagcagatcatcgagctgcaggaggccgcccagatcaatgccggcctgcagcccaccaacctgggcaggaacaacagcctgcatgacatgaagacagtggtgaagacctggaggaaccggctgcccatcgtgtctgatgacctgagccactggagcagcatcttcatgtggaggcagcaccactaccagggcaagcccacctggagcggcatgcacagcagcagcatcgtgacagcctatgagaacagcagccagcacgaccccagcagcaacaatgccatgctgggcgtgcacgccagcgccagcgccatcatccagtatggcaagatcgccaggaagcagggcctggtgaatgtggccctggacatcctgagccgcatccacaccatccccaccgtgcccatcgtggactgcttccagaagatccggcagcaggtgaagtgctacctgcagctggccggcgtgatgggcaagaatgaatgcatgcagggcctggaggtgattgagagcaccaacctgaagtacttcaccaaggagatgacagctgagttctacgccctgaagggcatgttcctggcccagatcaacaagtctgaggaggccaacaaggccttctctgctgctgtgcagatgcatgatgtgctggtgaaggcctgggccatgtggggagactacctggagaacatctttgtgaaggagcggcagctgcacctgggcgtgtctgccatcacctgctacctgcacgcctgccgccaccagaatgaaagcaagagcaggaagtacctggccaaggtgctgtggctgctgagctttgatgatgacaagaacaccctggctgatgctgtggacaagtactgcatcggcgtgccccccatccagtggctggcctggatcccccagctgctgacctgcctggtgggcagcgagggcaagctgctgctgaacctgatcagccaggtgggccgggtgtacccccaggccgtgtacttccccatccgcaccctgtacctgaccctgaagattgagcagcgggagcgctacaagagtgaccccggccccatccgggccacagcccccatgtggcgctgcagccgcatcatgcacatgcagcgggagctgcaccccaccctgctgagcagcctggagggcatcgtggaccagatggtgtggttccgggagaactggcatgaggaggtgctgcggcagctgcagcagggcctggccaagtgctacagcgtggcctttgagaagtctggagctgtgtctgatgccaagatcaccccccacaccctgaactttgtgaagaagctggtgtccaccttcggcgtgggcctggagaatgtgtccaatgtgtccaccatgttcagcagcgctgccagcgagagcctggcccggcgggcccaggccacagcccaggaccctgtgttccagaagctgaagggccagttcaccacagactttgacttctctgtgcccggctccatgaagctgcacaacctgatcagcaagctgaagaagtggatcaagatcctggaggccaagaccaagcagctgcccaagttcttcctgattgaggagaagtgccgcttcctgagcaacttcagcgcccagacagctgaggtggagatccctggagagttcctgatgcccaagcccacccactactacatcaagatcgcccgcttcatgccccgggtggagatcgtgcagaagcacaacacagctgcccggcggctgtacatccggggccacaacgggaagatctacccctacctggtgatgaatgatgcctgcctgacagagagccggcgggaggagcgggtgctgcagctgctgcggctgctgaacccctgcctggagaagaggaaggagaccaccaagaggcacctgttcttcaccgtgccccgggtggtggccgtgagcccccagatgaggctggtggaggacaaccccagcagcctgagcctggtggagatctacaagcagagatgtgccaagaagggcatcgagcatgacaaccccatcagccgctactatgaccggctggccaccgtgcaggcccggggcacccaggccagccaccaggtgctgcgggacatcctgaaggaggtgcagagcaacatggtgcccaggtccatgctgaaggagtgggccctgcacaccttccccaatgccacagactactggaccttcaggaagatgttcaccatccagctggccctgattggatttgctgagtttgtgctgcacctgaaccggctgaaccctgagatgctgcagatcgcccaggacaccgggaagctgaatgtggcctacttccgctttgacatcaatgatgccaccggggacctggatgccaacagacctgtgcccttccggctgacccccaacatcagcgagttcctgaccaccatcggcgtgtctggccccctgacagcctccatgattgctgtggcccgctgctttgcccagcccaacttcaaggtggatggcatcctgaagacagtgctgagagatgagatcatcgcctggcacaagaagacccaggaggacaccagcagccccctgtctgctgctggccagcctgagaacatggacagccagcagctggtgtccctggtgcagaaggctgtgacagccatcatgacccggctgcacaacctggcccagtttgagggcggggagagcaaggtgaacaccctggtggccgccgccaacagcctggacaacctgtgcaggatggaccctgcctggcacccctggctgtag

SEQ ID NO: 87271 - DNA, 11580 bp, Artificial Sequence
  derived and/or modified sequence
atggccttcgtggccacccagggcgccaccgtggtggaccagaccacccttatgaagaaatacctgcaatttgtagcggctctaacagacgtaaacaccccggatgaaacaaagttaaagatgatgcaggaagtgtccgagaattttgagaatgttacctccagcccccaatattccactttcttagagcacattattcctagatttctcacattcctgcaggatggggaagtgcaatttctccaggagaagccagctcaacagctccgtaaactcgtgcttgagataattcacaggatccccactaacgaacaccttagaccccacactaagaatgtcttaagcgtaatgttccggtttctggagacagagaatgaagaaaacgtccttatatgtctgcgcattattatagaattgcataaacagtttagaccaccaatcactcaggagattcatcacttcttggatttcgtgaaacaaatctacaaggaattgccgaaggtggtcaaccgatactttgaaaatccccaggttataccagaaaatactgtgcctccccctgagatggtggggatgatcactaccattgccgtaaaagttaaccctgagagagaggattctgagactcgaactcacagcatcattccaaggggtagcctgagcttgaaggtactcgcagaattgccaattatcgtggtccttatgtaccagctatacaaactgaacatccacaatgttgtggccgagttcgtacccttgatcatgaatacaattgccattcaggtttccgcccaagctaggcagcacaaactctataataaggagctgtacgctgatttcattgcagcgcagattaaaacgctctcattcctagcatacatcatccggatttaccaggagctagtgaccaagtactcacagcagatggttaagggaatgctacagctgctgagcaactgtcccgctgaaaccgcccacttgcgaaaagagttgctcatagcagccaaacacattctgactaccgaactgagaaatcagttcattccctgtatggataagctgtttgatgagtcaattttgatcgggtcaggatacacagcccgagagaccctgagacctctggcctattccaccttggccgacctggtgcaccacgtgaggcaacacctgcccctgagtgatctctccctcgcagttcagctctttgcaaagaacattgacgacgaaagtcttccctcgagcatccagactatgtcttgcaaacttctcctgaatttggtcgattgcattaggagtaagagcgaacaggaatctgggaatgggcgcgacgtgctgatgaggatgctggaggtgttcgtgctcaagtttcatacaatcgctcgttatcaactgtcggcgatcttcaagaagtgcaaacctcaatctgaactgggcgccgtagaggctgcactgcccggcgtgcctacagctcccgccgctcctggacccgcccctagtccagccccagtcccagcgccacctccccctccacctcctccgcctccggccacccctgttactcccgctcctgtgccacctttcgagaaacagggtgagaaggataaggaagacaagcagacatttcaagtcaccgactgccgttcactggtgaaaaccctggtgtgtggcgtgaagactataacctgggggattacatcttgcaaagctccgggagaggcccaatttattcccaataagcagctccagcccaaggaaactcaaatttacatcaagcttgtgaagtatgccatgcaggctctggacatctaccaggtacagatcgccgggaatggccagacatatatacgcgtcgccaattgtcagacggtccgcatgaaagaggaaaaagaggtcctggagcactttgcaggagtgttcacgatgatgaatccgctgacttttaaagaaatctttcagactaccgtcccatacatggtcgaaagaatctctaaaaactatgccctgcagatagtcgccaattcctttctagctaacccaactactagcgcactgtttgctaccatcctcgtagaatacctgctggataggctgccagaaatgggctctaacgtggagctgagtaacttgtacctaaaattattcaagctggttttcgggtctgtcagtcttttcgcggccgagaatgagcagatgttaaagccacatctgcacaaaattgtcaactcatctatggaactcgcccagaccgccaaagagccgtataactatttccttcttctccgcgccctctttcggtccatcggcggcggatcgcacgatttgctgtaccaggagtttttgcccctcctgcctaatctgcttcaaggtctgaatatgctgcagtctggtttgcacaagcagcacatgaaggatctttttgtcgaactatgcctgacagtgcctgtgcgactgtcttcgctgctcccatatctacctatgttaatggatcctttagtctcagcactgaacggctcccaaacccttgtgagccagggcctgcgaactctggagctttgcgtggacaatctgcagcccgactttctatacgatcatatacagcctgttcgcgctgaattaatgcaggctttgtggcggacccttaggaaccccgcagactcgatatctcacgtcgcttatcgagtcttaggcaagtttggggggagcaatcggaaaatgctgaaagagtctcagaaactgcattatgtggtaaccgaagtacagggtccatccatcacagtcgaattttccgattgtaaggcctcgctacagctaccaatggagaaagcaattgagacagccctggactgcttgaagtctgctaataccgagccctattacagacggcaggcttgggaagttatcaagtgttttctcgtggccatgatgtctctggaagacaataagcacgcactctaccagcttctcgctcacccaaacttcacggaaaaaaccatacccaacgttatcattagccacagatacaaggctcaggacacgccggcacggaaaacgttcgaacaggcgttgacaggagcttttatgtccgcggttatcaaagacctgcggccaagcgctttaccatttgtggcctcattgattcggcattatacaatggtcgccgtggcccagcaatgtgggccattcctgctaccatgctaccaggtgggctctcagccttccacagccatgtttcattctgaagagaatggaagtaagggcatggaccccctggtgctcattgacgcgattgccatctgcatggcctatgaggagaaggagctgtgcaagataggcgaggttgcactggctgtaattttcgatgttgcaagcatcattctgggctcgaaggaaagagcgtgccagcttccgctgtttagttacatagttgagaggttgtgcgcctgttgttacgaacaggcctggtacgcaaaacttggtggtgtagtgagcatcaagttcctgatggagaggttgcccttgacctgggtgctgcagaaccagcaaacattccttaaggcacttctgtttgttatgatggacttgactggcgaggtgtccaatggtgcagtcgccatggctaaaaccacactcgagcagctgctgatgaggtgcgcaactcccctcaaggacgaagaaagagctgaggagattgtggcagcccaagagaagtctttccatcatgttacccatgatctggtgagagaggtcactagccccaatagtacggtgcgtaagcaggcaatgcatagcttgcaagttttggcccaggtcactggcaaatctgtgactgtgattatggagccccacaaagaagtgctacaggacatggtgcccccaaaaaagcatttattgagacatcagccagcgaacgcacagatagggctaatggaagggaatactttctgcaccaccctacagccacgactgttcactatggatttaaatgtggtcgaacacaaagtgttctacacggagctcttgaacctgtgtgaagctgaagacagtgccttgactaaattaccgtgctataaatcactgccttcccttgtccccctccggatcgcggctctcaacgctctggccgcctgtaactaccttccccagtcaagagaaaagatcatcgccgccctattcaaggccctgaattccaccaatagcgaactccaggaagcaggagaggcctgcatgaggaagttcttggagggcgctactattgaagtggaccagattcatacccacatgaggccactcctaatgatgctgggagactacagatctctcacgctcaacgtggttaatcggctgacttctgtgacacgcctctttcctaactccttcaacgacaaattctgtgatcaaatgatgcagcacctgcgcaagtggatggaagtagttgtgatcacccacaagggagggcagcggagcgatggaaacgaatcgatatcagaatgtggccggtgccccctgtcgccattttgccagttcgaagaaatgaagatatgtagcgctatcattaatctgttccacttaatacctgcggctccacagaccttggtgaaacctctcttggaggttgtcatgaagactgaaagagctatgctgatagaagccggttctccattcagagagcctctgatcaagtttctgaccaggcatcccagtcaaaccgtggaattatttatgatggaggcgaccctgaacgatcctcaatggtctcgtatgttcatgtcttttctgaagcataaggacgcaaggccgctgcgcgatgtccttgctgctaacccgaaccggtttatcacactccttttgccgggtggggcccaaactgccgttaggcccgggtccccatccacatcaactatgcgccttgatctgcaatttcaagctataaaaatcatctcaattattgtgaaaaacgatgacagttggctggcttcacagcatagtcttgtctcccagcttagacgagtgtgggtcagcgaaaattttcaggaacgtcatagaaaggaaaacatggcagccaccaactggaaagaacccaaattactggcttactgtctgctcaactactgcaagcggaactacggcgacatagaacttctgttccagctgctgcgggcatttaccggtcgctttctgtgcaacatgactttccttaaggagtacatggaagaggagattccaaaaaactactcaattgcccagaagcgcgctctgttctttcgctttgtggacttcaacgatccaaacttcggagatgaacttaaggcaaaagttctgcagcacatcctcaaccccgctttcctgtattctttcgaaaaaggcgaaggggagcagctgttgggacccccaaacccagagggcgataatcctgaatctattacctctgtatttataacaaaggtgctggatcccgaaaaacaagccgacatgctggactcgctaaggatttacttgctacagtacgctacacttctcgtggaacatgctccccaccatatacacgacaacaataaaaaccggaactctaagctgcgccggctgatgacgtttgcttggccatgcctgctctcaaaggcatgcgtggatccagcttgtaagtactccggtcacctgctccttgcacatatcatcgccaaatttgccatacataagaagatcgtcttgcaggtgttccacagcttactgaaagcccatgccatggaagctcgcgcgatcgttcgacaagcaatggctattctgactccggcagtgcccgccaggatggaagatggccaccagatgttaacccattggacccgaaaaatcatcgtcgaggagggccacactgtgccccagctcgtccatatcctgcatttaattgtgcagcacttcaaggtctactaccctgtcaggcaccatttagtgcagcatatggtgtcagctatgcaaaggctggggttcactccgagtgttaccatcgaacagcggcgactcgctgtggatctcagtgaagtggttataaaatgggaactgcagagaataaaagatcagcaaccagattccgatatggatcccaactcttccggagagggagtgaattcagtgagcagttctatcaagcgcggactgtcagtggacagtgcacaggaagttaaaaggtttaggacagctaccggtgccatctcagcggtgttcggtcggtctcaatctctgccgggagcggacagcctgctcgccaagcctatagataagcaacacactgacacagtggtaaactttctcattcgcgttgcatgccaggtcaacgacaataccaataccgccggttctcctggagaggtgctgagtcgccgatgtgtgaacctgctgaaaacggcccttcgtcccgatatgtggccaaaaagtgagcttaagctacagtggtttgacaaactcttgatgaccgtcgaacagccaaaccaggtcaactacggtaacatctgtacaggcctggaggtcctttcattcctcctcaccgtgttgcaaagtccagccattctttcgagcttcaaacctcttcagcgggggatagctgcttgtatgacttgcggcaacacgaaagtgcttagggcagtgcacagtctgctttcacgtcttatgtctatttttccgacagaaccttcgacctccagtgtggcctccaaatacgaggaactggagtgcctttacgccgcagtgggcaaagtgatatacgagggtctgacaaactatgaaaaggcaaccaatgctaacccaagtcagctatttggcactctgatgatattgaagtccgcctgcagtaacaatcccagctacatcgacaggcttatcagtgtttttatgagatcactgcagaaaatggtccgcgagcacctcaacccacaggcggcctctggaagcacagaggctacaagtgggacaagcgaattagtgatgctgagcctggagttagtgaagacaaggctggccgtcatgtccatggagatgagaaaaaactttattcaggcgatattgacctctctgattgagaaatcgccagacgccaaaattctccgcgccgttgtgaagattgtcgaggaatgggtcaagaacaacagtccaatggccgccaatcagactcccaccttgcgggagaaatctatactgcttgttaaaatgatgacgtatattgagaagagatttcccgaggacctcgagctcaacgcccaattcctggacctggtcaattacgtatacagagacgaaactcttagcggctcagagcttactgccaagttagaacctgcattcctctccggcctgcgctgcgctcagccactcattagagcaaaattttttgaagtgttcgacaatagcatgaagcggagagtctatgaacgcctgttatacgttacctgctctcagaactgggaagctatgggaaatcacttttggattaaacagtgtatcgaactgctcctggcagtctgcgaaaagtctactcctatagggacctcctgtcaaggtgccatgctgcctagcattacaaacgtgatcaatctcgctgattcgcacgacagagccgcattcgcgatggtgacacatgtgaaacaagagccccgtgaaagagaaaattcggagagtaaggaagaggatgtggagatcgatatcgagttggctcctggggaccagaccagtacccctaaaactaaggagctgagcgagaaagacatagggaaccagctgcacatgctgacaaacaggcacgacaagttcctcgacaccctgagagaagtcaagaccggtgcgttgctcagcgcctttgtccagctttgtcacataagcacaactctggctgagaagacctgggtccagctcttcccaaggctgtggaagatcctctcagacaggcagcagcacgccctagccggcgagatatccccattcttgtgctcgggttctcaccaagtgcagcgcgattgccaacccagcgccttgaattgcttcgttgaggccatgtcccagtgcgtgccacctatcccaataaggccatgtgtgctaaagtacctggggaagacccacaacctgtggtttcgttccacgctcatgctggagcaccaggcgtttgagaaagggcttagcctccagattaagccaaagcagacgacagaattttacgaacaggaaagtatcaccccgccacaacaggaaatccttgatagtctcgccgaactgtattccctccttcaggaagaagatatgtgggccgggctctggcaaaagaggtgtaagtactctgagacagccacagccatcgcctacgaacagcatggtttcttcgaacaggcccaggagtcatacgagaaagcaatggacaaagctaagaaggaacacgaacgtagtaacgcctcaccagctatcttccctgagtaccagttgtgggaggaccactggattcgctgctctaaagaattgaaccagtgggaggccttaaccgagtacgggcagtccaagggccacatcaatccctatcttgtcctcgagtgtgcttggcgagtgagcaactggaccgccatgaaggaagctctggtgcaagtggaggttagctgtccaaaggagatggcctggaaagtgaatatgtatcggggctacctcgccatttgtcaccctgaagagcagcagctgagttttatcgagcgacttgttgagatggcatcgagcctggccatacgggagtggcgccggttgccccatgtagtctcgcacgtacatacaccactactacaggccgctcagcagatcatcgaacttcaggaggccgctcagataaacgccggtcttcagccaacaaatctgggccgtaataacagcctgcacgatatgaagactgtggtgaaaacatggcgcaatcgcctacctatcgtgagtgatgacctgagtcactggtcatcgattttcatgtggaggcagcaccactatcaagggaagccaacctggtctggtatgcactcctcaagcatagtcacagcatacgagaactcttcacagcacgatccctcctcaaataacgctatgctaggtgtgcacgctagcgcctcagctatcatccagtacgggaaaatagctcggaaacagggcctggtgaacgtcgccctggatattttatctcgtatacatactatccccacagtgcccatcgtagattgctttcagaagataagacagcaagttaagtgttatcttcaattggcgggcgtgatgggcaagaacgaatgtatgcagggcctcgaggttatagaatctactaatcttaagtatttcacaaaggagatgaccgcggagttttacgccctgaaagggatgtttctggcacagatcaataagtcagaggaagccaataaggcattctctgccgcagtgcagatgcacgacgtgctggtaaaagcgtgggcaatgtggggtgactacctggaaaatattttcgttaaagagagacagttgcatctcggagtaagcgcgattacttgctacttgcatgcatgtaggcatcaaaacgagtctaagagccggaagtacctcgccaaagtcctgtggctgctaagtttcgacgatgataagaacacactggccgacgcagtagacaaatattgcatcggggtgcccccaatccagtggcttgcctggatcccacagttactgacatgtctggtagggtccgaaggcaagttattattaaaccttataagccaagtggggcgggtgtacccacaagcagtgtattttccaatccggacgctgtaccttacccttaaaattgagcaaagagaacgttataagtctgatccaggccccatcagagccaccgctcctatgtggcgttgttcccggatcatgcacatgcaaagggaactgcaccccacgctgttgagcagtctagaaggtatcgtggaccagatggtgtggttccgggaaaactggcatgaggaggtgctacgacagctgcagcagggtttggcgaaatgttacagcgtggctttcgaaaaatcaggcgccgtctccgatgcaaaaataactcctcacaccctcaacttcgtgaagaaactcgtgtcgacttttggagtgggcttggagaacgtgtccaacgtgtccaccatgttttcctccgcagcttccgaaagcctcgcgagacgcgcacaggctactgcacaggatcctgttttccagaaactgaaagggcagttcacaacggatttcgacttctctgtgcctggcagcatgaagcttcataaccttatttcaaagctcaaaaagtggattaagattctggaggcaaaaactaagcagctgccgaagttttttctgatcgaggaaaaatgtcgattcctgagcaatttctctgcacagaccgctgaggttgagatccccggtgaatttctgatgccaaaacccacacactactacattaagatagcacggttcatgccacgcgtggaaattgtgcagaagcacaacaccgctgcaagaaggctgtacataaggggccataatggcaaaatctacccttacttagttatgaatgacgcctgccttactgagtctaggcgcgaggaacgtgtgttgcagctccttcggctcctcaatccctgcttggagaagcggaaagaaacgaccaaacgtcacttattctttacagtccctcgtgtcgttgcagtgtccccacaaatgagactggtagaggacaaccctagctcattaagtctagtggagatatacaagcaacgttgcgcaaaaaagggcatcgagcacgacaatccaatttccaggtattatgaccgactggctaccgtccaggcgcgtggcactcaggcctcgcatcaggtgctcagagatatcctcaaagaggttcagtctaacatggtcccgcgctcgatgctgaaagagtgggcccttcatacattcccaaatgccaccgactattggacgtttcgcaagatgtttaccatccagctggccttaatcgggttcgcagaatttgtcctgcacctcaatagattaaacccagagatgttgcagatagcccaggacactggcaaattgaacgtggcatactttcgctttgacatcaacgacgcgaccggagatctcgatgcgaaccgacccgtcccctttcgcctaacccctaatatctcggagttcctcacaactatcggcgtgagcggcccccttaccgccagtatgatcgctgtggcccgctgcttcgcccagcccaatttcaaggttgacggtatcctgaagacggtcctgcgcgacgagatcatcgcttggcacaaaaagactcaggaggatactagcagtcccctttcggccgcaggccagcccgagaacatggactctcagcagctggtgtcactggtgcagaaggctgtgactgcgattatgacccgactccacaacctggcccaatttgaaggtggtgaatcgaaggtcaatactcttgttgctgcagccaactctcttgacaacctgtgccgcatggaccctgcgtggcatccatggttgtag

SEQ ID NO: 87272 - DNA, 11580 bp, Artificial Sequence
  derived and/or modified sequence
atggcatttgtagccacacagggcgctacagtcgttgaccagaccaccctgatgaaaaagtatctacagttcgtggccgcactcactgatgtcaatacgcccgatgaaaccaaattgaagatgatgcaggaagtgtccgaaaatttcgagaatgtgaccagttcacctcagtacagtacgttcctcgagcacatcatcccgcgttttctgacgttcctgcaggacggtgaggtccaattcctgcaggagaagcccgctcagcagctgcggaagctggttctggagattatccatcgcattccaaccaatgagcacctcaggccgcacacaaagaatgtgctgtcagtgatgtttcgctttctcgagacagaaaacgaagaaaacgttttgatatgcctgaggatcataatcgaattacataagcagttccgcccacccattactcaggagatccatcattttctggatttcgtaaaacagatttataaagagcttcccaaggtggtgaaccggtacttcgagaatcctcaagtcatccccgaaaatacagtgccccctccggagatggtcggcatgattactacgattgccgtgaaagtgaatccagaacgagaggactcagagactcgaacacactccataatcccacgtggctctttaagcctcaaggtcctggctgaactccctataatcgtggttcttatgtaccagttatataaactgaatattcacaacgtcgtagccgagttcgtgcccctgataatgaatactatcgcgattcaagtgagcgcccaagccaggcagcacaaactgtataacaaagaactgtatgccgactttattgcagcacagatcaagacattaagttttttagcctacattattagaatttatcaggagctcgtgaccaaatactcacagcagatggttaagggcatgctccagctgctaagcaactgccctgcggagactgctcaccttcgcaaagaactactgatcgccgcaaagcacatccttactacagaactgaggaatcagtttataccctgtatggacaaactttttgacgagagcatcctgattgggtcaggatacaccgcacgagagacgctcagacccctagcatattccaccctcgcagatttggtgcaccacgtacgacagcacctccctctgagcgacttgtcactggcggtgcagctgttcgccaagaacattgacgacgagtcactgccatcatctattcagacgatgtcatgtaaactgctactaaatcttgtcgattgcataaggagtaaatctgagcaggaaagtggcaatggcagggacgtcctcatgaggatgctcgaggtcttcgttcttaagttccatacaatcgctcgctatcagctctccgctatctttaagaagtgcaaacctcagagcgagcttggcgcagtagaggcagcactccctggagtgccaacagcccctgccgcacccggacccgcaccgagtcccgcaccagtccccgctcctcccccaccccctcctcctcccccacctgcaacacctgtcacgcctgcccctgtgcccccattcgaaaagcagggtgagaaggataaagaggacaagcaaactttccaggtgaccgattgccgaagtcttgtcaaaacattggtctgtggagttaagaccattacgtggggaatcaccagctgcaaggcccctggagaagcccagttcatccctaacaagcagttgcagcctaaggaaactcagatttacatcaagctcgtgaaatacgccatgcaagctctggatatctaccaggtgcagatcgccggaaatggccagacctacatcagagtagctaattgtcagacagtgcggatgaaagaggagaaagaagtgttggagcacttcgctggcgtatttactatgatgaatccactgaccttcaaggaaatctttcaaacgactgtgccctatatggtagagagaataagtaagaattatgctctccagatcgtggcaaacagtttcttggccaacccaactacatccgctctttttgccacaatcttagtggaatacctcctggataggctgcccgaaatgggttcaaacgtggagctttccaacctgtatcttaagctgtttaaacttgtttttggctcggtgtcactgtttgccgctgagaatgagcagatgctgaagccacatctgcacaagattgtgaattcctctatggaactggcccagacggccaaagaaccatacaattactttctcctcttacgagctcttttccgctctatcggaggtggttcccacgatctcttgtaccaggagttcttgccgttgctgcctaacctgttgcagggcctcaatatgttgcagagtgggctccataaacagcacatgaaagacctcttcgtagagctgtgcctgaccgttccagtcagactgtccagcttacttccatatctgccaatgctgatggaccccctcgtgtccgcactgaatggcagtcagaccctggtgtcgcaagggctgcgtactcttgagctgtgtgtagacaatctccagcctgattttctgtatgatcacattcaacctgtgcgggctgagctgatgcaggccctgtggcggacactaaggaaccccgcagacagcatctctcacgttgcgtatcgggtgttgggtaagtttggcggaagcaatcgcaaaatgctgaaggagtcccagaagctgcactacgttgtcaccgaggtgcaggggccttctattaccgtggaattctctgactgcaaggcaagtctgcagttacctatggagaaagccatagagactgcattggattgtctaaagagtgccaacactgagccatactataggcggcaggcatgggaggttattaaatgttttctggttgcgatgatgtccctggaagataataaacatgcactataccagctcctggctcaccccaattttacagaaaagaccattcccaacgtgattatctctcaccgctataaggcccaggatacccccgctagaaaaacttttgaacaggcactgacaggtgcttttatgagcgcagtaataaaggacctgcgacccagcgccctgccttttgtagcttcactgattcggcactacacaatggtggctgtcgcacagcagtgcggaccttttctcttaccctgttatcaagtcggatcgcagccaagcactgcgatgtttcactcagaggagaacggttctaaggggatggacccgctggtcctaatcgacgccattgctatttgcatggcctacgaagagaaggaactgtgcaagattggagaggttgcattggcagtgatattcgacgtggcgtctatcatcttgggaagtaaggagcgagcttgtcagttgcctctgtttagctacatcgtggagaggttgtgtgcctgctgttacgagcaggcatggtatgccaagctggggggtgtggtatccatcaagttcctgatggagcgcctgcccctgacttgggtgctccagaatcagcagactttcctgaaggccctgctctttgtcatgatggatctgacgggggaagtatccaatggagcagtagcaatggccaaaacgactctggagcaactgctgatgcgctgcgccacaccacttaaggatgaagagagggctgaggagatcgtcgccgcacaggaaaagtccttccatcatgtgacccatgacctggtcagagaggtcacttccccaaacagtaccgtcaggaagcaggccatgcatagcctgcaggtccttgcccaggttacgggtaaatccgtaacagtaatcatggagccacacaaagaagtactccaggacatggttccccctaagaagcacctgctccgccaccagccagccaacgcccagattgggctgatggaagggaacactttttgcaccaccctgcaacccagactgtttaccatggaccttaatgttgtcgagcataaagtcttttataccgagcttctgaacctgtgcgaagcggaagatagcgccctaactaaactcccttgctataagagcctgccttctcttgtgccgctaagaatcgccgctctgaacgccttggcagcctgtaactaccttcctcagtctcgggagaaaattatagccgcactattcaaagcactgaacagcacaaattcagaactccaagaggccggagaggcttgcatgaggaaattcctcgaaggcgctacaatcgaagtggaccagattcatacacatatgcgcccactgttgatgatgttgggagactatcgctccctgaccctgaatgtggtaaatcgactgacctctgtcacgagactctttccaaactctttcaacgataagttttgcgatcagatgatgcagcacctgcgtaaatggatggaagttgtggtcatcactcataagggtggccagagatccgacggaaatgagtctattagcgaatgcggacggtgtcccctgagcccgttctgccagttcgaggaaatgaagatctgcagtgcgatcattaacctattccatcttataccagccgctccccagacattggttaagcctttgctcgaagtggtaatgaagacggaaagggccatgctgattgaagccggtagtccattcagggagccactgattaaattcctgacaagacacccctcacagactgttgagttattcatgatggaagccaccttaaacgacccccagtggagccgaatgttcatgagtttcttaaaacacaaggacgcccgacctcttcgagatgtcctggctgcaaatcccaacaggttcataactctgctgctcccaggtggtgcccaaacagccgttcgtcccggatcccctagtacctctaccatgaggctcgacctgcagttccaggcaatcaagatcatttccataatagtcaagaacgacgattcctggcttgctagccagcattccctcgtgtctcagttgcgcagggtgtgggtgtccgaaaattttcaggagaggcaccggaaggagaatatggccgcaaccaattggaaggagcccaagttgctggcgtattgcctcctcaattattgcaagaggaactatggagatatcgagctgttgtttcaactcctcagggcttttactgggaggttcctgtgcaatatgacttttttaaaagagtacatggaggaagagatcccaaagaactatagtatcgcccagaagcgtgcactgttttttcgatttgtcgatttcaatgaccctaatttcggggatgagctaaaggcaaaggtgctgcagcacatactcaacccggctttcttgtactccttcgaaaaaggggaaggcgagcagctgcttgggccacctaacccagaaggtgataatccagagtccattaccagcgtgtttattaccaaggtgcttgaccctgaaaagcaggctgacatgcttgatagcctgagaatttatctccttcagtacgcaaccttgctagtggagcatgcgccacatcatattcacgataacaataaaaataggaactcaaaacttcgaaggctgatgacattcgcctggccttgtctcttgagcaaagcatgcgttgatcccgcatgcaagtattccggacacttgctgctcgctcacattatagccaaattcgctatccacaaaaagatcgtgttacaggtctttcattcgctcctcaaagctcacgcaatggaggctagggccattgttagacaggccatggcgattctcactcctgccgtgccagcacgcatggaagacgggcaccaaatgctgacacattggacaaggaagattattgttgaagaggggcacacggtcccacaactggtgcatatcctgcacctgatagtgcagcattttaaggtatattacccggttaggcatcacttggtacagcacatggtctccgcgatgcagagactggggttcacaccctcagtgaccatcgaacagcggagactggccgtcgacttgagcgaggttgttataaaatgggagctgcaacggataaaagatcaacaacctgacagcgacatggaccctaattcgtctggcgaaggagtaaattccgtgtcttcctcaatcaaacgcggactgtctgtcgactcagcacaggaagtgaagcggtttaggactgccactggagccatcagcgcagtgtttggtcggtctcagtcccttccaggagccgactccttattagctaagccgattgataaacagcacaccgacactgtggtaaatttccttataagagtggcgtgccaggtcaacgacaacaccaacaccgccggaagcccaggggaggtactttcaagacggtgtgtaaatctgctgaagactgcactccgccctgacatgtggcctaagtctgagctgaagctccagtggtttgacaaactgttgatgaccgtcgagcagcccaatcaggtgaattacggcaatatttgtacagggctagaggtgctgagcttcctcctgaccgtgctccaatcacccgctatcttatcaagttttaaacccctgcagagggggattgctgcctgtatgacgtgtggcaacaccaaagtgctgcgtgccgttcattctctgctaagtcggctgatgtccatcttccccactgagcctagtacaagcagcgtagcttcgaagtatgaagaattggaatgtctgtatgccgctgttggtaaagtcatatatgaaggcctgaccaactatgaaaaggccactaacgccaatccctcgcaactctttggcacacttatgatccttaagagcgcctgcagcaataaccctagttacattgaccgactcatctctgtgtttatgcgaagcctgcagaaaatggtccgggagcacctgaacccccaggccgcatccggctctactgaggccacctccgggacatctgagctcgtcatgctgtcactggaacttgttaagactagactggctgttatgtctatggaaatgcgcaagaactttatccaggccatcctgacgtccctcattgagaaaagccccgacgctaagatcttgagagccgtggtgaagatcgtggaggaatgggtaaaaaataactcacccatggccgcaaatcagacccccacgttgagggagaagagcatactgcttgtgaagatgatgacctacatcgagaagcggttccccgaggatttggagttaaatgcccagtttcttgatcttgttaattatgtgtaccgggacgaaactctctctgggagcgagctgacagccaagttagaacccgcattcctaagcgggctccgatgcgctcagccgctaatcagagcaaagtttttcgaagtgttcgacaatagcatgaagcgtcgagtgtatgagcggctcctgtacgttacctgcagccagaactgggaagctatgggcaaccacttctggattaagcaatgtatcgagctgttactcgcggtttgtgagaagagcacacccattggcacctcctgccagggcgctatgctgcctagcatcacaaatgttatcaatctggccgattcccacgacagagccgcatttgctatggtaacacatgtcaagcaggaacccagagagagagagaatagcgagtcgaaggaggaagacgtggaaatcgacatagagttggcacctggagaccagacctctactcctaagactaaggagctgtcagaaaaagacatcggaaatcagctccatatgctgacaaacaggcatgataaattcttagatactttgagggaagtgaagaccggcgcactgttgtcagcatttgtgcagctgtgccacattagcaccactctagccgaaaagacatgggtccagctgttcccgaggttatggaagattctgtctgaccgacagcagcatgcgcttgctggagagatcagtccattcctctgttctggcagccatcaggtacagcgggactgtcagcctagtgcgttgaattgcttcgtcgaagcaatgtcacaatgtgtgcctccaatccctatacgcccatgtgtgctgaaatatctgggcaaaacccataatctgtggtttaggtcaacactgatgctggagcaccaggccttcgaaaaaggtctgagcttacagatcaagcctaagcaaacgaccgaattctatgagcaggagagtatcacccccccacagcaagagatcctggattccctggctgaactgtactctttgctgcaagaggaggatatgtgggcaggcttatggcagaaacgctgcaaatattccgagaccgctaccgccatcgcttacgagcaacacggtttttttgaacaggctcaggagtcatacgagaaggctatggataaagccaaaaaagagcatgagaggagcaatgcttcccccgcaattttcccggagtatcagttgtgggaggaccactggatcaggtgcagcaaagaattaaatcaatgggaggccctgacggagtacggccaatcaaagggtcacattaacccctatctggtccttgagtgcgcgtggcgtgtgagtaactggaccgctatgaaagaggcgctggtgcaagtagaggtttcgtgccctaaggaaatggcgtggaaagtcaatatgtatcgaggctatctcgctatttgtcaccccgaggagcagcagttgagtttcatcgaacggctggtcgaaatggcctccagcctggccatcagggagtggcgccgtctcccccatgtggtgtcacacgttcacactccgctcttgcaggccgctcaacagataatagagctacaagaggcggctcagatcaatgctggcctgcagccaactaacttggggcgtaacaactctctgcacgatatgaagaccgttgtgaaaacctggaggaatagactacctatagtctccgatgatctgagccactggtcttctatctttatgtggcggcaacaccactaccagggcaagcctacatggtccggcatgcattcaagctcaatcgtgactgcttacgaaaacagctcacagcacgatccctcctcaaacaacgcgatgctgggtgtgcacgcgtcagccagtgctattattcagtatggcaaaattgccagaaagcagggactggtaaatgtcgctttggatattctgagccggattcacacgatccccacagtgcccatagtcgactgcttccagaagatccggcagcaagtcaaatgttacctgcaactggccggagtcatggggaagaacgaatgcatgcagggactcgaggtgatcgagtccaccaacctgaaatatttcaccaaagaaatgacagctgaattttacgctcttaagggaatgtttctggcccagattaataaatccgaggaagcaaataaagctttctcagccgctgtccagatgcacgatgtgttagtgaaggcctgggccatgtggggagattatctggaaaacatcttcgtaaaggaaagacagctccatctcggcgtgtctgccatcacctgctatctgcatgcctgtagacaccagaatgagtcaaagtctagaaagtacctagcaaaagtcctttggttgctctcattcgacgacgacaaaaatactttggccgacgccgtggacaagtactgcattggggttcccccaatccagtggcttgcctggataccccagcttctgacgtgcctggttggatctgagggaaagctgctcttaaatttgattagccaggtggggagggtttatccccaggctgtgtatttccccattcggactctgtacctcacactgaaaatagagcaacgggagcgttacaagtccgaccccggacccatacgggctactgcgcctatgtggcgctgttctcgcataatgcatatgcagagggaattacatcccacactgctgagctccctggaaggcattgtggaccaaatggtctggtttcgggagaactggcacgaagaagtcctgaggcagctgcagcaggggctggccaagtgttactccgtggccttcgagaaaagcggcgcagtatctgacgcaaagatcactcctcacactctcaacttcgtcaagaagctggtgtctaccttcggggtaggcctggaaaacgtgtctaacgtttcaaccatgttcagtagtgctgctagcgaatcactggccagacgggctcaggctacagcgcaggatcctgtattccagaagctcaaaggccagtttaccactgactttgacttctcagtgccaggatctatgaagctgcataacctgatcagtaagctgaagaagtggatcaaaatcctggaagcgaagactaagcagctcccaaagttctttttaattgaggaaaagtgtcggtttctttcaaactttagcgcccagacggcagaggtggaaattccaggcgaatttcttatgccaaaacccacccattactatatcaagattgctcggtttatgccaagggtcgagattgtgcaaaagcacaacacggcggctcgacgcctatacataagagggcacaatggcaagatttacccatatcttgtcatgaacgatgcctgtctcacagaatcgcggagggaagagcgtgtgctgcagctgttgcgtctccttaatccatgcctagagaaacggaaagagacaaccaagcggcacctgtttttcaccgtaccgcgagtcgtggccgtgtctccacagatgagactggtcgaggataacccttcgtcgctcagtctggtggaaatatataagcaaaggtgcgccaagaagggtatcgagcacgacaatccaatcagtagatactacgataggctcgccaccgtgcaggcacgtggcacacaagcaagccatcaagtccttagagatattctcaaggaggtgcagtcaaatatggtccctaggtcaatgttgaaggaatgggctctccacaccttcccaaacgccactgactattggacctttagaaagatgtttacgatccaactcgccttgatcgggttcgccgaattcgtcttgcatctaaaccgcctgaatcctgaaatgctccaaatcgcacaggacacaggaaaattgaacgtggcgtacttcagatttgatatcaacgatgccaccggggaccttgacgctaatcggccagtacctttccgactgacccccaatatttctgaattcctgaccactattggggtcagcggtccactaacagccagcatgatcgccgtggctaggtgttttgcacagccaaactttaaagtggacggaattctgaaaaccgtgttgcgagatgaaataatagcctggcacaagaagacccaagaggatacatcaagtcctctcagcgccgcaggacagccagaaaacatggacagtcagcagctcgtctccttagtgcagaaagccgtgacagcaattatgaccagattacacaacttggcccaattcgaagggggagagtctaaggtgaatactctcgtggctgccgcaaatagcctcgacaacctctgcagaatggatccagcttggcacccatggttgtac

SEQ ID NO: 87273 - DNA, 12677 bp, Artificial Sequence
  derived and/or modified sequence
cgcgccggggcctggtgctcggtcggcgggtgctgccgctttaagcgggggcgggactgcgcgcggccgagcggttgcgacgagggctcggctgggggtcgccggggtcgcgggccgggcctgcaggagccgggccgccgaggtcggggctggttgaactcatggacctgatacttttctcttgagaagcaaaccagcccaaaagaaaaatggcgtttgttgcaacacagggggccacggtggttgaccagaccactttgatgaaaaagtaccttcagtttgtggcagctctcacagatgtgaatacacctgatgaaacaaagttgaaaatgatgcaagaagttagtgaaaattttgagaatgtcacgtcatctcctcagtattctacattcctagaacatatcatccctcgattccttacatttctccaagatggagaagttcagtttcttcaggagaaaccagcacagcaactgcggaagctcgtacttgaaataattcatagaataccaaccaacgaacatcttcgtcctcacacaaaaaatgttttgtctgtgatgtttcgctttttagagacggaaaatgaagaaaatgttcttatttgtctaagaataattattgagctacacaaacagttcaggccaccgatcacacaagaaattcatcattttctggattttgtgaaacagatttacaaggagcttccaaaagtagtgaaccgctactttgagaaccctcaagtgatccccgagaacacagtgcctcccccagaaatggttggtatgataacaacgattgctgtgaaagtcaacccggagcgtgaggacagtgagactcgaacacattccatcattccgaggggatcactttctctgaaagtgttggcagaattgcccattattgttgttttaatgtatcagctctacaaactgaacatccacaatgttgttgctgagtttgtgcccttgatcatgaacaccattgccattcaggtgtctgcacaagcgaggcaacataagctttacaacaaggagttgtatgctgacttcattgctgctcagattaaaacattgtcatttttagcttacattatcaggatttaccaggagttggtgactaagtattctcagcagatggtgaaaggaatgctccagttactttcaaattgtccagcagagactgcacacctcagaaaggagcttctgattgctgccaaacacatcctcaccacagagctgagaaaccagttcattccttgcatggacaagctgtttgatgaatccatactaattggctcaggatatactgccagagagactctaaggcccctcgcctacagcacgctggccgacctcgtgcaccatgtccgccagcacctgcccctcagcgacctctccctcgccgtccagctcttcgccaagaacatcgacgatgagtccctgcccagcagcatccagaccatgtcctgcaagctcctgctgaacctggtggactgcatccgttccaagagcgagcaggagagtggcaatgggagagacgtcctgatgcggatgctggaggttttcgttctcaaattccacacaattgctcggtaccagctctctgccatttttaagaagtgtaagcctcagtcagaacttggagccgtggaagcagctctgcctggggtgcccactgcccctgcagctcctggccctgctccctccccagcccctgtccctgccccacctccacccccgcccccacccccacctgccacccctgtgaccccggcccccgtgcctcccttcgagaagcaaggagaaaaggacaaggaagacaagcagacattccaagtcacagactgtcgaagtttggtcaaaaccttggtgtgtggtgtcaagacaatcacgtggggcataacatcatgcaaagcacctggtgaagctcagttcattcccaacaagcagttacaacccaaagagacacagatttacatcaaacttgtgaaatatgcaatgcaagctttagatatttatcaggtccagatagcaggaaatggacagacatacatccgtgtggccaactgccagactgtgagaatgaaagaggagaaggaggtattggagcatttcgctggtgtgttcacaatgatgaaccccttaacgttcaaagaaatcttccaaactacggtcccttatatggtggagagaatctcaaaaaattatgctcttcagattgttgccaattccttcttggcaaatcctactacctctgctctgtttgctacgattctggtggaatatctccttgatcgcctgccagaaatgggctccaacgtggagctctccaacctgtacctcaagctgttcaagctggtctttggctctgtctccctctttgcagctgaaaatgaacaaatgctgaagcctcacttgcacaagattgtgaacagctctatggagctcgcgcagactgccaaggaaccctacaactacttcttgctgctacgggcgctgtttcgctctattggtggaggtagccacgatctcttgtatcaggagttcttgcctctccttccaaacctcctgcaagggctgaacatgcttcagagtggcctgcacaagcagcacatgaaggacctctttgtggagctgtgtctcaccgtccctgtgcggctgagctcgcttttgccgtacctgcccatgcttatggatcccttggtgtctgcactcaatgggtctcagacattggtcagccaaggcctcaggacgctggagctgtgtgtggacaacctgcagcccgacttcctctacgaccacatccagccggtgcgcgcagagctcatgcaggctctgtggcgcaccttacgcaaccctgctgacagcatctcccacgtggcctaccgtgtgctcggtaagtttggcggcagtaacaggaagatgctgaaggagtcgcagaagctgcactacgttgtgaccgaggttcagggccccagcatcactgtggagttttccgactgcaaagcttctctccagctccccatggagaaggccattgaaactgctctggactgcctgaaaagcgccaacactgagccctactaccggaggcaggcgtgggaagtgatcaaatgcttcctggtggccatgatgagcctggaggacaacaagcacgcactctaccagctcctggcacaccccaactttacagaaaagaccatccccaatgttatcatctcacatcgctacaaagcccaggacactccagcccggaagacttttgagcaggccctgacaggcgccttcatgtctgctgtcattaaggacctgcggcccagcgccctgccctttgtcgccagcttgatccgccactatacgatggtggcagtcgcccagcagtgtggccctttcttgctgccttgctaccaggtgggcagccagcccagcacagccatgtttcacagtgaagaaaatggctcgaaaggaatggatcctttggttctcattgatgcaattgctatttgtatggcatatgaagaaaaggagctttgcaaaatcggggaggtggccctagctgtgatatttgatgttgcaagtatcatcctgggctccaaggagagggcctgccagctgcccctgttttcttacatcgtggagcgcctgtgtgcatgttgttatgaacaggcgtggtatgcaaagctggggggtgtggtgtctattaagtttctcatggagcggctgcctctcacttgggttctccagaaccagcagacattcctgaaagcacttctctttgtcatgatggacttaactggagaggtttccaatggggcagtcgctatggcaaagaccacgctggagcagcttctgatgcggtgcgcaacgcctttaaaagacgaggagagagccgaagagatcgtggccgcccaggaaaagtctttccaccatgtgacacacgacttggttcgagaagtcacctctccaaactccactgtgaggaagcaggccatgcattcgctgcaggtgttggcccaggtcactgggaagagtgtcacggtgatcatggaaccccacaaagaggtcctgcaggatatggtcccccctaagaagcacctgctccgacaccagcctgccaacgcacagattggcctgatggaggggaacacgttctgtaccacgttgcagcccaggctcttcacaatggaccttaacgtggtggagcataaggtgttctacacagagctgttgaatttgtgtgaggctgaagattcagctttaacaaagctgccctgttataaaagccttccgtcactcgtacctttacgaattgcggcattaaatgcacttgctgcctgcaattaccttcctcagtccagggagaaaatcatcgctgcactcttcaaagccctgaattccaccaatagtgagctccaagaggccggagaagcctgtatgagaaagtttttagaaggtgctaccatagaagtcgatcaaatccacacacatatgcgacctttgctgatgatgctgggagattaccggagcttgacgctgaatgttgtgaatcgcctgacttcggtcacgaggctcttcccaaattccttcaatgataaattttgtgatcagatgatgcaacatctgcgcaagtggatggaagtggtggtgatcacccacaaagggggccagaggagcgacggaaacgaaagcatttccgagtgcgggagatgtcccttgtctccattctgtcagtttgaggaaatgaagatttgctcagcaattataaacctttttcatctgatcccggctgctcctcagacactggtgaagcctttgctagaggttgtcatgaaaacggagcgggcgatgctgatcgaggcggggagtccattccgagagcccctgatcaagttcctgactcgacatccctcgcagacagtggagctgttcatgatggaagccacactgaacgatccccagtggagcagaatgtttatgagttttttaaaacacaaagacgccagacctctgcgggatgtgctggctgccaaccccaacaggttcatcaccctgctgctgccggggggtgcccagacggctgtgcgccccggttcgcccagcaccagcaccatgcgcctggacctccagttccaggccatcaagatcataagcattatagtgaaaaacgatgactcctggctggccagccagcactctctggtgagccagttgcgacgtgtgtgggtgagtgagaacttccaagagaggcaccgcaaggagaacatggcagccaccaactggaaggagcccaagctgctggcctactgcctgctgaactactgcaaaaggaattacggagatatagaattgctgttccagctgctccgagcctttactggtcgttttctctgcaacatgacattcttaaaagagtatatggaggaagagattcccaaaaattacagcatcgctcagaaacgtgccctgttctttcgctttgtagacttcaacgaccccaacttcggagatgaattaaaagctaaagttctgcagcatatcttgaatcctgctttcttgtacagctttgagaagggggaaggagagcagctcttgggacctcccaatccagaaggagataacccagaaagcatcaccagtgtgtttattaccaaggtcctggaccccgagaagcaggcggacatgctggactcgctgcggatctacctgctgcagtacgccacgctgctggtggagcacgccccccaccacatccatgacaacaacaagaaccgcaacagcaagctgcgccgcctcatgaccttcgcctggccctgcctgctctccaaggcctgcgtggacccagcctgcaagtacagcggacacttgctcctggcgcacattatcgccaaattcgccatacacaagaagatcgtcctgcaggtttttcatagtctcctcaaggctcacgcaatggaagctcgagcgatcgtcagacaggcgatggccattctgaccccggcggtgccggccaggatggaggacgggcaccagatgctgacccactggacccggaagatcattgtggaggaggggcacaccgtcccgcagctggtccacattctgcacctgatagtgcaacacttcaaggtgtactacccggtacggcaccacttggtgcagcacatggtgagcgccatgcagaggctgggcttcacgcccagtgtcaccatcgagcagaggcggctggccgtggacctgtctgaagtcgtcatcaagtgggagctgcagaggatcaaggaccagcagccggattcagatatggacccaaattccagtggagaaggagtcaattctgtctcatcctccattaagagaggcctgtccgtggattctgcccaggaagtgaaacgctttaggacggccaccggagccatcagtgcagtctttgggaggagccagtcgctacctggagcagactctctcctcgccaagcccattgacaagcagcacacagacactgtggtgaacttccttatccgcgtggcctgtcaggttaatgacaacaccaacacagcggggtcccctggggaggtgctctctcgccggtgtgtgaaccttctgaagactgcgttgcggccagacatgtggcccaagtccgaactcaagctgcagtggttcgacaagctgctgatgactgtggagcagccaaaccaagtgaactatgggaatatctgcacgggcctagaagtgctgagcttcctgctaactgtcctccagtccccagccatcctcagtagcttcaaacctctgcagcgtggaattgccgcctgcatgacatgtggaaacaccaaggtgttgcgagccgtccacagccttctctcgcgcctgatgagcattttcccaacagagccgagtacttccagtgtggcctccaaatatgaagagctggagtgcctctacgcagccgtcggaaaggtcatctatgaagggctcaccaactacgagaaggccaccaatgccaatccctcccagctcttcgggacccttatgatcctcaagtctgcctgcagcaacaaccccagctacatagacaggctgatctccgtctttatgcgctccctgcagaagatggtccgggagcatttaaaccctcaggcagcgtcaggaagcaccgaagccacctcaggtacaagcgagctggtgatgctgagtctggagctggtgaagacgcgcctggcagtgatgagcatggagatgcggaagaacttcatccaggccatcctgacatccctcatcgaaaaatcaccagatgccaaaatcctccgggctgtggtcaaaatcgtggaagaatgggtcaagaataactccccaatggcagccaatcagacacctacactccgggagaagtccattttgcttgtgaagatgatgacttacatagaaaaacgctttccggaagaccttgaattaaatgcccagtttttagatcttgttaactatgtctacagggatgagaccctctctggcagcgagctgacggcgaaacttgagcctgcctttctctctgggctgcgctgtgcccagccactcatcagggcaaagtttttcgaggtttttgacaactccatgaaacgtcgtgtctacgagcgcttgctctatgtgacctgttcgcagaactgggaagccatggggaaccacttctggatcaagcagtgcattgagctgcttctggccgtgtgtgagaagagcacccccattggcaccagctgccaaggagccatgctcccgtccatcaccaacgtcatcaacctggccgatagccacgaccgtgccgccttcgccatggtcacacatgtcaagcaggagccccgggagcgggagaacagcgagtccaaagaggaggatgtagagatagacatcgaactagctcctggggatcagaccagcacgcccaaaaccaaagaactttcagaaaaggacattggaaaccagctgcacatgctaaccaacaggcacgacaagtttctggacactctccgagaggtgaagactggagcgctgctcagcgctttcgttcagctgtgccacatttccacgacgctggcagagaagacgtgggtccagcttttccccagattgtggaagatcctctctgacagacagcagcatgcactcgcgggtgagataagtccatttctgtgcagcggcagtcaccaggtgcagcgggactgccagcccagcgcgctgaactgctttgtggaagccatgtcccagtgcgtgccgccaatccccatccgaccctgcgtcctgaagtacctggggaagacacacaacctctggttccggtccacgctgatgttggagcaccaggcttttgaaaagggtctgagtcttcagattaagccgaagcaaacaacggagttttatgagcaggagagcatcaccccgccgcagcaggagatactggattcccttgcggagctttactccctgttacaagaggaagatatgtgggctggtctgtggcagaagcggtgcaagtactcggagacagcgactgcgattgcttacgagcagcacgggttctttgagcaggcacaagaatcctatgaaaaggcaatggataaagccaaaaaagaacatgagaggagtaacgcctcccctgctattttccctgaataccagctctgggaagaccactggattcgatgctccaaggaattgaaccagtgggaagccctgacggagtacggtcagtccaaaggccacatcaacccctacctcgtcctggagtgcgcctggcgggtgtccaactggactgccatgaaggaggcgctggtgcaggtggaagtgagctgtccgaaggagatggcctggaaggtgaacatgtaccgcggatacctggccatctgccaccccgaggagcagcagctcagcttcatcgagcgcctggtggagatggccagcagcctggccatccgcgagtggcggcggctgccccacgtagtgtcccacgtgcacacgcctctcctacaggcagcccagcaaatcatcgaactccaggaagctgcacaaatcaacgcaggcttacagccaaccaacctgggaaggaacaacagcctgcacgacatgaagacggtggtgaagacctggaggaaccgactgcccatcgtgtctgacgacttgtcccactggagcagcatcttcatgtggaggcagcatcattaccagggtaaaccgacctggtccggcatgcattcatcatcgattgtaactgcctatgagaatagctctcagcatgatcccagttcaaataacgctatgcttggggttcatgcatcagcttcagcgatcatccagtatggaaaaatcgcccggaaacaaggactggtcaatgtagctctggatatattaagtcggattcatactattccaactgttcctatcgtggattgcttccagaagattcgacagcaagttaaatgctacctccagctggcaggcgtcatgggcaaaaacgagtgcatgcagggccttgaagttattgaatctacaaatttaaaatacttcacaaaagagatgacagccgaattttatgcactgaagggaatgttcttggctcagatcaacaagtccgaggaggcaaacaaagccttctctgcagctgtgcagatgcacgatgtgctggtgaaagcctgggccatgtggggcgactacctggagaacatctttgtgaaggagcggcagctgcacctgggcgtgtctgccatcacctgctacctgcacgcctgccggcatcagaacgagagcaaatcgaggaaatacttagccaaggtgctgtggcttttgagttttgatgatgacaaaaacactttggcagatgccgtcgacaagtactgcattggtgtgccacccatccagtggctggcctggatcccacagctgctcacctgcctggttggctcggagggaaagctgctcttgaacctcattagccaggttggacgcgtgtatccccaagcggtctactttcccatccggaccctgtacctgaccctgaaaatagaacagcgggaacgctacaagagcgatccagggcccataagagcaacagcacccatgtggcgctgcagccgaatcatgcacatgcagcgagagctccaccccacccttctgtcttccctggaaggcatcgtcgatcagatggtctggttcagagaaaattggcatgaagaggttctcaggcagctccaacagggcctggcgaaatgttactccgtggcgtttgagaaaagtggagcggtgtccgatgctaaaatcaccccccacactctcaattttgtgaagaagttggtgagcacgtttggggtgggcctggagaatgtgtccaacgtctcgaccatgttctccagcgcagcctctgagtctctggcccggcgggcgcaggccactgcacaagaccctgtctttcagaagctgaaaggccagttcacgacggattttgacttcagcgttccaggatccatgaagcttcataatcttatttctaagttgaaaaagtggatcaaaatcttggaggccaagaccaagcaactccccaaattcttcctcatagaggaaaagtgccggttcttgagcaatttctcggcacagacagctgaagtggaaattcctggggagtttctgatgccaaagccaacgcattattacatcaagattgcacggttcatgccccgggtagagattgtgcagaagcacaacaccgcagcccggcggctgtacatccggggacacaatggcaagatctacccatacctcgtcatgaacgacgcctgcctcacagagtcacggcgagaggagcgtgtgttgcagctgctgcgtctgctgaacccctgtttggagaagagaaaggagaccaccaagaggcacttgtttttcacagtgccccgggttgtggcagtttccccacagatgcgcctcgtggaggacaacccctcttcactttcccttgtggagatctacaagcagcgctgcgccaagaagggcatcgagcatgacaaccccatctcccgttactatgaccggctggctacggtgcaggcgcggggaacccaagccagccaccaggtcctccgcgacatcctcaaggaggttcagagtaacatggtgccgcgcagcatgctcaaggagtgggcgctgcacaccttccccaatgccacggactactggacgttccggaagatgttcaccatccagctggctctgataggcttcgcggaattcgtcctgcatttaaatagactcaaccccgagatgttacagatcgctcaggacactggcaaactgaatgttgcctactttcgatttgacataaacgacgcgactggagacctggatgccaaccgtcctgtcccatttcgactcacgcccaacatttctgagtttctgaccaccatcggggtctccggcccgttgacagcgtccatgattgcggtcgcccggtgcttcgcccagccaaactttaaggtggatggcattctgaaaacggttctccgggacgagatcattgcttggcacaaaaaaacacaagaggacacgtcctctcctctctcggccgccgggcagccagagaacatggacagccagcaactggtgtccctggttcagaaagccgtcaccgccatcatgacccgcctgcacaacctcgcccagttcgaaggcggggaaagcaaggtgaacaccctggtggccgcggcaaacagcctggacaatctgtgccgcatggaccccgcctggcacccctggctgtgactgtggccgccacggccacccggaatgtgaagggcgctccgggctctgagcccgcagcttttacgacttctccctgcctcgttccttatattcacagaagccccatagtttcactgggttgcggttattttcctggtagtttgcgtgtaagaaagggagaatatagttttagaggaagctgaactatgacgatgctgggcgaagcggttggaaatggcagagctgaaacttattccaagctttcaaaataatcttttaagaagccaggattctccggtctggaatttctgagtgagtcctttttttatggtgtcctccctctgtgaatgtacaggcggaactgtacgaacagctcccttccatccatttttaactctttcggaaataacacctcacagcagcttcgtgcttttgtacagacctttgtaacaagtgtacagaaaactcattttgtttgagaaacaggagttgatgaacccatcatgctggtttttctctgagcacaaagttttaggctgtacacagccagccttgggaatctcgttgagcgttcggcgtggatccacggggccaggccaccctgcgggagcgccacacgcatccacttcggattcagtgggtgaagacagaactctgagagtctgcaggcggctcctgtgctttttatttctggctcttcggatgtcttctagacatttactatcactgcacctgaagaaaaaatcacttttaccttcctaatttaaaaagacaaaacagaaatgtacgttccttcgctagctttagtctttctgttcccatttttataaatctgagcattgataatgttctatctaaatttgtacagtgtgatttttttttttagaataaatattttataaaagggtt

SEQ ID NO: 87274 - DNA, 11580 bp, Artificial Sequence
  derived and/or modified sequence
atggcattcgtggcaacccagggcgcaacagtagtcgaccaaacaacgctcatgaagaaatatttacagttcgtcgcagctctgactgatgtgaacacgcctgatgagacaaagcttaaaatgatgcaagaggtcagcgaaaattttgaaaatgtgacgagttctccacagtacagcacattcctggaacatatcattccacggttccttacctttctgcaggacggcgaagtgcagttcctgcaggaaaagcccgcccagcagctaagaaaactggtgctggagataatccataggatccccacaaacgaacacctgagaccccacaccaagaatgtgttaagtgtcatgtttcgtttcttggaaactgaaaatgaagaaaacgttttgatctgcctgcggattattatcgagctgcataagcagttccgacctcctataacccaggaaatccatcacttcttggatttcgtaaagcagatatacaaagagctgcccaaagtcgtgaaccggtactttgagaacccccaagtgatccccgagaatactgtccctccccctgagatggtgggcatgattactacaattgccgtaaaagtcaacccagagagagaggacagtgagacacgcacacactccattatacctaggggaagcctctccttgaaggtactagccgaactgcctattattgtggtactgatgtaccaactgtacaagttaaacatacataatgtggtagccgagttcgtcccactaatcatgaatactattgcaatacaggtctctgcacaggctcgacaacataagctgtataataaggagctgtatgcagatttcatcgctgcccagatcaagaccctctcgtttcttgcatatatcatccgcatctaccaggagttggtcacaaagtactctcaacagatggttaaaggaatgctacagctgctgagcaattgccccgcggaaaccgcccaccttagaaaagagctgttgatagccgctaagcatatattaaccactgagttgcgaaaccagttcattccctgtatggacaaattgttcgacgaaagcatcctgattggatctggatataccgccagggagacccttcgtccactcgcctacagtacactggctgatttggtgcaccacgtgcggcagcatttgcccttgtccgacctgagcctggctgtgcagctttttgctaagaatatcgatgacgagagtctcccatccagcattcagactatgtcttgtaagttacttctgaatctggtagactgtatccgaagcaaatcagagcaggagagcgggaatgggagggacgtactcatgaggatgctggaagttttcgtactgaagttccacactatagctcgctaccaactctcagctattttcaaaaagtgtaagccccaaagcgagttaggcgccgttgaggcagctctccccggagtgcccactgcacctgctgcacctgggccggcaccttcgcctgcgcctgtgcctgcacccccacctccccccccccctcctccacctgcaacccccgttactcctgcccctgttccgccattcgaaaaacagggcgaaaaagataaggaggataaacaaacttttcaggtcactgattgcagatcattggtgaagaccctcgtctgcggtgtgaaaacaattacctgggggatcacatcttgcaaagctcctggcgaggcccagttcattcctaataaacaacttcagcccaaagagactcagatctacatcaagttagtgaagtacgcaatgcaagccctggacatttaccaagtacagattgccggaaatggccagacctacatccgcgtggctaattgtcaaaccgtccgtatgaaggaggagaaggaggtcttggagcactttgccggcgtcttcacgatgatgaatccactcacttttaaggagatattccagacaacggtgccatatatggtcgagcggatctccaaaaattatgctttacagatcgtcgctaattcattcctcgcaaatcccaccactagcgctctttttgctacaatactagtcgaatatctgctcgaccgcttgcccgagatgggcagcaacgtggaactgtctaacctttatttgaaactcttcaaactagtgttcggatccgtcagcctttttgccgccgagaacgaacagatgttgaaaccgcacctgcacaagatagtcaactctagcatggaattggcgcagacagctaaggaaccatacaactattttctgctgctgagggccctgtttagaagcataggcggcggtagtcatgacctgctttaccaggagtttctgccactgctgccaaacctgttacagggtttgaacatgctacaaagcggcttacataaacaacacatgaaagatctctttgtggagctatgtctgaccgttcccgtccggctctcctccttgctgccctatctgcctatgcttatggaccccttggtgtcagccctcaacggctcacaaacacttgtgtcccagggtttacggactctggagctctgtgttgacaatttgcagcccgacttcttatatgaccacattcagcctgtccgagccgagctgatgcaggccctgtggcgcaccctaagaaacccagcagattccattagccacgttgcctacagagtgctggggaaatttggcgggagcaacaggaaaatgctaaaagagtcccagaagttgcattacgtagtgaccgaggttcaagggcccagtatcacagtggagttcagtgattgtaaagcgtccctccagctgcctatggagaaggccatcgagaccgctttagactgcctaaaaagcgcaaataccgaaccctattaccgccgccaagcctgggaagtgatcaaatgttttttagtcgctatgatgagcctggaggataacaagcacgctctataccagctgctcgctcaccctaatttcaccgagaagacaatccctaatgtgatcatctcacaccggtataaggcccaggatacacctgctcgtaaaacttttgagcaggcacttacaggagccttcatgagtgctgtaattaaggacctgaggcctagtgccctcccattcgtcgcgtctttgatccgacactacaccatggttgccgttgctcagcaatgtggccctttcctcctgccatgttaccaagtaggatctcagccatccactgccatgttccatagcgaggaaaatgggagtaaagggatggaccctctcgttctcatagatgccatcgcaatctgcatggcctatgaagagaaagaattgtgcaagataggtgaggtggccctggccgtgattttcgatgtggcaagcatcatcctcggctccaaagaacgagcatgccagcttcctttgttttcatatattgtcgaacgcttatgcgcatgctgctacgagcaggcctggtatgcaaagttgggcggagtggtttccattaagttcttgatggaaagattgcctcttacgtgggtcctacagaatcagcagactttcctgaaagccctgctgttcgtgatgatggatctgaccggggaagtgtcaaatggggccgtagcaatggcaaagaccacactggaacagctcctgatgaggtgtgctacgccgctaaaggatgaggaaagagcagaggagattgtcgctgctcaggagaaaagcttccatcatgtaacacacgacctggtgcgcgaagtgacaagcccgaacagcactgtccgaaagcaagccatgcactccctacaagtgctggcccaggtgacaggaaagtctgtaaccgtgatcatggaaccacataaggaagtactgcaggacatggttccccccaagaaacatctccttcgccaccaacccgccaacgcgcaaatcggtctgatggagggaaacactttttgcacaaccctgcaacccagactctttactatggacctcaatgttgtggagcacaaggtgttctatactgaactgctgaacctctgcgaagccgaggactcggcactgacaaaactgccgtgttataagtccctaccctcactagtgccactgcggatagccgccctaaatgcgctagcagcctgcaactatctgccccagagcagagaaaagatcatcgccgctctcttcaaagccctgaattccactaattccgaattgcaggaggcaggagaagcctgtatgagaaagttcctggagggcgccacaattgaagtggaccagatccatacgcatatgcggcccctgcttatgatgctgggcgattacaggtccctaacactgaacgtggtgaacaggctaacaagcgtgacacgcctcttccccaactcttttaatgataagttttgtgaccagatgatgcagcaccttcgtaagtggatggaagttgtggtcatcacacacaaaggcggtcagcggtcggacgggaacgagagtatcagcgaatgcggccggtgtccattgtcccccttctgccagttcgaggaaatgaagatctgctcagcaattattaatttatttcacctcatacccgctgcccctcaaactttggtaaaacctctgctggaggttgtgatgaagaccgagcgggctatgttgatcgaagccggctccccatttagagaacctcttatcaaattcctgactaggcatcccagccagacagtggaactgttcatgatggaggcaaccctaaacgatccgcagtggtctcggatgttcatgagctttctgaaacacaaggatgctagaccgctgcgggacgtattagctgcaaacccaaatcgattcatcacactgctgctgccaggaggagcacagaccgcagtccggcccggcagcccatcaactagcaccatgcgattagacttgcaattccaggccattaaaataatctccataatagttaaaaacgatgattcatggctcgcgagccaacattctcttgtatcccagctgcgccgagtgtgggtcagcgagaatttccaggagcgccatcggaaagaaaatatggccgctacaaactggaaagaaccaaagctgcttgcatactgcctcctgaattactgtaaaaggaattatggggacatcgagctactgtttcagctgttaagagcttttaccggccggttcctgtgtaatatgaccttcctcaaggaatacatggaagaagaaattcccaagaattacagtatcgctcagaaaagggccctgtttttcagatttgtggactttaacgatcccaactttggtgatgagctgaaggctaaagtacttcagcacatattgaaccctgcattcctctactcattcgaaaagggcgagggagaacagctcctgggaccacctaatcctgagggcgataacccagagtcaatcacaagcgtattcatcacaaaagtgttggatccggagaagcaggcagatatgctcgatagccttaggatttatctgttgcagtatgccaccctcttggtggagcacgccccccatcatatccatgataacaacaaaaacagaaactctaagcttcgccggctgatgacctttgcctggccatgtctgctgagtaaagcatgtgtcgatccggcttgtaagtacagtggccatctcctcttggcacacatcatcgccaagtttgctatccacaaaaagatcgtgctgcaggtattccacagcctccttaaggcccacgcaatggaggccagagctattgtcagacaagccatggcaattctgactcctgcagtgccagctagaatggaggacggccaccagatgctgacgcactggaccagaaaaataatcgtggaggaaggacacactgtgcctcagttggtccacattctgcatttgatagtacagcactttaaagtatattacccggtccgacaccatctcgttcagcacatggtttcagctatgcagagattgggcttcaccccctccgtgacgatcgagcagcggcgccttgctgtggatctgtccgaggttgtaattaaatgggaattgcagagaatcaaggatcaacaacctgactccgacatggacccaaattcttctggagagggcgttaattccgtatcctcgagcattaagaggggattgtcggtggactctgcccaggaggtgaagagatttagaactgccacgggtgccatctccgcagtatttggaaggtctcagtccctgcctggagctgatagtctgctggccaagccaatcgacaagcagcacaccgacactgttgtcaatttcttgattagagtcgcctgccaggtgaacgataacacaaacactgctgggtctccgggggaagtactgtcgagaaggtgcgttaacctacttaaaaccgcgctgagaccagacatgtggcctaagtccgaattgaagctccagtggtttgacaagctgctcatgacagtagaacagcccaatcaggtcaattatggaaacatctgcactggcctggaggtcctttccttcttgctgaccgttctgcagtcaccagctattttgtcctctttcaagccgctgcaaagggggatagccgcgtgtatgacatgtggaaatacgaaggttcttagggcagttcactcacttctgagcagactgatgagtattttccctacggaacccagcacttcctcagtggcgagtaagtacgaggaactggagtgtctgtatgcggctgtgggaaaagttatttacgagggcctcaccaactatgagaaggcaacaaatgccaacccgagccagctgttcggaaccctgatgatccttaagtccgcttgctcaaataacccctcttacattgatcgcctgattagcgtgtttatgcggtccctgcaaaaaatggtgcgggagcacctgaatcctcaggcagcctccgggagcaccgaggcaacctccggtacttccgagctcgtcatgttgtcgttagaactcgtcaagacgagattagctgtgatgagtatggaaatgcgcaagaatttcattcaggccattctgacttctctgatagagaagtcgccagacgctaagattctcagagcagtcgtgaaaatcgtagaggagtgggtaaagaacaacagcccaatggcagcaaaccagacccccacattacgcgagaaatccatcctattggtaaagatgatgacgtacatcgaaaagagattccctgaggatctggaattgaatgcacagtttctcgacctggtgaactacgtttaccgcgatgaaaccctgtccggtagtgagctgacagcaaagctcgagcccgcatttttgtccggtttaagatgtgcacaacctctgattcgcgccaagttcttcgaggtcttcgacaactcaatgaagcggagagtttacgagcgcctcctgtatgtgacgtgctctcagaactgggaagctatgggcaaccatttctggataaaacagtgtatagagctgctgctggctgtatgcgagaagtcgacaccaatcggcacatcatgccagggcgcaatgctacctagtatcactaacgtgataaacctagctgatagccacgatcgtgccgcatttgccatggttacgcacgtgaaacaggaaccacgcgaacgggaaaactccgagtccaaagaagaagacgtcgagatagacatcgaactcgcccctggggatcagacgtcaacaccaaagaccaaagaacttagcgagaaagatattggcaaccagctacacatgttgacaaataggcacgataagtttctcgacactctgagggaggtcaagacgggagctctcctgagcgcttttgtgcagctctgtcacatcagcaccacactcgctgaaaagacgtgggtgcaactgttcccaaggttatggaagatcctatccgataggcagcagcacgcactagcaggtgaaatcagccccttcctctgttcagggagccatcaagtgcaacgagactgccagccttccgcattgaattgtttcgtggaagctatgagtcagtgcgtgccgccgatcccaataaggccatgcgtgctcaagtacctcggaaaaactcacaatctgtggttccggagtacacttatgttagagcaccaagcttttgagaaaggcctgtccctccagattaaacccaagcagaccacagaattctacgagcaggagagcatcacccctcctcagcaagagattttggactccctcgccgaattgtactctcttttgcaggaggaggatatgtgggccgggctctggcagaaacgttgcaagtattcggaaactgcaaccgccatcgcatatgaacagcacggattttttgagcaagcccaagagtcatatgagaaagcgatggataaagctaagaaagaacacgagcggtcgaatgcctccccggccattttccccgaataccaattgtgggaggaccattggatccgctgttccaaggaactgaaccagtgggaggctttgaccgaatatggacaaagcaaagggcacataaacccctacctggtactggagtgcgcctggcgggtctctaactggacagcaatgaaggaggcactcgttcaggtcgaggtgtcctgcccaaaggagatggcatggaaagtaaacatgtaccgcggctacctcgctatttgtcaccctgaagagcagcaactttccttcatcgagaggctggtggagatggcctcgtctcttgctatacgtgaatggcgaaggcttccacacgtggtcagccatgtgcacacgcctctcctgcaggccgctcaacagatcatcgaactgcaagaggccgcccagataaatgctggcctccagcctactaatcttgggaggaacaacagtcttcacgatatgaagactgtggtcaagacctggcggaatcgtctgccaatagtgtctgacgacctgtcacactggtcttcgatctttatgtggaggcagcatcattatcagggcaagcccacatggtctgggatgcattcctctagtatagtgactgcctatgagaacagctcccagcatgatccttcttctaataatgcaatgctgggcgtccacgcctcggcttcggccatcattcagtacggaaaaatcgcccgcaagcagggcctggttaatgtggccttggacatattaagtcggattcatactatacccaccgtgccgattgtcgactgcttccagaagattaggcaacaggttaaatgctatctgcagttagcaggagttatgggcaaaaacgagtgcatgcaaggactcgaagtcatcgagagtaccaatctcaagtacttcaccaaggaaatgacagcagaattttatgctttgaagggaatgttcttggctcagatcaacaaaagcgaagaagcgaacaaggcattcagtgccgccgtgcaaatgcacgatgtgctcgtaaaggcgtgggcaatgtggggtgactatcttgaaaatattttcgttaaggaacgtcagctacacctcggcgtttccgcaataacgtgctaccttcatgcttgccggcatcagaacgagtcgaaatcccggaagtatctggccaaagtgctgtggctactctcctttgacgatgataagaatacactagctgacgctgtggataaatactgcatcggggtgcctcctattcaatggctcgcgtggataccgcaacttttaacatgtctcgtcggttcagaaggtaaactgctgctgaacctcatttctcaggtcggtagggtgtacccacaggccgtttatttccccataaggacgctatatcttaccctgaaaatcgagcagcgggagagatacaaatcagatcccggtcccattcgcgctactgcccctatgtggaggtgctcacgcatcatgcacatgcagagggaactgcaccccaccttgctctcgtctctcgagggtatcgttgaccagatggtgtggttccgcgaaaactggcacgaggaagtcctgaggcagctgcagcagggtctcgctaaatgctattctgtagcattcgagaagtcgggggccgtttctgatgcaaagatcacacctcacacattaaactttgtgaagaaattggtgtcaacattcggcgtgggactggagaatgtgagcaatgtgagtacgatgtttagtagtgcagcaagtgagtccctcgcacgtagggcccaggcaacagcccaagatcccgtgtttcaaaaactcaaaggacagttcacgacagatttcgacttcagcgttcctggtagtatgaagctacataacctgatcagtaaacttaagaagtggatcaagattctagaggccaagacaaagcagctgcccaagtttttcttgatagaggagaagtgtaggttcctgagtaatttctccgcacaaacggcggaggtggaaattcccggagagttcctaatgcccaagcccacacactactacataaaaattgccaggtttatgccccgcgtggaaattgtgcagaaacacaacactgcagcccgtaggctttatatccgagggcacaacggcaagatctacccatacctggtgatgaatgatgcttgtctaacagagtctcgacgtgaggagcgggtgctgcaattgcttagactcttaaatccctgcctcgagaagcgcaaagagaccacaaaacgccatctattttttaccgttccgagggtggtagctgtgtccccgcaaatgcggttggttgaggataatccctcctcattatctctggtcgaaatatacaagcagcgctgcgcaaaaaagggcattgagcatgataatcctatctcacgttactatgacaggctggctacagtacaggcccgtgggacccaggcttcacatcaggtactgcgagacatcctaaaggaggtacagtccaacatggttccacgttctatgctaaaggagtgggccctgcatacgttcccgaacgccactgactattggacttttcgcaagatgtttactatccaactggctttgattggcttcgcggagtttgtcctccatttgaaccgcttgaaccccgagatgctgcagattgcccaggatacaggcaagctaaacgtggcatacttcaggttcgatattaatgatgccacaggcgacctcgacgctaacagacccgttcctttccggcttactcctaatatcagcgagtttctgactacaattggtgtctccggccccctgacagcctcaatgatagccgtggcccgctgttttgcccagccaaattttaaggtagatggcatactcaagacagtgctccgggatgaaatcatcgcctggcataagaagacccaggaagacacctcctccccgctttctgccgctgggcagcctgaaaatatggactcccagcagctcgtctccctggtgcagaaagccgtgactgctattatgacccggctgcacaacctggcacagtttgaaggtggcgaatcgaaagtgaacactctggtcgccgcagcaaattccttagacaatctctgcaggatggatcctgcctggcatccctggttatag

SEQ ID NO: 87275 - DNA, 11580 bp, Artificial Sequence
  derived and/or modified sequence
atggccttcgtggccacccagggcgccaccgtggtggaccagaccaccctgatgaaaaagtacctgcagttcgtggctgcgttgaccgacgtgaatactccagatgagacaaagttaaaaatgatgcaggaagtgagcgagaactttgaaaacgtcacctcctcaccccagtattccacgttcctggagcacattattccccggtttttgacttttctacaggacggagaagtgcaatttctgcaggaaaagcctgcccagcagctcagaaagctggtattagaaatcattcacaggatccccacaaatgaacacctcagaccgcataccaaaaatgtgctaagcgtaatgttccgtttcctggaaactgagaatgaagagaatgtgctaatctgcttgagaataataatcgaactccataagcagtttcgtcctcccatcactcaggaaatccatcactttctggacttcgtgaagcagatctataaagagctgcccaaagtcgtaaaccgttatttcgagaaccctcaggtgattcccgagaacactgtccctcccccggagatggtcgggatgattaccacaatcgccgttaaagtgaaccccgaacgggaggacagcgaaactaggacccattctattattccccgcggttccctatcattgaaggtcctggccgagctgccaatcatagtggttctgatgtatcaactgtacaagctgaacatccataacgtcgtcgctgaatttgtgcctctgattatgaacacgatagcaatacaggtatccgcgcaggccagacagcacaagctttacaacaaagaattgtacgcagactttattgccgcccagattaaaaccctgagtttcctcgcctacataatccgcatttaccaagagcttgttaccaagtatagccagcagatggttaagggcatgttacagttgctctcaaattgccccgctgaaactgcacatttacgcaaagagctgctgatcgccgctaaacacatcttgacaaccgaactcagaaaccagttcatcccatgtatggataaactcttcgatgagtctatcctgattgggtctggctatactgctcgggagacacttcgtcctcttgcctattctactctggccgacctggtgcatcacgtgaggcagcacttgcccctttccgacttgtcacttgcggttcaactgtttgccaaaaacatcgatgatgagtcgcttcccagtagcatacagacaatgtcatgcaagctcttactcaacctggttgattgtattcgctccaagagcgaacaagaatctggcaacgggagagatgtcctgatgagaatgctggaggtattcgtgctgaagttccacaccatcgctcgctaccaactatcagccatttttaaaaagtgcaagccccagtccgagctgggcgccgtggaggcggcacttccaggtgtgcctaccgcacctgctgccccgggacctgcccctagccccgctcctgtaccagccccaccccctccgccgccaccgccccctcccgctacaccagtgacacccgcccccgtacccccattcgagaagcagggcgaaaaggacaaagaggacaaacagacatttcaggttacagactgcaggtctcttgtaaagaccctggtgtgtggagtgaaaaccattacttggggcataacaagctgcaaggcccctggtgaggcccaatttatccctaataagcagttgcagccaaaggagactcagatctatatcaaattggtaaagtatgctatgcaggccctggatatataccaggtgcagattgccggaaatggccagacttatatccgagtcgccaattgccaaacggtgcgtatgaaggaagaaaaagaggtgctagaacactttgccggggtcttcaccatgatgaaccctctgactttcaaggaaatattccagactaccgtgccctacatggtcgagcggatcagcaagaactacgcattgcaaatcgtggcaaattcattcttagccaatccaactaccagcgccttgttcgcgacaatactggtcgaataccttctggacagactgcctgagatgggatcaaatgtggagctgtcaaacttgtatcttaaactgtttaagctagtgttcggatcagttagcctgtttgcagccgagaatgagcaaatgcttaagccacaccttcacaagatcgtaaactctagcatggaattggcccagactgcaaaggagccatacaattactttctgctgctccgcgctctgtttcggtctataggtggagggtcacacgaccttttataccaggagttccttccacttctccctaatcttcttcagggcttgaacatgctgcagagtggactgcacaagcaacacatgaaagacctgttcgtggagctgtgcttaacagtgcccgtgcggttgagtagcctgctgccttacctgcccatgctcatggatccactagtctcagcactgaacggatcccagacactggttagccagggcctgcgcactctcgaactgtgcgtagacaatctgcagcccgatttcctatatgatcatattcagccagtcagagccgagcttatgcaggccctgtggcggactctgagaaaccccgctgactctatctcacatgtagcataccgggtgttgggaaagtttggcggaagtaacaggaagatgctgaaggagtcccagaaactgcattacgtagtgactgaggtgcaaggcccttccatcacagtggagttctccgactgtaaagcctcccttcagttaccaatggaaaaagcaatagaaacagccttggattgcctaaaatcagccaacaccgaaccgtattaccgaaggcaggcgtgggaagtgattaagtgttttcttgtggccatgatgtccctcgaagataataaacacgccctgtatcagctactggctcatccgaatttcacggaaaagacaattcccaatgtgataatctctcatcggtacaaagcccaggacacccccgcgaggaagacatttgaacaggcccttaccggagctttcatgtccgcagtgatcaaggacctgaggccctctgcactgccattcgtcgcctccctgattcggcattacactatggtggccgttgcccagcagtgcgggccatttctcctgccatgttatcaggtggggtctcaaccctctactgctatgttccactctgaggagaacggctcaaaaggcatggacccgctggtgttgattgatgcgattgccatctgtatggcctacgaggaaaaggaactctgtaagatcggagaagttgcactggcggtcattttcgatgttgcctcgatcatcctcggcagcaaggagagagcatgtcagctgcctctgttcagttatattgtggagagactctgtgcttgttgctacgagcaggcatggtacgcgaagctcggcggagttgtgtctattaagttcctgatggagcggcttcccctaacttgggttctgcagaaccagcagacatttctgaaagctctgctgtttgtgatgatggatttgactggggaagtgagtaacggggccgtagccatggccaagacaacgctggagcagctgctcatgcgatgcgcaacacccttgaaagatgaggagcgggcggaagagatcgtggctgcccaggagaagtcttttcatcacgtcacgcacgacttggttagagaagtgacctcgcccaacagtactgtgcggaagcaggcgatgcattcactgcaggtgctggcccaggttaccggcaaaagtgtgaccgtcattatggagcctcataaggaggtgctgcaggacatggtgccccctaaaaaacacctgctgagacaccaaccagcaaatgcacagattggcttaatggagggaaacaccttttgtacgacactgcagccccgcctctttaccatggacttaaacgtggtggagcataaagtattctacactgagcttctaaacctttgcgaagccgaagatagcgcgttgactaaactgccatgctataagtccctgccaagcttagtgccattgaggattgccgccctgaatgccctcgcggcctgcaactatcttccccagtctagggaaaaaattatcgccgcactttttaaagctctcaatagtaccaattctgagttacaggaggcaggcgaggcttgtatgcggaagtttctggagggggccacgattgaggtcgaccagatacacactcacatgaggcctctgctaatgatgctgggggattatcggtcactgacattgaacgtcgtcaaccgattgactagcgtgacgcggctgtttcctaacagttttaacgacaaattctgcgaccaaatgatgcagcacctgaggaagtggatggaggtcgtcgtaatcacccacaaaggagggcagagaagtgatggcaatgaaagcatctcagaatgcggccgctgccccttgtctcctttttgccagtttgaggaaatgaaaatttgcagcgccatcatcaacctgtttcatctgatcccagccgccccccagactctagtgaagcctttgctggaggtcgttatgaagaccgagcgcgcgatgttgattgaggcagggagcccgtttagggagccactcataaagtttctgactcgccatccaagtcagactgtagaactcttcatgatggaggctactttgaacgaccctcagtggtctagaatgtttatgtcatttcttaagcataaagatgcaagaccactccgcgacgttctggccgccaatccaaacagattcatcaccctgctattgcctggtggagctcagacggcagtcagaccaggcagtccatcaacctcaactatgagattggacttgcagtttcaggccattaaaatcattagtattatcgtcaaaaatgatgacagctggctggcttctcaacattctttagtttcccagcttcgcagggtgtgggttagcgaaaactttcaggagaggcacagaaaagagaacatggcagctactaactggaaagaacccaaactgctggcttattgtttgttgaattactgcaagaggaattatggggatattgaacttctgtttcaactactgcgcgcctttaccgggcgattcctgtgcaacatgacgttcctcaaagagtacatggaagaagaaatcccgaaaaattattctatcgctcagaagcgggcgctcttcttccgattcgtagactttaatgatcccaatttcggagatgaactcaaggcgaaggtgctgcaacatattttaaaccctgccttcttatacagctttgagaagggagagggcgaacaactgctgggcccacctaaccccgaaggggacaaccctgagagcattacatccgtattcatcacaaaagtgctcgaccctgaaaagcaggctgatatgctggattccttgcgcatataccttctgcagtacgcaaccttactggtggagcacgctccccaccatatccacgacaacaacaagaatcgcaactccaaactgagacggctgatgacatttgcttggccatgtctgctgagcaaggcatgtgtggatcctgcatgcaagtacagcggtcatctgctcttagcacacatcatcgccaagtttgctatccataagaaaattgtcttgcaggtttttcattccctgctgaaagcgcacgcaatggaagccagagccattgttcggcaggctatggccatcctgacaccagccgtgccagcacggatggaggatggacaccagatgctgacacactggacacgtaaaatcattgtggaagagggacacacagtcccgcagctcgtccacatacttcatctgattgtgcaacattttaaagtgtactaccctgtcagacaccacttagtacagcacatggtgagtgctatgcagcgacttggcttcactccaagcgtcaccattgagcagcggcgcctagcggtcgacttatctgaggtggttattaagtgggagctacagcgcatcaaagatcagcagcctgactcagatatggatcccaattctagtggagagggggtgaactccgtttcatcaagcattaagcggggcctctcagttgacagcgctcaggaagtgaaaagatttagaactgcaactggcgcaatcagcgccgtctttggccggtcccaatccctgcccggggccgattcactcctggccaagcctatcgataagcaacacacagacacagtggtcaactttctaattcgggtggcttgccaagtgaatgacaataccaatacagcgggttctcccggagaagtgctgtccaggagatgcgtgaatttactgaaaaccgctctgcgtccggatatgtggcccaagtccgagctgaagttgcaatggttcgacaaactgcttatgacagtggagcagcccaaccaggtgaactatggtaatatatgtactggcctggaggtgctgagtttcttactgactgtgttgcagtcaccagcaattttgtcctcttttaagcctctgcaaaggggtatagccgcctgtatgacatgcggcaacactaaggtgcttcgtgcagtccacagtcttttgtcacgtcttatgtcgatctttccaactgagccctccacctctagtgttgcgagtaagtatgaggagctcgaatgtctctacgccgctgtcggcaaagttatctatgaagggctcactaactatgagaaagccactaacgccaacccgagccagttgttcggtaccctaatgatcctgaagagcgcctgcagcaataatccgagctacatagatagacttatctcggtgttcatgcggagcctgcagaagatggtaagggagcacctgaaccctcaggcggctagcggctcaacggaggccacatccggcacaagcgagctggtaatgctctccctggaattagtcaaaacaagacttgccgtcatgagtatggagatgagaaaaaacttcatccaggccatccttacctccctcattgagaagtctcccgatgccaaaatcctgcgggctgtcgtaaaaattgtggaggagtgggtaaaaaataattcccccatggccgccaatcagactccaaccctgcgcgaaaagagcatcctgcttgtgaagatgatgacctacatcgagaaacgctttccagaggatcttgaactgaacgcgcagtttcttgatcttgtaaactacgtgtacagggacgaaaccctgtccggatcagaactgacagcaaagcttgagcccgcctttttatcaggcctgaggtgcgcccaaccacttatcagagccaagttttttgaggtttttgacaattctatgaagcgccgggtctatgagcggttactgtacgtcacgtgcagtcagaactgggaggcgatgggcaatcatttttggattaagcagtgtatcgagctgcttctcgctgtttgtgaaaagtctacccccatcgggaccagttgtcaaggtgctatgctgccatcgatcacaaacgtaattaacctcgctgattcccatgaccgcgccgcatttgccatggttacacacgtgaagcaggaacctcgcgaaagagagaatagtgaaagtaaggaggaagatgtggagattgatatcgagcttgcgcccggtgatcagacttccacgccaaaaacgaaagagctctcagagaaggatattggaaaccagctgcacatgctgacaaaccggcacgataagttcctggacaccctcagggaggtcaagactggtgccctcttgagcgctttcgtgcaattatgccatatatcaaccaccctcgccgaaaagacttgggtacagctctttccaagactctggaagattctatcagaccggcagcagcacgctttggccggcgagatatcaccctttctgtgtagcggctcccaccaggttcagagggattgtcagcccagtgcactcaactgcttcgttgaggccatgagtcagtgtgtgccccccatcccgatcaggccctgcgtgctaaagtacttggggaagacccacaatttatggtttcgttccacattgatgctcgagcaccaggcatttgagaagggtctctcattacagattaagccgaagcagactaccgaattctatgaacaggagagtattactcccccacagcaagagatcctggactctctagctgaactatacagtctcctacaggaggaggacatgtgggctggtctgtggcagaagagatgcaaatactcagaaactgcaacagcaattgcttatgagcagcacggcttcttcgagcaggcccaggagtcgtatgaaaaggcgatggataaggccaagaaagagcatgagagatcaaacgctagccccgccatttttcccgagtaccagctttgggaggatcattggattcgatgttctaaggaactgaaccagtgggaggcattaacagagtatgggcagagcaagggccacattaatccctatttggtgctggagtgtgcttggagggtttccaattggaccgcaatgaaagaggcattagtccaggtggaggtttcctgccccaaagaaatggcatggaaggtgaatatgtaccgcggctatctcgccatatgccaccctgaagagcagcagctctcattcatcgagcggctcgtggaaatggcctcctcgttagccattagagagtggcgcagattgcctcacgtcgtgtctcacgtccacacaccgctgctgcaggccgcacaacagatcattgaactgcaagaagctgctcaaatcaacgctggtctccaacccacgaacttaggacgcaacaactcacttcacgacatgaagacagtggtcaaaacttggcgaaataggctaccaatagtttccgacgacctcagccattggtcttctattttcatgtggcgccaacaccactaccaaggcaagccaacttggtccggtatgcactcctcttccatagttacagcctacgagaatagttcccagcacgatcccagcagcaataacgctatgcttggagtccacgcttccgcgagtgcaatcatccagtacggcaagattgcccgtaaacaaggacttgtgaacgtggccctggatatcctctcacgcattcacacaatccccacagtacctatcgtagactgcttccaaaaaatccgtcagcaggtaaagtgctacctacagcttgctggagttatgggaaagaatgaatgtatgcagggtttagaggtgattgagtcaactaatcttaaatacttcacgaaagagatgaccgccgaattctatgcactgaaagggatgtttcttgctcagataaacaagagcgaggaggccaataaggctttcagcgctgccgtgcagatgcacgacgtgttggtgaaggcatgggcaatgtggggggactatctggaaaatatctttgtgaaagaacggcagctacacctgggggtctccgcgattacttgttatctgcacgcttgtaggcaccagaacgagtccaaatcgcgaaagtatctagccaaagtgttatggctcctttccttcgatgacgacaagaatacactggcagatgcagtggataaatactgtataggcgtgcctccaattcagtggctggcttggattccgcaattgctaacatgtctagtaggttccgaaggcaagcttctcctcaacctgatctctcaagttggacgggtttatcctcaagcggtttactttcccatcaggacgctctatctgacactcaaaattgagcagcgggaacgatacaaaagcgatccaggccccattagggctaccgcaccaatgtggaggtgttcgaggataatgcatatgcaacgagaactgcatcctactctcctgagcagcctagaaggcattgtggaccagatggtgtggtttcgggagaactggcacgaagaggtgctgaggcagttgcagcaggggctggctaaatgttatagtgttgctttcgaaaagtcaggcgctgtatcggatgcaaaaataactcctcatacattaaacttcgttaaaaagctagtgtctactttcggcgtgggactggaaaatgtcagcaacgtttcaacgatgttttcatccgcggctagcgagtctttggcacggagggcacaggctactgcccaggatcccgtgtttcagaaactgaaaggtcagttcactactgacttcgactttagcgtgcccggttcaatgaaactgcataacctgatctctaaactgaagaagtggatcaagatcttggaggccaagaccaagcagctcccaaagtttttcctcattgaagagaaatgcagattcctgagcaacttctcggcccagacagccgaggttgaaatccccggggaattcctgatgcccaaaccaacacactattacattaaaatcgcacgctttatgccacgagtggaaattgtgcagaagcataataccgcagcacggcgtctgtacatacgaggacacaacggcaaaatctacccctatttggtgatgaacgatgcttgcctgactgagtctagaagggaggaaagagtcctgcagttattgcgccttttaaatccatgcttagagaaacgtaaggagacaacaaagaggcaccttttttttactgtacccagggtcgtggccgtcagtccccagatgcggttggtggaggataatccttccagtctaagcctggtggagatctacaaacagcggtgcgcgaagaaaggcatcgaacacgacaaccccatttcaaggtactacgacagactcgcaacagtgcaggcccgtggtacacaggcaagccatcaagtgttgcgggatattctaaaggaggtgcaaagtaacatggtgcctcgctccatgctgaaggagtgggccctccacacctttcccaatgccactgactactggacgtttagaaagatgtttacaattcagctggcactgatagggtttgcagagtttgtgctgcaccttaatcgcctcaaccctgaaatgttacaaattgctcaggacactggcaagctgaacgtggcttactttagatttgatatcaacgatgccacaggggatttagatgcaaaccgtcctgtgccgttccgcctgaccccaaacattagcgaattcctgacgactattggtgtgtcaggccctctgactgcaagtatgatagccgttgcgaggtgcttcgcacaacccaactttaaggtggatggcatccttaaaacagttcttcgggatgaaatcatcgcctggcataagaagactcaagaagacacctcctcacccctgtctgccgccggccagcccgaaaatatggattctcagcagttagtgtcactcgtacagaaggccgtgacagccattatgactaggttgcacaacttggcccagttcgagggcggcgaatctaaagtcaacactcttgtagctgctgccaacagcctggacaatctgtgtcggatggaccccgcatggcacccttggctgtag

SEQ ID NO: 87276 - DNA, 11580 bp, Artificial Sequence
  derived and/or modified sequence
atggccttcgtggccacacagggagcaacagtcgtggaccagaccaccctcatgaaaaagtatctgcagttcgtggcggctcttacagatgtcaacacccctgacgagacaaagctcaaaatgatgcaagaggtgtctgagaatttcgagaatgtgacctcttcaccccagtacagcacattcctggagcacataatcccgagatttctcacattcctgcaggatggagaggttcaattccttcaagagaagccggctcagcaattgaggaagctggtcctggaaatcattcaccggatccccacaaatgaacatctgcgtccccataccaaaaatgtattatccgtgatgttcagatttctggagacagagaatgaggagaacgtgctgatctgcctgcgaatcattatcgagctacataagcagtttagaccgccaatcacacaggagatccaccactttctggatttcgtcaaacagatctacaaagagcttccgaaggttgtgaacaggtatttcgagaacccacaggtaatccccgaaaatactgtgccaccccctgagatggtcggcatgataaccactatcgcagtgaaggttaaccccgaacgggaggattctgaaacccggactcacagtattataccccgaggctctctttccctaaaggtgctggctgaactccccatcattgttgtgctgatgtaccagttgtacaagctgaacatccataatgtggttgcagaattcgtcccactaatcatgaatacaattgcgatacaggtcagcgcccaggcccgacagcacaagctctataataaggagctgtacgccgatttcattgcagcccaaattaaaactctcagcttcctggcctacatcattaggatttatcaggaactcgttactaagtacagccaacagatggtgaaagggatgctgcaattactctctaactgtcctgcggaaactgcccacctccgtaaagaacttctgatcgcggcaaaacatatcctcaccactgaactccgtaaccagttcataccctgtatggataagctgttcgacgaaagtatcctgataggatcaggttacactgccagagagacgctacgcccactagcgtactcgaccttagctgaccttgttcaccacgtgcgccagcacctacctctgagtgatctgtccctggcagtccagctatttgcaaaaaacattgacgatgagagtttaccatctagcattcaaacgatgtcttgtaaacttctcttaaatttagtcgattgcatcagaagcaagtctgagcaggagagtgggaacggacgtgacgtactcatgcgtatgctcgaggtgtttgtgctgaagttccacacgattgccaggtatcaactctctgccatcttcaaaaagtgcaagccgcagtcagagctgggagccgtagaggcagccctgcccggtgtcccgaccgctcccgctgctcctggacccgctccaagtcctgctcccgtacccgcacctccccctccgccaccgccacctcccccagcgacacccgtgacccctgcaccagtcccaccattcgagaagcaaggcgagaaggacaaagaagataaacagactttccaggtgactgactgcaggtcgctcgtgaagactctggtatgtggcgtaaaaaccatcacttgggggattacctcttgtaaggccccaggagaggcccaatttattcctaataaacagctgcagccgaaggagacgcaaatctacattaagctcgtgaaatatgccatgcaagctctggacatttatcaggtgcagatagccggaaatggacaaacctatatacgagtggctaattgccagactgtgcgcatgaaggaggagaaggaagtcctagagcactttgctggcgtgttcacgatgatgaatcctctgacctttaaagaaatattccaaactaccgttccatacatggtggagaggatttctaagaactacgccctccagattgtggcaaatagcttcttggccaaccccaccacctcagcccttttcgcaaccatccttgtcgagtaccttttagacaggctcccagaaatgggcagcaacgtggaactaagtaatctttatctaaagctgtttaagctggtgtttggctcagtgtcactatttgctgccgaaaatgagcaaatgttgaagccacacctccacaaaatagtgaatagttccatggagcttgcccagacagcaaaagaaccctataactattttctcctcctgagggccctgttcagaagcattggcggtggctcacacgacctgctgtaccaagagttcttaccactgcttccaaatttacttcaaggattgaacatgctgcaaagtggcctgcataaacagcatatgaaggacctgtttgtggaactgtgcctaaccgtacccgtgcggctgtcttccctcctgccgtaccttccgatgcttatggatcctctagtgtccgccttaaatggctcccaaactctggtaagccaaggactacgtacgctggagctctgtgtggacaatttacagcccgatttcctgtatgaccacattcagcccgtaagggctgaattgatgcaggctctatggagaaccctccgcaatcctgccgacagcattagccatgttgcatatcgagtgctgggcaagtttgggggttccaatagaaaaatgctcaaggaatctcagaaacttcactacgtggtgacggaggtccaagggccaagtatcactgtggagtttagcgattgcaaggcttccctccagctgcctatggaaaaggcaatagaaactgcgctcgattgcttgaagtcagcgaacacggaaccatactatcggcgacaggcctgggaggtgatcaagtgttttctcgtggcgatgatgtccttggaggataacaagcacgccctctaccaattgcttgctcatcccaatttcactgaaaaaaccatccctaatgtgatcatttcgcatcgctataaggctcaggacacaccagctagaaagacgtttgagcaggctcttacgggggctttcatgtctgccgtgataaaggacctgaggccaagtgctttacccttcgtggcctccctaatccgccactataccatggttgcagtggcacagcagtgcggcccatttctcctcccctgctatcaagtcggcagccagccaagtactgcaatgtttcatagcgaagaaaacgggtcaaaaggcatggatcctctggtgctcatcgatgccattgccatttgtatggcctatgaagagaaagaactctgtaagatcggtgaagtagctcttgcagtaatctttgacgttgcctccattattctggggagcaaggagcgagcctgtcagcttccactgttctcgtacattgttgaacgtctgtgtgcctgctgttacgaacaggcatggtacgcgaagctgggaggagtggtgtctatcaaatttttgatggaacgtctgcctttgacttgggtgctgcagaatcaacagacattcctgaaagctctgctgtttgtgatgatggatctcactggcgaggtgtctaacggagcagtcgcaatggctaaaacgaccctcgagcagttgctgatgagatgcgccacccccttgaaagatgaagaacgcgctgaggagatcgtcgccgcacaggagaagagctttcatcacgtgacgcacgacttggtgcgggaggtaacgtctccgaatagtacagtgcgaaaacaggctatgcacagcctgcaagtcctagcgcaagtaaccggaaaaagcgtaactgttataatggagccccataaggaggtcttgcaagatatggtccccccaaaaaaacatctgctgcgtcatcagccagcaaatgcccagataggactcatggagggaaataccttttgtaccactcttcagccgaggctgttcacaatggacctgaacgtggtggagcataaagtcttctacaccgagttgttgaatctgtgcgaggctgaagattctgccctcaccaaattgccatgctataaatcactgccatcactcgtcccactaagaattgctgcgctgaatgccctggcagcttgcaattacctgcctcagagtcgcgagaagataatcgcagcgctgtttaaggccttgaattccaccaactccgagctgcaggaagcaggcgaagcatgtatgcgcaagttcttggagggcgcaactatagaggtggaccaaattcacactcacatgaggccgctgttaatgatgctaggagattaccgaagtctaactctgaatgttgtcaatagactgaccagcgtcaccaggctgttcccaaactcatttaacgacaagttttgtgatcaaatgatgcagcaccttaggaagtggatggaggtggtggtgattacacacaaaggcggacagcgatctgacggcaatgaatctattagcgagtgcggcagatgtccactctctccattctgtcagtttgaggagatgaaaatctgtagtgcaatcattaacctgtttcacctcattccagctgctcctcagacactcgtaaaacccctgctagaggttgttatgaagacggaacgcgctatgctgatagaggccggaagcccctttcgtgagccactaattaaattcttgacacggcacccaagccaaactgtagagctgtttatgatggaggcaacccttaatgacccccagtggagtcgcatgttcatgtcatttctgaaacataaggatgccagacccctgagagatgtgcttgccgctaacccaaataggtttataactctgttgctgcctgggggagctcaaactgcggttagacccggatccccgtcaacttccaccatgcggctagaccttcaattccaagcaatcaagatcatctccattattgtcaagaatgacgactcatggttggcctcgcagcattccctggtttcacaactcaggcgggtgtgggtgtcggagaacttccaggaaagacaccgaaaagaaaatatggctgctaccaattggaaggagcctaaattgttagcgtattgtttattaaactactgcaagcggaactacggtgatattgagctgttattccagttgttgcgggcattcaccggtagattcctgtgtaacatgaccttcctgaaggagtatatggaagaagaaatacccaagaactatagcattgctcagaaaagagctctcttcttcagatttgtagacttcaacgatccaaatttcggggacgagttaaaagctaaagtccttcagcacatattaaacccagccttcttatactcattcgaaaaaggggaaggagagcagctcctgggccctccgaatcctgagggcgacaatcctgaatcaatcacgagcgtgttcatcacaaaggtgcttgaccctgagaaacaggccgacatgctcgacagcctccggatctacctgctacagtacgccactctcctggtggaacacgctccacaccatattcatgacaacaacaagaatagaaactcaaagctgaggaggttgatgaccttcgcctggccatgccttctgagtaaagcatgcgtggatccagcatgcaaatacagtgggcacctgttgctcgcccacattattgcaaagttcgcaatccacaagaagatcgtattgcaggtgttccattcccttttaaaggcgcatgccatggaggccagagccatcgtgaggcaggccatggctatcctgactccggcagtcccagcgagaatggaggacgggcaccagatgttgacacattggacccgtaagatcatcgttgaagagggtcataccgtccctcagctggttcatatcttacaccttattgtgcaacatttcaaagtttactacccagtgcggcaccaccttgttcagcacatggtgtccgccatgcagcggttgggattcactccttccgtaacaatagaacagcgccgactagccgtggacttgagcgaggttgttatcaaatgggaactacagaggatcaaagaccagcagcccgacagcgacatggacccaaattcttcgggggagggggttaattctgtgtcctcttcaattaagaggggcctttcagtggattccgcccaggaggtaaaaagattccgaaccgctactggcgctatttccgcagtgttcggcaggtcccaatccctgcccggtgccgacagcctgctggctaagcccattgacaagcagcataccgacacagtggtaaatttcctgattcgcgtcgcctgccaggttaacgacaatactaataccgccggttccccaggggaggtattatccagacggtgtgtgaatttattgaagaccgctctcaggccagatatgtggcctaaatcagaacttaaactacaatggtttgacaagctgctgatgacagttgagcagcctaatcaggtcaattacggcaatatatgtacaggtctcgaggtgctgagtttcctgttaacggtgctgcaatcacctgcaatcctctcttcattcaagcccctccagagaggaatcgccgcatgcatgacctgcgggaataccaaagttcttcgagccgtccatagcctgctgagcagattaatgtcgatcttccctaccgagccatccacgagctctgtcgcttcaaagtacgaggagcttgagtgcctctatgcggcagtcgggaaagtaatctacgagggtcttactaattacgagaaggctactaacgcaaacccctcccagttattcgggacactaatgatcctcaagtcggcctgctccaataacccctcctacattgataggttgatctccgtctttatgcggagtctccagaagatggtccgtgaacatttgaatccccaggcagcctctggcagtaccgaggcaacatcaggtacaagtgagttagtgatgctctcactggagcttgtaaaaaccagactggccgtgatgtcaatggaaatgagaaaaaatttcattcaggctattcttacttcactgattgaaaaaagccctgacgccaaaatcttaagagccgtcgtgaagattgtcgaagaatgggtgaagaacaactctccaatggcagccaatcaaactccaaccttacgggagaagtcaatccttctggtcaagatgatgacatatattgagaaacgcttcccagaggatctcgagctgaatgcccagttcctggatctggtgaactacgtatacagagatgagacgctatcgggctccgagttaaccgccaaattagaaccagcttttttatcgggcctgcgttgtgctcagcccctgattcgagcgaaattctttgaagtgttcgacaacagtatgaagcggcgtgtgtatgagagactgttgtacgtgacatgttcacagaactgggaggctatggggaatcacttctggatcaaacaatgcattgaattactgctcgccgtgtgtgagaagtctacacctatcggaaccagctgtcaaggggcaatgttaccatctatcaccaatgtgattaacctggctgacagccatgacagggccgcattcgccatggtcactcatgtgaagcaggagccccgagagagggagaacagcgaaagcaaggaggaggacgttgaaatcgatatcgagttggcacccggagaccagacatccacgcctaagactaaagaattatccgaaaaggacattggcaaccaactacatatgctgactaaccgccatgataagtttctggacacactacgggaagtgaagaccggagccctgctcagtgcttttgtgcagctttgccatatttcgacgaccctggccgagaagacatgggtgcaactgtttcccaggctctggaagattctgtcagatcgccagcagcacgcactagctggcgaaatttctccgtttctctgtagcggcagtcatcaggtgcagcgggattgccagccgtctgcgctgaactgcttcgtcgaagccatgagccagtgcgtgccacctatccccatcaggccttgcgttttgaaatacctggggaagacacacaatctctggttcagaagtaccctcatgttggaacatcaggccttcgaaaagggactgagcctccagattaaacccaagcagaccaccgagttctacgagcaggagagcataactcccccacaacaggaaattctagatagtctggcagagttatattccctcctgcaggaagaggacatgtgggccggattgtggcagaagcgatgcaagtattcagagacagccaccgccattgcatacgagcagcatggatttttcgagcaggcccaggaatcttatgagaaggctatggacaaagccaagaaggagcacgagcgctccaacgccagccccgctatatttcccgagtatcagctttgggaagatcactggatcagatgtagtaaagaacttaaccagtgggaagctctgaccgagtacggacagagcaagggacacatcaatccttatctggttttggagtgcgcatggcgcgtcagcaattggaccgccatgaaggaggctctggtacaagtcgaagtaagctgtcccaaggagatggcctggaaagtgaacatgtaccgcggatacctcgctatatgccaccctgaagagcagcagctgagctttatcgagagattggtggagatggcgtcgtcactggctatcagagagtggcgtcggctcccacatgtggtttctcacgttcacacaccgctattacaggccgctcagcagataatcgagctgcaggaggctgctcagatcaacgctggtctacagcctaccaatctgggtaggaacaattccctgcacgatatgaaaactgtggtaaaaacatggaggaaccggctgccaatcgtttccgacgacctctcgcactggtcaagcatctttatgtggcgacagcatcactatcagggtaagcctacttggtcgggcatgcacagctcgtcgattgtaactgcttatgaaaactccagccagcacgacccttcatccaataacgctatgctaggggtccacgcttctgcttctgctatcatccagtacggcaagatcgctagaaagcagggcctcgtcaacgtcgccctggacatcctcagccggatccacactatcccaactgtaccaatcgtcgattgctttcagaagatccgacagcaggtgaagtgctatcttcaactggccggagtgatgggtaaaaacgagtgcatgcagggactggaagtgatcgaatccactaatctgaagtatttcactaaggagatgacagctgagttttatgcgttgaaaggtatgttcctcgcccagatcaataaatccgaggaagcaaacaaagccttctcggctgcagtgcagatgcacgacgtgctagtgaaggcgtgggccatgtggggcgattacctagaaaatattttcgtcaaggagcgccagctgcaccttggggtgtcagccattacatgttacctgcatgcttgccgccaccagaacgaatccaagtctaggaaatacttagcaaaggtgctttggttgctgagctttgacgatgataagaacaccctggctgatgccgtggataaatactgcatcggcgtgccgccaattcagtggctcgcttggattccccagctcctgacatgcctcgtgggctctgagggcaagctgctgctgaatctaatcagccaggtaggtcgcgtgtacccacaggccgtgtacttccccattaggacactgtacttaaccctgaagattgagcagagggagaggtacaaatccgaccccggacctatccgagccacagccccaatgtggcgctgttcccgcattatgcacatgcagagggaactgcacccaaccctcttatcaagtctggagggcattgtggaccagatggtttggttccgggagaattggcacgaagaagtgcttagacagctccagcaggggcttgccaagtgttacagtgtggcattcgagaagtctggtgccgtgagtgatgctaaaatcactccacacaccttgaattttgtcaaaaagctggtgtccactttcggagtggggcttgagaatgtgagcaacgtaagcaccatgttcagtagcgccgcttcagaatccctggcccgtcgggcacaagcgacagcccaggacccggtgtttcagaaactgaagggtcagtttaccaccgatttcgattttagcgtgcctggatcaatgaagctgcacaacctgataagtaaactgaagaagtggatcaaaattctcgaagctaagactaagcagttgcccaaattcttcctgatcgaggagaagtgtagatttttatctaacttttctgcgcagaccgctgaggtggagatccccggtgaattcctcatgcctaaacctacacattactacattaagattgctagatttatgccccgagtagagatagtgcagaaacacaacactgcagccaggcggctttacattagaggccacaatggaaaaatttacccctacctagttatgaacgatgcctgcctcaccgagagccggagggaggagagagtacttcagttgcttcggctcctgaacccgtgtctcgagaagcgaaaagagacaaccaagaggcacttgttcttcacggttccacgggtggtggctgtgagtccccaaatgaggctggtggaagacaatccgagctctttgtcgttagttgagatctataaacagcgctgcgctaaaaagggaattgagcatgataatccgatctctaggtattatgatcgtttagctaccgtgcaggcaaggggcacccaagcctcacaccaggtgcttcgcgacatactgaaggaagttcagtccaatatggtgcctaggtccatgttaaaggagtgggccttacacacatttccaaatgccactgattattggaccttccggaagatgtttacaatacaattggcgttgattgggttcgccgaatttgttttgcacctgaacaggctcaacccagaaatgttacagatcgctcaagatactggaaaactgaacgtggcatattttcgcttcgatattaacgatgccaccggtgatcttgacgcaaacaggccagttccctttcgcttaacacctaatattagtgagttcctgacaaccatcggagtgtccggtccactgacggccagtatgatcgcggtggcaagatgctttgcacagccaaattttaaggtagacggcatcctcaaaactgtcttgcgagacgagattatcgcatggcataagaagactcaagaggatacctctagtccactgagcgctgcagggcagccagagaacatggacagccagcagctagtgtcgttggtgcaaaaagccgtcactgctattatgactaggctgcataatttagcacagtttgaaggcggagagtcaaaagtgaatactctggtggcagcagcaaatagcctggacaatctctgtcggatggatcccgcttggcacccctggctctac

SEQ ID NO: 87277 - protein, 280 aa, Artificial Sequence
  derived and/or modified sequence
MMKEKEKTIAIVKVIDTSKLKLLSGSILDVYSGEQGISPINMGLTSASCPSSLPMKREITETDTRALAKERQKKDNHNLIERRRRYNINYRIKELGTLIPKSNDPDMRWNKGTILKASVEYIKWLQKEQQRARELEHRQKKLEQANRRLLLRIQELEIQARTHGLPTLASLGTVDLGAHVTKQQSHPEQNSVDYCQQLTVSQGPSPELCDQAIAFSDPLSYFTDLSFSAALKEEQRLDGMLLDDTISPFGTDPLLSATSPAVSKESSRRSSFSSDDGDEL

SEQ ID NO: 87278 - DNA, 843 bp, Artificial Sequence
  derived and/or modified sequence
atgatgaaggagaaggaaaagaccatcgcaatcgtcaaagttatcgatactagcaaacttaaactcctgtccggcagtattctcgatgtgtattcaggcgagcagggcatatcccccatcaatatgggcctgacctctgcgtcttgcccgtcgagcctaccaatgaagcgagaaataacggagacggacacacgggcacttgctaaggagaggcagaaaaaagacaatcataatctcattgagaggcgtagacgttataacatcaactatcgaatcaaagaattaggcactctgattccaaaatccaacgaccccgacatgaggtggaataagggtacgatcttgaaggcctctgttgagtatattaagtggctgcagaaggaacaacagagagcacgtgagcttgagcatcgccagaaaaagctagagcaagctaatcgccgactactgctgcgcattcaagaacttgaaatccaggccaggacccatggtctccctacacttgcttcactgggcacggtcgatctgggcgcccatgtcactaaacagcagtctcaccccgagcaaaacagtgttgattattgccaacagttgacggtcagccagggcccatctcctgagctctgtgaccaagcaatagcgttctcggacccactgtcatatttcacagacctgtcgttttctgctgcattaaaagaggagcagcggctcgacgggatgctcctagacgacactatctccccctttgggactgaccccctgctcagcgccacctccccagctgtgagcaaggagtcttctaggaggtcctcatttagttcagacgatggagacgaactgtag

SEQ ID NO: 87279 - DNA, 843 bp, Artificial Sequence
  derived and/or modified sequence
atgatgaaggagaaggagaagaccatcgccatcgtgaaggtgattgacaccagcaagctgaagctgctgagcggcagcatcctggatgtgtacagcggggagcagggcatcagccccatcaacatgggcctgaccagcgccagctgccccagcagcctgcccatgaagcgggagatcacagaaacagacacccgggccctggccaaggagcggcagaagaaggacaaccacaacctgattgaaagaagaagacgctacaacatcaactaccgcatcaaggagctgggcaccctcatccccaagagcaatgaccctgacatgcgctggaacaagggcaccatcctgaaggcctctgtggagtacatcaagtggctgcagaaggagcagcagagggcccgggagctggagcaccggcagaagaagctggagcaggccaacagaaggctgctgctgcgcatccaggagctggagatccaggcccggacccacggcctgcccaccctggccagcctgggcaccgtggacctgggcgcccacgtgaccaagcagcagagccaccctgagcagaacagcgtggactactgccagcagctgactgtgtcccagggccccagccctgagctgtgtgaccaggccatcgccttcagtgaccccctgagctacttcacagacctgtccttctctgctgccctgaaggaggagcagaggctggatggcatgctgctggatgacaccatcagcccctttggaacagaccccctgctgagcgccaccagccctgctgtgtccaaggagagcagccgccgcagcagcttcagcagtgatgatggagatgagctgtag

SEQ ID NO: 87280 - DNA, 843 bp, Artificial Sequence
  derived and/or modified sequence
atgatgaaggagaaggagaagaccatcgccatcgtgaaggtgatcgacacctctaaacttaagctgttatccgggtctatattggatgtctattcaggggagcagggaatttcccctatcaatatgggcctgacaagcgcctcttgtccgagcagtctgccaatgaagcgcgagatcactgagacagacacccgggccctggcgaaggagagacaaaaaaaggacaatcataacttgatcgagagaaggaggaggtataacatcaactaccggataaaggaactggggacactgatccccaagagcaacgaccccgacatgaggtggaacaagggcacaattctgaaggccagcgtagaatacatcaagtggctgcagaaagaacagcagcgcgccagggagctggaacaccgacaaaaaaagctggagcaggcaaaccgccgtttgctcttacggattcaggagctcgaaattcaggcacgaacccacggattgcccacccttgccagcctgggaacagtggacctgggtgcgcacgtaaccaaacagcagagtcaccctgaacagaattcagtggattattgtcagcagttgaccgtctctcagggcccaagcccggagttatgcgaccaagccatcgccttcagtgacccgcttagctacttcacagatttgagtttcagtgcagcattaaaggaggagcagcgtctcgatggcatgcttttagacgacacaatttcccctttcggaactgatcctctgctgagtgcgaccagccccgccgtctcaaaagaatccagccggcggagttcattttctagcgatgatggggacgagttgtag

SEQ ID NO: 87281 - DNA, 843 bp, Artificial Sequence
  derived and/or modified sequence
atgatgaaggagaaagaaaaaactattgccatagttaaagtaatcgacaccagcaagctgaaactgcttagtggcagtattctcgatgtttatagcggagaacagggcatttcaccaatcaatatggggcttacatctgcttcatgtccttcctccctgccaatgaagcgggagattaccgaaactgatactagggcgctcgctaaagagagacagaagaaagataaccataacctcattgagagaaggcgcaggtataatatcaactaccgaattaaagaactgggcaccctgatacccaaaagcaacgatccagatatgcgatggaacaagggaacaattctgaaagcttcagtggagtacattaagtggctgcagaaggaacagcagcgcgctagggaactggagcaccgccaaaaaaagctcgaacaagccaaccgccgactgctgttgcggattcaggagttagagatacaggcaaggacccacgggttgcccacgctggcctctttaggcacggttgatttgggcgcacacgtgacaaaacagcagagtcaccctgagcagaacagtgtcgactactgccagcagctgactgtatcccagggcccaagccccgagctctgcgatcaggccattgcttttagtgacccactgtcctacttcacagatttatctttctcagccgcactgaaagaggagcagcggctggatggcatgctgctggatgatacaatttcgccttttggcaccgatcctctgctgagcgcgacgtcccctgccgtctcgaaggagtcctctcgtcgcagttcattttcaagcgatgacggagatgaactgtag

SEQ ID NO: 87282 - DNA, 6246 bp, Artificial Sequence
  derived and/or modified sequence
atgatgaaggagaaagagaaaaccattgctattgtgaaggttatagacacttcaaagttaaaactgttatctggaagtattttggatgtgtatagcggtgaacaaggaatttcaccaattaacatggggcttacaagtgcttcttgtccaagtagtctaccaatgaaaagagaaattacagaaactgacactagagctttagcaaaagagagacaaaaaaaggacaaccacaacctcattgaaagaagaagaaggtataatattaattaccgaatcaaggagcttggcactcttattccaaagtctaatgatcctgatatgcgctggaacaaaggaaccattctaaaagcatcagtggagtacatcaagtggctacaaaaagaacaacagagagcccgagaattggaacacagacagaagaaattagagcaggctaacaggcgacttctacttcggattcaggaactagaaattcaggctcgtactcatggtctgccaaccctggcttcacttggcacggttgatttaggtgctcatgtcaccaaacagcagagccatcctgagcagaattcagtagactattgccaacaactgactgtgtctcaggggccaagccctgagctctgtgatcaagctatagccttttctgatcctttgtcatacttcacagatttatcatttagtgctgcattgaaagaggaacaaagattggatggcatgctattggatgacacaatctctccatttggaacagatcctctgctatctgccacttcccctgcagtttccaaagaaagcagtaggagaagtagctttagctcagatgatggtgatgaattataagaaataaacagacccaattcatcaactggaaagcaattctatgctggtgctatgcaattatgctctgtgtttcatatgttgctttggcttattttttttcttaaaggaatgtgttgttcatgaaaaactgatagaagcaacagaagaattcgcaggaagaaaaatcatagtgttaatgaattattgagggcgaaaaaaaggtgttttcttctttgactacggagtccaaatccacttaaattctgttttcctgaaaagaggtacagcataagaaatagctctttattgatgttttaaaagcagcaacttggtggtgtactactggaactaatgactgcaaagtgttaaacgactgaaatatacaaacagtctcttagttactcatttccatcttctcttcaactttcacatcagtcttccggaatcaagatcaacatatcaggtggtcattgcctttctccattgtctagtagacatgtctaaagttcaaactttataggataaataaatgtataatagattatctgtcacttgtggttgaaaggcaaatctacaataaatgtgagaattttccacaataaaatatggataacttataaaaacattggttactaaaattagatcctcattttattgtagttggttcaattacactaattctaaaagcatccatgcatatttatatctccagtctctgttcaggaaaaggaacatattgaatattttcctcaggaatatggaccagaattgtatcccttcacacaaacatacacatacacatatgcacatcattcaggtagtatatgttcttttgttttcttcatgcttctgactgcatcagaatcacattccaaattctcttttcttatgaagaagagatgtcagatcatcaattttagtaaataaaatataaaatgtccccctgcaaggacagttttcaggtacttaaaacttttcatcagtattggacagaaatcaattagttgttgatttggtttttctccaaatggataaaatattgaaaattgaattgccaattgacaaaataattattacaacaaactatttcttattattttcagttctgagaggaacgtaaggttctatttctataaacacttagagtgtcctatgatctttggttgcactgttagcatttattataagcacttataactatgatgcttcatttagatttttatctcttgcgcttgttttaggttaggaaattaagttaccaagcacgttgctctgtgctggacctccaagagtgatcatccgatcaatgagtattcatggaggcatactcagaactgcagtgagtcctgagaaaatgtagaagagttgaaaaagatatggtcttactcctaaggtagttaatgagaatgcatgaaaaacaaaaacaaaagatagaagacatatagaataaaaaatctaagcataaactgtaaatacagaaggtcagagaaaatgaaaatgactgacaaactttatgggaacagcagaatttgacttctctttgaaaggcattaattgagtgaaagtgagggcatataaaggaataataccaaccaaatgataaaagtgagaataataggggaagtatctttataggactttaattagaaagatctggatgccctagaagatgtctgttggggagttctgaagcataagactgacaacaggttgtgaaggcccttagaaaactatggtgaaataatatagtattaatataatagaaacaaatctttttagtagcagggaggatgctaaaaactaaaatatatattactaatgagtgagatgtaatctttcatgaatattaagctttgggataaattttgaaaggatcttttagttgcttctcacatggaaaatatgtcactatgaaatgtgagaccctaatgctgataaaagtagaaaaatagtaaatcattatggtataataattatctcaggcttagcttgtatcatttgctcagaatttggagaattaaaataattttattgtttgacatggaaaaataattactaacttctgggtacagtcattaaagcctgatagataaattcatctgaaatatgccatgtgaaacagctattagatacatcttctcaataattttcaagacgatattacatacttttaattttataacaaaattccacttcattatctgagttgataatttgattaaatgttaaaaattatagataaggaatatattttggagttcatagaaaacacaccactttattagatagagactggcttcagttctcattttatctgctcttctcatttcttcatattttgagtagacttgcactgatgatgtcattactcagtcattattttctgttctgttaaggtacaactactgggccttgaaatctatccttcacaatcttggctgagataaggacttggcacaggatgatagagcctggacacaagagatctggagagggaactgctatttgctgctacattcagattatgagatgtcagggaactgtaaaaagggtaatgaatttttaaagagagtaaagagttatgctgtgtcccggtcaactgaaatacattaaaaattaattagatggtagttcttaactttttaaggcagataccttgagaatctagtgagttatagaccctctccctagaaaagtatagaactgtttatatggacaataattcacatgcattcagagatcttagggatctcctgaatgttttcttggatcccaagtgaaaaattcctgaatcaggtctcttaggtgtgcggttaatgtcatgtataacaatggggggacccttacttatctaaatataattatcccaatcctaataatgatgaggttgcataggaaagtaatagtgtaccaaactttagattattcactaaaaaagttgttcatttatgaagtagtcgtttatcaaacatgtcctccccactcagcaaactatgccttctatttattatatatgggtcagtttcactataattactgagtgttataaacatctgaccataacattttgaaatgatgcaaataaatttccaaacaaaaatagtgtgaatttaaaagcaaattatttgagtatctaagaaacaagatagacttctagaaaaatttgactctctagaatatttcttgcagaaatgagatttttcataatagtaaaagaggcatatgtttatcaaacaatgctgtcacaaaaagcatcaactgtaatgggactattaatgcataattattgatttattcattcaattaatatacaattatcccttttcatttaaagatttaattcataattacaattataataaaacttcctttaaagtaagatacaataattttattgtttttcattcttttttcaacaaaatatcccatccaatcattttttatattattaaatattggctgctttttcttggattcacattaaacagccctttccaacttccaattgtcttaaaataatgatgacctcctgtgagtagatacagctctttacaatttttttctttagtgccttttcttcttgaatttttcctatatcaaatggagaatatatgtacagatggtattttctcagtttataggcatatcagtgaccatggctttctttatataggtttttaaaaaagccctaaataataaatagccagatgagctggggacattgagaaatagccttcctcttcctttttcaactcatttttttcccacctacatgactgtaaatcaaatatttaatagctcttacttaaaaaaacagatacaaagaatgtcttgatttggtgtgctcatttaccataatgtcatgaggggaattagatttcacaactttaaaaggaatatatttttattttattttgaaaaactgagtcatataggaattttcttatacttcaaggcatcatggaaacacttttttcctgtttggatattgtggaatttaaacgttcaaataaataaatggcataactaagtgttccaaatttttttacaatgtctttgaccctattcaaacactttaggtatttactgaccgtctgatgtgtaagatgtggaataaaactggaatcaattaattatttcactgtgttatcagcgcaagatcaaccatctgggtttcttaaagacacccgaaggattgaattttgtttcagtattgataatggcatagtctctatgtgctacatggaattacatcatttatccctccagtgccctatatgttgataagtatgtcagtttgacttagtatacatatatacagagatttcattacatttacctaataaatacaaaatacatttcgagtgttactgatctcctatgttacatgagcctcctgtaatcattgtgcattgatgttccaatgttttattgtttgtatgaattttaatttgaaaacaaggaaacaatccaaaagcagaaaaaatagcttttcttaaaattttcagtgctacattttccctctgaggtccatagagatttgaatgtataggagattatccgaaaacagctattttgattaaaaaatatatctcccaggattcaaccaacttaatgatgaagtactattgtctactgctttatacataaaagggaactttttatctgcttgtaaagggatttttatgtgtatttctgcataatcagatgacttctattgtgttttctactgatgaaattctctgtaaaatgtctttttcttacattatccaacaggcataaagaataacagtaaagacttttgtgtttgtaatactacctcttttatccctgcactactgttttattgcaaaaattctatattgtcactgtattttttccatagaatataaattttgttcttgtgctaaagctggtagtttatgtagcagacaaaatatacaaataaaagaagagactgattttgctgaaagaattatatataatcaagaagttacatattgttctttaaatatgatactgaattttaaaagcaaacgaaattcaagaatcttatctaacagcatagcagttgcttatggcatacaaggctaaaattaattcagctatttaatcttaataattattatgtagttaaaaatctttgactttaatagtgttttacatatacaaatagctgaagtaacattcctataattttaatctgacattggttagatcaagaaaacattgttaataagactgtagaatttgtaattattgctatttttcatttttaataacaaagtaatgtgtcttattttctaagaaaatggagaactttggtgtactttaatacatacaaaaatctttgtaaaaataccttaaaatgtaccaatattttctttgcatatattaaatgaaagactataattatgaaatgtt

SEQ ID NO: 87283 - DNA, 843 bp, Artificial Sequence
  derived and/or modified sequence
atgatgaaggagaaggagaagaccatcgccatcgtgaaggtgatcgacaccagcaagctgaagctgctgagcggcagcatcctggacgtgtacagcggcgagcagggcatcagccccatcaacatgggcctgaccagcgccagctgccccagcagcctgcccatgaagagagagatcaccgagaccgacaccagagccctggccaaggagagacagaagaaggacaaccacaacctgatcgagagaagaagaagatacaacatcaactacagaatcaaggagctgggcaccctgatccccaagagcaacgaccccgacatgagatggaacaagggcaccatcctgaaggccagcgtggagtacatcaagtggctgcagaaggagcagcagagagccagagagctggagcacagacagaagaagctggagcaggccaacagaagactgctgctgagaatccaggagctggagatccaggccagaacccacggcctgcccaccctggccagcctgggcaccgtggacctgggcgcccacgtgaccaagcagcagagccaccccgagcagaacagcgtggactactgccagcagctgaccgtgagccagggccccagccccgagctgtgcgaccaggccatcgccttcagcgaccccctgagctacttcaccgacctgagcttcagcgccgccctgaaggaggagcagagactggacggcatgctgctggacgacaccatcagccccttcggcaccgaccccctgctgagcgccaccagccccgccgtgagcaaggagagcagcagaagaagcagcttcagcagcgacgacggcgacgagctgtag

SEQ ID NO: 87284 - protein, 198 aa, Artificial Sequence
  derived and/or modified sequence
MSVIWDKAVVTGKMDENQFVAVTSTNAAKVFNLYPRKGRIAVGSDADLVIWDPDSVKTIFEGMECRGSPLVVISQGKIVLEDGTLHVTEGSGRYIPRKPFPDFVYKRIKARSRLAELRGVPRGLYDGPVCEVSVTPKTVTPASSAKTSPAKQQAPPVRNLHQSGFSLSGAQIDDNIPRRTTQRIVAPPGGRANITSLG

SEQ ID NO: 87285 - DNA, 1611 bp, Artificial Sequence
  derived and/or modified sequence
atggaggacgggttgatcaaacagattggggagaacctcattgtcccaggcggtgtgaaaacgatagaggcccattcccgtatggtgatcccgggaggcatcgatgtccacactaggtttcagatgcctgaccaaggaatgacctctgccgatgatttttttcaggggacaaaggcagcgctggcaggtggcactactatgattattgaccatgtggtgcctgaacccggcacctctctgcttgctgccttcgatcagtggcgtgaatgggcggattccaagtcctgttgtgactactcccttcacgtggacatttccgagtggcataagggaatacaggaggagatggaagccctggtgaaggaccatggcgtaaactctttcttggtgtatatggccttcaaggatagatttcaattgaccgattgccagatctacgaggtcctgtcagtcattcgggacatcggggcaatagctcaggttcacgccgagaacggcgatatcatcgcagaagaacagcaacgcatactcgacctgggcattaccggccctgagggccacgtgctgtcacgccccgaagaagtggaggccgaggctgtgaaccgagcaattactatcgcaaatcagaccaactgtcctctgtacataacaaaggtgatgtccaaaagcagtgctgaggtgattgctcaagctaggaagaaaggaacggtggtttatggggagccgatcaccgcatcattggggactgacgggtcccactactggagtaagaactgggccaaagccgcggcattcgtcacaagtcctcctttgtcacccgatccaaccacgcccgacttcttgaacagcctcctcagctgcggtgatttacaagtgactggaagtgcccattgtacttttaataccgcgcagaaagccgttggaaaggacaacttcaccttgatccctgaaggcacaaatgggactgaagagaggatgtcagtgatttgggataaagccgtcgtcaccgggaaaatggatgaaaatcagtttgtggccgtgacctctactaatgccgccaaagtgtttaacctgtatccacgtaagggccggattgcggtgggatctgatgcagatctggtaatttgggatccagattctgtgaagacaatcagcgcgaagacgcacaattcttcattagaatataacatctttgaaggcatggagtgtagaggatcacccctcgtagtgattagtcagggtaagatcgtattagaggacggcactctccatgtgacagagggatccggtcggtacattccacgcaaacccttcccggatttcgtttataagagaatcaaggcccgaagtcgtctcgccgagttaagaggagtcccaagagggttgtacgatggcccagtgtgcgaggtctcggtaacccccaaaacagtgactcccgcttcgagtgcaaaaactagccccgcgaagcagcaggctccccctgtacgaaatttacatcagagtggtttcagtctatccggcgctcagatcgacgacaatataccacgacgaactacacagaggatcgttgccccccccggtggtagggctaatatcaccagtctcggatag

SEQ ID NO: 87286 - DNA, 1611 bp, Artificial Sequence
  derived and/or modified sequence
atggaggatggacttataaaacagataggggaaaatctcatcgtccctgggggggtcaaaaccattgaagctcactcgagaatggtgattcctggcgggattgacgtacacacgaggttccagatgccagatcaaggcatgacctcagcagatgacttctttcagggtacaaaggctgcccttgccggaggcaccaccatgattattgaccacgttgtacctgagccgggaacctctctcttagccgcctttgatcagtggcgagagtgggccgacagtaaaagttgttgcgattactccctgcacgttgacatatccgagtggcataaaggcattcaggaagaaatggaggctctcgtcaaagatcacggagtgaattcattcctcgtgtacatggccttcaaggaccggttccagctcacagactgccagatttacgaggtgctgtccgtcattagagatatcggggcaatcgcgcaggtgcatgctgaaaacggcgatattattgccgaagagcagcagcgaatcctcgatcttgggattacaggcccagaaggccacgtgctctcacggcccgaagaggtagaggcagaggctgtgaaccgagcaattactatcgcaaatcaaactaactgcccactctatataacaaaagttatgtcaaaatctagcgcagaagtcatcgctcaggctaggaagaagggaacagttgtctacggtgagccaatcactgcaagtctgggcaccgacggctcgcattattggtccaagaattgggccaaggcagccgcctttgtgaccagccctcctctttctcctgaccctaccaccccggatttcctaaattcattgctcagctgtggggacctgcaagtgactggctccgctcactgcactttcaacaccgcccagaaggctgtgggcaaagataacttcacattgattcccgaagggactaatggcaccgaggaacgaatgtcggtgatctgggataaagcagtggtaacgggaaagatggacgagaaccagtttgtcgctgtcacaagcacaaacgccgctaaagtgtttaacctatacccgcgtaaagggcggattgcagtcgggagtgacgctgatttggtgatctgggatcctgattcagtcaaaacaatatctgccaagacacacaactcatcactcgagtacaatatcttcgaaggaatggagtgccgcggatcccctctggtagtgatctcccagggaaagatcgtcttggaggatggcactcttcacgtcacagagggcagcgggaggtatataccaagaaaaccctttccggatttcgtatacaagcgcataaaggcaagatctaggcttgccgagctgagaggcgtcccacgcggattgtacgacggccctgtgtgcgaggtgtctgtcactcctaaaacggtcacgcccgcctcttccgctaagacatcacctgcgaagcaacaggccccacccgtgcgtaaccttcaccagagcggcttctctctttccggagcccagatagacgataacattccacgcaggactacacagaggatagtggcccctccaggtggaagagccaatatcacctcactgggctag

SEQ ID NO: 87287 - DNA, 597 bp, Artificial Sequence
  derived and/or modified sequence
atgtcagttatttgggataaggcggtcgtgaccggcaagatggatgagaatcaattcgtcgcggtcacctctaccaatgctgcaaaggtttttaatctgtatcctcgtaaaggcagaatcgccgtcggatctgatgccgaccttgtaatttgggatccagactcggtaaagaccatcttcgaaggcatggaatgtcggggtagccccctggtggttatctcccagggaaaaatagtgttggaggatggcactcttcacgttaccgaaggctctgggcggtacattccgcgaaaaccatttcctgactttgtttataaaaggatcaaggctagatcacgccttgccgagcttcgcggcgtccctagaggactctacgacggaccagtgtgcgaagtcagcgtgaccccaaagacagtaacccctgcatcctctgctaaaacaagccccgcgaaacagcaagcaccaccggttcgaaatttgcatcagtccggcttttctctgagtggggcacagatcgacgataatattcctaggaggactacacagcgcatcgtggctccaccgggggggagggcgaatataacatctcttgggtag

SEQ ID NO: 87288 - DNA, 1611 bp, Artificial Sequence
  derived and/or modified sequence
atggaggatggcctcatcaagcagattggagaaaatctcatcgtgcctgggggcgtgaagaccatcgaggcccacagcaggatggtgattcctgggggcattgatgtgcacacccgcttccagatgccagaccagggcatgaccagcgcagatgacttcttccagggcaccaaggccgccctggccggcggcaccaccatgatcatcgaccacgtggtgcctgagcccggcaccagcctgctggccgcctttgaccagtggagggagtgggccgacagcaagagctgctgtgactacagcctgcacgtggacatcagcgagtggcacaagggcatccaggaggagatggaggccctggtgaaggaccatggagtgaacagcttcctggtgtacatggccttcaaggaccgcttccagctgacagactgccagatctatgaggtgctgagcgtcatccgggacattggagccatcgcccaggtgcatgctgaaaatggagacatcatcgccgaggagcagcagaggatcctggacctgggcatcaccggccctgagggccacgtgctgagcaggcctgaggaggtggaggccgaggccgtgaacagagccatcaccatcgccaaccagaccaactgccccctgtacatcaccaaggtgatgagcaagagcagcgctgaggtgattgcccaggccaggaagaagggcaccgtggtgtatggagagcccatcacagccagcctgggcacagatggcagccactactggagcaagaactgggccaaggctgctgcctttgtgaccagcccccccctgagcccagaccccaccaccccagacttcctgaacagcctgctgagctgtggggacctgcaggtgactggaagtgcccactgcaccttcaacacagcccagaaggctgtgggcaaggacaacttcaccctcatccctgagggcaccaacggcacagaggagaggatgtctgtcatctgggacaaggctgtggtgacaggcaagatggatgagaaccagtttgtggccgtgaccagcaccaatgctgccaaggtgttcaacctgtaccccaggaagggcagaattgctgtgggcagtgatgctgacctggtgatctgggaccctgacagcgtgaagaccatcagcgccaagacccacaacagcagcctggagtacaacatctttgagggcatggagtgccggggcagccccctggtggtgatcagccagggcaagatcgtgctggaggatggcaccctgcacgtgacagagggcagcggccgctacatccccaggaagcccttcccagactttgtgtacaagaggatcaaggcccggagccggctggccgagctgcggggcgtgccccggggcctgtatgatggccctgtgtgtgaggtgtctgtgacccccaagacagtgaccccagccagcagcgccaagaccagccctgccaagcagcaggcccctcctgtgaggaacctgcaccagagcggcttcagcctgagcggggcccagattgatgacaacatccccaggaggaccacccagagaattgtggcccctcctgggggccgggccaacatcaccagcctgggctag

SEQ ID NO: 87289 - DNA, 597 bp, Artificial Sequence
  derived and/or modified sequence
atgtctgtcatctgggacaaggctgtggtgacaggcaagatggatgagaaccagtttgtggccgtgaccagcaccaatgctgccaaggtgttcaacctgtaccccaggaagggcagaattgctgtgggcagtgatgctgacctggtgatctgggaccctgattctgtgaagaccatctttgagggcatggagtgccggggcagccccctggtggtgatcagccagggcaagatcgtgctggaggatggcaccctgcacgtgacagagggcagcggccgctacatccccaggaagcccttcccagactttgtgtacaagaggatcaaggcccggagccggctggccgagctgcggggcgtgccccggggcctgtatgatggccctgtgtgtgaggtgtctgtgacccccaagacagtgaccccagccagcagcgccaagaccagccctgccaagcagcaggcccctcctgtgaggaacctgcaccagagcggcttcagcctgagcggggcccagattgatgacaacatccccaggaggaccacccagagaattgtggcccctcctgggggccgggccaacatcaccagcctgggctag

SEQ ID NO: 87290 - DNA, 1611 bp, Artificial Sequence
  derived and/or modified sequence
atggaggacggcctgatcaagcagatcggcgagaacctgatcgtgcctggcggggtgaaaaccattgaagctcattcgagaatggtgatcccagggggtattgacgtgcataccagattccagatgcccgatcaggggatgacttctgcggacgattttttccagggcaccaaggcagctctggcaggcggaaccactatgatcatcgaccatgtggtacctgagcccggcaccagtctcctggccgcattcgaccagtggagggaatgggcagactctaagtcctgttgtgactattctctgcatgtagacatctccgaatggcataaggggattcaggaagagatggaagccctggtgaaggaccatggcgtcaactcatttcttgtatacatggctttcaaggacagattccagttaaccgattgccagatttatgaggtgttgtcagtgattagagacatcggcgccatcgcacaggtgcatgccgagaatggagacataatcgccgaggaacagcagcggatcctcgatttgggcatcactggacctgagggacacgtgttgagtaggcccgaggaagtggaggctgaggctgtcaaccgtgctatcactattgccaatcaaaccaactgccctctctacatcacaaaggtgatgtccaaatcaagcgctgaagtgatagcccaggcgcgtaagaagggtaccgtagtgtacggcgagccaataactgcctcccttgggaccgacggctcccactactggtcgaaaaactgggccaaggctgccgcttttgtcaccagcccacctctgtcacccgaccccaccactcctgatttcctgaattccctgctctcttgcggcgacctgcaagtaaccggctccgcccattgcactttcaataccgcccagaaggcagtgggcaaagataattttaccctgatcccagagggtacgaacggcacagaggagcgcatgagcgttatctgggacaaggcggtcgtcaccggtaaaatggacgaaaaccagtttgtcgctgtgacctcaaccaacgcggccaaggtttttaatctgtacccaaggaagggcaggatcgctgtcggcagtgatgcagatctcgttatttgggatcctgacagcgtgaagactatatcagctaagactcataatagctctttggaatataacattttcgaagggatggagtgtcgaggctctcccctcgtagtgatttcccaggggaagatcgtgctggaggacggaacattgcacgtgaccgaaggatctggcaggtacatacctcgcaagccgttccctgatttcgtgtataaacggatcaaggcgcggtctcggctcgctgagttacggggcgtcccccggggcctctacgacgggcctgtctgtgaggtcagcgtgacgccaaagaccgtcacccccgcctcatcagccaagaccagtccggccaagcagcaggccccccctgtaaggaatttacaccaaagcgggttcagcttgagcggggcccagattgacgacaacatccctaggcgaacgacccaaaggattgtggccccgcctggtgggagggccaacatcaccagcctgggttag

SEQ ID NO: 87291 - DNA, 1611 bp, Artificial Sequence
  derived and/or modified sequence
atggaggacggcctgatcaagcagatcggcgagaacctgatcgtgccaggcggcgtcaagacaatcgaagcgcacagcaggatggtgatcccaggcggcatagacgttcacacccggtttcaaatgccagaccaggggatgaccagcgccgatgatttcttccagggcacaaaggccgccctcgccgggggaaccaccatgatcattgaccatgtggtgcctgagccaggaacgagtctcctggctgcttttgaccagtggcgagaatgggctgattctaagagctgttgtgactactccttacatgttgacatatctgaatggcacaagggcatacaggaggagatggaggctctggtcaaggaccacggggtgaattctttcctggtctacatggctttcaaagacaggtttcagctgaccgattgccagatctacgaagtgctgagcgtgatccgagacatcggtgcaatagcccaagtccacgctgagaatggcgacattattgcagaggagcagcaacgaattcttgatctcggcatcaccgggccagaaggccatgtgttgtctcggccagaggaggtcgaggcagaggctgtgaaccgcgccatcactatcgcaaaccaaaccaactgcccgttgtacatcacaaaggtcatgtctaagagcagtgctgaagttattgcccaagcgcggaaaaaaggtacagttgtctacggagagcctattactgctagcctgggtaccgacgggagccactactggtccaaaaactgggccaaagccgccgcgtttgttacttcaccaccgctatctccagatcccaccacaccagactttctgaattccctgctgtcatgcggggatctgcaagtcacagggtccgcccactgcacatttaataccgcccagaaggcggtcggcaaggataactttacccttataccagaggggactaacggtaccgaggaaaggatgagtgtcatctgggataaagctgttgtcacggggaagatggatgaaaaccaattcgtggcggttacatctactaatgccgccaaagtgtttaatctgtatcctcgcaaggggcggatcgcagtcggctcggacgccgacctggtaatttgggacccagacagtgtaaagaccatttcagcaaaaacacacaacagctcactcgaatataacattttcgaggggatggagtgtagggggtccccactggtcgtaatctcccagggaaaaatcgtgttagaagacggcaccttacatgtaaccgaggggtcaggaaggtacatccccaggaaacccttcccggatttcgtgtacaaaagaataaaggcgcgctctcggcttgctgagttgcgaggggtgccacgcggtctgtatgacggtccagtgtgcgaggtcagcgtcacaccgaaaaccgtgacacccgcatctagcgctaaaactagtccagccaagcagcaggctccacccgtgaggaatctgcatcagagcggatttagtctcagcggggcgcagattgacgataatatcccaagaagaaccactcaacgaatcgtcgccccgcccggaggcagagcaaatattacaagcttagggtag

SEQ ID NO: 87292 - DNA, 597 bp, Artificial Sequence
  derived and/or modified sequence
atgagcgtgatctgggacaaggccgtggtgaccggcaagatggacgaaaatcagttcgtggccgtgaccagcaccaacgcggctaaagtatttaacctgtaccctagaaaaggcagaatcgccgtaggctcggacgccgacctggtgatatgggatccggacagtgttaagacaatctttgagggcatggagtgtcggggctcacccttggtggtgatcagccaagggaagatcgtcctagaggacggcactctgcatgtgactgaggggtccggccggtacatcccgcgaaagcctttcccagacttcgtttataaacgcatcaaagcgcgttccagactagccgaactgcgcggcgtaccacggggcttgtatgacggacccgtctgcgaagtgagcgttacgccaaaaaccgtcacccctgcatcttctgctaaaacctcacccgcgaaacagcaggccccccctgtgagaaacctccaccaatccggcttttcgctgagcggagcccagattgatgacaatattcccaggaggacgacccagagaattgtggcccctccaggtggcagggctaacattaccagccttgggtag

SEQ ID NO: 87293 - DNA, 1611 bp, Artificial Sequence
  derived and/or modified sequence
atggaggatggtctgataaagcagataggggaaaacttgatcgtgcctggaggcgttaagaccatcgaggctcactctcgcatggtcatccccggaggcattgacgttcacacccggtttcagatgccagaccagggcatgacctctgccgacgattttttccagggtactaaagccgctctcgccggtggcactacgatgatcatcgatcacgtggtcccggagcctggtacctcgctcttagcggcatttgaccagtggagagagtgggcagactccaagtcctgttgtgactattctctccacgttgacatttcagagtggcacaaaggcatccaggaggaaatggaagctctggtgaaggatcacggcgtaaactcgttcctcgtgtacatggccttcaaggaccggttccagctgacggactgccagatttacgaagtcctcagcgtgatcagggacatcggtgcgattgcccaggtgcacgctgagaatggagatatcattgcggaggagcagcagcgcattctggatttaggaattacggggcctgaaggacatgtgttgtcccgccctgaggaagtggaggccgaagcagtgaatagagccataaccatagccaaccaaacaaattgcccactctatataacaaaagtcatgtcgaaaagttccgccgaagtcattgctcaggcacgaaagaaggggacggtggtttatggcgagcccataactgcgagcctggggaccgacggttcccactattggtcaaaaaactgggcaaaagccgcagcctttgttacttccccccctttaagccctgacccgaccactcctgacttcctcaatagtctcctgagctgcggagacctccaggttaccggcagtgctcactgcacctttaacacagcgcagaaggccgttggcaaggacaactttaccttaattcctgagggaacaaacggcacggaggaacggatgtccgtgatctgggataaagctgtggtgaccggaaagatggatgaaaaccaatttgttgctgtcacaagcactaacgctgcaaaagtgtttaacctgtatccaagaaagggacgcatcgctgtaggtagcgatgccgacctggtcatttgggatcctgatagcgtgaaaaccatttctgccaagacacataactcttcccttgaatataatattttcgagggtatggagtgccgcggttctccgttggtcgtgatctcacaagggaagattgtgctggaggacgggaccctgcacgtaaccgagggttccggcaggtacattccgaggaagccttttcccgacttcgtttacaagaggattaaagccaggagtcggctggccgaactgagaggggtgccaaggggcctctacgacggccctgtctgtgaggtgtctgtgactccaaagaccgtgacaccagcttccagcgctaagacatctcctgccaagcagcaggcaccacccgtgcgtaatcttcaccagtccggcttcagtctgagtggcgcacagatcgatgataacataccgaggcgaaccacgcagaggatcgtggctcctcccggaggcagagccaatatcacatcactggggtag

SEQ ID NO: 87294 - DNA, 1611 bp, Artificial Sequence
  derived and/or modified sequence
atggaggatggcttgattaaacagatcggcgaaaacctgatagtgccagggggtgtcaagactatcgaagcccattcccggatggtgattccagggggtattgacgttcacacacggtttcagatgccagatcagggaatgacctctgcagatgattttttccaggggacaaaggccgcactggctggagggaccactatgatcattgaccatgtggtgcccgagcctgggaccagcctactggcagcattcgatcagtggcgggagtgggccgactctaaatcctgttgcgactattccttgcatgtggacatttccgagtggcacaagggtatacaggaggaaatggaggctctggttaaagaccatggtgtgaattcattcctggtttatatggcattcaaggacagattccagctgactgattgtcagatttacgaggtgttgtccgtgattcgcgacataggggcaatcgcccaggtgcacgctgagaatggagatatcatcgctgaagagcaacagcggatcctggacctaggcatcactggacctgaaggtcatgtcttgagccggccagaggaggtggaagccgaagcagtgaatagggccatcaccatcgccaaccaaacaaattgcccactgtatataacaaaagttatgtccaaatcctccgctgaggtcatcgcacaagccagaaagaaagggactgtggtttacggagagccgatcactgcttcactcggaacggacggttcacattactggtcaaaaaattgggctaaggcagctgcctttgtgacttctcccccattgagtcctgatcctactacgccagacttcctgaactctcttcttagttgtggagacctacaggtgacaggcagtgcccactgcacctttaataccgcacagaaggccgtcgggaaggacaactttactctgattcccgagggtaccaacggcaccgaggagcggatgagcgtcatatgggacaaagctgtggtgaccgggaagatggatgagaaccagttcgtagcagtcacaagtaccaacgccgcaaaagtttttaacctataccctcggaaaggaagaatcgcagtcggctccgacgcagacctagttatctgggatcccgattcggttaagactatatccgccaagacccataatagcagcctggaatacaacatttttgaagggatggagtgcagggggtctcctctggtcgtcatttcacagggaaaaattgtcctagaagacggcacattacacgtcactgagggatctggacggtacatccctcgtaagccatttcccgatttcgtgtacaagcgcattaaggctaggtcccgactggctgaactgaggggtgttccgaggggcctctatgatgggcctgtatgtgaagttagcgtgacacctaaaaccgtcactcccgcttctagtgcaaagaccagcccggctaagcaacaggcaccgccagtgcgtaatcttcaccagtcgggattcagcctgagcggggctcaaatagatgacaacattccacggcgtaccactcagcggatcgtggctccccctggcggacgggcaaatataacaagccttgggtag

SEQ ID NO: 87295 - DNA, 597 bp, Artificial Sequence
  derived and/or modified sequence
atgagcgtaatctgggacaaggccgtcgttacagggaaaatggatgagaaccagttcgtggcggtgacttctaccaacgctgccaaggttttcaatctatacccaaggaaaggccgaattgccgtagggtctgacgccgatctggtgatttgggatcctgatagtgtcaagactatttttgaggggatggagtgtcgtggatcacccctggtcgtaatctcgcaggggaagattgtgctcgaggatgggacgttacacgtaacggaaggcagcggccgatatatccccaggaagccctttccagactttgtgtacaagagaatcaaagccaggtctagacttgccgagcttcggggagttcccaggggactgtatgatggccctgtctgcgaagtgtccgtaaccccaaaaacggtgacaccagcttcaagcgcaaagacctcccctgccaagcagcaagcccctcctgtgcgaaacctccatcaatcagggttcagcttgtccggagcacaaattgacgataacatacctagacgaacaacacagaggatagtcgcacctcccggaggccgagcgaatatcacctcattaggatag

SEQ ID NO: 87296 - DNA, 1611 bp, Artificial Sequence
  derived and/or modified sequence
atggaggacggcctgatcaagcagatcggcgagaacctgatcgtgcccggcggcgtgaagaccatcgaggcccacagcagaatggtgatccccggcggcatcgacgtgcacaccagattccagatgcccgaccagggcatgaccagcgccgacgacttcttccagggcaccaaggccgccctggccggcggcaccaccatgatcatcgaccacgtggtgcccgagcccggcaccagcctgctggccgccttcgaccagtggagagagtgggccgacagcaagagctgctgcgactacagcctgcacgtggacatcagcgagtggcacaagggcatccaggaggagatggaggccctggtgaaggaccacggcgtgaacagcttcctggtgtacatggccttcaaggacagattccagctgaccgactgccagatctacgaggtgctgagcgtgatcagagacatcggcgccatcgcccaggtgcacgccgagaacggcgacatcatcgccgaggagcagcagagaatcctggacctgggcatcaccggccccgagggccacgtgctgagcagacccgaggaggtggaggccgaggccgtgaacagagccatcaccatcgccaaccagaccaactgccccctgtacatcaccaaggtgatgagcaagagcagcgccgaggtgatcgcccaggccagaaagaagggcaccgtggtgtacggcgagcccatcaccgccagcctgggcaccgacggcagccactactggagcaagaactgggccaaggccgccgccttcgtgaccagcccccccctgagccccgaccccaccacccccgacttcctgaacagcctgctgagctgcggcgacctgcaggtgaccggcagcgcccactgcaccttcaacaccgcccagaaggccgtgggcaaggacaacttcaccctgatccccgagggcaccaacggcaccgaggagagaatgagcgtgatctgggacaaggccgtggtgaccggcaagatggacgagaaccagttcgtggccgtgaccagcaccaacgccgccaaggtgttcaacctgtaccccagaaagggcagaatcgccgtgggcagcgacgccgacctggtgatctgggaccccgacagcgtgaagaccatcagcgccaagacccacaacagcagcctggagtacaacatcttcgagggcatggagtgcagaggcagccccctggtggtgatcagccagggcaagatcgtgctggaggacggcaccctgcacgtgaccgagggcagcggcagatacatccccagaaagcccttccccgacttcgtgtacaagagaatcaaggccagaagcagactggccgagctgagaggcgtgcccagaggcctgtacgacggccccgtgtgcgaggtgagcgtgacccccaagaccgtgacccccgccagcagcgccaagaccagccccgccaagcagcaggccccccccgtgagaaacctgcaccagagcggcttcagcctgagcggcgcccagatcgacgacaacatccccagaagaaccacccagagaatcgtggccccccccggcggcagagccaacatcaccagcctgggctag

SEQ ID NO: 87297 - DNA, 597 bp, Artificial Sequence
  derived and/or modified sequence
atgagcgtgatctgggacaaggccgtggtgaccggcaagatggacgagaaccagttcgtggccgtgaccagcaccaacgccgccaaggtgttcaacctgtaccccagaaagggcagaatcgccgtgggcagcgacgccgacctggtgatctgggaccccgacagcgtgaagaccatcttcgagggcatggagtgcagaggcagccccctggtggtgatcagccagggcaagatcgtgctggaggacggcaccctgcacgtgaccgagggcagcggcagatacatccccagaaagcccttccccgacttcgtgtacaagagaatcaaggccagaagcagactggccgagctgagaggcgtgcccagaggcctgtacgacggccccgtgtgcgaggtgagcgtgacccccaagaccgtgacccccgccagcagcgccaagaccagccccgccaagcagcaggccccccccgtgagaaacctgcaccagagcggcttcagcctgagcggcgcccagatcgacgacaacatccccagaagaaccacccagagaatcgtggccccccccggcggcagagccaacatcaccagcctgggctag

SEQ ID NO: 87298 - DNA, 3091 bp, Artificial Sequence
  derived and/or modified sequence
ctttcggctcccgcagccgcagcggacgccctcccagatccaactttgccgcttccccgagctcgcgctgtagccgcggggggcgtgggcagggaggggagaagcggggtcagggggagggaccgggagggtgggtcgccggctcgccagccctccttcctttctgtgcaccttgcggtgggcggcgaacggcagccgcggcagcagctagggggcttgtgcacgtttaacactgcccagaaggctgtaggaaaggacaacttcaccctgattccggagggcaccaatggcactgaggagcggatgtccgtcatctgggacaaggctgtggtcactgggaagatggatgagaaccagtttgtggctgtgaccagcaccaatgcagccaaagtcttcaacctttacccccggaaaggccgcattgctgtgggatccgatgccgacctggtcatctgggaccccgacagcgttaaaaccatctttgaaggcatggagtgccgcggctccccactggtggtcatcagccaggggaagattgtcctggaggacggcaccctgcatgtcaccgaaggctctggacgctacattccccggaagcccttccctgattttgtttacaagcgtatcaaggcaaggagcaggctggctgagctgagaggggttcctcgtggcctgtatgacggacctgtgtgtgaagtgtctgtgacgcccaagacagtcactccagcctcctcggccaagacgtctcctgccaagcagcaggccccacctgtccggaacctgcaccagtctggattcagtttgtctggtgctcagattgatgacaacattccccgccgcaccacccagcgtatcgtggcgccccccggtggccgtgccaacatcaccagcctgggctagagctcctgggctgtgccgtccactggggactggggatgggacacctgaggacattctgagacttctttcttccttcctttttttttttttgtttttttttttaagagcctgtgatagttactgtggagcagccagttcatggggtcccccttggggccccacaccccgtctctcaccaagagttactgattttgctcatccacttccctacacatctatgggtatcacacccaagactacccaccaagctcatacagggaaccacacccaacacttagacatgcgaacaagcagcccccagcgagggtctccttcgccttcaacctcctagtgtctgttagcatcttccttttcatggggggagggaagataaagtgaattgcccagagctgcctttttcttttctttttaaaaattttaagaagttttctttgtggggctggggaggggccggggtcagggagagtcttttttttttttttttttaaatactaaattggaacatttaattccatattaatacaaggggtttgaactggacatcctaatgatgcaattacgtcatcacccagctgattccgggtggttggcaaactcatcgtgtctgtcctgagaggctccacaatgcccacccgcatcgccattctgtagtcttcagggtcagctgttgataaaggggcaggcttgcgttattggcctagattttgctgcagattaaatcctttgaggattctcttctcttttaccatttttctgcgtgctctcactctctctttctctctctagctttttaattcatgaatattttcgtgtctgtctctctctctctctgtgtttcctccagcccttgtctcggagacggtgttttcctcccttgccccattatcttttcacctcccaggtctaccatttcatggtggtcgttgggtccgcctaaaggatttgagcgtttgccattgcaagcatagtgctgtgtcatcctggtccatgtaggactggtgctaaccacctgccatcatgaggatgtgtgctagagtgtgggaccctggccaagtgcaggaatgggccatgccgtctcacccacagtatcacacgtggaaccgcagacagggcccagaagctttagaggtatgaggctgcagaaccggagagattttcctctgtgcagtgctctctggctaaagtcacggtcaaacctaaacaccgagcctcattaacccaagtgaaccaaccaaagtcaccagttcagaagtgctaagctaataggagtctgacccgagggcctgctgcttcctggttaagtatcttttgagattctagaacacatgggagctttttattttcggggaaaaaccgtatttttttcttgtccaattatttctaaagacacactacatagaaagaggccctataaactcaaaaagtcattgggaaacttaaagtctattctactttgcaagaggagaaatgtgttttatgaacgatagatcacatcagaactcctgtggggaggaaaccttataaattaaacacatggcccccttagagaccacaggtgatgtctgtctccatccttccctctccttttctgtcacctttccccctagctggctcctttggacctacccctgtccttgctgacttgtgttgcattgtattccaaacgtgtttacaggttctcttaagcaatgttgtatttgcaggcttttctgaataccaaatctgctttttgtaaagcgtaaaaacatcacaaagtaggtcattccatcaccacccttgtctctctacacattttgcctttggggatctggttggggttttgggttttttgttgttgttgtttatttgttattttaaaggtaaattgcacttttaaaaaaataattggttgacttaatatatttgctttttttctcacctgcacttagaggaaatttgaacaagttggaaaaaaacaatttttgtttcaattctaagaaacacttgcagctctagtattcacttgagtcttcctgtttttcctgtaccgggtcatggtaatttttggttgttttggttgttttcttaaaaaacaagttaaaacctgacgatttctgcaggctgtgtaagcatgtttacctgttggcttgctttgtgtgtctgttaaatgaatgtcatatgtaaatgctaaaataaatcgacagtgtctcag

SEQ ID NO: 87299 - protein, 945 aa, Artificial Sequence
  derived and/or modified sequence
MAPNLKGRPRKKKPCPQRRDSFSGVKDSNNNSDGKAVAKVKCEARSALTKPKNNHNCKKVSNEEKPKVAIGEECRADEQAFLVALYKYMKERKTPIERIPYLGFKQINLWTMFQAAQKLGGYETITARRQWKHIYDELGGNPGSTSAATCTRRHYERLILPYERFIKGEEDKPLPPIKPRKQENSSQENENKTKVSGTKRIKHEIPKSKKEKENAPKPQDAAEVSSEQEKEQETLISQKSIPEPLPAADMKKKIEGYQEFSAKPLASRVDPEKDNETDQGSNSEKVAEEAGEKGPTPPLPSAPLAPEKDSALVPGASKQPLTSPSALVDSKQESKLCCFTESPESEPQEASFPSFPTTQPPLANQNETEDDKLPAMADYIANCTVKVDQLGSDDIHNALKQTPKVLVVQSFDMFKDKDLTGPMNENHGLNYTPLLYSRGNPGIMSPLAKKKLLSQVSGASLSSSYPYGSPPPLISKKKLIARDDLCSSLSQTHHGQSTDHMAVSRPSVIQHVQSFRSKPSEERKTINDIFKHEKLSRSDPHRCSFSKHHLNPLADSYVLKQEIQEGKDKLLEKRALPHSHMPSFLADFYSSPHLHSLYRHTEHHLHNEQTSKYPSRDMYRESENSSFPSHRHQEKLHVNYLTSLHLQDKKSAAAEAPTDDQPTDLSLPKNPHKPTGKVLGLAHSTTGPQESKGISQFQVLGSQSRDCHPKACRVSPMTMSGPKKYPESLSRSGKPHHVRLENFRKMEGMVHPILHRKMSPQNIGAARPIKRSLEDLDLVIAGKKARAVSPLDPSKEVSGKEKASEQESEGSKAAHGGHSGGGSEGHKLPLSSPIFPGLYSGSLCNSGLNSRLPAGYSHSLQYLKNQTVLSPLMQPLAFHSLVMQRGIFTSPTNSQQLYRHLAAATPVGSSYGDLLHNSIYPLAAINPQAAFPSSQLSSVHPSTKL

SEQ ID NO: 87300 - DNA, 926 bp, Artificial Sequence
  derived and/or modified sequence
ggggagagccctccctgccagtctggcaactccagcaaagtcctcaggctcatcccacacactcggtgctagtcactgctgtgtgtttacatgagtaatggagctgccgggggaggggagttgtaagcagagcgctgagcctcgcagctcgcattcggagggaagctgacatccacaccaagtcgagacttccagggatgtggccggggagcagtcacatgctgtagctttcatgagcacaggcatcagtcaggcagatgtttgtcgactggaatggcgccaaatcttaaaggcagaccacgcaaaaagaaaccatgcccacaaagaagagattcattcagtggtgttaaggattccaacaacaattccgatggcaaagccgttgccaaggtgaaatgtgaggccaggtcagccttgaccaagccgaagaataaccataactgtaaaaaagtctcaaatgaagaaaaaccaaaggttgccattggtgaagagtgcagggcagatgaacaagccttcttggtggcactttataaatacatgaaagaaaggaaaacgccgatagaacgaataccctatttaggttttaaacagattaacctttggactatgtttcaagctgctcaaaaactgggaggatatgaaacaataacagcccgccgtcagtggaaacatatttatgatgaattaggcggtaatcctgggagcaccagcgctgccacttgtacccgcagacattatgaaagatcaatcctaccatatgaaagatttattaaaggagaagaagataagcccctgcctccaatcaaacctcggaaacaggagaacagttcacaggaaaatgagaacaaaacaaaagtatctggaaccaaacgcatcaaacatgaaatacctaaaaacaaaaaaaaaaaaaaaaaaaaaaaaaaaaa

SEQ ID NO: 87301 - DNA, 2838 bp, Artificial Sequence
  derived and/or modified sequence
atggcaccaaacctgaagggaaggccacgtaagaagaaaccatgtccacagcggagagactcattcagcggggtgaaggacagcaataataacagcgatggcaaggcggtggctaaggtgaagtgtgaagcccgctcagcactgaccaaaccgaaaaataaccacaattgcaaaaaggtctccaatgaggagaagcccaaggttgccataggcgaagagtgccgggccgacgaacaggcttttctggtcgccttgtacaaatatatgaaggaaagaaagacccccatagaacgaatcccatatctcggctttaaacagatcaatctgtggacaatgtttcaagctgcccagaaactcggcgggtacgaaactattactgcgcgcaggcagtggaagcatatttacgatgagctgggaggaaatccaggcagcacttccgcagctacttgcactcgccgacattacgagagattgatcctcccatacgagagattcatcaaaggggaagaggacaagccactgcctcccatcaagccccgaaagcaggaaaattcgagccaggagaatgaaaataaaactaaggtcagcggcacaaaacgcataaaacacgaaattcccaagtcaaaaaaggaaaaagaaaacgctcccaagccccaagatgccgccgaggtttcatcagagcaggagaaggagcaggagacgctgatctcccagaagtcaattcccgaaccgctgcccgctgctgacatgaaaaaaaagatcgaggggtatcaggaattcagtgccaagcccctggcttctcgcgttgaccctgaaaaggacaacgaaacagaccagggatccaatagcgaaaaagtggcagaggaagcgggtgaaaaggggccgaccccccctcttccgagcgcaccactggcgccggagaaggacagcgctctggtaccaggtgcctcaaagcagcctcttaccagcccatccgcgctcgtcgactcaaagcaggagtcaaagctgtgctgtttcaccgagagtccagagtcagaaccacaggaagcatcatttccgagtttccctacaacccagccccccttagccaatcagaacgaaacagaagacgacaagttgcccgctatggcagactacatcgcaaattgcactgtgaaggttgaccagctgggctcagacgacatccataatgcgctgaaacagactcctaaggttctcgtggttcaatcttttgacatgttcaaggacaaggatttaaccggacccatgaacgaaaatcatgggctgaattatacccccctgctgtactctcgtgggaatcctggcatcatgtcgccactggctaaaaagaagctgctatcgcaggtgagcggagcttcactgtccagctcgtacccttacgggtccccgccgccactgatcagcaaaaagaagctgatcgcacgggacgacctgtgttcaagcctgtcgcagacccatcacgggcagtcgacagaccacatggccgtttcccggcctagcgtgattcagcacgtgcagtcctttaggagtaaaccgtctgaggagagaaaaaccatcaatgacattttcaaacatgagaagcttagccggtcagaccctcaccggtgtagtttctcgaagcaccacctgaaccccctggcagactcttacgtgctcaagcaggagatccaggagggcaaggataagctccttgagaaacgtgcccttccccattcccacatgcccagtttcctcgccgatttctacagctcaccacatctccacagtctgtataggcacaccgagcaccaccttcataatgagcaaacatccaagtaccctagtagggatatgtacagagaaagcgagaatagtagcttccctagtcatagacatcaagagaagctgcacgttaactacctgaccagcctgcatttacaagacaagaagtccgccgctgcagaggcaccgaccgacgaccagcccacagatctctccttgcccaaaaatccacataagcctacgggcaaggtgctgggcctagcacactcaaccaccggcccgcaggagtccaaagggatttcccaatttcaagtgctgggcagtcagtcccgggattgccacccgaaggcctgccgtgtctctcccatgacaatgagtggcccaaagaaataccccgaaagcttatcccggtctggcaagcctcaccatgtgcgactggaaaatttccgaaagatggaggggatggtgcatccaatactgcataggaagatgtccccccagaacatcggcgccgcccggcctatcaagcggtcgctggaggacttggatctagtcattgcagggaagaaggcccgcgccgtatcacccctggacccctctaaggaagttagcggaaaggagaaagccagcgaacaggagagcgagggatccaaagctgctcatggtggccattctggcggagggagtgagggccacaagctgcccttgtcttcgcctatattccccgggctgtattcaggttcgctgtgtaacagcgggcttaattctagactaccagccggatactcccacagcctgcagtatctgaaaaatcaaaccgtcctatcgcccctcatgcaaccactggcatttcactccctggtgatgcaaagagggattttcacaagcccaacaaatagtcagcaattgtatagacatttagcagctgcaacccctgtgggtagttcttacggcgatctcctgcataatagcatatatcccttggcggcaattaacccgcaagctgcttttccctcttctcagctctcttctgtccatccctcaactaaattatag

SEQ ID NO: 87302 - DNA, 2838 bp, Artificial Sequence
  derived and/or modified sequence
atggcccccaacctgaagggccggcccaggaagaagaagccctgcccccagaggcgggacagcttctctggagtgaaggacagcaacaacaacagtgatggcaaggctgtggccaaggtgaagtgtgaggcccggagcgccctgaccaagcccaagaacaaccacaactgcaagaaggtgtccaatgaggagaagcccaaggtggccatcggggaggagtgcagagcagatgagcaggccttcctggtggccctgtacaagtacatgaaggagaggaagacccccatcgagcgcatcccctacctgggcttcaagcagatcaacctgtggaccatgttccaggccgcccagaagctgggcggctatgagaccatcacagcccggcggcagtggaagcacatctatgatgagctgggcggcaaccctggcagcaccagcgctgccacctgcacccggcggcactatgagcggctcatcctgccctatgagcgcttcatcaagggggaggaggacaagcccctgccccccatcaagcccaggaagcaggagaacagcagccaggagaatgaaaacaagaccaaggtgtctggcaccaagaggatcaagcatgagatccccaagagcaagaaggagaaggaaaatgcccccaagccccaggatgctgctgaggtgagcagcgagcaggagaaggagcaggagaccctcatcagccagaagagcatccctgagcccctgcctgctgctgacatgaagaagaagattgagggctaccaggagttcagcgccaagcccctggccagccgggtggaccctgagaaggacaatgaaacagaccagggcagcaacagcgagaaggtggccgaggaggccggggagaagggccccaccccacccctgcccagcgcccccctggcccctgagaaggacagcgccctggtgcctggggccagcaagcagcccctgaccagccccagcgccctggtggacagcaagcaggagagcaagctgtgctgcttcacagagagccctgagagcgagccccaggaggccagcttccccagcttccccaccacccagccccccctggccaaccagaatgaaacagaagatgacaagctgcctgccatggctgactacatcgccaactgcaccgtgaaggtggaccagctgggcagtgatgacatccacaatgccctgaagcagacccccaaggtgctggtggtgcagagctttgacatgttcaaggacaaggacctgaccggccccatgaatgaaaatcatggcctgaactacacccccctgctgtacagccggggcaaccctggcatcatgagccccctggccaagaagaagctgctgagccaggtgtctggggccagcctgagcagcagctacccctacggcagccccccacccctcatcagcaagaagaagctgattgccagagatgacctgtgcagcagcctgagccagacccaccacggccagagcacagaccacatggctgtgtcccggcccagcgtcatccagcacgtgcagagcttccgcagcaagcccagcgaggagaggaagaccatcaatgacatcttcaagcatgagaagctgagcagaagtgacccccaccgctgcagcttcagcaagcaccacctgaaccccctggccgacagctatgtgctgaagcaggagatccaggagggcaaggacaagctgctggagaagagggccctgccccacagccacatgcccagcttcctggccgacttctacagcagcccccacctgcacagcctgtaccgccacacagagcaccacctgcacaatgagcagaccagcaagtaccccagccgggacatgtaccgggagagcgagaacagcagcttccccagccaccgccaccaggagaagctgcacgtgaactacctgaccagcctgcacctgcaggacaagaagtctgctgctgctgaggcccccacagatgaccagcccacagacctgagcctgcccaagaacccccacaagcccaccgggaaggtgctgggcctggcccacagcaccaccggcccccaggagagcaagggcatcagccagttccaggtgctgggcagccagagccgggactgccaccccaaggcctgccgggtgagccccatgaccatgagcggccccaagaagtacccagagagcctgagccgcagcggcaagccccaccacgtgcggctggagaacttcaggaagatggagggcatggtgcaccccatcctgcacaggaagatgagcccccagaacattggagctgcccggcccatcaagaggagcctggaggacctggacctggtgattgctgggaagaaggcccgggctgtgagccccctggaccccagcaaggaggtgtctgggaaggagaaggccagcgagcaggagagcgagggcagcaaggccgcccatggaggccacagcggcggcggcagcgagggccacaagctgcccctgagcagccccatcttccctggcctgtacagcggcagcctgtgcaacagcggcctgaacagccggctgcctgctggctacagccacagcctgcagtacctgaagaaccagacagtgctgagccccctgatgcagcccctggccttccacagcctggtgatgcagaggggcatcttcaccagccccaccaacagccagcagctgtaccgccacctggccgccgccacccctgtgggcagcagctatggagacctgctgcacaacagcatctaccccctggccgccatcaacccccaggccgccttccccagcagccagctgagctctgtgcaccccagcaccaagctgtag

SEQ ID NO: 87303 - DNA, 2838 bp, Artificial Sequence
  derived and/or modified sequence
atggcccccaacctgaagggccggccccggaagaagaagccctgcccgcagcggagagattcattcagtggtgtgaaagactccaataacaatagtgatggaaaggctgtggccaaagtgaaatgtgaggctaggagcgccctgactaagcccaagaataaccataactgcaagaaggtatctaacgaggaaaagcccaaagttgcaattggcgaggaatgcagggccgacgagcaggcttttctcgtggccctgtataagtacatgaaggaaagaaagacccccatagaaagaataccctacttgggcttcaagcaaatcaatctgtggacaatgtttcaggccgcacaaaaactcggaggatacgaaaccattacagctaggcgccagtggaaacatatttatgacgagctgggcggtaatccaggcagcacttcagccgctacctgcacccgccggcactacgagagactgattttgccctatgagcgctttattaaaggggaggaggataaacccctgccacccataaagccaagaaaacaggagaattcctctcaggaaaatgaaaacaaaaccaaagtctccggcacaaaaaggatcaagcacgagatccctaaaagcaaaaaagaaaaggaaaacgccccaaagcctcaggatgccgccgaagtttccagcgagcaagaaaaggagcaagagacgctcattagccagaagagcatcccagagcctttgcccgctgcggacatgaaaaagaagatcgagggctaccaggagttctctgccaagccgctggctagtcgcgtggacccagagaaggataacgaaaccgaccagggaagcaattcagaaaaggtcgccgaagaggccggcgagaaggggcccacaccacctctcccctcagccccactggctccggagaaagatagtgcactcgtgcccggagctagtaagcagcccctgacgtctccgagcgcattggtagattcaaagcaggaatccaaactgtgctgtttcacagaatctcccgaaagcgaacctcaggaggcgtcctttcccagcttcccaacgactcagcctccgctggccaatcagaatgaaactgaagacgacaaactgcctgcgatggcagattatatcgctaattgtactgttaaagttgatcagctgggatcagacgatatacataatgctctcaagcaaacacccaaggtcctggttgttcagtcctttgatatgttcaaggacaaggatttgaccggccccatgaacgagaatcacggcctaaattacactcctctgctctattcacgcggaaatccgggcatcatgtcccctcttgccaaaaaaaaactgctgagccaagtaagcggagccagcctcagtagtagttacccatacggaagcccacctcctctcataagcaagaagaaattgatcgcgcgggacgatttgtgctccagtctcagccagactcaccacggacagagcaccgatcacatggccgttagcaggccgtctgtgattcagcacgtgcagtctttcaggagcaaaccgtctgaagagaggaagactataaatgatatctttaagcacgagaaactctcaagaagcgatccccacaggtgttccttttctaaacaccacctcaatcctcttgccgactcgtatgtccttaagcaagagatacaggaaggaaaagacaagcttctagagaagcgcgctctccctcactcacatatgcctagcttcttagccgacttttatagctcaccccacctgcatagcctataccgacacaccgaacatcaccttcataatgagcagaccagcaagtatccttctagggatatgtatcgggagagcgagaactcttctttcccctcccatcggcaccaagagaagttacatgtgaactacctgacatccctgcacctccaggacaagaagtccgctgccgcggaagctcctacagatgaccagccaacagatctctcactccctaagaacccccacaagccaactggtaaagtgctcggtctcgctcacagtaccactggcccccaggagtccaagggaattagtcaattccaggtactgggaagccagtcccgtgactgccatcctaaggcttgtcgagttagcccaatgaccatgtccggtcctaaaaagtatccagagtctctttcgaggtcagggaaacctcaccatgttcgattggagaattttagaaaaatggagggcatggtgcatcccattttacaccgaaaaatgtcaccacaaaatatcggggctgcccgccccataaagcgcagtctggaggacctggacttagttatcgcagggaaaaaagcccgtgccgtcagcccattggacccaagcaaggaagtgtctggcaaagagaaggcgagtgaacaggaatctgagggttccaaggccgcacacggcgggcatagcggcggaggctccgaaggacacaagctgcccttatcaagcccaattttccccggactgtattccgggtccctgtgcaacagcggcttgaacagccgccttccagccggttacagccactccctccagtatttgaaaaaccagaccgtgttgagccccttaatgcagcccctcgcgttccactcgctggtgatgcagaggggcatctttacatcgccgactaatagtcagcagctctaccgccatctcgcggccgccacccctgttgggtcttcttatggcgacttgcttcacaattccatctaccctttggccgctattaaccctcaggctgcattcccatcttctcagctttcatccgtgcatcctagcacgaagctttag

SEQ ID NO: 87304 - DNA, 2838 bp, Artificial Sequence
  derived and/or modified sequence
atggcccctaacctcaaaggccgtcctagaaaaaagaagccttgtccccagagacgggattctttctcgggggttaaggacagcaacaataactctgatggcaaggcggtggccaaggtcaagtgcgaggcacgttccgccctgacaaagccaaagaacaaccacaattgcaagaaggttagcaacgaagagaagcctaaagtagcgataggtgaggagtgcagggccgacgagcaggcgttcctggtcgccctgtataaatacatgaaggagagaaagacccccattgaacgcattccttacttaggcttcaagcagattaatctatggacaatgttccaggccgcacagaagctgggaggatatgagaccatcacagcacggagacaatggaaacatatctatgacgaactgggcggtaaccccggatctacatccgccgctacttgtactcggcgtcactacgagcggctgatcctgccatacgagagattcattaagggcgaggaagataagccgttgcctcccattaaaccaaggaagcaggaaaattcgagtcaggaaaatgaaaataagacaaaggtatccggaacaaagcgaataaagcatgagatccccaaatctaagaaggagaaggaaaatgcgccaaagccccaggatgctgccgaggtgtcgagcgagcaggagaaagagcaggaaacacttatttcccagaagtccatcccagaacctctgcccgcagctgacatgaagaaaaaaattgaaggctatcaggagttttcagccaagcccctggcgtctagagtggaccctgagaaagacaatgaaaccgatcaaggcagtaactctgagaaagtcgcagaagaggctggagaaaagggcccaaccccacccctaccgtctgctcccctggcccctgaaaaggactcagctctcgtgcctggagctagcaagcagccactgacctctccttctgcacttgtggacagcaagcaagaaagcaaattgtgttgcttcaccgaatcaccagagtcagagcctcaggaagcctcattcccttcttttccaacaactcagccccctctcgcaaaccagaacgagaccgaggacgacaagctcccggcaatggccgactacattgccaactgcacggtgaaggtggatcaactgggatcagacgacatccacaatgcacttaagcagactcccaaggtgcttgtggtgcaaagtttcgatatgtttaaggacaaggatctgaccggcccaatgaatgagaaccacggcctgaattacaccccactcttgtacagtcgtggaaacccaggcattatgagccctctcgcaaagaaaaagcttttgagccaggtgtccggagccagcctgtcaagcagttatccgtatggatccccccctccattgatttccaagaagaaattaattgcacgtgatgatctgtgctcaagcttgtcacagacacaccacggtcagagcaccgatcacatggccgtgtcccgcccttccgttatccaacatgtgcagtctttccggagcaaaccaagtgaggaacgcaaaactataaatgacatatttaagcatgagaaactgagccgcagtgacccacatagatgctccttctccaaacatcacttgaatcctcttgctgatagttacgtgctgaaacaagaaatccaggaggggaaggacaaactcctcgaaaaacgggcacttccacactcccacatgccaagctttctagcagatttctacagctcaccgcacctacacagtctatataggcacacagagcatcacctgcataatgagcaaacatctaaatatcctagtcgggatatgtacagggaatccgagaactcgtcctttcccagtcaccgccaccaagaaaagctgcatgtgaactaccttaccagcctgcacctgcaggacaaaaagagtgctgccgctgaggcaccaacagacgaccagccgacagatttgagcctgcctaaaaacccccataaaccaactggtaaagtgttggggctcgcacactctaccacgggaccacaggaatcaaagggtatttctcagttccaggttctgggaagtcagtctcgtgattgccacccaaaagcctgccgtgtgtcccccatgaccatgtcaggccctaaaaagtatcctgagagcctgtcgaggtcaggcaaacctcaccatgtgagattggagaacttccggaaaatggaggggatggtgcacccgatcttgcatcggaagatgtctcctcagaacattggggcagcccgtcccatcaaacggtctctggaagacctggacctggtaattgccggaaagaaagcaagggctgtgtcccccctggacccttctaaagaagtatctggaaaagagaaggcctcagaacaggaaagcgaaggctcgaaggccgctcacggcggacactcggggggaggaagtgagggccacaagttgcctctcagctcacctatttttcccggactttacagtggcagcctgtgtaactccggactgaatagccgactgcccgcagggtactcacacagcctgcagtatctaaagaaccagactgtgctctccccactaatgcaacctctcgctttccattccttggtcatgcaacgcggtatatttactagtccaacaaacagtcagcagctgtaccggcatcttgccgctgctactcctgtaggctcaagctatggcgatctcttgcacaactctatctatcccctggccgcaataaaccctcaggcagcatttccttcatcccagttgtcatctgtccacccaagcactaaactgtag

SEQ ID NO: 87305 - DNA, 3141 bp, Artificial Sequence
  derived and/or modified sequence
agagccctccctgccagtctggcaactccagcaaagtcctcaggctcatcccacacactcggtgctagtcactgctgtgtgtttacatgagtaatggagctgccgggggaggggagttgtaagcagagcgctgagcctcgcagctcgcattcggagggaagctgacatccacaccaagtcgagacttccagggatgtggccggggagcagtcacatgctgtagctttcatgagcacaggcatcagtcaggcagatgtttgtcgactggaatggcgccaaatcttaaaggcagaccacgcaaaaagaaaccatgcccacaaagaagagattcattcagtggtgttaaggattccaacaacaattccgatggcaaagccgttgccaaggtgaaatgtgaggccaggtcagccttgaccaagccgaagaataaccataactgtaaaaaagtctcaaatgaagaaaaaccaaaggttgccattggtgaagagtgcagggcagatgaacaagccttcttggtggcactttataaatacatgaaagaaaggaaaacgccgatagaacgaataccctatttaggttttaaacagattaacctttggactatgtttcaagctgctcaaaaactgggaggatatgaaacaataacagcccgccgtcagtggaaacatatttatgatgaattaggcggtaatcctgggagcaccagcgctgccacttgtacccgcagacattatgaaagattaatcctaccatatgaaagatttattaaaggagaagaagataagcccctgcctccaatcaaacctcggaaacaggagaacagttcacaggaaaatgagaacaaaacaaaagtatctggaaccaaacgcatcaaacatgaaatacctaaaagcaagaaagaaaaagaaaatgccccaaagccccaggatgcagcagaggtttcatcagagcaagaaaaagaacaagagactttaataagccagaaaagcatccctgagcctctcccagcagcagacatgaagaaaaaaatagaagggtatcaggaattttcagcgaagcccctggcatccagagtagacccagagaaggacaacgaaacagaccaaggttccaacagtgagaaggtggcagaggaggcgggagagaaggggcccacacctccactcccaagtgctcctctggccccagaaaaagattcagccttggtccctggggccagcaaacagccactcacctctcctagtgccctggtggactcaaaacaagaatccaaactgtgctgttttacagagagccctgaaagtgaaccccaagaagcatccttccccagcttccccaccacacagccaccgctggcaaaccagaatgagacggaggatgacaaactgcccgccatggcagattacattgccaactgcaccgtgaaggtggaccagctgggcagtgacgacatccacaatgcgctcaagcagaccccaaaggtccttgtggtccagtcgtttgacatgttcaaagacaaagacctgactgggcccatgaacgagaaccatggacttaattacacgcccctgctctactctaggggcaacccaggcatcatgtccccactggccaagaaaaagcttttgtcccaagtgagtggggccagcctctccagcagctacccttatggctccccaccccctttgatcagcaaaaagaaactgattgctagggatgacttgtgttccagtttgtcccagacccaccatggccaaagcactgaccatatggcggtcagccggccatcagtgattcagcacgtccagagtttcagaagcaagccctcggaagagagaaagaccatcaatgacatctttaagcatgagaaactgagtcgatcagatccccaccgctgcagcttctccaagcatcaccttaacccccttgctgactcctacgtcctgaagcaagaaattcaggagggcaaggataaactcttagagaaaagggccctcccccattcccacatgcctagcttcctggctgacttctactcgtcccctcatctccatagcctctacagacacaccgagcaccatcttcataatgaacagacatccaaatacccttccagggacatgtacagggaatcggaaaacagttcttttccttcccacagacaccaagaaaagctccatgtaaattatctcacgtccctgcacctgcaagacaaaaagtcggcggcagcagaagcccctacggatgatcagcctacagatctgagccttcccaagaacccgcacaaacctaccggcaaggtcctgggcctggctcattccaccacagggccccaggagagcaaaggcatctcccagttccaggtcttaggcagccagagtcgagactgtcaccccaaagcctgtcgggtatcacccatgaccatgtcaggccctaaaaaataccctgaatcgctttcaagatcaggaaaacctcaccatgtgagactggagaatttcaggaagatggaaggcatggtccacccaatcctgcaccggaaaatgagcccgcagaacattggggcggcgcggccgatcaagcgcagcctggaggatttggaccttgtgattgcagggaaaaaggcccgggcagtgtctcccttagacccatccaaggaggtctctgggaaggagaaggcctctgagcaggagagtgaaggcagcaaagcagcgcacggtgggcattccgggggcggatcagaaggccacaagcttcccctctcctcccctatcttcccaggtctgtattccgggagcctgtgtaactcgggcctcaactccaggctcccggctgggtattctcattctctgcagtacttgaaaaaccagactgtgctttctccactcatgcagcccctggctttccactcgcttgtgatgcaaagaggaatttttacatcaccgacaaattctcagcagctgtacagacacttggctgcggctacacctgtaggaagttcatatggggaccttttgcataacagcatttaccctttagctgctataaatcctcaagctgcctttccatcttcccagctgtcatccgtgcaccccagtacaaaactgtaggctcagctctgcccagcagtccaaagcggcatgg

SEQ ID NO: 87306 - DNA, 2838 bp, Artificial Sequence
  derived and/or modified sequence
atggcccccaacctgaagggcagacccagaaagaagaagccctgcccccagagaagagacagcttcagcggcgtgaaggacagcaacaacaacagcgacggcaaggccgtggccaaggtgaagtgcgaggccagaagcgccctgaccaagcccaagaacaaccacaactgcaagaaggtgagcaacgaggagaagcccaaggtggccatcggcgaggagtgcagagccgacgagcaggccttcctggtggccctgtacaagtacatgaaggagagaaagacccccatcgagagaatcccctacctgggcttcaagcagatcaacctgtggaccatgttccaggccgcccagaagctgggcggctacgagaccatcaccgccagaagacagtggaagcacatctacgacgagctgggcggcaaccccggcagcaccagcgccgccacctgcaccagaagacactacgagagactgatcctgccctacgagagattcatcaagggcgaggaggacaagcccctgccccccatcaagcccagaaagcaggagaacagcagccaggagaacgagaacaagaccaaggtgagcggcaccaagagaatcaagcacgagatccccaagagcaagaaggagaaggagaacgcccccaagccccaggacgccgccgaggtgagcagcgagcaggagaaggagcaggagaccctgatcagccagaagagcatccccgagcccctgcccgccgccgacatgaagaagaagatcgagggctaccaggagttcagcgccaagcccctggccagcagagtggaccccgagaaggacaacgagaccgaccagggcagcaacagcgagaaggtggccgaggaggccggcgagaagggccccaccccccccctgcccagcgcccccctggcccccgagaaggacagcgccctggtgcccggcgccagcaagcagcccctgaccagccccagcgccctggtggacagcaagcaggagagcaagctgtgctgcttcaccgagagccccgagagcgagccccaggaggccagcttccccagcttccccaccacccagccccccctggccaaccagaacgagaccgaggacgacaagctgcccgccatggccgactacatcgccaactgcaccgtgaaggtggaccagctgggcagcgacgacatccacaacgccctgaagcagacccccaaggtgctggtggtgcagagcttcgacatgttcaaggacaaggacctgaccggccccatgaacgagaaccacggcctgaactacacccccctgctgtacagcagaggcaaccccggcatcatgagccccctggccaagaagaagctgctgagccaggtgagcggcgccagcctgagcagcagctacccctacggcagccccccccccctgatcagcaagaagaagctgatcgccagagacgacctgtgcagcagcctgagccagacccaccacggccagagcaccgaccacatggccgtgagcagacccagcgtgatccagcacgtgcagagcttcagaagcaagcccagcgaggagagaaagaccatcaacgacatcttcaagcacgagaagctgagcagaagcgacccccacagatgcagcttcagcaagcaccacctgaaccccctggccgacagctacgtgctgaagcaggagatccaggagggcaaggacaagctgctggagaagagagccctgccccacagccacatgcccagcttcctggccgacttctacagcagcccccacctgcacagcctgtacagacacaccgagcaccacctgcacaacgagcagaccagcaagtaccccagcagagacatgtacagagagagcgagaacagcagcttccccagccacagacaccaggagaagctgcacgtgaactacctgaccagcctgcacctgcaggacaagaagagcgccgccgccgaggcccccaccgacgaccagcccaccgacctgagcctgcccaagaacccccacaagcccaccggcaaggtgctgggcctggcccacagcaccaccggcccccaggagagcaagggcatcagccagttccaggtgctgggcagccagagcagagactgccaccccaaggcctgcagagtgagccccatgaccatgagcggccccaagaagtaccccgagagcctgagcagaagcggcaagccccaccacgtgagactggagaacttcagaaagatggagggcatggtgcaccccatcctgcacagaaagatgagcccccagaacatcggcgccgccagacccatcaagagaagcctggaggacctggacctggtgatcgccggcaagaaggccagagccgtgagccccctggaccccagcaaggaggtgagcggcaaggagaaggccagcgagcaggagagcgagggcagcaaggccgcccacggcggccacagcggcggcggcagcgagggccacaagctgcccctgagcagccccatcttccccggcctgtacagcggcagcctgtgcaacagcggcctgaacagcagactgcccgccggctacagccacagcctgcagtacctgaagaaccagaccgtgctgagccccctgatgcagcccctggccttccacagcctggtgatgcagagaggcatcttcaccagccccaccaacagccagcagctgtacagacacctggccgccgccacccccgtgggcagcagctacggcgacctgctgcacaacagcatctaccccctggccgccatcaacccccaggccgccttccccagcagccagctgagcagcgtgcaccccagcaccaagctgtag

SEQ ID NO: 87307 - DNA, 519 bp, Artificial Sequence
  derived and/or modified sequence
atggagctggaaataaagaagatggctaagattggaaataaagaggcttgcaaggtgctcgccaagcagttagtgcacctccgaaaacaaaaaacccggacatttgctgtcagttccaaagtcactagtatgtctactcagaccaaagtgatgaactcacagatgaagatggccggagcaatgagtactactgcaaagactatgcaggcggtaaataagaagatggacccccagaaaacactgcaaaccatgcagaactttcaaaaggaaaacatgaaaatggaaatgacggaagagatgattaatgacacactcgatgacatcttcgacggaagcgacgacgaagaggagagtcaggacatcgtgaatcaggtcttagacgaaataggaattgaaatttcaggtaagatggctaaagctcccagcgctgcccgatctctcccttcagcttcaacgtccaaggccaccatttctgacgaagagattgagaggcagctcaaagctctcggagtggattag

SEQ ID NO: 87308 - DNA, 519 bp, Artificial Sequence
  derived and/or modified sequence
atggagctggagatcaagaagatggccaagattggcaacaaggaggcctgcaaggtgctggccaagcagctggtgcacctgaggaagcagaagaccaggacctttgctgtgagcagcaaggtgacctccatgagcacccagaccaaggtgatgaacagccagatgaagatggccggggccatgagcaccacagccaagaccatgcaggccgtgaacaagaagatggacccccagaagaccctgcagaccatgcagaacttccagaaggagaacatgaagatggagatgacagaggagatgatcaatgacaccctggatgacatctttgatggcagtgatgatgaggaggagagccaggacatcgtgaaccaggtgctggatgaaattggaattgagatcagcggcaagatggccaaggcccccagcgctgcccggagcctgcccagcgccagcaccagcaaggccaccatcagtgatgaggagattgaaaggcagctgaaggccctgggcgtggactag

SEQ ID NO: 87309 - DNA, 519 bp, Artificial Sequence
  derived and/or modified sequence
atggagctggagatcaagaagatggccaagatcggcaacaaggaggcttgcaaagttctggctaaacagctcgtgcaccttaggaagcagaaaacaaggacttttgccgtctctagcaaagtcacgagcatgtctacacagactaaggtgatgaactctcaaatgaagatggccggcgcaatgtctaccaccgctaaaaccatgcaggccgtgaacaaaaagatggatcctcagaagacgcttcagaccatgcaaaactttcagaaagaaaatatgaagatggagatgaccgaggagatgatcaacgacaccctggacgacatttttgacggctccgacgacgaggaagagtctcaggatattgtgaatcaggtgctggacgagattggcatcgagatctctggtaaaatggctaaggcgcctagcgcagcccgcagcctgccttctgcaagcacatcaaaagctactatatcagacgaggagattgaaagacagctcaaggctttaggcgtggactag

SEQ ID NO: 87310 - DNA, 519 bp, Artificial Sequence
  derived and/or modified sequence
atggagttggaaatcaaaaagatggccaagattggtaataaagaagcctgcaaggtcctcgccaagcagctcgtgcacctccgaaagcaaaaaaccaggaccttcgcagtgtcctcgaaggtgacctccatgagtacgcaaactaaagtcatgaactcccaaatgaaaatggccggagccatgtccaccaccgcgaaaaccatgcaggcggttaataagaaaatggacccgcagaagaccttgcagaccatgcaaaactttcagaaggagaacatgaaaatggagatgaccgaagaaatgatcaatgacactctggacgatatcttcgacgggtccgacgatgaagaagaatctcaggatattgtcaatcaggtactggacgaaattgggattgagatctctgggaaaatggcaaaggcaccaagcgcagctcggagtctgccaagcgcgagtacttccaaagctaccataagcgacgaggagatcgagcgacagcttaaggctctgggggtggattag

SEQ ID NO: 87311 - DNA, 894 bp, Artificial Sequence
  derived and/or modified sequence
cgcaggcgccgcctagaagtgacttctccaaaaagtgtgttagttcccggtcacctgagctccgggtgacgcggctgcggtagctgcggatacaagccttccgcgggtcctgcctggcgaccccgacctcctcctgctgtctctccgctccgccaccccgaacccgccaaggtcctgtccttttcctcctgtcctttgccagcgttgggccggaccgggccgagccgggccgcccgggcgcagtctttaaccatggcgtccctcttcaagaagaaaaccgtggatggaattagaaattaagaaaatggccaagattggtaataaggaagcttgcaaagttttagccaaacaacttgtgcatctacggaaacagaagacgagaacttttgctgtaagttcaaaagttacttctatgtctacacaaacaaaagtgatgaattcccaaatgaagatggctggagcaatgtctactacagcaaaaacaatgcaggcagttaacaagaagatggatccacaaaagacattacaaacaatgcagaatttccagaaggaaaacatgaaaatggaaatgactgaagaaatgatcaatgatacacttgatgacatctttgacggttctgatgacgaagaagaaagccaggatattgtgaatcaagttcttgatgaaattggaattgaaatttctggaaagatggccaaagctccatcagctgctcgaagcttaccatctgcctctacttcaaaggctacaatctcagatgaagagattgaacggcaactcaaggctttaggagtagattagtcaaaagaagtcatactattttgcttacttataattatgtagtataaaccaagcacagtgcagatttcttttacaaaacacatgtattttgc

SEQ ID NO: 87312 - DNA, 519 bp, Artificial Sequence
  derived and/or modified sequence
atggagctggagatcaagaagatggccaagatcggcaacaaggaggcctgcaaggtgctggccaagcagctggtgcacctgagaaagcagaagaccagaaccttcgccgtgagcagcaaggtgaccagcatgagcacccagaccaaggtgatgaacagccagatgaagatggccggcgccatgagcaccaccgccaagaccatgcaggccgtgaacaagaagatggacccccagaagaccctgcagaccatgcagaacttccagaaggagaacatgaagatggagatgaccgaggagatgatcaacgacaccctggacgacatcttcgacggcagcgacgacgaggaggagagccaggacatcgtgaaccaggtgctggacgagatcggcatcgagatcagcggcaagatggccaaggcccccagcgccgccagaagcctgcccagcgccagcaccagcaaggccaccatcagcgacgaggagatcgagagacagctgaaggccctgggcgtggactag

SEQ ID NO: 87313 - DNA, 306 bp, Artificial Sequence
  derived and/or modified sequence
atgcagcagcagcagcagttggcttccgcacgcaatcgcagactagcccagcagatggaaaaccgccctagtgtacaggccgcgcttaagctcaagcagaaatcactaaaacagcggctgggaaagtccaatatccaggcacggctaggtcgaccgattggcgcacttgcccgcggcgctatcggcggacgcggactcccaattatccagaggggactaccacgagggggactgcgcgggggacgagcgactcggacactcctgagaggggggatgagtctaagaggacagtgttgcgtgccctag

SEQ ID NO: 87314 - DNA, 306 bp, Artificial Sequence
  derived and/or modified sequence
atgcagcagcagcagcagctggccagcgccaggaacagaaggctggcccagcagatggagaaccggcccagcgtgcaggccgccctgaagctgaagcagaagagcctgaagcagaggctgggcaagagcaacatccaggcccggctgggccggcccatcggggccctggcccggggggccatcggcggccggggcctgcccatcatccagaggggcctgccccggggcggcctgcggggcggccgggccaccaggaccctgctgcggggcggcatgagcctgcggggccagtgctgcgtgccctag

SEQ ID NO: 87315 - DNA, 306 bp, Artificial Sequence
  derived and/or modified sequence
atgcagcagcagcagcagctggccagcgcccggaaccggcggctggcgcagcaaatggaaaaccgccccagtgtccaagccgccctaaaactgaaacagaaatcattgaagcagcgtctgggaaagtccaacatccaggccagactgggtcgtcctatcggtgcacttgcgcgaggcgccatagggggcagggggctgccaataatccaacgagggcttccacgcggagggctcagaggcggaagggcgacgcgcacactgctgagaggaggcatgtctctcaggggacagtgttgcgtgccatag

SEQ ID NO: 87316 - DNA, 306 bp, Artificial Sequence
  derived and/or modified sequence
atgcaacagcagcaacaactggcaagtgctcgaaacagacgcctagcccagcagatggaaaataggccgtctgtgcaggccgcattaaagctcaagcaaaaatccctgaagcaaaggttaggcaagagcaatattcaggctcggctgggacgtcccataggcgctctcgccagaggcgcaatcgggggtcggggactccccattatccaaagggggttgcccaggggaggcctgaggggtggacgggctacccgaacactgcttcgagggggaatgtcactgagaggacaatgttgtgtgccatag

SEQ ID NO: 87317 - DNA, 306 bp, Artificial Sequence
  derived and/or modified sequence
atgcagcagcagcagcagctggccagcgccagaaacagaagactggcccagcagatggagaacagacccagcgtgcaggccgccctgaagctgaagcagaagagcctgaagcagagactgggcaagagcaacatccaggccagactgggcagacccatcggcgccctggccagaggcgccatcggcggcagaggcctgcccatcatccagagaggcctgcccagaggcggcctgagaggcggcagagccaccagaaccctgctgagaggcggcatgagcctgagaggccagtgctgcgtgccctag

SEQ ID NO: 87318 - protein, 321 aa, Artificial Sequence
  derived and/or modified sequence
MIPRKRYGSKNTDQGVYLGLSKTQVLSPATAGSSSSDIAPLPPPVTLVPPPPDTMSCRDRTQEFLSACKSLQTRQNGIQTNKPALRAVRQRSEFTLMAKRIGKDLSNTFAKLEKLTILAKRKSLFDDKAVEIEELTYIIKQDINSLNKQIAQLQDFVRAKGSQSGRHLQTHSNTIVVSLQSKLASMSNDFKSVLEVRTENLKQQRSRREQFSRAPVSALPLAPNHLGGGAVVLGAESHASKDVAIDMMDSRTSQQLQLIDEQDSYIQSRADTMQNIESTIVELGSIFQQLAHMVKEQEETIQSVLLFPLLPALSPGSTRTC

SEQ ID NO: 87319 - DNA, 966 bp, Artificial Sequence
  derived and/or modified sequence
atgatccccagaaagagatacggcagcaagaacaccgaccagggcgtgtacctgggcctgagcaagacccaggtgctgagccccgccaccgccggcagcagcagcagcgacatcgcccccctgcccccccccgtgaccctggtgccccccccccccgacaccatgagctgcagagacagaacccaggagttcctgagcgcctgcaagagcctgcagaccagacagaacggcatccagaccaacaagcccgccctgagagccgtgagacagagaagcgagttcaccctgatggccaagagaatcggcaaggacctgagcaacaccttcgccaagctggagaagctgaccatcctggccaagagaaagagcctgttcgacgacaaggccgtggagatcgaggagctgacctacatcatcaagcaggacatcaacagcctgaacaagcagatcgcccagctgcaggacttcgtgagagccaagggcagccagagcggcagacacctgcagacccacagcaacaccatcgtggtgagcctgcagagcaagctggccagcatgagcaacgacttcaagagcgtgctggaggtgagaaccgagaacctgaagcagcagagaagcagaagagagcagttcagcagagcccccgtgagcgccctgcccctggcccccaaccacctgggcggcggcgccgtggtgctgggcgccgagagccacgccagcaaggacgtggccatcgacatgatggacagcagaaccagccagcagctgcagctgatcgacgagcaggacagctacatccagagcagagccgacaccatgcagaacatcgagagcaccatcgtggagctgggcagcatcttccagcagctggcccacatggtgaaggagcaggaggagaccatccagagcgtgctgctgttccccctgctgcccgccctgagccccggcagcaccagaacctgctag

SEQ ID NO: 87320 - DNA, 966 bp, Artificial Sequence
  derived and/or modified sequence
atgatcccccggaaacgctatggatctaaaaatacggaccagggagtctacctgggattgtctaagactcaggttttgtctcccgccaccgcgggatccagtagttccgatatcgcccccctcccacctcctgttacactcgtcccaccacctccagacacaatgagttgtcgcgacaggacgcaagagttcctttccgcttgtaaatctctgcagacccgccaaaatggcattcagacaaataaaccagcccttcgggccgtccgccaaagatctgagtttacgctgatggccaaacggatagggaaggacctatcaaataccttcgctaagttggaaaaattgacgatcttggccaaaagaaagagcctttttgacgataaagccgttgaaattgaagaactgacatacatcattaagcaggatatcaattctctgaacaagcagattgcccagctccaagactttgtgagggcaaagggctcacagtccggtaggcaccttcagactcacagtaacaccatcgtggtttcattgcaatccaaacttgcaagcatgtccaatgattttaaaagcgtattggaagttagaactgagaacttgaaacagcagcggtcgagaagggagcagttttcgcgagcccccgtctcagccttgccattggccccgaaccatctgggaggcggcgcggtcgtgctgggagcagaatcacacgcttccaaagatgtggctattgacatgatggattctagaacatcccagcaactacagctcatcgatgagcaagattcatacattcaatcacgcgcagatacaatgcagaatatagagtctactatagtggagctggggagcatattccaacaattagcccacatggtgaaggaacaggaagagactatacagtccgtactactgtttcctcttttgcccgcgttatctcctgggagcacgagaacctgctag

SEQ ID NO: 87321 - DNA, 966 bp, Artificial Sequence
  derived and/or modified sequence
atgatccccaggaagagatatggcagcaagaacacagaccagggcgtgtacctgggcctgagcaagacccaggtgctgagccctgccacagctggcagcagcagcagtgacatcgcccccctgcccccacctgtgaccctggtgcccccacctccagacaccatgagctgccgggacaggacccaggagttcctgagcgcctgcaagagcctgcagacccggcagaatggcatccagaccaacaagccagccctgcgggctgtgcggcagaggtctgagttcaccctgatggccaagagaattggcaaggacctgagcaacacctttgccaagctggagaagctgaccatcctggccaagaggaagagcctgtttgatgacaaggctgtggagattgaggagctgacctacatcatcaagcaggacatcaacagcctgaacaagcagatcgcccagctgcaggactttgtgcgggccaagggcagccagagcggccgccacctgcagacccacagcaacaccatcgtggtgtccctgcagagcaagctggcctccatgagcaatgacttcaagtctgtgctggaggtgaggacagagaacctgaagcagcagaggagcagaagagagcagttcagccgggcccctgtgtctgccctgcccctggcccccaaccacctgggcggcggcgctgtggtgctgggcgctgagagccacgccagcaaggatgtggccatcgacatgatggacagcaggaccagccagcagctgcagctgattgatgagcaggacagctacatccagagcagagctgacaccatgcagaacatcgagagcaccatcgtggagctgggcagcatcttccagcagctggcccacatggtgaaggagcaggaggagaccatccagagcgtgctgctcttccccctgctgcctgccctgagccctggcagcaccaggacctgctag

SEQ ID NO: 87322 - DNA, 966 bp, Artificial Sequence
  derived and/or modified sequence
atgatcccccggaagcggtacggcagcaagaacaccgaccagggcgtgtacttaggtctgtcaaagacccaggttctatctccagccactgcaggtagctctagttctgacattgccccgctgcctcccccggtcaccctggtcccccccccgcctgataccatgtcctgccgcgaccgcacccaggagttcctctcggcctgcaaatctctacaaacgcgccagaacggaatccagacaaacaaacctgctctgagggcggtacgtcagagatcggagttcactcttatggctaaacgcatagggaaagatctgtctaatacattcgctaaactcgaaaaacttacgatcctggctaagcgtaagtctttatttgatgataaggctgttgaaatcgaggaacttacgtatattattaaacaggacatcaactcccttaataagcaaatcgctcaacttcaggatttcgtaagggcaaagggtagtcagtcgggtcgccacctccagacccactctaatactattgtggtatccctccagtccaagctggcttcgatgtctaatgatttcaagtccgtgctcgaggtgagaactgagaacttaaagcagcaaagaagccgaagggagcaattcagccgagctcccgtttctgctttacccctggcccctaatcacctgggagggggggctgtagtgctgggagccgagtcacatgcctcaaaagacgtcgctatcgacatgatggactccaggacatcccagcagttacaactcatagatgaacaagacagctacatccagagccgggcagacacaatgcagaatatcgagtctactatcgtcgagttaggttccatctttcaacagctggcacacatggtaaaagaacaggaggaaacaattcagagtgtccttctgtttcccctgctccccgccctgagtcctggctcaacccgaacgtgttag

SEQ ID NO: 87323 - DNA, 966 bp, Artificial Sequence
  derived and/or modified sequence
atgatccccaggaaaagatatgggagtaagaacacagatcagggagtgtaccttggtctaagtaagactcaggtgctgagccctgccacagctgggagctcttccagtgacatagctccgctcccaccacctgtaacacttgtaccgcctccaccggatacgatgtcatgccgagatcgaacccaagaatttttgtccgcgtgtaagagcctccagactaggcaaaacggcatccaaacaaataagccagcgcttcgggctgtgcgtcaacgaagtgaatttaccctaatggctaaaaggattggcaaggacctgagtaacacttttgccaagcttgaaaagctcacaattctcgctaagcggaaatcactattcgacgacaaagctgttgagatcgaggaactgacctacattattaaacaggatattaactccctcaataaacagatcgctcagctgcaggacttcgtgcgcgctaaaggctcccagtctggcagacacctacagacacactctaatactatagtggtttccctgcagtctaagttggctagtatgtccaacgactttaaaagtgtgctggaagtccggacggagaatctgaaacagcagcgcagcaggcgcgagcagttctccagagcacctgtgagcgcacttcctcttgctcctaaccatctgggaggtggggcagtggtgcttggagcagagagccacgcaagtaaagatgtggctattgatatgatggactccagaacatcccagcagcttcagttaattgacgaacaggattcatatattcagtcccgggctgatacgatgcaaaatatcgaatccaccattgtggagctggggtctatattccagcagctcgcgcatatggttaaagagcaagaggagactatccagtccgtgctcttatttcccctccttcctgctctgtcaccagggagcacccgaacatgttag

SEQ ID NO: 87324 - DNA, 1785 bp, Artificial Sequence
  derived and/or modified sequence
cgggtttcggcggcttcagtgctcggggaggaggcagtgacggccggtgagattggaagtggcggcggcggcaggcggcagaggggagtccgaggttatgcgtctcaatgatcccgcggaaacgctacgggtctaagaacacggatcagggtgtctacctgggtctctcaaagacacaggtcctgtcccctgcaactgctggcagtagcagcagcgacatcgcccctctgccccccccagtgaccctcgtccctccccctcccgacaccatgtcctgccgggatcggacccaggagtttctgtctgcctgcaagtcgctgcagacccgtcagaatggaatccagacaaataagccagctttgcgtgctgtccgacaacgcagtgaattcaccctcatggccaagcgcattgggaaagaccttagcaacacatttgccaagctggagaagctgacaatcttggcaaagcgcaagtccctctttgatgataaagcagtggaaattgaagagctaacatatatcatcaaacaggacatcaatagcctcaacaaacaaattgctcagctccaggatttcgtgagagccaagggcagccagagtggccggcacctgcagacccactccaacaccattgtggtctccttgcagtcgaaactggcttctatgtccaatgacttcaaatcggttttagaagtgaggacagagaacctgaagcagcagaggagccggagagagcagttctcccgggcacctgtgtcagccctgccccttgcccctaaccacctgggcggtggtgctgtggttctgggggcagagtcccatgcctccaaggatgtcgccatcgacatgatggactctcggaccagccagcagctgcagctcattgacgagcaggattcctacatccagagtcgggcagacaccatgcagaacattgagtcgacaattgttgagttgggctccatctttcagcagttggcacacatggttaaggaacaggaggaaaccattcagagtgtccttttgtttcctcttctcccggccttgtccccaggatcgacgagaacgtgctaggagcccagctggacgttgaggccgcccattcagagatcctcaagtacttccagtctgtcacctccaaccggtggctcatggtcaaaatcttcctcatcctcattgtcttcttcatcatctttgtggtcttccttgcttgaaccctctctactctgaggcactctgttggggtttgggaccctcctgggaaggcaagtggccagtgctgccactgagcctgtgcagggtacttgggagaaaggccctgtttccctggaactgctaagaatgaccactgcccctgatcccccaccccttgcctctggccaccctgtcctccccccaccaccctcaggcctatgaaacacacagggttctagatttgaactctgctgtgaagtgactggaagggagcagaggccagctgggggccagtgggggaggttgtttccactaggagatttttataaaccctctccagcctctcccaaaggaagcgttggcagcaaagggagatgatgcccttacccaccttcctgtgagtgaagagaggaagcagccccagggaccaattttcccaattgacctctttcttcctctttcaccatgtgaggcagggagccctgagcccttcagctgcctgcacaacccctgacattggctgctggtgactcaatctgccaaatgtgctgcagctcgttttctcccaattacagcaagactgtcagcctca

SEQ ID NO: 87325 - protein, 405 aa, Artificial Sequence
  derived and/or modified sequence
MWYVSTRGVAPRVNFEGALFSGYAPDGGLFMPEELPQLDRGTLCQWSTLSYPGLVKELCALFIGSELLPKDELNDLIDRAFSRFRHREVVHLSRLRNGLNVLELWHGVTYAFKDLSLSCTTQFLQYFLEKREKHVTVVVGTSGDTGSAAIESVQGAKNMDIIVLLPKGHCTKIQELQMTTVLKQNVHVFGVEGNSDELDEPIKTVFADVAFVKKHNLMSLNSINWSRVLVQMAHHFFAYFQCTPSLDTHPLPLVEVVVPTGAAGNLAAGYIAQKIGLPIRLVVAVNRNDIIHRTVQQGDFSLSEAVKSTLASAMDIQVPYNMERVFWLLSGSDSQVTRALMEQFERTQSVNLPKELHSKWERQDYEKMAVMECDGCCVELCLGNCGPRRGSVTDIPGTAMVRGGG

SEQ ID NO: 87326 - DNA, 1218 bp, Artificial Sequence
  derived and/or modified sequence
atgtggtacgtgagcacaaggggggtagccccaagagtcaatttcgagggagcgctgtttagcggctacgcccctgacggtggtctctttatgcctgaagaacttccacagctcgaccggggaacactttgtcaatggagtactttgtcttatcccggtttggttaaagagttgtgcgctctttttatcggctctgaactcctaccaaaagatgagctcaatgaccttattgaccgagccttctcaaggttcagacaccgggaggttgtgcacctgagtcgcctgcggaatgggttaaatgtgctggagctctggcacggagtaacctatgccttcaaggatctatccttatcttgcacaacacaatttctgcagtatttcctagaaaagagggagaagcatgtcacggtcgtggttggcacaagcggggacacgggaagcgcagccatcgagtcagtacagggagcaaaaaacatggacatcattgtgctgctgcccaagggccactgtactaaaatccaggagctccagatgactaccgtgttaaaacagaatgtacatgtgttcggggtcgagggtaatagtgatgagctggatgaacccatcaagaccgtattcgccgacgttgcctttgtgaagaagcacaatctgatgtccctgaattctattaattggtctcgtgtgctagtgcaaatggcccatcatttttttgcttactttcagtgcaccccctccctggacacccacccactccccctggtggaggtggtcgtaccaacgggagcggctggcaatcttgctgctgggtacattgctcagaagatcggccttcccattagactcgttgttgcagtgaataggaatgacataatccaccggacagtccagcaaggtgatttcagtctaagtgaggcggtcaaatcaaccctggcaagtgcgatggatatccaagtgccatataacatggaacgcgtgttctggctcctctctggatcagattctcaggtgacgcgcgctctgatggagcagttcgaacgaacccagagcgtgaacctgcctaaggaactgcactctaagtgggagcgtcaagattacgaaaaaatggctgttatggagtgtgatggatgctgtgttgagctgtgtctggggaattgcggcccacgtcgcggttcagtgaccgatatccctggcaccgctatggtgcggggaggcggatag

SEQ ID NO: 87327 - DNA, 1371 bp, Artificial Sequence
  derived and/or modified sequence
agctccggccccgaccggaagccccaccgcaccgtcagggacgcggactcgggagtgcgcacattcgcagcccgggcagccctgctgcgcaccgggcctcgcgccccgcgccccgcgccccgcgccccgcgccccgcaccggcctccaggatcatgtggtatgtcagcaccaggggcgtagccccacgggtcaactttgagggggccctcttctctggctatgcacctgacgggggcctctttatgcctgaagagctcccacagttggacagagggaccctgtgccagtggagcacactctcctatcctggcctggtgaaggagctgtgtgccctcttcattggctctgagctccttccaaaagatgaattaaatgatctgatcgaccgagccttcagcagattccgtcacagagaagtggtccatctgtccaggttgaggaatgggctgaacgtgttggagctgtggcatggcgtcacatatgcatttaaggacctgtccctgtcctgcacaacacagttcctgcagtacttcctggagaagagggagaagcacgtcactgtggttgtaggaacatctggggacacaggaagtgctgccattgagagtgttcaaggggcaaagaacatggacattatcgttctgctgcccaaaggtcactgcacaaagattcaggagctccagatgacaacggtgctgaagcagaacgtacatgtgtttggagtggagggaaacagcgatgagctcgatgagccgatcaagactgtgtttgccgatgtggcttttgtcaagaagcacaatctgatgagcctgaattcgatcaactggtcccgggtcctggtgcagatggcccatcacttctttgcttacttccagtgtacgccatccttggacacacatcccctacccctggtggaggtggttgtgccaacaggggctgccggtaaccttgcagctgggtacattgctcaaaagataggcctgcccatccgtctggtcgtggcagtgaaccgcaatgacatcatccacaggactgtccagcagggagacttctctctctctgaggctgttaaatcaaccttggcatcagctatggacattcaggtgccctacaacatggagagggtgttctggctgctctctggctctgacagccaggtgacaagagccctcatggagcagtttgaaaggacccaaagtgtgaatctgcccaaggaactgcacagcaagtgggagagacaggactacgaaaaaatggctgtaatggagtgtgatgggtgctgtgtggaactgtgccttggaaactgtgggcccagaagagggagcgtgacagatatcccagggacagccatggtcagaggtggtggctga

SEQ ID NO: 87328 - DNA, 1218 bp, Artificial Sequence
  derived and/or modified sequence
atgtggtatgtatcgaccaggggcgttgccccacgagtgaatttcgaaggggctcttttcagcggctacgcgcctgacggtggtctttttatgccagaagagctcccgcaattggatagggggacactctgccaatggtctaccttgagctatcctggcttggtcaaggagctgtgtgccctgttcatcggttctgaattgctccctaaggacgaactgaacgatctgattgacagagcattctcccggttccgacatcgcgaagtggttcatctgtccagactaagaaatgggctgaatgttttggaactgtggcacggggtaacatatgccttcaaagacttatccctttcatgtacaacacaattcctccagtattttttagagaagcgggaaaagcatgtcactgtggtggtcggaacttcaggtgatacgggttcagcggcaatagaatctgtgcaaggagcaaaaaacatggatattatagtgctgctcccaaaaggccattgtaccaaaatccaggagttgcaaatgacaaccgtgctgaaacagaatgtccatgtgtttggcgtggaaggcaactctgatgagctggatgaacctatcaaaaccgtgtttgcagatgtggctttcgtgaaaaagcataacctcatgtcccttaattccatcaattggagtcgggtcctggtccagatggcccatcacttttttgcctacttccaatgtactcctagtctggacactcaccccctgcccctcgtcgaggtagtggtgccgactggagccgcagggaacctggccgctggctatatagcacagaagatcgggctgccaatccgtcttgtggtcgcagttaatcggaacgacatcatccatcggactgtccagcagggtgacttttctctgtccgaggcggttaagtccaccctggcatctgctatggatatccaggtgccatataacatggaacgggtgttctggcttctaagtggctctgatagccaggtgacccgggctctcatggagcagtttgaacgcacccagtcagtgaaccttccgaaggaattacattcgaaatgggaacgccaggattatgaaaaaatggctgttatggaatgcgatggctgttgcgtggaactgtgccttggaaactgtggcccacgcagggggagcgtcaccgatatccccggaaccgccatggtgagaggcggtggatag

SEQ ID NO: 87329 - DNA, 1218 bp, Artificial Sequence
  derived and/or modified sequence
atgtggtatgtgagcacacgaggggtcgcaccaagggtgaattttgagggagcacttttttctggttatgcacccgatggcggtctatttatgcctgaagaactgcctcagttagacagggggaccctgtgtcaatggtcaacactcagttatcccggacttgtgaaggagctctgtgccctgttcataggttcagagttgctgcctaaagatgaacttaacgacctgatcgatcgggcattttccaggttcagacacagagaggtcgtgcaccttagtcggctacgtaatggactcaacgtgctcgagctgtggcacggtgtcacctacgcgttcaaagatcttagtctgtcctgtacaacacaattcttacagtacttcctggagaaacgcgaaaaacatgtaactgtggttgttggcacatccggagacactggcagtgccgcaattgaaagcgtacagggcgcgaaaaatatggatattatagttctgctccctaagggacactgtacaaaaatacaggagctgcagatgactaccgtccttaagcagaatgtacacgtgtttggagtggaaggcaattccgacgaattggacgagcctattaaaaccgtgtttgcagatgtagcatttgttaaaaagcacaatttgatgtccctcaacagcatcaactggtcaagggtgctagtccagatggcccatcatttcttcgcatatttccagtgtactcctagtctcgacacacaccccctacccctcgtggaggtcgtcgtgcccactggagctgcaggaaacttggccgccggatacattgctcagaagatcggcctccctatccgtttagtcgtagcagtaaaccgtaatgacatcatacaccgcacagtgcagcagggagactttagcttgtcagaagcagttaagagcaccttagctagtgctatggacattcaagttccctacaatatggagcgtgtcttttggcttctgagtggatccgacagccaagtgacacgggccctaatggaacagtttgaacggacgcaaagtgttaatcttcccaaggagctccactcgaagtgggagagacaggactatgaaaaaatggcagtcatggaatgtgacggttgttgcgtagagctgtgcttgggcaactgtggtccccgacggggatccgtgaccgacatccctgggacagctatggtcaggggcggcgggtag

SEQ ID NO: 87330 - DNA, 1218 bp, Artificial Sequence
  derived and/or modified sequence
atgtggtatgtttcaacacgaggagttgcacctcgggtgaattttgagggggctttatttagcggctacgcacccgacggcggcctgttcatgcctgaagaacttccacagctagatcgaggcacactgtgccagtggtctaccctttcctatcccgggctggtgaaagagctctgcgccctctttattggctctgagttgctgccgaaggatgaactcaacgatctgattgatcgggcattcagcagatttcggcacagggaggtggtacacttatctaggctcagaaatggtctgaacgttctcgagttatggcatggtgtgacctacgcatttaaagacttgagcctgagctgtacaacacagttcctgcagtactttttagagaagcgcgagaaacatgtcactgtcgtagtagggacaagcggcgacactggctcagcagctatcgagtccgtgcagggagcgaaaaatatggatatcatcgttctgctgcctaaggggcactgtaccaaaattcaggagctgcagatgacaacagtgttaaaacagaatgtccacgtgtttggggtggagggtaacagcgatgaactggatgagcctatcaagacagtgttcgcagacgtcgcctttgtcaaaaaacacaaccttatgtccctgaactcaattaattggtcccgggtcctcgtgcagatggcgcatcactttttcgcgtacttccagtgtacaccctctctggacactcatccactgccgctagtcgaggtagtagtgcctacaggagccgccggcaacctggccgccggttatatagctcaaaaaataggtctcccaatccgactcgtggtggctgtgaaccgtaatgacattatccatagaaccgttcagcaaggggacttcagcttgtccgaagctgtgaagagcaccctggcttctgctatggacatccaggtgccctataatatggaacgagtgttttggctcttgagcggttccgactctcaggtgacacgtgctttgatggagcagtttgaaagaacacagtctgtgaacctccctaaagaactccactctaaatgggaaaggcaagattatgagaagatggccgtgatggagtgcgatggttgttgcgtggagctgtgtttgggcaattgtggcccacggagaggcagcgtgacagatatacccggtaccgcaatggttaggggggggggatag

SEQ ID NO: 87331 - DNA, 1218 bp, Artificial Sequence
  derived and/or modified sequence
atgtggtatgtgagcacacgaggggtcgcaccaagggtgaattttgagggagcacttttttctggttatgcacccgatggcggtctatttatgcctgaagaactgcctcagttagacagggggaccctgtgtcaatggtcaacactcagttatcccggacttgtgaaggagctctgtgccctgttcataggttcagagttgctgcctaaagatgaacttaacgacctgatcgatcgggcattttccaggttcagacacagagaggtcgtgcaccttagtcggctacgtaatggactcaacgtcctggaactatggcacggggttacatatgcattcaaggatctgtccctatcttgcacaacgcagttcctccaatattttctggaaaagagagaaaagcatgtcaccgtagttgtgggaacatcaggtgataccggctctgcggctattgaaagcgtccagggggccaaaaatatggatatcattgttttactgccaaaagggcactgcaccaagatccaggaactccaaatgactacagtgctgaagcagaatgttcacgtatttggcgtggaaggaaactcggatgagttggatgaacccatcaaaactgtgtttgccgatgttgccttcgtaaagaaacacaaccttatgagtctcaactctatcaactggtccagggtgttagtccaaatggcacaccacttttttgcctatttccagtgtacaccaagcctggacactcacccactccctctcgtagaagtcgtcgttccaaccggcgcagcgggtaatctcgcggccggctatatcgcccaaaagattggattgccaattcgtttggtggttgctgtgaatcgcaatgatatcattcatcgtaccgtccaacagggggatttcagtctgagcgaagctgttaaaagcaccttggccagcgcgatggatatccaggtcccttacaatatggagcgagtcttttggctgcttagcggttcggactcacaggtaaccagagccctgatggaacaattcgagcggacacaatcagttaacttaccaaaggagctgcatagcaaatgggagcgtcaggactacgagaagatggcagtgatggagtgtgacggctgttgtgttgaactgtgcctggggaactgtggaccacgccggggcagcgtcaccgacatccccggtaccgcaatggtgcggggcgggggatag

SEQ ID NO: 87332 - DNA, 1218 bp, Artificial Sequence
  derived and/or modified sequence
atgtggtacgtttccacacggggagtggctccgagggttaattttgaaggagctctattctcaggctacgcccccgacggcggactgttcatgcccgaagagctcccccagctggacagaggcaccctgtgccagtggtccacactgtcctatccaggcttggtgaaggaactgtgcgcactgttcataggctcagaattgttaccaaaggacgaactgaatgatctaatcgacagagcattttctcgtttcagacaccgagaagtagtgcatctcagccggctgcgtaacggacttaatgtattagagttatggcatggggtgacatacgctttcaaggatctctctctgagctgcaccacacagtttctgcagtatttcctcgagaaaagggagaagcacgtgacagtagtggtgggcacctctggcgatacaggttctgcagccattgaaagtgttcaaggggctaagaacatggacattatcgttctgctcccgaaaggtcattgcactaaaattcaagaactgcaaatgacaacagttttaaaacagaatgtacacgtgttcggtgtggaagggaacagcgacgagctcgacgagccaatcaagacagtctttgcagatgtggccttcgtaaaaaagcacaatctcatgtctctaaattctattaactggtcaagggttttggtgcagatggcacaccacttcttcgcgtattttcaatgcactccaagtctcgatacacacccactgccactggtcgaagttgtggtcccaacaggcgctgccgggaatctggccgcaggctatatcgcgcagaaaatcgggcttcctatccgtttagtcgtggccgtcaaccgcaacgacatcattcaccgcacggtacagcagggcgacttctcactctctgaagccgtgaagtctacgttggcaagcgccatggacattcaggtcccctacaacatggaacgcgtgttctggctgctaagtggctctgattcccaagtaacccgcgctctgatggaacaattcgagaggacacagagcgttaatctgcccaaagagctgcacagtaagtgggagagacaagattacgagaaaatggctgtaatggaatgtgacggctgttgtgtcgaattgtgcctgggtaactgtggaccaagaaggggatccgtgaccgatataccagggactgcgatggtacggggcggggggtag

SEQ ID NO: 87333 - DNA, 1218 bp, Artificial Sequence
  derived and/or modified sequence
atgtggtacgtgagcaccagaggcgtggcccccagagtgaacttcgagggcgccctgttcagcggctacgcccccgacggcggcctgttcatgcccgaggagctgccccagctggacagaggcaccctgtgccagtggagcaccctgagctaccccggcctggtgaaggagctgtgcgccctgttcatcggcagcgagctgctgcccaaggacgagctgaacgacctgatcgacagagccttcagcagattcagacacagagaggtggtgcacctgagcagactgagaaacggcctgaacgtgctggagctgtggcacggcgtgacctacgccttcaaggacctgagcctgagctgcaccacccagttcctgcagtacttcctggagaagagagagaagcacgtgaccgtggtggtgggcaccagcggcgacaccggcagcgccgccatcgagagcgtgcagggcgccaagaacatggacatcatcgtgctgctgcccaagggccactgcaccaagatccaggagctgcagatgaccaccgtgctgaagcagaacgtgcacgtgttcggcgtggagggcaacagcgacgagctggacgagcccatcaagaccgtgttcgccgacgtggccttcgtgaagaagcacaacctgatgagcctgaacagcatcaactggagcagagtgctggtgcagatggcccaccacttcttcgcctacttccagtgcacccccagcctggacacccaccccctgcccctggtggaggtggtggtgcccaccggcgccgccggcaacctggccgccggctacatcgcccagaagatcggcctgcccatcagactggtggtggccgtgaacagaaacgacatcatccacagaaccgtgcagcagggcgacttcagcctgagcgaggccgtgaagagcaccctggccagcgccatggacatccaggtgccctacaacatggagagagtgttctggctgctgagcggcagcgacagccaggtgaccagagccctgatggagcagttcgagagaacccagagcgtgaacctgcccaaggagctgcacagcaagtgggagagacaggactacgagaagatggccgtgatggagtgcgacggctgctgcgtggagctgtgcctgggcaactgcggccccagaagaggcagcgtgaccgacatccccggcaccgccatggtgagaggcggcggctag

SEQ ID NO: 87334 - DNA, 1218 bp, Artificial Sequence
  derived and/or modified sequence
atgtggtacgtctctacgcggggtgtggctccacgcgttaacttcgagggagccttgttttccggatatgcgcctgatgggggattattcatgcccgaggaattaccacagctcgaccgagggacgctttgtcagtggtctaccctgtcttatcccgggctggtaaaggaactgtgtgcactttttattggatctgaactgcttccaaaagatgagttgaatgacctcatcgatagagctttctcacgattccggcacagagaggtggttcatctatcgaggctcaggaacggcctcaatgtgcttgagctttggcacggagtcacgtatgcattcaaggacctgagcctctcttgcaccactcaatttctgcaatatttccttgaaaagcgagaaaaacacgtcacagtcgtcgtgggcaccagcggcgataccgggagcgccgccatcgagagtgtgcaaggagctaagaatatggacatcattgttctgctacccaagggtcattgtaccaaaatccaggagttgcagatgacaacggtgttgaagcagaatgtccatgtttttggggtggaaggtaatagcgacgagctcgacgagccaattaaaaccgtcttcgctgatgtcgctttcgtcaagaaacataatctgatgtccctgaacagtattaactggagtcgcgtgcttgtccagatggcccaccatttttttgcatactttcagtgtacacctagcctggatacacatcctctacccctcgtggaggtggttgttcccacaggtgcggctgggaatttggcggccggatatattgcccagaaaatcggcttgcccatccgcctggtggtcgccgtgaaccggaatgacatcattcacagaacggtacaacaaggcgatttctcccttagtgaggccgtgaagagtacactcgccagtgctatggatatccaggtcccatataacatggagagagtattttggcttctgtccgggtctgactcccaagtgacccgcgcactcatggagcagtttgagagaacccagtctgtgaacctgccaaaggagctgcatagtaagtgggagagacaggattacgagaaaatggctgtaatggagtgtgacggatgctgcgtcgaattgtgtctgggcaattgtggcccacggcgcggctccgtcaccgatattcccggcacggccatggtccgcggcggtggatag

SEQ ID NO: 87335 - DNA, 2052 bp, Artificial Sequence
  derived and/or modified sequence
tgctgcgcaccgggcctcgcgccccgcgccccgcgccccgcgccccgcgccccgcaccggcctccaggatcatgtggtatgtcagcaccaggggcgtagccccacgggtcaactttgagggggccctcttctctggctatgcacctgacgggggcctctttatgcctgaagagctcccacagttggacagagggaccctgtgccagtggagcacactctcctatcctggcctggtgaaggagctgtgtgccctcttcattggctctgagctccttccaaaagatgaattaaatgatctgatcgaccgagccttcagcagattccgtcacagagaagtggtccatctgtccaggttgaggaatgggctgaacgtgttggagctgtggcatggcgtcacatatgcatttaaggacctgtccctgtcctgcacaacacagttcctgcagtacttcctggagaagagggagaagcacgtcactgtggttgtaggaacatctggggacacaggaagtgctgccattgagagtgttcaaggggcaaagaacatggacattatcgttctgctgcccaaaggtcactgcacaaagattcaggagctccagatgacaacggtgctgaagcagaacgtacatgtgtttggagtggagggaaacagcgatgagctcgatgagccgatcaagactgtgtttgccgatgtggcttttgtcaagaagcacaatctgatgagcctgaattcgatcaactggtcccgggtcctggtgcagatggcccatcacttctttgcttacttccagtgtacgccatccttggacacacatcccctacccctggtggaggtggttgtgccaacaggggctgccggtaaccttgcagctgggtacattgctcaaaagataggcctgcccatccgtctggtcgtggcagtgaaccgcaatgacatcatccacaggactgtccagcagggagacttctctctctctgaggctgttaaatcaaccttggcatcagctatggacattcaggtgccctacaacatggagagggtgttctggctgctctctggctctgacagccaggtgacaagagccctcatggagcagtttgaaaggacccaaagtgtgaatctgcccaaggaactgcacagcaagtgggagagacaggactacgaaaaaatggctgtaatggagtgtgatgggtgctgtgtggaactgtgccttggaaactgtgggcccagaagagggagcgtgacagatatcccagggacagccatggtcagaggtggtggctgagctggcctccaaccaggaggagcagtttgccagcactccccggtgctgcctcgcccctgcctctgcagccaagttcccggaagctgtcctggctgctggcctgacccctgagactcccgcggagatcgtagccctggagcacaaggagacacgctgcaccctgatgcggagaggtgacaactggatgctgatgcttcgggacaccattgaggaccttagccgacagtggaggagtcatgccctcaacacctcccagtagcctggctggaggtggctttctttaggcttcagatcccaggaagatgcaccttctgagctgccttgtgcaccctccccattaagcgtaggttaggaggtttccgggaggctgctcagctggatctggagccagctggctttgctccgttccctggctagtctgtgcctggtcaccagggaggctgagtgaggggctgtgaacagttgccggaagcaccccctccctccccggcccgtgcagcagtgtctgagctgtagtgaaagtttcagggcctgcaaaagaagaggcttgggcacaggactgaccatggctccaggggtttaggaccccagacctgtgaaggtgggagcagctcaccaccttcacgcaggctttgtatgttctctgagccttagttgattttggcccccaaaccaaatccaaaggttctggcccaccttgtcagaggcttccaccctgctcacatgttgggaatccctggaataaaatgcttgttcagtgtga

SEQ ID NO: 87336 - DNA, 1218 bp, Artificial Sequence
  derived and/or modified sequence
atgtggtatgtgtccaccagaggggttgctccaagagtgaatttcgaaggcgcccttttttccggctatgccccggacggtgggctgtttatgcctgaggagttgccccagctggataggggcaccctttgccaatggtcaaccctctcttatccgggcctggttaaagaattatgtgcccttttcattggttccgagcttctcccgaaagacgagttgaatgacctaattgatcgcgccttttcccgctttagacatagagaggtggtgcatctctctcgccttcgcaacggtctcaacgttctcgagctatggcatggagtcacatacgcctttaaggatctgtctctttcatgcacaacccagtttctgcagtacttcctggagaaaagggagaagcacgtgacggtagtcgtgggcaccagcggagacaccggatccgcagcgatcgagtctgtgcagggggccaaaaacatggatatcattgtcctgctgcctaagggccattgcacaaagattcaagaactccagatgactactgttctcaaacagaacgtgcatgtcttcggagtggaaggcaattcggatgagctggatgaacctatcaagacagtgtttgctgacgtggccttcgtgaagaagcacaacctcatgtccttaaactctatcaactggagtcgggtactggttcaaatggcacaccacttcttcgcctactttcagtgcactccctctctcgacacgcatcccttaccacttgttgaggtggttgttccaaccggcgcagcaggaaacctagcggccggctacatcgcacaaaagattgggctaccaatcagactcgtggtcgctgtgaaccgcaatgacattattcacagaacagtccaacagggcgatttctccctttccgaagctgtgaagtcaaccctcgccagtgctatggatattcaggttccctacaacatggagcgagtattctggctcctttcagggtctgacagccaagtcacaagggcactgatggaacagttcgaaagaacacaatccgtcaatctacctaaggagctccattcgaagtgggagcgccaggattacgaaaaaatggccgtgatggagtgtgatgggtgctgcgtggagctctgcctaggcaattgcggccctaggagaggaagcgttaccgacatcccgggtaccgcaatggtaagaggagggggatag

SEQ ID NO: 87337 - DNA, 1218 bp, Artificial Sequence
  derived and/or modified sequence
atgtggtacgtgtccacccggggcgtggccccccgggtgaactttgaaggagccctcttcagcggctacgccccagatggcggcctcttcatgcctgaggagctgccccagctggaccggggcaccctgtgccagtggagcaccctgagctacccaggcctggtgaaggagctgtgtgccctcttcatcggcagcgagctgctgcccaaggatgagctgaatgacctgattgaccgggccttcagccgcttccgccaccgggaggtggtgcacctgagccggctgagaaatggcctgaatgtgctggagctgtggcacggcgtgacctacgccttcaaggacctgagcctgagctgcaccacccagttcctgcagtacttcctggagaagcgggagaagcacgtgacagtggtggtgggcaccagcggggacaccggcagcgctgccatcgagagcgtgcagggcgccaagaacatggacatcatcgtgctgctgcccaagggccactgcaccaagatccaggagctgcagatgaccaccgtgctgaagcagaatgtgcacgtgtttggagtggagggcaacagtgatgagctggatgagcccatcaagacagtgtttgctgatgtggcctttgtgaagaagcacaacctgatgagcctgaacagcatcaactggagccgggtgctggtgcagatggcccaccacttctttgcctacttccagtgcacccccagcctggacacccaccccctgcccctggtggaggtggtggtgcccaccggggctgctggcaacctggccgccggctacatcgcccagaagattggcctgcccatccggctggtggtggccgtgaacagaaatgacatcatccacaggacagtgcagcagggcgacttcagcctgtctgaggccgtgaagagcaccctggccagcgccatggacatccaggtgccctacaacatggagagggtcttctggctgctgagcggcagtgacagccaggtgacccgggccctgatggagcagtttgagaggacccagagcgtgaacctgcccaaggagctgcacagcaagtgggagcggcaggactatgagaagatggctgtgatggagtgtgatggctgctgcgtggagctgtgcctgggcaactgtggcccccggcggggctctgtgacagacatccctggaacagccatggtgcggggcggcggctag

SEQ ID NO: 87338 - DNA, 1218 bp, Artificial Sequence
  derived and/or modified sequence
atgtggtacgtgagcacccggggcgtggccccccgggtgaacttcgagggcgcactgttcagcggttacgctcccgatggcgggctcttcatgcctgaggagttgccacagctcgatcgcggcaccctatgccaatggtccacactcagttaccctgggctggtaaaggagttgtgcgccctgttcattggcagcgaactgctgccaaaagacgaactcaatgacctgattgacagagccttctcacgattccggcaccgagaagttgttcaccttagcaggctcaggaatggtttaaatgtactcgagctgtggcacggcgtgacctatgcttttaaggacctgtccctctcatgcaccacacaatttctccagtacttcctcgaaaaacgagagaagcacgtgacagtagtggtgggcacaagcggggacacggggtccgctgcaatcgaaagcgtgcagggcgcaaaaaacatggatatcatcgtgcttctgcctaagggacactgtacgaagatccaagaactgcagatgacaacagttctgaaacaaaacgtgcacgtcttcggcgtggaaggcaatagcgacgagctcgacgagccgatcaaaacagtgtttgctgatgtcgcatttgtgaaaaaacataacttgatgagtctgaatagcattaattggtcccgggtgctcgtgcagatggcgcaccacttcttcgcatactttcagtgtaccccctcacttgacacacacccattgcccctggtcgaggtggttgtcccaaccggtgccgctgggaacctggcggccggttatattgctcaaaagattgggctcccaatcagattagtggtggctgtgaacagaaatgatataatccataggaccgtgcagcagggagatttctctctcagcgaggcagtgaaatccacactcgcgtctgccatggacatccaagtgccctataacatggagagggtgttttggttgttgagcggatcagatagccaggtgacgagggctctcatggagcagtttgaacggactcagagcgttaatcttcctaaggaactgcacagtaaatgggaacgccaagattatgaaaaaatggcggtgatggaatgtgacggatgttgtgtggagctgtgcctaggcaactgtgggccacggagaggttctgtcacagacatacccgggacggcaatggttcgcggcggcggctag

SEQ ID NO: 87339 - DNA, 1218 bp, Artificial Sequence
  derived and/or modified sequence
atgtggtacgtgagcacccggggcgtggccccccgggtgaacttcgagggggccctttttagcggctatgcaccggatggcggcctgtttatgcccgaggaactgcctcagcttgaccgcggcaccctttgccagtggtcaaccctgtcctatcccggcctagtcaaagagctgtgcgcccttttcattgggagcgaacttcttcccaaggatgaactgaatgacttaattgatagagcgttcagtcggttcaggcacagggaggttgtgcatttgagccgcctgcgcaacgggttgaatgtgctggaattatggcatggagtgacatacgccttcaaagatctctcactaagctgcactactcagtttttgcaatatttcctggagaaaagggaaaaacatgtgacagtggtagtcggtaccagtggtgataccggttcagcggccattgagagtgtgcagggtgcaaagaacatggacattattgtactgctgcccaaagggcattgcaccaagatccaggagctgcagatgactaccgtgcttaaacagaatgttcatgtgtttggggtggaaggcaactctgatgagttggatgagccaataaaaaccgtgtttgctgacgtggcctttgttaaaaagcacaatctaatgtcattgaattctattaattggtctcgcgtcctggtacagatggctcatcatttcttcgcctactttcagtgtaccccgagccttgacacacacccccttccactggtcgaagtggttgtaccaaccggagcagctggcaacctggctgccgggtacatcgctcaaaagattggtctccccatacgccttgttgtagctgtaaacagaaacgacattatccaccgaaccgtacagcagggcgattttagcctaagcgaagctgtgaagagcacccttgcgtccgccatggatatccaggttccttacaatatggagagagtcttctggcttctgtccgggtccgattctcaggtgactcgcgctctgatggagcagttcgagaggacccagtccgttaacctgccaaaagagcttcacagtaaatgggagcgtcaggactatgagaagatggcagtcatggaatgcgacggatgctgtgtcgagctgtgcctggggaactgcgggcctcgtcgcggctctgtgaccgatatccctggtaccgctatggtcagagggggaggatag

SEQ ID NO: 87340 - RNA, 1218 nt, Artificial Sequence
  derived and/or modified sequence
augugguaugugagcacacgaggggucgcaccaagggugaauuuugagggagcacuuuuuucugguuaugcacccgauggcggucuauuuaugccugaagaacugccucaguuagacagggggacccugugucaauggucaacacucaguuaucccggacuugugaaggagcucugugcccuguucauagguucagaguugcugccuaaagaugaacuuaacgaccugaucgaucgggcauuuuccagguucagacacagagaggucgugcaccuuagucggcuacguaauggacucaacgugcucgagcuguggcacggugucaccuacgcguucaaagaucuuagucuguccuguacaacacaauucuuacaguacuuccuggagaaacgcgaaaaacauguaacugugguuguuggcacauccggagacacuggcagugccgcaauugaaagcguacagggcgcgaaaaauauggauauuauaguucugcucccuaagggacacuguacaaaaauacaggagcugcagaugacuaccguccuuaagcagaauguacacguguuuggaguggaaggcaauuccgacgaauuggacgagccuauuaaaaccguguuugcagauguagcauuuguuaaaaagcacaauuugaugucccucaacagcaucaacuggucaagggugcuaguccagauggcccaucauuucuucgcauauuuccaguguacuccuagucucgacacacacccccuaccccucguggaggucgucgugcccacuggagcugcaggaaacuuggccgccggauacauugcucagaagaucggccucccuauccguuuagucguagcaguaaaccguaaugacaucauacaccgcacagugcagcagggagacuuuagcuugucagaagcaguuaagagcaccuuagcuagugcuauggacauucaaguucccuacaauauggagcgugucuuuuggcuucugaguggauccgacagccaagugacacgggcccuaauggaacaguuugaacggacgcaaaguguuaaucuucccaaggagcuccacucgaagugggagagacaggacuaugaaaaaauggcagucauggaaugugacgguuguugcguagagcugugcuugggcaacugugguccccgacggggauccgugaccgacaucccugggacagcuauggucaggggcggcggguag

SEQ ID NO: 87341 - RNA, 1218 nt, Artificial Sequence
  derived and/or modified sequence
augugguauguuucaacacgaggaguugcaccucgggugaauuuugagggggcuuuauuuagcggcuacgcacccgacggcggccuguucaugccugaagaacuuccacagcuagaucgaggcacacugugccaguggucuacccuuuccuaucccgggcuggugaaagagcucugcgcccucuuuauuggcucugaguugcugccgaaggaugaacucaacgaucugauugaucgggcauucagcagauuucggcacagggaggugguacacuuaucuaggcucagaaauggucugaacguucucgaguuauggcauggugugaccuacgcauuuaaagacuugagccugagcuguacaacacaguuccugcaguacuuuuuagagaagcgcgagaaacaugucacugucguaguagggacaagcggcgacacuggcucagcagcuaucgaguccgugcagggagcgaaaaauauggauaucaucguucugcugccuaaggggcacuguaccaaaauucaggagcugcagaugacaacaguguuaaaacagaauguccacguguuugggguggaggguaacagcgaugaacuggaugagccuaucaagacaguguucgcagacgucgccuuugucaaaaaacacaaccuuaugucccugaacucaauuaauuggucccggguccucgugcagauggcgcaucacuuuuucgcguacuuccaguguacacccucucuggacacucauccacugccgcuagucgagguaguagugccuacaggagccgccggcaaccuggccgccgguuauauagcucaaaaaauaggucucccaauccgacucgugguggcugugaaccguaaugacauuauccauagaaccguucagcaaggggacuucagcuuguccgaagcugugaagagcacccuggcuucugcuauggacauccaggugcccuauaauauggaacgaguguuuuggcucuugagcgguuccgacucucaggugacacgugcuuugauggagcaguuugaaagaacacagucugugaaccucccuaaagaacuccacucuaaaugggaaaggcaagauuaugagaagauggccgugauggagugcgaugguuguugcguggagcuguguuugggcaauuguggcccacggagaggcagcgugacagauauacccgguaccgcaaugguuaggggggggggauag

SEQ ID NO: 87342 - RNA, 1218 nt, Artificial Sequence
  derived and/or modified sequence
augugguaugugagcacacgaggggucgcaccaagggugaauuuugagggagcacuuuuuucugguuaugcacccgauggcggucuauuuaugccugaagaacugccucaguuagacagggggacccugugucaauggucaacacucaguuaucccggacuugugaaggagcucugugcccuguucauagguucagaguugcugccuaaagaugaacuuaacgaccugaucgaucgggcauuuuccagguucagacacagagaggucgugcaccuuagucggcuacguaauggacucaacguccuggaacuauggcacgggguuacauaugcauucaaggaucugucccuaucuugcacaacgcaguuccuccaauauuuucuggaaaagagagaaaagcaugucaccguaguugugggaacaucaggugauaccggcucugcggcuauugaaagcguccagggggccaaaaauauggauaucauuguuuuacugccaaaagggcacugcaccaagauccaggaacuccaaaugacuacagugcugaagcagaauguucacguauuuggcguggaaggaaacucggaugaguuggaugaacccaucaaaacuguguuugccgauguugccuucguaaagaaacacaaccuuaugagucucaacucuaucaacugguccaggguguuaguccaaauggcacaccacuuuuuugccuauuuccaguguacaccaagccuggacacucacccacucccucucguagaagucgucguuccaaccggcgcagcggguaaucucgcggccggcuauaucgcccaaaagauuggauugccaauucguuuggugguugcugugaaucgcaaugauaucauucaucguaccguccaacagggggauuucagucugagcgaagcuguuaaaagcaccuuggccagcgcgauggauauccaggucccuuacaauauggagcgagucuuuuggcugcuuagcgguucggacucacagguaaccagagcccugauggaacaauucgagcggacacaaucaguuaacuuaccaaaggagcugcauagcaaaugggagcgucaggacuacgagaagauggcagugauggagugugacggcuguuguguugaacugugccuggggaacuguggaccacgccggggcagcgucaccgacauccccgguaccgcaauggugcggggcgggggauag

SEQ ID NO: 87343 - RNA, 1218 nt, Artificial Sequence
  derived and/or modified sequence
augugguacguuuccacacggggaguggcuccgaggguuaauuuugaaggagcucuauucucaggcuacgcccccgacggcggacuguucaugcccgaagagcucccccagcuggacagaggcacccugugccagugguccacacuguccuauccaggcuuggugaaggaacugugcgcacuguucauaggcucagaauuguuaccaaaggacgaacugaaugaucuaaucgacagagcauuuucucguuucagacaccgagaaguagugcaucucagccggcugcguaacggacuuaauguauuagaguuauggcauggggugacauacgcuuucaaggaucucucucugagcugcaccacacaguuucugcaguauuuccucgagaaaagggagaagcacgugacaguaguggugggcaccucuggcgauacagguucugcagccauugaaaguguucaaggggcuaagaacauggacauuaucguucugcucccgaaaggucauugcacuaaaauucaagaacugcaaaugacaacaguuuuaaaacagaauguacacguguucgguguggaagggaacagcgacgagcucgacgagccaaucaagacagucuuugcagauguggccuucguaaaaaagcacaaucucaugucucuaaauucuauuaacuggucaaggguuuuggugcagauggcacaccacuucuucgcguauuuucaaugcacuccaagucucgauacacacccacugccacuggucgaaguuguggucccaacaggcgcugccgggaaucuggccgcaggcuauaucgcgcagaaaaucgggcuuccuauccguuuagucguggccgucaaccgcaacgacaucauucaccgcacgguacagcagggcgacuucucacucucugaagccgugaagucuacguuggcaagcgccauggacauucagguccccuacaacauggaacgcguguucuggcugcuaaguggcucugauucccaaguaacccgcgcucugauggaacaauucgagaggacacagagcguuaaucugcccaaagagcugcacaguaagugggagagacaagauuacgagaaaauggcuguaauggaaugugacggcuguugugucgaauugugccuggguaacuguggaccaagaaggggauccgugaccgauauaccagggacugcgaugguacggggcgggggguag

SEQ ID NO: 87344 - DNA, 681 bp, Artificial Sequence
  derived and/or modified sequence
atggacatcatcgtgctgctgcccaagggccactgcaccaagatccaagagcttcagatgactacagtcctcaaacagaacgtgcatgttttcggggtggaaggcaatagtgacgaactagacgaacccatcaagaccgtctttgcggatgtggcgttcgtgaaaaaacacaacttgatgagcttgaacagtattaattggtcaagggtcctggttcagatggctcatcattttttcgcttacttccagtgtaccccatcgcttgatactcaccccttgccactcgtggaggttgtggtccctactggcgctgccggcaatcttgcagcggggtatatcgcccagaaaataggccttccaattcgtctcgtggtggccgttaataggaatgatataattcaccgcactgtacaacagggggatttttctttgtccgaagctgtcaagtccacccttgcatccgctatggacattcaggttccgtacaatatggagagggtgttttggctgctgagcggctctgatagccaggtgactcgcgctttgatggaacagtttgaacgcacgcagagcgtgaacttacctaaggagctgcacagtaagcacagccctgtgttgccgaggccttgcctgtgctcccaagttcctgggagctgccccggctgctggcctgatccctag

SEQ ID NO: 87345 - DNA, 681 bp, Artificial Sequence
  derived and/or modified sequence
atggacattatagttctccttccgaagggccactgtacgaaaatccaggaactgcagatgaccactgtgcttaagcagaatgtccacgtgttcggggtggagggcaattccgacgagcttgacgagccaattaagaccgtgttcgcggatgtcgctttcgtgaagaagcataatctaatgtctctcaattccattaattggagcagagtcctcgtgcagatggctcaccacttcttcgcgtactttcaatgcaccccaagcctggacactcatccgctcccactcgtggaggtggtagtgccaactggcgctgcagggaatctggcggcaggttatatagcacagaagattggattgcctattcgactggttgttgccgtgaacagaaatgacattatccatcgtaccgtgcaacagggggatttttccttgtccgaagctgtgaagtccactctggccagcgccatggatatacaagtcccatacaacatggaacgagtcttttggctgctgtcaggctcagacagccaggtgaccagggccctgatggaacagtttgaacgtacccagtctgtgaacctgcccaaggaactgcactccaaacactctcccgttttgcccagaccctgcctgtgctctcaggtgccagggtcttgtccgggatgttggccagatccatag

SEQ ID NO: 87346 - DNA, 681 bp, Artificial Sequence
  derived and/or modified sequence
atggacatcattgtcctacttcccaaggggcactgcactaagatccaagaattacagatgaccaccgtgctgaaacaaaatgtccatgtcttcggcgtagaggggaattctgatgagctcgatgaacctattaaaacagtgtttgctgatgtcgcctttgttaagaagcacaacctgatgtctctcaatagcattaattggtctagagtcctggtccagatggcccaccatttcttcgcatatttccagtgcacgccttctctcgatactcacccgttaccacttgtagaggtggtagtgccgacaggtgccgccgggaatttggcagccggctatattgcacaaaaaataggactccccatccgcctggttgtggccgtaaatcgcaacgacatcattcacagaactgtccagcaaggcgacttttccctctcagaggcagtcaagagtacgctggcctccgcaatggacattcaggtgccctacaacatggaacgggtattttggttgctctccggtagcgactcccaagtgactcgcgccctcatggagcagtttgagcgcacccaatccgtcaacttacccaaggaattgcactccaaacactcaccagttctgcccaggccatgcctgtgctcccaggtgccaggctcttgcccaggatgctggcctgacccctag

SEQ ID NO: 87347 - DNA, 681 bp, Artificial Sequence
  derived and/or modified sequence
atggacatcattgtcctacttcccaaggggcactgcactaagatccaagaattacagatgaccaccgtgctgaaacaaaatgtccatgtcttcggcgtagaggggaattctgatgagctcgatgaacctattaaaacagtgtttgctgatgtcgcctttgttaagaagcacaacctgatgtctctcaatagcattaattggtctagagtcctggtccagatggcccaccatttcttcgcatatttccagtgcacgccttctctcgatactcacccgttaccacttgtagaggtggtagtgccaacaggggcagccggaaatcttgctgctggttatatcgcccagaaaattggtttaccgatccgccttgtggttgcagtcaacaggaacgatatcatccatagaacagtgcaacagggagacttcagtctgtccgaggccgtcaagtcaacgctcgcctccgctatggatattcaggtgccctataacatggaacgggtgttctggctactctccgggtctgattcacaggttacacgagccctcatggaacaattcgaacgcacacagagcgtgaacctccctaaagagctgcactccaagcattctcctgtgctccctcgaccttgcctatgctcacaggtgcccggttcatgcccaggctgttggccagatccatag

SEQ ID NO: 87348 - DNA, 681 bp, Artificial Sequence
  derived and/or modified sequence
atggacatcatcgtgctgctgcccaagggccactgcaccaagatccaggagctgcagatgaccaccgtgctgaagcagaacgtgcacgtgttcggcgtggagggcaacagcgacgagctggacgagcccatcaagaccgtgttcgccgacgtggccttcgtgaagaagcacaacctgatgagcctgaacagcatcaactggagcagagtgctggtgcagatggcccaccacttcttcgcctacttccagtgcacccccagcctggacacccaccccctgcccctggtggaggtggtggtgcccaccggcgccgccggcaacctggccgccggctacatcgcccagaagatcggcctgcccatcagactggtggtggccgtgaacagaaacgacatcatccacagaaccgtgcagcagggcgacttcagcctgagcgaggccgtgaagagcaccctggccagcgccatggacatccaggtgccctacaacatggagagagtgttctggctgctgagcggcagcgacagccaggtgaccagagccctgatggagcagttcgagagaacccagagcgtgaacctgcccaaggagctgcacagcaagcacagccccgtgctgcccagaccctgcctgtgcagccaggtgcccggcagctgccccggctgctggcccgacccctag

SEQ ID NO: 87349 - DNA, 681 bp, Artificial Sequence
  derived and/or modified sequence
atggatattatcgtgttgctccctaagggtcattgtacaaagattcaagaactccagatgaccacggtgctgaagcaaaatgtgcacgtcttcggcgtcgagggcaacagtgatgagctggacgaacccatcaagaccgtctttgcagacgttgcttttgtgaaaaaacataacctcatgagtcttaacagcattaattggtcaagggtgctggtgcagatggctcaccacttttttgcgtattttcaatgtactccatccctggatacacatcctctccccttggttgaggtggtggtgccgacgggcgccgctgggaaccttgctgccgggtatatcgcacagaagatcggcctgcctatcaggctcgttgtggccgtaaaccggaatgacattatccaccgtaccgtgcaacagggcgacttctccttgagtgaggctgtaaagagcacactagcgtccgcaatggacattcaggtgccctataatatggagcgggtgttctggctgctgtccggcagtgattctcaggtgactcgggcgcttatggagcagttcgaacgcactcagagcgttaatctgccaaaagagctccatagcaagcactcaccggtcttgccccgcccttgcctctgtagtcaggttcccggaagctgtccaggctgttggcccgatccatag

SEQ ID NO: 87350 - DNA, 681 bp, Artificial Sequence
  derived and/or modified sequence
atggacatcatcgtgctgctgcccaagggccactgcaccaagatccaggagctgcagatgaccaccgtgctgaagcagaatgtgcacgtgtttggagtggagggcaacagtgatgagctggatgagcccatcaagacagtgtttgctgatgtggcctttgtgaagaagcacaacctgatgagcctgaacagcatcaactggagccgggtgctggtgcagatggcccaccacttctttgcctacttccagtgcacccccagcctggacacccaccccctgcccctggtggaggtggtggtgcccaccggggctgctggcaacctggccgccggctacatcgcccagaagattggcctgcccatccggctggtggtggccgtgaacagaaatgacatcatccacaggacagtgcagcagggcgacttcagcctgtctgaggccgtgaagagcaccctggccagcgccatggacatccaggtgccctacaacatggagagggtcttctggctgctgagcggcagtgacagccaggtgacccgggccctgatggagcagtttgagaggacccagagcgtgaacctgcccaaggagctgcacagcaagcacagccctgtgctgccccggccctgcctgtgcagccaggtgcccggcagctgccccggctgctggccagacccctag

SEQ ID NO: 87351 - RNA, 681 nt, Artificial Sequence
  derived and/or modified sequence
auggacaucauuguccuacuucccaaggggcacugcacuaagauccaagaauuacagaugaccaccgugcugaaacaaaauguccaugucuucggcguagaggggaauucugaugagcucgaugaaccuauuaaaacaguguuugcugaugucgccuuuguuaagaagcacaaccugaugucucucaauagcauuaauuggucuagaguccugguccagauggcccaccauuucuucgcauauuuccagugcacgccuucucucgauacucacccguuaccacuuguagaggugguagugccgacaggugccgccgggaauuuggcagccggcuauauugcacaaaaaauaggacuccccauccgccugguuguggccguaaaucgcaacgacaucauucacagaacuguccagcaaggcgacuuuucccucucagaggcagucaagaguacgcuggccuccgcaauggacauucaggugcccuacaacauggaacggguauuuugguugcucuccgguagcgacucccaagugacucgcgcccucauggagcaguuugagcgcacccaauccgucaacuuacccaaggaauugcacuccaaacacucaccaguucugcccaggccaugccugugcucccaggugccaggcucuugcccaggaugcuggccugaccccuag

SEQ ID NO: 87352 - RNA, 681 nt, Artificial Sequence
  derived and/or modified sequence
auggacaucauuguccuacuucccaaggggcacugcacuaagauccaagaauuacagaugaccaccgugcugaaacaaaauguccaugucuucggcguagaggggaauucugaugagcucgaugaaccuauuaaaacaguguuugcugaugucgccuuuguuaagaagcacaaccugaugucucucaauagcauuaauuggucuagaguccugguccagauggcccaccauuucuucgcauauuuccagugcacgccuucucucgauacucacccguuaccacuuguagaggugguagugccaacaggggcagccggaaaucuugcugcugguuauaucgcccagaaaauugguuuaccgauccgccuugugguugcagucaacaggaacgauaucauccauagaacagugcaacagggagacuucagucuguccgaggccgucaagucaacgcucgccuccgcuauggauauucaggugcccuauaacauggaacggguguucuggcuacucuccgggucugauucacagguuacacgagcccucauggaacaauucgaacgcacacagagcgugaaccucccuaaagagcugcacuccaagcauucuccugugcucccucgaccuugccuaugcucacaggugcccgguucaugcccaggcuguuggccagauccauag

SEQ ID NO: 87353 - protein, 438 aa, Artificial Sequence
  derived and/or modified sequence
MESPRTAKGGRDIKMSGDVADSTDARSTLSQVEPGNDRNGLDFNRQIKTEDLSDSLQQTLSHRPCHLSQGPAMMSGNQMSGLNASPCQDMASLHPLQQLVLVPGHLQSVSQFLLSQTQPGQQGLQPNLLPFPQQQSGLLLPQTGPGLASQAFGHPGLPGSSLEPHLEASQHLPVPKHLPSSGGADEPSDLEELEKFAKTFKQRRIKLGFTQGDVGLAMGKLYGNDFSQTTISRFEALNLSFKNMCKLKPLLEKWLNDAESSPSDPSVSTPSSYPSLSEVFGRKRKKRTSIETNIRLTLEKRFQDNPKPSSEEISMIAEQLSMEKEVVRVWFCNRRQKEKRINCPVATPIKPPVYNSRLVSPSGSLGPLSVPPVHSTMPGTVTSSCSPGNNSRPSSPGSGLHASSPTASQNNSKAAVNSASSFNSSGSWYRWNHSTYLH

SEQ ID NO: 87354 - DNA, 1317 bp, Artificial Sequence
  derived and/or modified sequence
atggagtctcctaggacagccaagggaggtcgtgacattaagatgagtggagacgtcgctgatagtactgatgcccgctccacgttgagccaagtggagcctgggaatgataggaatggtttagattttaaccgacagattaagacggaggacctgtctgattccctccagcaaaccctatcccacaggccctgccatctttcccaaggtcccgcaatgatgtccggaaatcagatgtccggcctgaacgcttccccatgccaggacatggcatccctgcacccattacaacagctcgtactggtgccaggtcatttacaatccgtttctcaattccttctgtcccaaacacaacccggacagcaggggctccagcctaatttactgcctttccctcagcagcaatccggactgcttttaccgcagacgggtcccggactggcctcccaagccttcggacatccgggtttgcctggatcatcacttgaaccgcacctggaggcttcacagcacttacccgtacctaagcacttgccctctagtgggggggcggatgagccctcagacttggaggagttggagaagttcgccaagacatttaaacaaagaagaataaaattaggattcacccaaggagacgtcggcttagctatggggaagctctatggtaacgatttctctcagaccactatctcccggtttgaagctctgaatctgtctttcaaaaacatgtgtaaactgaaacctctcttagagaagtggctgaacgatgcagagagttctccaagcgatcccagcgtgtccacccccagttcataccctagcctgtcagaggtgttcggacggaaacgaaaaaagagaacgtctattgagactaacataaggctgactcttgagaagcggtttcaggataatcccaagccctctagtgaggaaatcagcatgattgcagagcaactgagcatggagaaggaggtagttcgagtttggttctgcaataggcggcagaaggaaaagcgaattaactgtcccgttgcaaccccgattaaacctccagtgtacaacagtcggctggtgtccccaagcggaagccttggacctctgtctgtccctccagtgcactcaactatgcccggtaccgtgaccagttcttgctcaccagggaacaactctcgccctagtagccccggcagcgggctgcacgcctcttctccgacagcctctcagaataacagtaaagcagccgtcaactccgccagctcatttaacagcagcggaagttggtaccggtggaaccacagcacatatttgcactag

SEQ ID NO: 87355 - DNA, 1317 bp, Artificial Sequence
  derived and/or modified sequence
atggagagccccaggacagccaagggcggccgggacatcaagatgtctggagatgtggccgacagcacagatgcccggagcaccctgagccaggtggagcctggaaatgacagaaatggcctggacttcaaccggcagatcaagacagaggacctgagtgacagcctgcagcagaccctgagccaccggccctgccacctgagccagggccctgccatgatgagcggcaaccagatgagcggcctgaatgccagcccctgccaggacatggccagcctgcaccccctgcagcagctggtgctggtgcccggccacctgcagagcgtgtcccagttcctgctgagccagacccagcccggccagcagggcctgcagcccaacctgctgcccttcccccagcagcagagcggcctgctgctgccccagacaggccctggcctggccagccaggccttcggccaccctggcctgcccggcagcagcctggagccccacctggaggccagccagcacctgcctgtgcccaagcacctgcccagcagtggaggagcagatgagcccagcgacctggaggagctggagaagtttgccaagaccttcaagcagaggcgcatcaagctgggcttcacccagggagatgtgggcctggccatgggcaagctgtatggaaatgacttcagccagaccaccatcagcagatttgaggccctgaacctgtccttcaagaacatgtgcaagctgaagcccctgctggagaagtggctgaatgatgctgagagcagccccagcgaccccagcgtgtccacccccagcagctaccccagcctgtctgaggtgtttggaaggaagaggaagaagaggaccagcattgagaccaacatccggctgaccctggagaagcgcttccaggacaaccccaagcccagcagcgaggagatctccatgattgctgagcagctgtccatggagaaggaggtggtgcgggtgtggttctgcaacagacggcagaaggagaagaggatcaactgccctgtggccacccccatcaagccccctgtgtacaacagccggctggtgagccccagcggcagcctgggccccctgtctgtgccccctgtgcacagcaccatgcctggcaccgtgaccagcagctgcagccctggcaacaacagccggcccagcagccctggcagcggcctgcacgccagcagccccacagccagccagaacaacagcaaggctgctgtgaacagcgccagcagcttcaacagcagcggctcctggtaccgctggaaccacagcacctacctgcactag

SEQ ID NO: 87356 - DNA, 1317 bp, Artificial Sequence
  derived and/or modified sequence
atggagagcccccggaccgccaagggcggccgggacatcaagatgagcggggatgtggcagattcaaccgatgcccggtccaccctgtctcaggtggagcctgggaacgaccggaacggcctggacttcaacagacagataaaaacggaggacctgtctgacagccttcaacaaaccctgagccatcggccttgccacttgagtcagggacccgctatgatgtccggcaaccagatgtctggtctcaatgcaagcccatgccaggatatggcaagcctccaccccctccagcagctcgttttggttcccgggcacctgcaaagcgtttcccagttcctgctatcccagacccagcccggacaacagggactgcaacccaatctgctgccctttccgcagcaacagtccggacttctgttaccgcagacaggccctggtctggcaagccaggcttttgggcaccctggtctgcctggcagctcacttgagcctcacttagaagcttcacaacatctgcccgttcccaaacacctcccatccagcggcggtgcagacgagccatcagacctggaggagctggaaaagttcgccaaaacctttaagcagcggcgaattaaactgggcttcacacaaggcgatgtagggctcgccatgggcaaactgtacgggaatgacttttctcagaccactatttcccggtttgaagctctgaatctgtcctttaagaacatgtgtaaactgaagcccttactagaaaaatggcttaatgacgccgaatcctccccaagtgacccctctgtgagtaccccctcaagctatccaagcctgtctgaggtgtttggacgcaagaggaagaaacggacgagtatcgaaaccaatattcgcctgactctggagaagcgttttcaggataatccgaaaccgtcatctgaggaaatctctatgatcgccgagcagctctcaatggagaaggaagtcgtaagagtgtggttctgtaacaggcggcagaaggaaaagagaattaactgccccgtggcaaccccgattaaacctccagtgtataattcaaggctggtgagtcctagcggttcattggggcctctatctgtgcctccagtacattcgacgatgcctgggacagtgacctcctcatgcagtccaggaaacaatagccgcccatcatcccccggcagcggtctgcacgccagctctcccactgcctctcagaacaattctaaggccgccgtgaattctgcgtcatctttcaatagctcaggttcctggtaccgttggaatcacagcacgtacctccactag

SEQ ID NO: 87357 - DNA, 1662 bp, Artificial Sequence
  derived and/or modified sequence
ctcactccagcccagagctcaaaaaaccggtttcatggagtctccaagaactgctaaaggaggaagggatatcaagatgagtggggatgtagccgattccacggatgctcgcagcactctcagccaggtggagccaggaaatgatcgaaatggcctagatttcaacaggcagattaaaaccgaagatctcagtgactccctgcagcagaccctctcccatcggccatgccacctgagtcaaggacctgccatgatgtccggaaaccaaatgtctgggctaaatgccagcccatgtcaggacatggcttccctccatccgctccagcagcttgtgctggttcccggccacttacagtctgtatcccagttcctgctatctcagacccagcctgggcagcaaggtctgcagccaaatctcctcccctttccacagcaacaaagcggtctcctcctcccacagactgggccgggactggcatcccaggcatttgggcaccctgggctgccaggatcctctttagaaccccacctggaagcatcccagcatctcccagtgcccaagcatctacccagctctggaggggccgatgagcccagtgacctcgaggagctggagaagtttgccaagaccttcaagcagaggcgcattaagctgggcttcacacagggagatgtggggctggcgatgggaaagctgtatggcaacgacttcagccagaccaccatctcacgatttgaggccctcaacctgagcttcaagaacatgtgcaagctcaagcccctgctggagaagtggctgaatgatgcagagtcctctccgtcagacccctcagtgagcacgcccagctcctaccccagcctcagtgaagtatttggtaggaagagaaagaaacggaccagcatcgagaccaacatccgcctgactctggagaagaggtttcaagataacccaaaacccagctcggaggagatctccatgattgcagagcagttgtccatggagaaggaggtggtgagggtctggttctgcaaccgacgccaaaaggagaagcgaatcaactgccctgtggccacacccatcaaaccacctgtctacaactcccggctggtatctccctcagggtctctgggccccctctctgtccctcctgtccacagtaccatgcctggaacagtaacgtcatcctgttcccctgggaacaacagcaggccttcatctcctggctcaggactccacgccagcagccccactgcatctcaaaataactccaaagcagcagtgaactccgcctccagttttaactcttcaggatcttggtaccgatggaatcattccacctacctccactgagaccaaaaagtttctcctactccagctggccctgtattccccctggaaggaagggaatcatgccttctatatacagacagattgccttcagaagagtggaagaaaatctccactatcaatgaacccagactcttgtcttcttcaagagcaagggcctccggagatccaaactgtgattgaaccaagtgcagactcctaatgctcttgaaatacacagcccctcctaggagcttaccattttcaccttccttgcctatgcccttgccttctagttccaaatattttagccagcttcactgtggcaatagtct

SEQ ID NO: 87358 - DNA, 1317 bp, Artificial Sequence
  derived and/or modified sequence
atggaatcccccagaaccgctaaggggggaagggacataaagatgagcggcgacgtcgccgacagtactgatgccaggagcaccttgagccaagtggaacctggaaacgatcgcaacggcttggactttaaccggcagatcaagactgaagacctttccgattcactgcagcagacactgagtcacagaccctgccacctcagtcaagggcctgcgatgatgtcgggaaaccagatgagcgggcttaatgcgagtccgtgccaggatatggcctcattgcacccactccagcaacttgtacttgtgcccggacatcttcagtccgtgtcccagtttcttttatcccaaactcagccaggacagcagggcttacaacctaacctgctgcccttccctcagcagcagagcggccttctgctcccccagactgggcctggactagcctcccaagcttttggacaccccggtttgccagggagtagcctggagccccatctggaggcctcccagcacctgccggtaccaaaacatcttcctagctcaggaggggcagacgaaccaagtgatctggaggaactggagaagttcgccaagacctttaaacagaggcgaataaaattaggcttcacccagggggatgttgggttagcaatggggaagttatacggtaacgacttctcacaaacaaccatctctcgcttcgaggcacttaacctctccttcaagaacatgtgtaaactgaaaccacttttagagaaatggttgaacgatgcggagtccagcccatccgacccatccgtgtctacaccatccagttaccccagcttgtccgaagtgtttggacgcaagcggaagaagcgaacctctattgaaactaacatcaggttaactctggagaaacgctttcaagataatcccaagccctcatcagaagaaatcagcatgattgcggaacaactgtcaatggagaaagaagtggtgagagtgtggttttgcaatcgacggcagaaggaaaaacgcatcaactgtcctgtggcgacacctataaaaccacctgtctataacagccggttagtgagtccctccggctccctaggaccactctctgttccaccagtgcattcgacaatgccgggaactgttacttccagctgctcccccggtaataactctcggccatccagccccggatcaggcctgcacgcctccagccctacagcgagtcagaataattccaaagccgcagtgaactctgcctcttcgtttaattcatcgggctcatggtatcggtggaatcatagcacctacctccattag

SEQ ID NO: 87359 - DNA, 1317 bp, Artificial Sequence
  derived and/or modified sequence
atggagagccccagaaccgccaagggcggcagagacatcaagatgagcggcgacgtggccgacagcaccgacgccagaagcaccctgagccaggtggagcccggcaacgacagaaacggcctggacttcaacagacagatcaagaccgaggacctgagcgacagcctgcagcagaccctgagccacagaccctgccacctgagccagggccccgccatgatgagcggcaaccagatgagcggcctgaacgccagcccctgccaggacatggccagcctgcaccccctgcagcagctggtgctggtgcccggccacctgcagagcgtgagccagttcctgctgagccagacccagcccggccagcagggcctgcagcccaacctgctgcccttcccccagcagcagagcggcctgctgctgccccagaccggccccggcctggccagccaggccttcggccaccccggcctgcccggcagcagcctggagccccacctggaggccagccagcacctgcccgtgcccaagcacctgcccagcagcggcggcgccgacgagcccagcgacctggaggagctggagaagttcgccaagaccttcaagcagagaagaatcaagctgggcttcacccagggcgacgtgggcctggccatgggcaagctgtacggcaacgacttcagccagaccaccatcagcagattcgaggccctgaacctgagcttcaagaacatgtgcaagctgaagcccctgctggagaagtggctgaacgacgccgagagcagccccagcgaccccagcgtgagcacccccagcagctaccccagcctgagcgaggtgttcggcagaaagagaaagaagagaaccagcatcgagaccaacatcagactgaccctggagaagagattccaggacaaccccaagcccagcagcgaggagatcagcatgatcgccgagcagctgagcatggagaaggaggtggtgagagtgtggttctgcaacagaagacagaaggagaagagaatcaactgccccgtggccacccccatcaagccccccgtgtacaacagcagactggtgagccccagcggcagcctgggccccctgagcgtgccccccgtgcacagcaccatgcccggcaccgtgaccagcagctgcagccccggcaacaacagcagacccagcagccccggcagcggcctgcacgccagcagccccaccgccagccagaacaacagcaaggccgccgtgaacagcgccagcagcttcaacagcagcggcagctggtacagatggaaccacagcacctacctgcactag

SEQ ID NO: 87360 - protein, 338 aa, Artificial Sequence
  derived and/or modified sequence
MTTTLVSATIFDLSEVLCKGNKMLNYSAPSAGGCLLDRKAVGTPAGGGFPRRHSVTLPSSKFHQNQLLSSLKGEPAPALSSRDSRFRDRSFSEGGERLLPTQKQPGGGQVNSSRYKTELCRPFEENGACKYGDKCQFAHGIHELRSLTRHPKYKTELCRTFHTIGFCPYGPRCHFIHNAEERRALAGARDLSADRPRLQHSFSFAGFPSAAATAAATGLLDSPTSITPPPILSADDLLGSPTLPDGTNNPFAFSSQELASLFAPSMGLPGGGSPTTFLFRPMSESPHMFDSPPSPQDSLSDQEGYLSSSSSSHSGSDSPTLDNSRRLPIFSRLSISDD

SEQ ID NO: 87361 - protein, 321 aa, Artificial Sequence
  derived and/or modified sequence
MTTTLVSATIFDLSEVLCKGNKMLNYSAPSAGGCLLDRKAVGTPAGGGFPRRHSVTLPSSKFHQNQLLSSLKGEPAPALSSRDSRFRDRSFSEGGERLLPTQKQPFEENGACKYGDKCQFAHGIHELRSLTRHPKYKTELCRTFHTIGFCPYGPRCHFIHNAEERRALAGARDLSADRPRLQHSFSFAGFPSAAATAAATGLLDSPTSITPPPILSADDLLGSPTLPDGTNNPFAFSSQELASLFAPSMGLPGGGSPTTFLFRPMSESPHMFDSPPSPQDSLSDQEGYLSSSSSSHSGSDSPTLDNSRRLPIFSRLSISDD

SEQ ID NO: 87362 - DNA, 3026 bp, Artificial Sequence
  derived and/or modified sequence
gtgtgttgggggtggtgagaatgcgctctcttcggcccgccccgtcctttccaaagaaacgtgctcataatggggtgacctaattacatcgcaatggaactcaatcttagccactccgcagcaccgggtttcataacagactcggcggcctcgagtgctgggaagaaacgtgcgagggccgaggggggcggcggagcccgcgtggaaatcggaaagaagcgcagccctgcgacttccgcctgggtcatcacgccagcagtcgggccaaggcgcagggggcgggtgggggactcgttaactttttatttgggtgggcggcatccaaacctaacagtatatattttatcattttcaagggagtcatgctccattgcgggcccttcggtttcgtggctcccatgtccccctctccacctcccgccaaaacggcgcagcgtgacaagccatatgttccactccggtgggggcgagagagaagcaacaataagttaaaagtgccgcctccctccacctctttaccttcattcttaccaaagtaaccttttttcattgttctagagtcttgaggtgtgtgtggggaggatggaggaggagggagggttgtggcgccgcccagaattcggagcgcgcgtggaaagtagtgagttgctcggtgggctttttctgggaggaaggggcattcaggaaggattagggttttcttgactaaaaagtttaaagattggatgcgtgaaaagaaacggcacgcctaggcctggtaaaacaaacaatcgtcccgggttgtggtctttttttgcggcgccccccacccgcccacacccggagagcgccggctgcaaagcgagcgcgagtgtcgacgcgtgcggcgcactaaattgtgccgcgctcgcccccgccagaccatgtcctcctggggaaaaagtttccctagtccccccagcagcgcgccccaccctacgccccgctggaaaaaaaacagcaacataaaatcctaggcttgaacattctgtgcgtcccaaatttctaatgtcctcggcctgcccggtttgccgaagggagccgagtgtcgaagagaagtcgggaaaaggtaagttgtgcagacacttggggaagtttcaaggagaccgccagctcaagatggaaaccgcggcccgggcgctaaggacgggcttcagctcccgctggcaaaaagagaaagtcgagcccgccttcctgcccaacaaaaaacaacaacatgacaacaagaaccccggagggagtggaatgagtgacgtcacagccgcgctctgaggctgacaaaggagggggcgcgcccctcccgctctgcgcccgcgcggccccggagagggggcgcctgaagcgccgggtagggaagtcagccgacttgaaacttttcctcttaaagaaaaaaaaaaaaaagttgtgcgcggctcacagtggggttttttttttccgccttcttttctcgtctcccctcccccttcttccttttgaaagtttcttctcctccccctgccccccctccccgcctgaccgcatggctgattcaactccagtgtcaatcaacttctttttcctcctcttcctcatttaaataagtttaaagctcctcctccccccggcccaccaaatctgaactttataaattgggctttgcgcgccccagcccggagtcagaaaggcgaggggcgccgggaactggcgtgtgggactccagacaggagaggctgcgccttccccgcaccgggaccttcgcgacacaccagatcctcgcccctggctcgcgcgaacgcacaggatgaccaccaccctcgtgtctgccaccatcttcgacttgagcgaagttttatgcaagggtaacaagatgctcaactatagtgctcccagtgcagggggttgcctgctggacagaaaggcagtgggcacccctgctggtgggggcttccctcggaggcactcagtcaccctgcccagctccaagttccaccagaaccagctcctcagcagcctcaagggtgagccagcccccgctctgagctcgcgagacagccgcttccgagaccgctccttctcggaagggggcgagcggctgctgcccacccagaagcagcccgggggcggccaggtcaactccagccgctacaagacggagctgtgccgcccctttgaggaaaacggtgcctgtaagtacggggacaagtgccagttcgcacacggcatccacgagctccgcagcctgacccgccaccccaagtacaagacggagctgtgccgcaccttccacaccatcggcttttgcccctacgggccccgctgccacttcatccacaacgctgaagagcgccgtgccctggccggggcccgggacctctccgctgaccgtccccgcctccagcatagctttagctttgctgggtttcccagtgccgctgccaccgccgctgccaccgggctgctggacagccccacgtccatcaccccaccccctattctgagcgccgatgacctcctgggctcacctaccctgcccgatggcaccaataacccttttgccttctccagccaggagctggcaagcctctttgcccctagcatggggctgcccgggggtggctccccgaccaccttcctcttccggcccatgtccgagtcccctcacatgtttgactctccccccagccctcaggattctctctcggaccaggagggctacctgagcagctccagcagcagccacagtggctcagactccccgaccttggacaactcaagacgcctgcccatcttcagcagactttccatctcagatgactaagccagggtctgcaggaaggaaggctgaaaaagcggacgaagattttgacttaagtgggactttgtgatttaattttttcttttttttaagtggggaggaaggggaagctagatggactaggagagacttgattttggtgctaaagttccccagttcatatgtgacatctttttaaaaaaaataacaacaaaaaaaaaatgagagaaaagct

SEQ ID NO: 87363 - DNA, 1727 bp, Artificial Sequence
  derived and/or modified sequence
gaagaatttgggggattttgcaaatgacctgaagcctgagaggaagtgcaacactgcagggctctcaggagggggtaccctgctgacgcctgtgactaggcctaaccttctggggtcctgcggcccagtgctgcacactgtcatctgccttgaggtgcgcctggggtccagattggccgatgaatacgtacacccgcagcgcctccttcactccgaagactttcactttcccccttgcacaaaaccgaacatcccaccccaccaccacctccaagctaaaatacctgggccgcccctccccacgaagggacgcgctccaggcgaatggggagggcccggaagtcgggcctgggacagaggagccggcccaccgcctcccggtcggaagcggcagtgcaggtgaggcggcggccagcctggggactgcgcgggtaaggagcgggagggcggaatgcaccgcgaagttggcgggggacggccacgcacgcctcgcctcggccttcctgcaccgtagggccgccctcccgccacccctgggcacctgtcgaccacgtctgggcgagggcgggtcggctcccgccctcgggccctcaccgcggcggggacgccgggtcagcgaagggttaagggactcgctccctcctctcggctccctcacccttggaaagtccccgaaatgacgtttcaacccgacaatttaaaaaagagtttaattatagagacaggctctgggagctggaacaaacccttggtcggcggggccggtaaacaactcgggagcgagcgggctaggccagtcgcagccttgcggagcccgcgcccccggggagagggggaggggagggcctccgggagttggaaaagccgaggaaattcgaggaatcagctttctttggaaaaatccactttgtagccattctggggcgcctgatggtgctcctggccggtcccgcagccttggagggaaagcggcgccgcccgaagcaggggcatagccggtgccccgcggggacaggccctgggccgggaagggggccccgcccgctcccagtccccttcccctttgcttttttccagcccctcctccggtccccccagctgagcttcgcgaaccctcgggagttaaagaccagccggcctcttttttggggggggtggggggtgggggagcgggaatgggtggaggccgggggaataaaaaaccgaaatagcttcacatcagaactcagactaaccttgtggtttcaacgcgcactctgctctgtcctgaaatctggaactcattacctcatcaccaagaaactgcacgaaatctctcccccaccgccccaacacccacttgggaaaggaacgagcaaacatccctctaagaaagaaacctacacttgaatgatttaaattaaggtggatggaagttatttccctttctggcgcttgccagatttcaagaaaagctgaaaaatgggagcgggggagggaagcaacagacggctggagggcagcagcagaacaagcgaggggcagcagccgagttaaagtgggggccatccatttcgggcagaggagacaaatgaaagccgaccccgctgggatcacgtaggttcgtggctgcagcaaaagttgggtttcacaaagttgaaaaacagccggtttctcaaacaattgtgatttggaaggtttcgctgggtttgcccagatgtttacgaataaataagaaatgcagtttt

SEQ ID NO: 87364 - DNA, 1236 bp, Artificial Sequence
  derived and/or modified sequence
ggagtcagaaaggcgaggggcgccgggaactggcgtgtgggactccagacaggagaggctgcgccttccccgcaccgggaccttcgcgacacaccagatcctcgcccctggctcgcgcgaacgcacaggatgaccaccaccctcgtgtctgccaccatcttcgacttgagcgaagttttatgcaagggtaacaagatgctcaactatagtgctcccagtgcagggggttgcctgctggacagaaaggcagtgggcacccctgctggtgggggcttccctcggaggcactcagtcaccctgcccagctccaagttccaccagaaccagctcctcagcagcctcaagggtgagccagcccccgctctgagctcgcgagacagccgcttccgagaccgctccttctcggaagggggcgagcggctgctgcccacccagaagcagccctttgaggaaaacggtgcctgtaagtacggggacaagtgccagttcgcacacggcatccacgagctccgcagcctgacccgccaccccaagtacaagacggagctgtgccgcaccttccacaccatcggcttttgcccctacgggccccgctgccacttcatccacaacgctgaagagcgccgtgccctggccggggcccgggacctctccgctgaccgtccccgcctccagcatagctttagctttgctgggtttcccagtgccgctgccaccgccgctgccaccgggctgctggacagccccacgtccatcaccccaccccctattctgagcgccgatgacctcctgggctcacctaccctgcccgatggcaccaataacccttttgccttctccagccaggagctggcaagcctctttgcccctagcatggggctgcccgggggtggctccccgaccaccttcctcttccggcccatgtccgagtcccctcacatgtttgactctccccccagccctcaggattctctctcggaccaggagggctacctgagcagctccagcagcagccacagtggctcagactccccgaccttggacaactcaagacgcctgcccatcttcagcagactttccatctcagatgactaagccagggtagggagggacctcctgcctactccagcccctaccctgcacccacatcccataccctcttctccctacccatcccattccccacaggccctacattaacaaggttaagctcaacccctttcccccagcacctca

SEQ ID NO: 87365 - DNA, 3190 bp, Artificial Sequence
  derived and/or modified sequence
gtttcttctcctccccctgccccccctccccgcctgaccgcatggctgattcaactccagtgtcaatcaacttctttttcctcctcttcctcatttaaataagtttaaagctcctcctccccccggcccaccaaatctgaactttataaattgggctttgcgcgccccagcccggagtcagaaaggcgaggggcgccgggaactggcgtgtgggactccagacaggagaggctgcgccttccccgcaccgggaccttcgcgacacaccagatcctcgcccctggctcgcgcgaacgcacaggatgaccaccaccctcgtgtctgccaccatcttcgacttgagcgaagttttatgcaagggtaacaagatgctcaactatagtgctcccagtgcagggggttgcctgctggacagaaaggcagtgggcacccctgctggtgggggcttccctcggaggcactcagtcaccctgcccagctccaagttccaccagaaccagctcctcagcagcctcaagggtgagccagcccccgctctgagctcgcgagacagccgcttccgagaccgctccttctcggaagggggcgagcggctgctgcccacccagaagcagcccgggggcggccaggtcaactccagccgctacaagacggagctgtgccgcccctttgaggaaaacggtgcctgtaagtacggggacaagtgccagttcgcacacggcatccacgagctccgcagcctgacccgccaccccaagtacaagacggagctgtgccgcaccttccacaccatcggcttttgcccctacgggccccgctgccacttcatccacaacgctgaagagcgccgtgccctggccggggcccgggacctctccgctgaccgtccccgcctccagcatagctttagctttgctgggtttcccagtgccgctgccaccgccgctgccaccgggctgctggacagccccacgtccatcaccccaccccctattctgagcgccgatgacctcctgggctcacctaccctgcccgatggcaccaataacccttttgccttctccagccaggagctggcaagcctctttgcccctagcatggggctgcccgggggtggctccccgaccaccttcctcttccggcccatgtccgagtcccctcacatgtttgactctccccccagccctcaggattctctctcggaccaggagggctacctgagcagctccagcagcagccacagtggctcagactccccgaccttggacaactcaagacgcctgcccatcttcagcagactttccatctcagatgactaagccagggtagggagggacctcctgcctactccagcccctaccctgcacccacatcccataccctcttctccctacccatcccattccccacaggccctacattaacaaggttaagctcaacccctttcccccagcacctcagaatgtgccctccctctccccctcataaccccacctaacataaggacaagtcaatttgtcagtagcttcttctggcttgaaaccccctccctggattttatagcccacttaccatgcataacagacaagtcccatattttgtcagtagatgcctttttttttccggcttaagccttaagtgccaaatcacaagagaaaaagcagtaacagtttacagaagcaacttagtgccttgtaatctaactttgtcactgtgactacattacctcttcagcgccagagggcacccgtgggcctcccggagcctctgcccatggcggggtggagacccggaaccagcagccccctccactggcgacacaactgcaccttccctcatttcagtctcccgcacacttattcctcctcccctcttcccggtggcacctctccacctgtacccgcccccccaccccccccacccctgccccttggaagagttgttgccagaccagggttttgggggaaacctgtcttgacattcaaaacctttttcttcccgatctgaacccctgttgactaatcttgcctgggtttgtgtaggtctgcaggaaggaaggctgaaaaagcggacgaagattttgacttaagtgggactttgtgatttaattttttcttttttttaagtggggaggaaggggaagctagatggactaggagagacttgattttggtgctaaagttccccagttcatatgtgacatctttttaaaaaaaataacaacaaaaaaaaaatgagagaaaagctaaaaaaaaaaaagtaaggggtgagcagttaatggtattcattccacatacaatatctgtgtaaaacgatttcctgtagaagtagctttaatggtttttgctctagaataccgtaggtctatccttagagcactcacgccatgctttcttccctgggttttaaacttcatataactttcagaaattggagagcaaaaattttgcttgtcactgcacatcaatataaaaaagcttatttaacttatcaaaacgtatttattgccaaactatgcttttttttgttaattttgttcatatttatcgggatgacaaatccatagaatatattcttttatgttaaattatgatcttcatattaatcttaaaattttgtgacgtgtctttttcctttttttccacagttttaatatattattcttcaacgacattttttgtaactttacacttttttggttattttattttaaaaaaatgaaaaattaatttaaaaaaatgcaaaaaactgttggattatttattttagaaattcccccctttgtgttggactgcaaattgagtttctttctctttaggcctttcacaactaggactgagaatgtatgtaaaagttctgtgacagtacagaaggaaaacaactttttatgtatagcttctaaaaggggaaaaaaaaaaaaagagaaaccctttgacttccacgtgcccatctcaagacattccactcacagatttgaggttctggattccaggtctggagttttccaatgttaatgtaaacagaactggcacacacacattaagatgaatgtaattattattcctcttgctggtcactaccgtcgctttctatttctctttctttgtgtgaatttatttaaaagaaaaaaaaactttttgtaacgactatttgcagtttaaaaatcaataaaccccgttttttcaagaaa

SEQ ID NO: 87366 - DNA, 1365 bp, Artificial Sequence
  derived and/or modified sequence
atggccgacagcgaggccctgcccagcctggccggcgaccccgtggccgtggaggccctgctgagagccgtgttcggcgtggtggtggacgaggccatccagaagggcaccagcgtgagccagaaggtgtgcgagtggaaggagcccgaggagctgaagcagctgctggacctggagctgagaagccagggcgagagccagaagcagatcctggagagatgcagagccgtgatcagatacagcgtgaagaccggccaccccagattcttcaaccagctgttcagcggcctggacccccacgccctggccggcagaatcatcaccgagagcctgaacaccagccagtacacctacgagatcgcccccgtgttcgtgctgatggaggaggaggtgctgagaaagctgagagccctggtgggctggagcagcggcgacggcatcagcgccctgtgccactacagcatccagaagggcgccgccttcctgggcctgggcaccgacagcgtgagagtggtgaaggccgacgagagaggcaagatggtgcccgaggacctggagagacagatcggcatggccgaggccgagggcgccgtgcccttcctggtgagcgccaccagcggcaccaccgtgctgggcgccttcgaccccctggaggccatcgccgacgtgtgccagagacacggcctgtggctgcacgtggacgccgcctggggcggcagcgtgctgctgagccagacccacagacacctgctggacggcatccagagagccgacagcgtggcctggaacccccacaagctgctggccgccggcctgcagtgcagcgccctgctgctgcaggacaccagcaacctgctgaagagatgccacggcagccaggccagctacctgttccagcaggacaagttctacgacgtggccctggacaccggcgacaaggtggtgcagtgcggcagaagagtggactgcctgaagctgtggctgatgtggaaggcccagggcgaccagggcctggagagaagaatcgaccaggccttcgtgctggccagatacctggtggaggagatgaagaagagagagggcttcgagctggtgatggagcccgagttcgtgaacgtgtgcttctggttcgtgccccccagcctgagaggcaagcaggagagccccgactaccacgagagactgagcaaggtggcccccgtgctgaaggagagaatggtgaaggagggcagcatgatgatcggctaccagccccacggcaccagaggcaacttcttcagagtggtggtggccaacagcgccctgacctgcgccgacatggacttcctgctgaacgagctggagagactgggccaggacctgtag

SEQ ID NO: 87367 - DNA, 1482 bp, Artificial Sequence
  derived and/or modified sequence
atggccgacagcgaggccctgcccagcctggccggcgaccccgtggccgtggaggccctgctgagagccgtgttcggcgtggtggtggacgaggccatccagaagggcaccagcgtgagccagaaggtgtgcgagtggaaggagcccgaggagctgaagcagctgctggacctggagctgagaagccagggcgagagccagaagcagatcctggagagatgcagagccgtgatcagatacagcgtgaagaccggccaccccagattcttcaaccagctgttcagcggcctggacccccacgccctggccggcagaatcatcaccgagagcctgaacaccagccagtacacctacgagatcgcccccgtgttcgtgctgatggaggaggaggtgctgagaaagctgagagccctggtgggctggagcagcggcgacggcatcttctgccccggcggcagcatcagcaacatgtacgccgtgaacctggccagataccagagataccccgactgcaagcagagaggcctgagaaccctgccccccctggccctgttcaccagcaaggagtgccactacagcatccagaagggcgccgccttcctgggcctgggcaccgacagcgtgagagtggtgaaggccgacgagagaggcaagatggtgcccgaggacctggagagacagatcggcatggccgaggccgagggcgccgtgcccttcctggtgagcgccaccagcggcaccaccgtgctgggcgccttcgaccccctggaggccatcgccgacgtgtgccagagacacggcctgtggctgcacgtggacgccgcctggggcggcagcgtgctgctgagccagacccacagacacctgctggacggcatccagagagccgacagcgtggcctggaacccccacaagctgctggccgccggcctgcagtgcagcgccctgctgctgcaggacaccagcaacctgctgaagagatgccacggcagccaggccagctacctgttccagcaggacaagttctacgacgtggccctggacaccggcgacaaggtggtgcagtgcggcagaagagtggactgcctgaagctgtggctgatgtggaaggcccagggcgaccagggcctggagagaagaatcgaccaggccttcgtgctggccagatacctggtggaggagatgaagaagagagagggcttcgagctggtgatggagcccgagttcgtgaacgtgtgcttctggttcgtgccccccagcctgagaggcaagcaggagagccccgactaccacgagagactgagcaaggtggcccccgtgctgaaggagagaatggtgaaggagggcagcatgatgatcggctaccagccccacggcaccagaggcaacttcttcagagtggtggtggccaacagcgccctgacctgcgccgacatggacttcctgctgaacgagctggagagactgggccaggacctgtag

SEQ ID NO: 87368 - DNA, 1365 bp, Artificial Sequence
  derived and/or modified sequence
atggccgattccgaggcacttccttcgttggccggggaccccgttgccgtggaggcactcctccgggccgtttttggagtggtggtcgatgaggccattcagaaaggaacctccgtctcccagaaagtctgtgagtggaaagagcctgaagaactgaaacagctgctggatctggagctacgtagccagggggaatctcagaaacagatcctggagcgctgtcgtgccgtgattagatactccgtaaagaccggtcatccccgtttcttcaatcaactcttttctggactggatccgcatgctttggcagggcgtataatcacggagagtctgaacacttcccagtatacttatgagattgcccccgtcttcgtattgatggaggaggaggtgctgcgcaagctgcgtgctcttgtcggttggtcaagtggagatgggatcagcgccctctgccattactccatccagaaaggagccgccttccttggtctcggaacggattcagtgagagtggttaaggccgacgaacgggggaaaatggtccctgaagaccttgaacgacagattggcatggcggaagcagaaggcgcggtacccttcttggtcagtgcgaccagcggtactactgtgctgggggctttcgaccccctggaagctatcgctgacgtgtgtcaacggcatggcttgtggctgcatgtggatgctgcatggggcggatcagtcctgcttagccagacacacaggcacctcttagatgggatccagcgtgcagactcagttgcctggaatcctcataaattgcttgcagctggactacaatgctccgccctcctgttgcaggatacaagcaacctactcaaacgctgccacgggtcccaggcgagctacttgttccagcaggataagttttatgacgtcgcactggacacaggcgataaggtagttcaatgtgggagaagggtcgattgtctgaaattgtggctaatgtggaaagctcagggcgatcagggactcgaacgcagaatagaccaagccttcgtgctcgctcgatatctggttgaggaaatgaagaagagagagggcttcgagctggtgatggagcctgagtttgtaaacgtctgcttctggtttgtccctccaagccttagaggtaaacaggagtccccagattatcatgagcgcctgagtaaagtcgcacccgtcttgaaagaaagaatggtaaaagagggatctatgatgattggctaccaacctcacggaacccggggtaattttttcagagtcgtcgtcgcaaattccgctctcacctgcgctgatatggacttcttgttgaatgaactagagagattaggacaagatctctag

SEQ ID NO: 87369 - DNA, 1482 bp, Artificial Sequence
  derived and/or modified sequence
atggctgacagtgaggcccttccctcattagccggagatcctgtcgccgttgaggccctcctccgcgcagtattcggggtggtggttgatgaagcgatccagaagggcacatctgtgagtcagaaggtctgcgaatggaaggagcccgaggaattaaagcagttgctggacctggagttgcggtctcagggcgagtcacaaaagcagatattggaaagatgcagagctgtaattcggtatagtgtgaagacgggccatcctaggttctttaaccaattattttccggactggacccacatgcactcgccggacgtatcatcaccgagtccctgaatacctcacagtatacctacgagatcgcccccgtgttcgtgctgatggaggaagaagtcctccggaagttgagggcgctcgttggctggagtagcggagatggaatcttttgccctggcggcagcattagtaacatgtacgccgtgaatctcgcacgctaccagaggtacccggactgcaaacagcggggcctaaggacattgccaccccttgctctctttacctccaaagagtgtcactattccatccaaaaaggtgccgcattcctgggtctaggaaccgatagcgtacgggtggtgaaagcagatgaacgcggcaaaatggtgcctgaggatctggaaaggcaaatcggaatggcggaggccgaaggagctgtccccttccttgtctccgcaaccagtggcaccaccgttctcggcgcttttgatcccctggaggctatagccgacgtgtgccagaggcacgggctctggctccacgtggatgctgcatggggtggttcagtcctgctgtctcagacacacaggcacttattagacggcatccagagggcggactctgtagcgtggaaccctcataaactgctagcggcagggctgcaatgctcagctctgctgctgcaagatacctcaaacctgctgaagagatgccacggcagccaggcgtcttatctgtttcagcaggataagttttatgacgtggcattggataccggcgataaggtggtccagtgcggaaggagagtggattgcctcaaactttggctgatgtggaaggcccagggagatcagggcctggagaggagaatcgatcaggcctttgttcttgcccgatacctggtcgaagagatgaaaaagcgggagggttttgagttagtgatggagccagaatttgtgaatgtatgcttctggtttgtccctccttcactgagaggcaagcaggagagcccagactaccatgagcgactctcaaaggtcgcgccagttctcaaagagcggatggtcaaagaaggcagcatgatgatcggttatcaaccgcatggtactcgaggcaactttttcagggtggtcgtggcgaactctgccttgacctgtgcagacatggatttcctgctgaacgaactggagcggctgggccaggacctgtag

SEQ ID NO: 87370 - DNA, 1365 bp, Artificial Sequence
  derived and/or modified sequence
atggctgacagcgaggccctgcccagcctggccggggaccctgtggccgtggaggccctgctgcgggctgtgtttggagtggtggtggatgaggccatccagaagggcacctctgtgtcccagaaggtgtgtgagtggaaggagcctgaggagctgaagcagctgctggacctggagctgcggagccagggcgagagccagaagcagatcctggagcgctgccgggccgtcatccgctacagcgtgaagacaggccacccccgcttcttcaaccagctgttcagcggcctggacccccacgccctggccggccgcatcatcacagagagcctgaacaccagccagtacacctatgagatcgcccctgtgtttgtgctgatggaggaggaggtgctgaggaagctgcgggccctggtgggctggagcagtggagatggcatcagcgccctgtgccactacagcatccagaagggagctgccttcctgggcctgggcacagacagcgtgcgggtggtgaaggcagatgagcggggcaagatggtgcctgaggacctggagcggcagatcggcatggccgaggccgagggcgctgtgcccttcctggtgtctgccaccagcggcaccaccgtgctgggcgcctttgaccccctggaggccatcgcagatgtgtgccagagacatggcctgtggctgcacgtggatgctgcctggggcggctctgtgctgctgagccagacccaccgccacctgctggatggcatccagagagctgacagcgtggcctggaacccccacaagctgctggccgccggcctgcagtgcagcgccctgctgctgcaggacaccagcaacctgctgaagcgctgccacggcagccaggccagctacctgttccagcaggacaagttctatgatgtggccctggacaccggggacaaggtggtgcagtgtggcagaagagtggactgcctgaagctgtggctgatgtggaaggcccagggcgaccagggcctggagaggagaattgaccaggcctttgtgctggcccgctacctggtggaggagatgaagaagcgggagggctttgagctggtgatggagcctgagtttgtgaatgtgtgcttctggtttgtgccccccagcctgcggggcaagcaggagagcccagactaccacgagcggctgagcaaggtggcccctgtgctgaaggagaggatggtgaaggagggctccatgatgattggctaccagccccacggcacccggggcaacttcttccgggtggtggtggccaacagcgccctgacctgtgccgacatggacttcctgctgaatgagctggagcggctgggccaggacctgtag

SEQ ID NO: 87371 - DNA, 1482 bp, Artificial Sequence
  derived and/or modified sequence
atggctgacagcgaggccctgcccagcctggccggggaccctgtggccgtggaggccctgctgcgggctgtgtttggagtggtggtggatgaggccatccagaagggcacctctgtgtcccagaaggtgtgtgagtggaaggagcctgaggagctgaagcagctgctggacctggagctgcggagccagggcgagagccagaagcagatcctggagcgctgccgggccgtcatccgctacagcgtgaagacaggccacccccgcttcttcaaccagctgttcagcggcctggacccccacgccctggccggccgcatcatcacagagagcctgaacaccagccagtacacctatgagatcgcccctgtgtttgtgctgatggaggaggaggtgctgaggaagctgcgggccctggtgggctggagcagtggagatggcatcttctgccctgggggcagcatcagcaacatgtatgctgtgaacctggcccgctaccagcgctacccagactgcaagcagaggggcctgcggaccctgccccccctggccctcttcaccagcaaagaatgccactacagcatccagaagggggccgccttcctgggcctgggcacagattctgtgcgggtggtgaaggcagatgagcggggcaagatggtgcctgaggacctggagcggcagatcggcatggccgaggccgagggcgctgtgcccttcctggtgtctgccaccagcggcaccaccgtgctgggcgcctttgaccccctggaggccatcgcagatgtgtgccagagacatggcctgtggctgcacgtggatgctgcctggggcggctctgtgctgctgagccagacccaccgccacctgctggatggcatccagagagctgacagcgtggcctggaacccccacaagctgctggccgccggcctgcagtgcagcgccctgctgctgcaggacaccagcaacctgctgaagcgctgccacggcagccaggccagctacctgttccagcaggacaagttctatgatgtggccctggacacaggagacaaggtggtgcagtgtggccggcgggtggactgcctgaagctgtggctgatgtggaaggcccagggcgaccagggcctggagaggagaattgaccaggcctttgtgctggcccgctacctggtggaggagatgaagaagcgggagggctttgagctggtgatggagcctgagtttgtgaatgtgtgcttctggtttgtgccccccagcctgcggggcaagcaggagagcccagactaccacgagcggctgagcaaggtggcccctgtgctgaaggagaggatggtgaaggagggctccatgatgattggctaccagccccacggcacccggggcaacttcttccgggtggtggtggccaacagcgccctgacctgtgccgacatggacttcctgctgaatgagctggagcggctgggccaggacctgtag

SEQ ID NO: 87372 - DNA, 1365 bp, Artificial Sequence
  derived and/or modified sequence
atggccgacagcgaggccctgcccagcctggccggcgaccccgtggccgtagaagctttactccgtgccgtcttcggggtggtagtcgacgaggcaatacaaaaagggacctcagttagtcagaaagtatgtgaatggaaggaaccggaggagctgaagcagctcctggatttagagcttcgctctcaaggcgagtcacagaagcagatcctggagcggtgtcgggccgttatccggtattctgttaagaccggacaccccaggttcttcaaccagctgttttcaggattagacccacacgccctagcaggaaggatcatcaccgaaagcttgaacacctcacagtatacctacgagatcgcacccgtttttgtgcttatggaagaagaggtgcttagaaagctgagggccctcgtgggctggagcagcggggatgggatttctgcactgtgccattactcgattcaaaaaggcgccgcattcctcggactcggtaccgactcagtacgggttgtcaaggcggatgagcggggcaagatggttcccgaagacttggaacggcagattggcatggctgaggctgagggcgctgttccctttttggtgtctgccacctccggcaccaccgtgctcggcgcctttgacccattagaggccatcgctgatgtctgtcagcgccatgggctgtggttacacgtagatgctgcctggggagggtcagtccttctctcccagacccatagacacttactggacggcatacagcgcgccgattcggtagcgtggaaccctcataaactgctcgccgccggattacaatgcagtgcgcttctgttgcaggacacctccaatctgctcaagaggtgccatggtagccaggcctcttacctgttccaacaagacaagttctacgacgtcgccctcgatacaggagacaaagtcgtgcaatgtggacgccgagtggattgtctgaaactgtggctgatgtggaaagcccagggagatcaaggactggaacggaggattgaccaggcttttgtgctcgctcgctatctagtagaagagatgaaaaaaagggaaggctttgagctagtgatggagccagagttcgtaaatgtgtgtttttggtttgtgccgccttctcttcgagggaaacaggagtctcctgactaccacgaaaggttgagcaaggttgctccggttctcaaggagcgcatggtgaaggagggctccatgatgatcggctaccagccacatggaacgcgaggcaacttttttcgggtagtggtagctaatagcgctttaacgtgcgcagacatggacttcctactgaacgagctagagaggctgggacaggatctgtag

SEQ ID NO: 87373 - DNA, 1482 bp, Artificial Sequence
  derived and/or modified sequence
atggccgacagcgaggccctgcccagcctggccggcgaccccgtggccgtggaagctctcctgcgggccgtattcggcgtcgttgtagacgaggccatccagaaggggacgagcgtctcgcagaaagtgtgtgagtggaaagagcctgaggagctcaaacagctgctggacttagagctgcgctcccagggagagtcccagaagcaaattctggaacgctgcagggcagttatcaggtacagcgttaaaaccgggcatcctcgcttcttcaaccagctctttagcggcttggatcctcacgccctggccggccggataatcaccgaatcacttaacactagccagtacacttacgagatcgcccccgtgtttgtgctgatggaagaggaggtgctaagaaagctgcgagctctggttggctggtcttctggggatggaattttctgccccggtgggagtatctcaaatatgtacgccgtgaacctggccagataccagcgctaccccgactgtaagcagcgggggctgcggaccctgccaccgctggccctctttacctcaaaggaatgccactacagtattcagaagggtgcagctttcttaggccttgggactgattcagtgcgtgtggtaaaggccgacgagaggggcaaaatggtgcccgaggatctagaacgtcagatcggcatggctgaggctgagggcgcagttccttttctggtgtcagccactagcggcaccacagtactgggagctttcgatcctctggaggcgattgctgacgtttgccagcgccatggtttgtggctccacgtagatgcagcctgggggggctctgtactcctgagccaaacacatagacacctcctcgatggtatccagcgggctgactctgtagcttggaacccacacaagctgctggcggccggcctccagtgtagtgcactgctcttacaagacacctcaaatctcctcaagaggtgccacggtagccaggccagctacctgttccaacaggacaagttctacgatgtcgctctggacaccggcgacaaggtagttcagtgcggtcgcagggtggactgtctgaaactgtggctgatgtggaaagctcagggcgaccaggggctggaacgccgtatcgaccaagccttcgtcttggcacgctacctcgtagaggagatgaaaaagcgggaaggctttgagctcgtgatggagcctgagttcgtgaatgtgtgcttctggtttgtacccccatctctccggggcaagcaggagtccccagactaccacgaacggttgtcaaaagtggctcccgttctgaaagagcggatggttaaggaaggatccatgatgattggctaccagccccatggcacaaggggtaatttctttagggtagtggtggcgaacagtgcacttacatgcgccgatatggacttcctccttaatgagctcgaaagacttggtcaggacctctag

SEQ ID NO: 87374 - DNA, 1365 bp, Artificial Sequence
  derived and/or modified sequence
atggcagattcagaagcgttgcccagcctggccggagacccagtcgccgttgaggcgctgttacgtgccgtgtttggagtggtggttgatgaggccattcagaaaggaacttctgtttcccagaaggtttgcgagtggaaggagccggaggagcttaagcagctcctggatctcgagctgcgctctcagggggaatctcaaaagcagatcctagaaaggtgcagggcagtcatcaggtattcagttaagacagggcaccccaggttctttaatcaattattttctggcttggatccccatgctctggccggacgaattataaccgaatccctgaatacctctcagtacacctacgagattgcaccggttttcgtcctcatggaggaagaagtgctgcgaaagctgagggctctcgtggggtggtcatctggcgacggaattagtgccctctgccactactcaatacaaaagggagcagctttcctgggattggggaccgatagtgtgcgagttgtaaaagccgacgaaaggggcaagatggtgcctgaggacctggagaggcagatcggcatggctgaggctgagggggctgtcccgttcctggtgtctgcaactagcgggaccaccgtgctcggagcctttgatcccctggaggctatcgccgatgtatgtcagaggcacggactttggctgcacgtcgacgcggcttgggggggtagcgtcctcctgtcccagacccaccggcacctgttagatggcatccagagagccgacagcgtcgcctggaaccctcacaagctcctcgccgcaggactgcagtgctccgctttgcttctgcaagacacttccaatctgctgaagagatgtcacggatcccaggccagctacctgttccagcaggacaaattttatgacgtggcccttgacacaggagacaaagtggtccaatgcgggagaagagttgattgcctaaaactttggttaatgtggaaggcccagggtgaccagggactggagcggagaattgatcaagcattcgtgctggcgaggtatctggtggaagagatgaaaaaaagagaagggtttgaattggtcatggaaccagagttcgtgaacgtttgcttttggtttgtacccccttctcttagaggtaaacaggaatccccagattatcatgaaaggctgagtaaagttgcacctgtgctcaaggagcgaatggttaaggagggatctatgatgatcggttaccagcctcacggaacacgcggaaatttctttagagttgtggtagccaatagtgcccttacttgcgccgacatggattttctcctgaacgagctggaaaggctggggcaggatctctag

SEQ ID NO: 87375 - DNA, 1482 bp, Artificial Sequence
  derived and/or modified sequence
atggccgacagcgaggctctgccgagtctagctggggaccctgtggccgtggaagctctacttagggcagtgtttggcgtggtcgtggatgaagctatacaaaaagggacctctgtatcacaaaaggtgtgcgaatggaaggaacccgaggaattaaagcaactgctggatctggaacttaggagtcagggcgaatcccagaagcaaattttagaaaggtgtagggcggtcatccgctatagcgttaagaccggtcatcctaggttcttcaaccagctgttttctgggctcgacccacacgctctggctgggcgaatcatcaccgagagtctcaatacaagtcaatacacatatgagatcgcccctgtttttgtactcatggaggaagaggtgctgcgaaagctgcgcgctctcgtggggtggtcttcaggcgacgggatattctgccctggaggcagcatcagcaatatgtacgcggtgaacctggcacgctatcagaggtaccctgattgtaaacagaggggcctgaggaccctgcccccactcgctctattcacttcaaaagagtgccactattcaatacagaaaggcgcagcatttctggggctagggactgattccgtgagggtggtcaaggcagacgagcgaggaaagatggtccccgaggacctggaaagacagattggcatggctgaggctgaaggggcagtcccctttctagtctccgccaccagcggcacgacggtgctaggagcttttgacccactagaagcgatcgccgacgtctgtcaacgtcacggtttgtggcttcatgtagacgcggcatggggcggaagcgtgctcttgtcccagacacaccgccacctgttggacgggatccagcgtgcagattcagtggcatggaatccccacaaactactagccgctggcctccagtgctctgcgctgttgctacaggacactagtaatctgcttaagagatgtcacggatcgcaggcgtcatacctctttcaacaggataaattctacgacgtggcactagacacgggggacaaagtggtccagtgtgggcgtagagtggactgtcttaagctttggctgatgtggaaggcccaaggggaccaaggcctggagcgcaggatagatcaggccttcgttctcgctcggtacctggtagaggaaatgaagaagcgggagggcttcgagctggtgatggagccagagtttgtgaacgtgtgcttttggttcgttccacctagtctgaggggcaagcaggaatcacctgattaccacgaacggctctccaaggttgcacccgtcctgaaggagagaatggtcaaggaggggagcatgatgatcggataccagccccacggcacaagaggcaacttctttcgcgtggtggtggcgaacagcgctctaacttgcgcggacatggatttcctgctgaatgagctggagcggttgggccaagatctgtag

SEQ ID NO: 87376 - protein, 699 aa, Artificial Sequence
  derived and/or modified sequence
MCGIFAYLNYHVPRTRREILETLIKGLQRLEYRGYDSAGVGFDGGNDKDWEANACKIQLIKKKGKVKALDEEVHKQQDMDLDIEFDVHLGIAHTRWATHGEPSPVNSHPQRSDKNNEFIVIHNGIITNYKDLKKFLESKGYDFESETDTETIAKLVKYMYDNRESQDTSFTTLVERVIQQLEGAFALVFKSVHFPGQAVGTRRGSPLLIGVRSEHKLSTDHIPILYRTARTQIGSKFTRWGSQGERGKDKKGSCNLSRVDSTTCLFPVEEKAVEYYFASDASAVIEHTNRVIFLEDDDVAAVVDGRLSIHRIKRTAGDHPGRAVQTLQMELQQIMKGNFSSFMQKEIFEQPESVVNTMRGRVNFDDYTVNLGGLKDHIKEIQRCRRLILIACGTSYHAGVATRQVLEELTELPVMVELASDFLDRNTPVFRDDVCFFLSQSGETADTLMGLRYCKERGALTVGITNTVGSSISRETDCGVHINAGPEIGVASTKAYTSQFVSLVMFALMMCDDRISMQERRKEIMLGLKRLPDLIKEVLSMDDEIQKLATELYHQKSVLIMGRGYHYATCLEGALKIKEITYMHSEGILAGELKHGPLALVDKLMPVIMIIMRDHTYAKCQNALQQVVARQGRPVVICDKEDTETIKNTKRTIKVPHSVDCLQGILSVIPLQLLAFHLAVLRGYDVDFPRNLAKSVTVE

SEQ ID NO: 87377 - DNA, 2100 bp, Artificial Sequence
  derived and/or modified sequence
atgtgcggcatcttcgcctacctgaactaccacgtgcccagaaccagaagagagatcctggagaccctgatcaagggcctgcagagactggagtacagaggctacgacagcgccggcgtgggcttcgacggcggcaacgacaaggactgggaggccaacgcctgcaagatccagctgatcaagaagaagggcaaggtgaaggccctggacgaggaggtgcacaagcagcaggacatggacctggacatcgagttcgacgtgcacctgggcatcgcccacaccagatgggccacccacggcgagcccagccccgtgaacagccacccccagagaagcgacaagaacaacgagttcatcgtgatccacaacggcatcatcaccaactacaaggacctgaagaagttcctggagagcaagggctacgacttcgagagcgagaccgacaccgagaccatcgccaagctggtgaagtacatgtacgacaacagagagagccaggacaccagcttcaccaccctggtggagagagtgatccagcagctggagggcgccttcgccctggtgttcaagagcgtgcacttccccggccaggccgtgggcaccagaagaggcagccccctgctgatcggcgtgagaagcgagcacaagctgagcaccgaccacatccccatcctgtacagaaccgccagaacccagatcggcagcaagttcaccagatggggcagccagggcgagagaggcaaggacaagaagggcagctgcaacctgagcagagtggacagcaccacctgcctgttccccgtggaggagaaggccgtggagtactacttcgccagcgacgccagcgccgtgatcgagcacaccaacagagtgatcttcctggaggacgacgacgtggccgccgtggtggacggcagactgagcatccacagaatcaagagaaccgccggcgaccaccccggcagagccgtgcagaccctgcagatggagctgcagcagatcatgaagggcaacttcagcagcttcatgcagaaggagatcttcgagcagcccgagagcgtggtgaacaccatgagaggcagagtgaacttcgacgactacaccgtgaacctgggcggcctgaaggaccacatcaaggagatccagagatgcagaagactgatcctgatcgcctgcggcaccagctaccacgccggcgtggccaccagacaggtgctggaggagctgaccgagctgcccgtgatggtggagctggccagcgacttcctggacagaaacacccccgtgttcagagacgacgtgtgcttcttcctgagccagagcggcgagaccgccgacaccctgatgggcctgagatactgcaaggagagaggcgccctgaccgtgggcatcaccaacaccgtgggcagcagcatcagcagagagaccgactgcggcgtgcacatcaacgccggccccgagatcggcgtggccagcaccaaggcctacaccagccagttcgtgagcctggtgatgttcgccctgatgatgtgcgacgacagaatcagcatgcaggagagaagaaaggagatcatgctgggcctgaagagactgcccgacctgatcaaggaggtgctgagcatggacgacgagatccagaagctggccaccgagctgtaccaccagaagagcgtgctgatcatgggcagaggctaccactacgccacctgcctggagggcgccctgaagatcaaggagatcacctacatgcacagcgagggcatcctggccggcgagctgaagcacggccccctggccctggtggacaagctgatgcccgtgatcatgatcatcatgagagaccacacctacgccaagtgccagaacgccctgcagcaggtggtggccagacagggcagacccgtggtgatctgcgacaaggaggacaccgagaccatcaagaacaccaagagaaccatcaaggtgccccacagcgtggactgcctgcagggcatcctgagcgtgatccccctgcagctgctggccttccacctggccgtgctgagaggctacgacgtggacttccccagaaacctggccaagagcgtgaccgtggagtag

SEQ ID NO: 87378 - DNA, 8695 bp, Artificial Sequence
  derived and/or modified sequence
gctggcggagcccgggaggcggagaaggctgtcgttgccttggccgtcgcatccccgagggagtcgtgtcggcgccaccccggcccccgagcccgcagattgcccaccgaagctcgtgtgtgcacccccgatcccgccagccactcgcccctggcctcgcgggccgtgtctccggcatcatgtgtggtatatttgcttacttaaactaccatgttcctcgaacgagacgagaaatcctggagaccctaatcaaaggccttcagagactggagtacagaggatatgattctgctggtgtgggatttgatggaggcaatgataaagattgggaagccaatgcctgcaaaatccagcttattaagaagaaaggaaaagttaaggcactggatgaagaagttcacaagcaacaagatatggatttggatatagaatttgatgtacaccttggaatagctcatacccgttgggcaacacatggagaacccagtcctgtcaatagccacccccagcgctctgataaaaataatgaatttatcgttattcacaatggaatcatcaccaactacaaagacttgaaaaagtttttggaaagcaaaggctatgacttcgaatctgaaacagacacagagacaattgccaagctcgttaagtatatgtatgacaatcgggaaagtcaagataccagctttactaccttggtggagagagttatccaacaattggaaggtgcttttgcacttgtgtttaaaagtgttcattttcccgggcaagcagttggcacaaggcgaggtagccctctgttgattggtgtacggagtgaacataaactttctactgatcacattcctatactctacagaacagctaggactcagattggatcaaaattcacacggtggggatcacagggagaaagaggcaaagacaagaaaggaagctgcaatctctctcgtgtggacagcacaacctgccttttcccggtggaagaaaaagcagtggagtattactttgcttctgatgcaagtgctgtcatagaacacaccaatcgcgtcatctttctggaagatgatgatgttgcagcagtagtggatggacgtctttctatccatcgaattaaacgaactgcaggagatcaccccggacgagctgtgcaaacactccagatggaactccagcagatcatgaagggcaacttcagttcatttatgcagaaggaaatatttgagcagccagagtctgtcgtgaacacaatgagaggaagagtcaactttgatgactatactgtgaatttgggtggtttgaaggatcacataaaggagatccagagatgccggcgtttgattcttattgcttgtggaacaagttaccatgctggtgtagcaacacgtcaagttcttgaggagctgactgagttgcctgtgatggtggaactagcaagtgacttcctggacagaaacacaccagtctttcgagatgatgtttgctttttccttagtcaatcaggtgagacagcagatactttgatgggtcttcgttactgtaaggagagaggagctttaactgtggggatcacaaacacagttggcagttccatatcacgggagacagattgtggagttcatattaatgctggtcctgagattggtgtggccagtacaaaggcttataccagccagtttgtatcccttgtgatgtttgcccttatgatgtgtgatgatcggatctccatgcaagaaagacgcaaagagatcatgcttggattgaaacggctgcctgatttgattaaggaagtactgagcatggatgacgaaattcagaaactagcaacagaactttatcatcagaagtcagttctgataatgggacgaggctatcattatgctacttgtcttgaaggggcactgaaaatcaaagaaattacttatatgcactctgaaggcatccttgctggtgaattgaaacatggccctctggctttggtggataaattgatgcctgtgatcatgatcatcatgagagatcacacttatgccaagtgtcagaatgctcttcagcaagtggttgctcggcaggggcggcctgtggtaatttgtgataaggaggatactgagaccattaagaacacaaaaagaacgatcaaggtgccccactcagtggactgcttgcagggcattctcagcgtgatccctttacagttgctggctttccaccttgctgtgctgagaggctatgatgttgatttcccacggaatcttgccaaatctgtgactgtagagtgaggaatatctatacaaaatgtacgaaactgtatgattaagcaacacaagacaccttttgtatttaaaaccttgatttaaaatatcaccccttgaagcctttttttagtaaatccttatttatatatcagttataattattccactcaatatgtgatttttgtgaagttacctcttacattttcccagtaatttgtggaggactttgaataatggaatctatattggaatctgtatcagaaagattctagctattattttctttaaagaatgctgggtgttgcatttctggaccctccacttcaatctgagaagacaatatgtttctaaaaattggtacttgtttcaccatacttcattcagaccagtgaaagagtagtgcatttaattggagtatctaaagccagtggcagtgtatgctcatacttggacagttagggaagggtttgccaagttttaagagaagatgtgatttattttgaaatttgtttctgttttgtttttaaatcaaactgtaaaacttaaaactgaaaaattttattggtaggatttatatctaagtttggttagccttagtttctcagacttgttgtctattatctgtaggtggaagaaatttaggaagcgaaatattacagtagtgcattggtgggtctcaatccttaacatatttgcacaattttatagcacaaactttaaattcaagctgctttggacaactgacaatatgattttaaatttgaagatgggatgtgtacatgttgggtatcctactactttgtgttttcatctcctaaaagtggtttttatttccttgtatctgtagtcttttattttttaaatgactgctgaatgacatattttatcttgttctttaaaatcacaacacagagctgctattaaattaatattgatatattcagtattctcttcaactttgtcacgaggaagaatttcctgtagttaattttaactttccttcattacattgttgcataaaactagtcccttagtgccagtttggaagttacttgcaattgtttggaagatttgcaggtcgctgacctcatcatttcactctaagtatatgtggtaggctaagctcagaaaaaggtatgtatgctttacactgataggcaccaaatttagtattgtatcctaagtatttttcctcttctgtattttctgtgctctacccctgaaatatatttaggaataaagaagatataaataaagtgatattggggtatgttcagcttgtaagtgtcagaaatggaagttgacaatttggattaaaatatttaaagtagaatgttattatttgatacccccaaaattgtgagtaataatttcttaatggagcttttctggccagatcttcagggctataggagagtgtgtttgtttttggtgaagtccttctttttcaaaggtttttacttttaaattgtgaagataagctatttagcacaattatttaagtaagctgttttttcctttcttttctttcttttcttgttttaacttctgggtgaggttaagattttctaatagttattgttgttgccagagaagcatagaattctgcttgtgtcttagggttagagaaagatttgttatattttgaggtaatttggaaggactttcatacatggtgactagaaacctgatctttttaagaataaaatagggtcactatttacattatatataatatatggctattatagctatattaatctactttaattgtttctaagattattttgtgtaagtcagctagcgtgtgtatagtgtcatttcttatgttttgtatattaacgttttacaaacacaatttgtgtgggtttgtagcatttcttatagtttaaagtatgattcagcattctaagttaaaactaatatgtgaagtcagtcattagtctgcataatctctgtctccctctgtgtgtgtctttctataaagcacatgtgtacacacacacacacaaatatactgaaagctagggtaagttctaaactgaatatcaaaaaccaaaatcaagaacaaagaagtgatattttccaaacaaacatggattctctgccgggtgcagtggctcagcctgtaataccagcctccactttgggagtctgaggtgggagtattgcttgagctcaagagttggagaacagcctgggcaacatggtgagacctggtctttacaaaaatttttttggccggacgcagtggctcacacctgtaatcccagcactttgggaggccgaggcaggttgatcatgaggtcaagagatcgagaccatcctggccaacatggtgaaaccccgtctttactaaaaatacaaaaattagctgggagtggtggcgtgcgcctgtagtcccaactacttgggaggctgaggcaggagaatcgcttgaacccaggaggcggaggttgcagtgaggcgagatcacgccactacactccagcctggcgacagagcaagactctctcaaaaaaaaaaaaaaaaaattttttttttaaatgggctgggcatggtggcttgtgcctgtagtctcagcaacttgggaggcttaagtagtaggatcgcttgagcctgggaggttgaggctgcagtgagctgtgattgtgccactgtgcttcagcttgagtgacagagtgagaccctcctgactcaaaacaaaaaacatggtttctcctctctctcctgtcttcttactctctatcccatttgatgtagtgatttttaaatgcttttgtaagttaattcttaacacaaaagagacattgtaatgaggcacaccactaaagtgagcatgcccaattaaaaccagtgtaatataggataagaaaatctgatttttcaaaaaagatactctacataaagaatccttcatataaaaagttctttcttgtagtacatttaaagttttaattcactcatgtataactgagagttcctttgagccctttttaggcagggaggcatgtctgtcatctagcgtgtggcccagtaagtgattattacattggaatcagtttttcagtcttttaaaataaattctgtgccataagaataaaagataaagagaaaaattaatgttaactatttttagcttattataactatgtcaacaagtgtttattaatacctattatgggaaagtcactgtggttggcattgaaaattacatcatctttaaagcagtatttgtccccagatggactcatcactagcaaagactaggttcattggaaggcatagggtgagagaatgggaagatgaagtggaggcgggttgttaaagtgctgtcagtgagtgattttgtctacttgaataatggtccatgtttgggggcatattgtgtttcataagaagtgaaaggtatttgcaaagtaagctacaaatgacccataaatctgttaacaacagtccttaatatgcaaagatgaaaaacaagcattactgctacccaaagggaactggtgcttggtgatgtgcagatggggctgttggttaagagagctattacaggttttctctcttaggtttcataggaggtagttactgagatgagattgttttatctttttgaatacagatctcttgtcttgagttagttctgaggatgggagtaataaaggagttttttgtttttttgtttgtttgtttgttttggctccttagtaatactcctctgacatttatttctattattcttcaaagaaaggaaaccaactgaaatgtttgctttaacaaacattttaataagttctctgggtttttttttccccttttaaaaaaattagcatataccatagcaataaaagaactaatgttaactattgtatgctacaacttaagtgatttttctaaagaagcacaatgtcattgaaagtattattgaaaaggatcatagtcacattgaatttgtgaaggccaaagaaattgaagggagtgatattttcattttatgatattcacatatttagtaaattttgtgtacaagaataccaggcagagtgttttacccatggaaacaggtttcagattactttatttttactgttagagtctcaagtttagaaatgctaacacttaaatcagtttttttctcactatacttgaagattgttaatattttgatatcttcctagcttgatgaatttaaacatatcttcagatctgtgacagtgacagccaataggactgataatattagcttcaaaccaataatatccagggttaaaataaaaatcatagtgaaagtacgattgtaaaattatgctatattaacttttaagtctgtaataacttgacatcaaaatgttatgtaattaccataaataatggctagcgagaacatctttggaaattctcaaattacctttcttactacactgtttgcagaatgaatgtagaaatgatcctgttagctttctgaatgttctgtggttgaatgtgtttttgcttaaataaagcttttggtatttgtttaaattacacttcttgagaagtggaaattttaggatcatctttgctttgtttcagttttgtgatttttgaaatgaatgtttagtttactgagccagttggtcatttcttcctcatgtcgttaagtccagtgagtaagcctgaactgtgaataaattaccaaaaacttgcttagaatttcattttgaagcaatttgctaatatttgaagtgtatacacatttgtagttatgttagaaattgtattgtactaagaatgtaatcaatgtctactttagttgtaaacatttctgatgtcaaaactttattcattactgttgattttaagaataagaaatcactgcctaaatattaccaaaagccactgtctctacccgaacttcccagtttgggaaagaatcgttagataaaacaaaggctctgccctttctgataccaaactccacagatactttctcacatcttttaaaacattttgcaataacatattgtttataggaagtttacggggtatgcaatgattaaaacttttaagtgaattgatagttgcaaaagaaaggataatatttaaggtcagtgagtagcaagacaatctaaagtttctgtaatatctggctctctgttaattatagagcaaagtttcccttacagaatccttttatgaacagcaagctagagtctatccctagtggttatagcacctgctgcgtttttcaggagacagttaggccagggtgatttgaatggatagatgtgctgttttgcctgcttgtagaattcagcccagtctttggtctctctctctctctccctcctccacctctccctctctcttcttctgcaccagagcctaaggctgcgccaccaagatgcgtcattttttccagaggcttcttttttttttttttgagatggagttttgctctgttgcccaggctggcatgcagtgctgcaatcttggctgactgcaacttccacctcccgtgttcacacgagtcttttgcctcagcctctggattagctgggattacaggcacgtgccaccatgcctagctaatttttgtgtttttagtagagacggggtttcaccatgttggccaggctagtctcaaactcctgaccttaagtgatctgcccgccttggcctcccaaagtgctgggattacaggcatgagtcaccgtgtcctgcccagacatatcaaatttgacaggtattgtataccctttggatctttaggaattaatttttgcctctgtcactcagctttgtatattttgaaatggagataagtatagggaggtcttggaaggaaaattgccagaattcccaaaccatgtaacactcattgagaattccagatccattatatctaaagggcaagtgaaggaaacagtattgtgaactgggtataactccttggttcttaactagtacattcttaatctgtgagacccaaaggttgataaacaataatttaagattgtacagtactctaaacgtctgcaaaggtctagatgttatcagtatcactagtttttatttctgccagtagctcccttttaggttacattgttgtcctctttccagtgtcgcatctgtcattggtttttcactatggcaagttcattaaaaagcttgctccattgttatcttcaagtaatgcccataaggagatggaagatatctgagacaattaaggctttagcttctaggcaagagaaataacgttgcattaaatttcaagtttctttctgctagacttgaatgtgtctagccactctaatttatgggggcttttggttttttcctattgtactttgtatgtagaattgttttgaaatatcaagcatatttactttgaatttgaactctttcttaattttgtatttatcctttgaataaaatgtaaatccaatatttat

SEQ ID NO: 87379 - DNA, 2100 bp, Artificial Sequence
  derived and/or modified sequence
atgtgcggaatttttgcttatcttaactatcatgtcccacgtacccgcagggaaatattggaaacactgattaaagggttacaaagactggaatacaggggttacgactcagctggggtgggtttcgacgggggtaacgataaggactgggaggccaacgcatgcaaaattcagctcattaaaaaaaagggcaaggtaaaagcgctggacgaggaggtgcataagcagcaggacatggacctcgacatcgagtttgatgttcacctgggtattgcccacacgcggtgggccacgcacggagaaccctcccccgttaattctcatccgcagcgttctgacaagaataacgagtttatcgtgatccacaatggaattataaccaattacaaggacctcaagaagttcctagagagtaaggggtatgacttcgagagcgaaaccgataccgagaccattgctaagttggtcaagtatatgtatgacaatcgtgaaagccaggatacaagttttactaccttggtagagcgggtgatacagcaactcgagggcgcgttcgcccttgtcttcaagtccgtccactttcctggccaggcagttggcactagacgtggatcgcccttgctgatcggcgtccgatcagaacataagctcagtaccgatcacatcccaattctgtatagaaccgcccggacacagatcggctctaaatttacaaggtggggttcacagggggagagagggaaggataagaagggatcctgtaacctatcgcgagtggactctactacttgcctattcccagttgaagaaaaggcagtcgaatattatttcgcctcagacgcaagcgctgtgatcgagcacacgaacagagtaatcttccttgaggacgatgacgtggctgctgtcgtggacgggcggttatccattcacaggatcaaacgcacggctggggaccacccagggcgcgctgtacaaaccctccagatggagctgcagcaaatcatgaaaggtaacttttcgtctttcatgcagaaggaaatctttgagcagccggagtccgttgtgaataccatgcgcgggcgagttaacttcgacgactataccgtaaaccttgggggtctgaaggatcatataaaggaaattcaacggtgcaggcgcctgatcctgatcgcctgtggcacgtcctatcatgccggggtcgcaaccaggcaggtcttggaagaactgactgaactccctgttatggttgagctcgcctctgactttctggatcggaacacccccgtctttcgggatgatgtgtgctttttcttgagtcaatctggagagaccgccgacaccttgatgggccttcgatactgcaaggagcgaggcgctctcacagtcggtattaccaacacagtcggctcttccatcagcagggagactgactgcggcgtccacatcaacgccggcccggaaattggagtggcatccacgaaagcctatacgtcccagttcgtatccttggtcatgttcgccctgatgatgtgcgatgaccggatcagtatgcaagagaggcggaaggagatcatgctcggactgaagcggctcccagatctgatcaaggaagtactctcgatggacgacgagatacagaaactcgcaactgaactctaccaccagaagtcggtcctcattatgggtcgcggataccactatgccacatgcctcgagggggccttgaagataaaggagatcacttatatgcactcagaaggtatcctcgcaggtgagctcaagcatggacctctggctctggtagacaaattgatgccggtgatcatgatcattatgcgcgaccacacttacgcaaaatgccagaacgctcttcagcaggtggtagcacgccaggggcgcccagtggtaatctgcgacaaagaggataccgaaaccatcaaaaacaccaaaagaaccatcaaggtgccacactccgtggactgcctccaaggcatattatctgttataccgctgcagcttctcgcttttcatttggccgtacttcggggatatgatgtggacttcccacggaatctcgctaagtccgttactgtcgagtag

SEQ ID NO: 87380 - DNA, 2100 bp, Artificial Sequence
  derived and/or modified sequence
atgtgtggcatctttgcctacctgaactaccacgtgcccaggacccggcgggagatcctggagaccctcatcaagggcctgcagaggctggagtaccggggctatgattctgctggggtgggctttgatggcggcaatgacaaggactgggaggccaatgcctgcaagatccagctgatcaagaagaagggcaaggtgaaggccctggatgaggaggtgcacaagcagcaggacatggacctggacattgaatttgatgtgcacctgggcatcgcccacacccgctgggccacccatggagagcccagccctgtgaacagccacccccagaggagtgacaagaacaatgagttcatcgtcatccacaacggcatcatcaccaactacaaggacctgaagaagttcctggagagcaagggctatgactttgaaagtgaaacagacacagagaccatcgccaagctggtgaagtacatgtatgacaaccgggagagccaggacaccagcttcaccaccctggtggagagggtcatccagcagctggagggcgcctttgccctggtgttcaagtctgtgcacttccctggccaggccgtgggcacccggcggggcagccccctgctgattggagtgcgctctgagcacaagctgagcacagaccacatccccatcctgtacagaacagcccggacccagatcggcagcaagttcacccgctggggcagccagggcgagcggggcaaggacaagaagggcagctgcaacctgagccgggtggacagcaccacctgcctcttccctgtggaggagaaggctgtggagtactactttgccagtgatgccagcgctgtgattgagcacaccaacagagtcatcttcctggaggatgatgatgtggccgctgtggtggatggccgcctgagcatccaccgcatcaagaggacagctggggaccaccctggccgggctgtgcagaccctgcagatggagctgcagcagatcatgaagggcaacttcagcagcttcatgcagaaggagatctttgagcagcctgagagcgtggtgaacaccatgaggggccgggtgaactttgatgactacacagtgaacctgggcggcctgaaggaccacatcaaggagatccagcgctgcagaagactcatcctgattgcctgtggcaccagctaccacgccggcgtggccacccggcaggtgctggaggagctgacagagctgcctgtgatggtggagctggccagtgacttcctggacaggaacacccctgtgttcagagatgatgtgtgcttcttcctgagccagagcggggagacagctgacaccctgatgggcctgcgctactgcaaggagcggggggccctgactgtgggcatcaccaacacagtgggcagcagcatcagccgggagacagactgtggggtgcacatcaatgccggccctgagattggagtggccagcaccaaggcctacaccagccagtttgtgtccctggtgatgtttgccctgatgatgtgtgatgaccgcatctccatgcaggagaggaggaaggagatcatgctgggcctgaagaggctgcctgacctgatcaaggaggtgctgtccatggatgatgagatccagaagctggccacagagctgtaccaccagaagtctgtgctgatcatgggccggggctaccactacgccacctgcctggagggcgccctgaagatcaaggagatcacctacatgcacagcgagggcatcctggccggggagctgaagcacggccccctggccctggtggacaagctgatgcctgtgatcatgatcatcatgagggaccacacctacgccaagtgccagaatgccctgcagcaggtggtggcccggcagggccggcctgtggtgatctgtgacaaggaggacacagagaccatcaagaacaccaagaggaccatcaaggtgccccacagcgtggactgcctgcagggcatcctgagcgtcatccccctgcagctgctggccttccacctggccgtgctgcggggctatgatgtggacttccccaggaacctggccaagtctgtgacagtggagtag

SEQ ID NO: 87381 - DNA, 2100 bp, Artificial Sequence
  derived and/or modified sequence
atgtgcggcatcttcgcctacctgaactaccacgtgccccggaccagaagggagattttggaaacattgattaaaggtctgcagaggctggaatataggggatacgatagcgctggtgtggggtttgatggcggcaacgacaaggactgggaagccaacgcttgtaaaattcagcttattaagaagaaggggaaggtgaaagctctggacgaagaggtgcacaagcagcaggatatggacctggatatcgaatttgatgtgcacctcggcatcgcccacactcggtgggctacacatggcgagcctagccctgtgaactcacatccgcaacggagcgataaaaacaacgagtttatcgtgatccacaatgggataattacaaattacaaagacttgaaaaaatttctcgagtctaagggctacgactttgaaagtgagaccgatacagagaccatcgcaaaactagtgaagtatatgtatgacaacagggagagccaggatacctcctttactactctggtagagagagtcatccagcagctggaaggagccttcgcattggtcttcaagtctgtgcactttcctggacaggccgtcggcaccaggcggggatcacccctcttaattggcgtacgcagtgaacataaactatctactgatcatattcccattctctataggaccgcacgtacgcagatagggtctaagtttacacgctgggggtctcagggggagcgtgggaaagataagaaaggaagttgcaacttgtcgcgtgttgattcaaccacatgccttttccctgtggaagagaaggcagtggagtattacttcgcttctgatgcgtccgccgtgatcgaacacaccaatagggtcatattcctcgaagatgacgatgtagctgctgtggtcgatggtaggctctcgatccatagaatcaagagaaccgccggtgaccaccctggccgagcagtccagacattacagatggaactccaacagattatgaaaggtaatttttcatcctttatgcaaaaggaaatatttgaacagcctgaaagcgtggttaatactatgcgtgggagggtcaactttgacgactatactgttaacctcggtgggctaaaagatcatatcaaagagattcagcgttgtagaagattgatactaatcgcttgtggtacctcttaccacgcaggcgttgcaaccagacaggtactagaagagctcactgaattgcctgttatggtcgaacttgcttcagatttccttgacaggaacacacctgtgttcagagacgacgtgtgtttcttcctgtcacagtcaggcgagactgccgatacattgatgggcttgcgctattgtaaagaaagaggagccctgactgtgggaattacgaatacggtcggatctagcatttctagagaaacggattgtggtgtacacattaacgcaggccccgaaattggagtggcgagcaccaaggcatacacctcccagtttgttagtttggttatgtttgcgctgatgatgtgtgacgaccgtatttccatgcaggagcgtagaaaggagattatgcttgggctgaaacgtctgcccgaccttattaaagaggtattgagcatggatgacgagatacagaaactggcaacagagctctaccatcaaaagagtgtcctcatcatgggtcgagggtaccattacgctacatgcttagagggtgctctgaaaataaaggaaatcacttatatgcactcagaaggtatcctggccggtgagctgaaacatggacccctggctctggtcgataaactcatgcctgtaatcatgatcatcatgagggatcatacgtacgctaaatgccagaacgccctccagcaggttgtcgcaaggcagggtaggcctgtagtcatctgcgacaaggaagacaccgagaccatcaaaaacactaaaaggactatcaaagtcccccattcagtggattgcctgcagggcatcctctccgtgatccctctgcagctcttagcctttcatctggcggtgctgcggggatatgacgtagatttcccaaggaacctcgccaagagtgtgacagtggagtag

SEQ ID NO: 87382 - DNA, 2100 bp, Artificial Sequence
  derived and/or modified sequence
atgtgtggcatctttgcgtacctgaactatcatgtgccacggacaagaagagaaatcctggagacactaatcaaagggctccaaaggctggagtatcgcggatatgattctgctggcgtgggtttcgatggcggtaatgacaaagattgggaagcaaatgcctgcaaaatacagttgatcaaaaagaaagggaaagtcaaggctctggatgaggaagtgcacaagcaacaggatatggacctggatatcgagtttgatgtgcacctaggcatcgctcacacgcgctgggccactcatggtgaacctagccccgttaacagccaccctcaacgttccgataaaaacaatgaatttatcgtcatccataatggaatcattaccaactacaaagaccttaaaaaatttctcgaatccaagggctatgattttgaatcagaaaccgacaccgaaacaatcgctaaattggtgaagtacatgtacgataacagagaaagccaagacactagtttcaccacactggtcgagcgtgtgatccagcaactggaaggcgcatttgcacttgtcttcaagtcagtgcattttcctggccaggctgtgggtactaggcggggaagtcctttacttatcggtgtacgtagtgagcataagctgagcacagaccatatacccatactgtatcggactgctagaacccagatcggttccaagtttactaggtggggctcccagggagagagagggaaggacaagaaaggttcctgcaacctctcaagggtggacagtaccacctgcttatttccagtggaggagaaggcagtcgagtactactttgccagcgacgctagtgctgtcattgaacataccaatcgtgtgatatttttggaggacgatgacgtggccgctgtcgtcgacggcaggctgagcattcaccgaatcaaaaggaccgccggagaccatcccggacgcgctgtccagactctccagatggagttgcagcagattatgaaggggaacttttcatcgttcatgcagaaggagatcttcgagcaacccgagagtgtcgtcaataccatgaggggccgtgtgaacttcgacgattacactgtgaatcttggcggactgaaagaccatatcaaagaaatccagcgctgcagaaggctaatactgatcgcttgcggaacaagttaccacgcaggcgtcgccactcggcaagtattggaggagctgactgagctccctgttatggtggagctggccagtgactttctggaccgaaatactcctgtgtttcgcgacgacgtctgcttctttctttcgcagagcggcgaaacagccgataccctgatgggtttacgctactgcaaggagagaggcgctctgaccgtggggatcacaaatacagtcgggagtagcatttcgcgcgaaactgactgtggggtccatataaacgccggacccgaaataggggtggccagtacgaaggcctacacttcccagtttgtgagcttggtgatgttcgctctgatgatgtgcgacgacagaatctcaatgcaagaacgcaggaaggagattatgctcggactaaaacgcctccccgacctcatcaaggaagttctgtctatggacgacgaaattcagaaactggctactgaactgtaccaccagaagagcgttctcataatgggtcgcggttaccattatgcaacttgtctggaaggcgcattgaaaattaaggaaatcacctatatgcatagcgaagggatactggcaggagaactaaagcacgggccactggcacttgtcgataaattgatgcctgttattatgataatcatgcgcgatcatacgtacgcgaagtgccaaaatgccctgcagcaggtcgtcgctcggcagggacgcccagtcgtgatatgcgacaaggaggacactgaaactatcaaaaacaccaagaggaccatcaaggtgcctcactctgtggactgccttcaaggaattcttagcgtgattccactgcagctcttggccttccacctggctgtgcttcgaggatatgatgtggacttcccaaggaacttggctaaatctgtaacagtggaatag

SEQ ID NO: 87383 - protein, 172 aa, Artificial Sequence
  derived and/or modified sequence
MVTKPKAVSTPAPATTQQSAPASTTAVTSSTTTTVAQAPTPVPALAPTSTPASITPASATASSEPAPASAAKQEKPAEKPAETPVATSPTATDSTSGDSSRSNLFEDATSALVTGQSYENMVTEIMSMGYEREQVIAALRASFNNPDRAVEYLLMIIVKTGNKKKKQPLLGK

SEQ ID NO: 87384 - protein, 80 aa, Artificial Sequence
  derived and/or modified sequence
MVKALKEKIESEKGKDAFPVAGQKLIYAGKILNDDTALKEYKIDEKNFVVVMVTKPKAVSTPAPATTQQSAPASTTAVTS

SEQ ID NO: 87385 - DNA, 243 bp, Artificial Sequence
  derived and/or modified sequence
atggtgaaggccctgaaggagaagatcgagagcgagaagggcaaggacgccttccccgtggccggccagaagctgatctacgccggcaagatcctgaacgacgacaccgccctgaaggagtacaagatcgacgagaagaacttcgtggtggtgatggtgaccaagcccaaggccgtgagcacccccgcccccgccaccacccagcagagcgcccccgccagcaccaccgccgtgaccagctag

SEQ ID NO: 87386 - DNA, 243 bp, Artificial Sequence
  derived and/or modified sequence
atggtcaaggcgctcaaagagaaaatagaatccgagaaaggaaaggacgcattcccagtggcaggtcaaaaattgatttatgccgggaaaattcttaatgatgatacagctttgaaagaatataagattgatgagaagaattttgtcgtcgtgatggttaccaaaccaaaggccgtctctacacctgctcctgctacgactcagcaatcagccccagcctccaccaccgctgtcactagctag

SEQ ID NO: 87387 - DNA, 243 bp, Artificial Sequence
  derived and/or modified sequence
atggtgaaggccctgaaggagaagattgaaagtgagaagggcaaggatgccttccctgtggccggccagaagctgatctatgctgggaagatcctgaatgatgacacagccctgaaggagtacaagattgatgagaagaactttgtggtggtgatggtgaccaagcccaaggctgtgtccaccccagccccagccaccacccagcagagcgccccagccagcaccacagctgtgaccagctag

SEQ ID NO: 87388 - DNA, 243 bp, Artificial Sequence
  derived and/or modified sequence
atggtgaaggccctgaaggagaagatcgagagcgagaagggcaaggacgcattcccggtcgcgggacagaagcttatctatgccgggaagatcctgaacgacgatactgccctgaaagaatacaagatcgatgagaaaaatttcgttgtggtgatggtgaccaaaccgaaggcggtctctactcccgctccagctaccacacagcagagtgctcccgcttcaacgaccgccgtaacttcttag

SEQ ID NO: 87389 - DNA, 243 bp, Artificial Sequence
  derived and/or modified sequence
atggtgaaggccctcaaagagaagatcgagtcagagaagggtaaagacgcttttccagtggctgggcagaagcttatctatgccggaaagattctcaatgatgataccgctctgaaagagtataagattgatgaaaaaaacttcgtggtcgtaatggttacaaagcccaaagccgtgagtaccccagctccagccactacacaacagtccgcccctgcaagtaccaccgctgtcacgagttag

SEQ ID NO: 87390 - DNA, 456 bp, Artificial Sequence
  derived and/or modified sequence
ataatactaagtttaaaccagcagctttctgcccaactctatttttaaaagtagttgattctattttgggtggagatcaggggctttggtgttaagtagacctgagttccatttgtggttttgtaacttatttgctatgaccttgggcaaattacggttagtttcattctctgtataatagggataatacctgccttgcagagatgtgaagattagatggtgaaagcactgaaagagaagattgaatctgaaaaggggaaagatgcctttccagtagcaggtcaaaaattaatttatgcaggcaaaatcctcaatgatgatactgctctcaaagaatataaaattgatgagaaaaactttgtggtggttatggtgaccaaacccaaagcagtgtccacaccagcaccagctacaactcagcagtcagctcctgccagcactacagcagttacttcc

SEQ ID NO: 87391 - protein, 114 aa, Artificial Sequence
  derived and/or modified sequence
  misc_feature (1)..(1): Xaa can be any naturally occurring amino acid
XTASSEPAPASAAKQEKPAEKPAETPVATSPTATDSTSGDSSRSNLFEDATSALVTGQSYENMVTEIMSMGYEREQVIAALRASFNNPDRAVEYLLMIIVKTGNKKKKQPLLGK

SEQ ID NO: 87392 - DNA, 1230 bp, Artificial Sequence
  derived and/or modified sequence
atgcaggtgaccctgaagaccctgcagcagcagaccttcaagatcgacatcgaccccgaggagaccgtgaaggccctgaaggagaagatcgagagcgagaagggcaaggacgccttccccgtggccggccagaagctgatctacgccggcaagatcctgaacgacgacaccgccctgaaggagtacaagatcgacgagaagaacttcgtggtggtgatggtgaccaagcccaaggccgtgagcacccccgcccccgccaccacccagcagagcgcccccgccagcaccaccgccgtgaccagcagcaccaccaccaccgtggcccaggcccccacccccgtgcccgccctggcccccaccagcacccccgccagcatcacccccgccagcgccaccgccagcagcgagcccgcccccgccagcgccgccaagcaggagaagcccgccgagaagcccgccgagacccccgtggccaccagccccaccgccaccgacagcaccagcggcgacagcagcagaagcaacctgttcgaggacgccaccagcgccctggtgaccggccagagctacgagaacatggtgaccgagatcatgagcatgggctacgagagagagcaggtgatcgccgccctgagagccagcttcaacaaccccgacagagccgtggagtacctgctgatgggcatccccggcgacagagagagccaggccgtggtggaccccccccaggccgccagcaccggcgccccccagagcagcgccgtggccgccgccgccgccaccaccaccgccaccaccaccaccaccagcagcggcggccaccccctggagttcctgagaaaccagccccagttccagcagatgagacagatcatccagcagaaccccagcctgctgcccgccctgctgcagcagatcggcagagagaacccccagctgctgcagcagatcagccagcaccaggagcacttcatccagatgctgaacgagcccgtgcaggaggccggcggccagggcggcggcggcggcggcggcagcggcggcatcgccgaggccggcagcggccacatgaactacatccaggtgaccccccaggagaaggaggccatcgagagactgaaggccctgggcttccccgagggcctggtgatccaggcctacttcgcctgcgagaagaacgagaacctggccgccaacttcctgctgcagcagaacttcgacgaggactag

SEQ ID NO: 87393 - DNA, 519 bp, Artificial Sequence
  derived and/or modified sequence
atggtgaccaagcccaaggccgtgagcacccccgcccccgccaccacccagcagagcgcccccgccagcaccaccgccgtgaccagcagcaccaccaccaccgtggcccaggcccccacccccgtgcccgccctggcccccaccagcacccccgccagcatcacccccgccagcgccaccgccagcagcgagcccgcccccgccagcgccgccaagcaggagaagcccgccgagaagcccgccgagacccccgtggccaccagccccaccgccaccgacagcaccagcggcgacagcagcagaagcaacctgttcgaggacgccaccagcgccctggtgaccggccagagctacgagaacatggtgaccgagatcatgagcatgggctacgagagagagcaggtgatcgccgccctgagagccagcttcaacaaccccgacagagccgtggagtacctgctgatgatcatcgtgaagaccggcaacaagaagaagaagcagcccctgctgggcaagtag

SEQ ID NO: 87394 - DNA, 1014 bp, Artificial Sequence
  derived and/or modified sequence
atggtgaccaagcccaaggccgtgagcacccccgcccccgccaccacccagcagagcgcccccgccagcaccaccgccgtgaccagcagcaccaccaccaccgtggcccaggcccccacccccgtgcccgccctggcccccaccagcacccccgccagcatcacccccgccagcgccaccgccagcagcgagcccgcccccgccagcgccgccaagcaggagaagcccgccgagaagcccgccgagacccccgtggccaccagccccaccgccaccgacagcaccagcggcgacagcagcagaagcaacctgttcgaggacgccaccagcgccctggtgaccggccagagctacgagaacatggtgaccgagatcatgagcatgggctacgagagagagcaggtgatcgccgccctgagagccagcttcaacaaccccgacagagccgtggagtacctgctgatgggcatccccggcgacagagagagccaggccgtggtggaccccccccaggccgccagcaccggcgccccccagagcagcgccgtggccgccgccgccgccaccaccaccgccaccaccaccaccaccagcagcggcggccaccccctggagttcctgagaaaccagccccagttccagcagatgagacagatcatccagcagaaccccagcctgctgcccgccctgctgcagcagatcggcagagagaacccccagctgctgcagcagatcagccagcaccaggagcacttcatccagatgctgaacgagcccgtgcaggaggccggcggccagggcggcggcggcggcggcggcagcggcggcatcgccgaggccggcagcggccacatgaactacatccaggtgaccccccaggagaaggaggccatcgagagactgaaggccctgggcttccccgagggcctggtgatccaggcctacttcgcctgcgagaagaacgagaacctggccgccaacttcctgctgcagcagaacttcgacgaggactag

SEQ ID NO: 87395 - DNA, 345 bp, Artificial Sequence
  derived and/or modified sequence
tgaaccgccagcagcgagcccgcccccgccagcgccgccaagcaggagaagcccgccgagaagcccgccgagacccccgtggccaccagccccaccgccaccgacagcaccagcggcgacagcagcagaagcaacctgttcgaggacgccaccagcgccctggtgaccggccagagctacgagaacatggtgaccgagatcatgagcatgggctacgagagagagcaggtgatcgccgccctgagagccagcttcaacaaccccgacagagccgtggagtacctgctgatgatcatcgtgaagaccggcaacaagaagaagaagcagcccctgctgggcaagtag

SEQ ID NO: 87396 - DNA, 1230 bp, Artificial Sequence
  derived and/or modified sequence
atgcaggtgacactcaagaccctgcagcagcaaactttcaaaatcgatatcgaccccgaggagactgtgaaggccctcaaggaaaaaatcgagtcggagaagggaaaagatgccttccccgtggccggacagaagcttatatatgctgggaagattctgaatgacgacaccgctttgaaagaatacaaaatcgatgagaagaacttcgtcgttgtcatggtaacgaagccaaaggccgtgagcacaccagcccccgctacaacacaacagagcgccccagcctcgaccacagcagtcacatcgtcaactactactaccgttgcccaagctcccacgccggtcccagccctggctcctactagcacaccagcaagcatcacccccgcaagcgcaaccgcttcctctgaaccagcccccgcctccgcggccaaacaggagaaaccagccgagaagcccgccgagacccccgttgccacatctccaactgcaactgatagcacatccggagactctagtaggtccaacttgttcgaagatgccacaagtgcgctggttactggccagagctacgagaatatggtgaccgagattatgagcatgggctatgagagagaacaggtcattgccgctttgagggccagctttaacaatcctgaccgcgccgtggagtacctgcttatgggtataccaggggacagagagtcgcaggccgttgtcgacccgccccaggctgcgtcaacgggagcaccccagtccagcgctgtcgcagctgcagcagctaccaccaccgccaccaccacgaccacatccagcggggggcacccactcgagttcctgcgtaatcagccccaattccagcagatgcgccaaattatccagcagaatcctagccttttgcccgctttgctccagcagatcgggcgcgaaaatcctcaactccttcagcagatctcccagcaccaagagcacttcatccaaatgctgaacgagccagtccaagaagccggtgggcaggggggtggcggagggggaggttctggcgggattgcggaagctggaagcggccatatgaattacatacaggtgacaccccaggaaaaggaagcgatagagcgcctcaaggccctcggatttcctgaaggcctggtgattcaggcttacttcgcctgtgagaaaaacgaaaatcttgccgcaaacttcttgctgcagcagaatttcgatgaggactag

SEQ ID NO: 87397 - DNA, 519 bp, Artificial Sequence
  derived and/or modified sequence
atggtgaccaagccaaaggcagtttccacccccgcacctgcaacgacccagcagtccgcgcccgccagcacgaccgctgttacctccagcaccaccacaaccgtcgcccaagcgcccacccccgtgcctgcgctggccccaaccagcacaccagccagtatcacaccagcatccgccaccgctagtagcgagccagcacccgcatccgcggctaaacaggagaagcccgccgaaaaaccagcagagactcctgtcgcgacttctcccaccgcaaccgattcgacctctggagattctagtagaagcaacttgttcgaagatgccacaagcgcactcgtgactggacagtcctatgagaacatggtaaccgagattatgtctatgggttacgaacgcgaacaggtcatagccgcactgcgcgcctcattcaataaccctgaccgggctgtggagtaccttttgatgataattgttaagacagggaacaagaagaaaaagcaacctcttctgggaaagtag

SEQ ID NO: 87398 - DNA, 1014 bp, Artificial Sequence
  derived and/or modified sequence
atggtcactaagccaaaagctgtgagtacaccagctcctgccacaacacagcagtctgccccagcgtccaccacagcagttacctcgtccacgaccactactgtggcccaggctcctacccccgtccccgcgttggcccctacatccacccccgcaagcattactccagcaagcgcgaccgcgagcagcgagcctgctcccgcctctgcagcaaagcaggaaaagccagcagaaaagccggccgaaactccagtggcaacctccccgaccgccaccgattccacatccggggatagttcacggtctaatctctttgaggacgctacctccgctttggtcaccggtcagtcatacgaaaatatggtcacggaaattatgagtatggggtacgaacgggaacaagtcattgccgccctgcgagcttccttcaataatcccgaccgcgccgtggagtatctgctcatgggaattccaggagatcgcgaatcgcaagctgttgtggatcccccccaggcagcttccaccggcgcaccccagtcatctgccgtcgcagcagccgctgctactacaactgcaaccacaaccacaaccagcagtggaggccatcccctggagtttctgcggaatcagccgcagttccagcagatgcgacagatcatccaacagaatccatcacttctgccagccttgttgcaacagatcggcagggaaaaccctcagttgttgcagcaaatttcacagcatcaggagcacttcatacagatgttgaatgaacccgtgcaggaggcaggaggtcaaggcggcggtggagggggaggctctggagggatcgcagaggcggggtcaggccacatgaattatatccaggtgacccctcaggagaaagaggctatcgaaagactgaaagctctggggttcccggagggactggttatccaggcatactttgcttgcgaaaagaacgagaacttggccgctaattttctactgcaacagaactttgatgaggactag

SEQ ID NO: 87399 - DNA, 345 bp, Artificial Sequence
  derived and/or modified sequence
tgaacggcctcatcagagcctgccccagcatcagcggcaaagcaggagaagcccgcggagaaacctgctgagactcccgtcgccacgtcccctacagccaccgatagcacctctggagatagctcaaggtccaacctcttcgaggatgcaacaagcgctcttgtgaccggacaaagttacgagaatatggtgacagaaatcatgtccatgggctacgaacgcgaacaagtgattgccgcactgagagcgtcatttaataaccctgaccgcgctgtggagtacctgctgatgataatcgtaaagacaggcaacaaaaaaaagaaacaaccattgcttggcaagtag

SEQ ID NO: 87400 - DNA, 1230 bp, Artificial Sequence
  derived and/or modified sequence
atgcaggtgaccctgaagaccctgcagcagcagaccttcaagattgatattgatcctgaggagaccgtgaaggccctgaaggagaagattgagagcgagaagggcaaggatgccttccctgtggccggccagaagctgatctatgccggcaagatcctgaatgatgacacagccctgaaggagtacaagattgatgagaagaactttgtggtggtgatggtgaccaagcccaaggctgtgtccaccccagccccagccaccacccagcagagcgccccagccagcaccacagctgtgaccagcagcaccaccaccaccgtggcccaggcccccacccctgtgcctgccctggcccccaccagcaccccagccagcatcaccccagccagcgccacagccagcagcgagcccgccccagccagcgctgccaagcaggagaagccagctgagaagccagctgagacccctgtggccaccagccccacagccacagacagcaccagcggggacagcagccgcagcaacctgtttgaagatgccaccagcgccctggtgacaggccagagctatgagaacatggtgacagagatcatgtccatgggctatgaaagagagcaggtgattgctgccctgcgggccagcttcaacaacccagacagagctgtggagtacctgctgatgggcatccctggggaccgggagagccaggccgtggtggaccccccccaggccgccagcactggagccccccagagcagcgctgtggccgctgctgctgccaccaccacagccaccaccaccaccaccagcagcggcggccaccccctggagttcctgaggaaccagccccagttccagcagatgaggcagatcatccagcagaaccccagcctgctgcctgccctgctgcagcagatcggccgggagaacccccagctgctgcagcagatcagccagcaccaggagcacttcatccagatgctgaatgaacctgtgcaggaggccggcggccagggcggcggcggcggcggcggcagcggcggcattgctgaggccggcagcggccacatgaactacatccaggtgaccccccaggagaaggaggccatcgagcggctgaaggccctgggcttccctgagggcctggtgatccaggcctactttgcctgtgagaagaatgaaaacctggccgccaacttcctgctgcagcagaactttgatgaggactag

SEQ ID NO: 87401 - DNA, 519 bp, Artificial Sequence
  derived and/or modified sequence
atggtgaccaagcccaaggctgtgtccaccccagccccagccaccacccagcagagcgccccagccagcaccacagctgtgaccagcagcaccaccaccaccgtggcccaggcccccacccctgtgcctgccctggcccccaccagcaccccagccagcatcaccccagccagcgccacagccagcagcgagcccgccccagccagcgctgccaagcaggagaagccagctgagaagccagctgagacccctgtggccaccagccccacagccacagacagcaccagcggggacagcagccgcagcaacctgtttgaagatgccaccagcgccctggtgacaggccagagctatgagaacatggtgacagagatcatgtccatgggctatgaaagagagcaggtgattgctgccctgcgggccagcttcaacaacccagacagagctgtggagtacctgctgatgatcatcgtgaagacaggcaacaagaagaagaagcagcccctgctgggcaagtag

SEQ ID NO: 87402 - DNA, 1014 bp, Artificial Sequence
  derived and/or modified sequence
atggtgaccaagcccaaggctgtgtccaccccagccccagccaccacccagcagagcgccccagccagcaccacagctgtgaccagcagcaccaccaccaccgtggcccaggcccccacccctgtgcctgccctggcccccaccagcaccccagccagcatcaccccagccagcgccacagccagcagcgagcccgccccagccagcgctgccaagcaggagaagccagctgagaagccagctgagacccctgtggccaccagccccacagccacagacagcaccagcggggacagcagccgcagcaacctgtttgaagatgccaccagcgccctggtgacaggccagagctatgagaacatggtgacagagatcatgtccatgggctatgaaagagagcaggtgattgctgccctgcgggccagcttcaacaacccagacagagctgtggagtacctgctgatgggcatccctggggaccgggagagccaggccgtggtggaccccccccaggccgccagcactggagccccccagagcagcgctgtggccgctgctgctgccaccaccacagccaccaccaccaccaccagcagcggcggccaccccctggagttcctgaggaaccagccccagttccagcagatgaggcagatcatccagcagaaccccagcctgctgcctgccctgctgcagcagatcggccgggagaacccccagctgctgcagcagatcagccagcaccaggagcacttcatccagatgctgaatgaacctgtgcaggaggccggcggccagggcggcggcggcggcggcggcagcggcggcattgctgaggccggcagcggccacatgaactacatccaggtgaccccccaggagaaggaggccatcgagcggctgaaggccctgggcttccctgagggcctggtgatccaggcctactttgcctgtgagaagaatgaaaacctggccgccaacttcctgctgcagcagaactttgatgaggactag

SEQ ID NO: 87403 - DNA, 345 bp, Artificial Sequence
  derived and/or modified sequence
tgaacagccagcagcgagcccgccccagccagcgctgccaagcaggagaagccagctgagaagccagctgagacccctgtggccaccagccccacagccacagacagcaccagcggggacagcagccgcagcaacctgtttgaagatgccaccagcgccctggtgacaggccagagctatgagaacatggtgacagagatcatgtccatgggctatgaaagagagcaggtgattgctgccctgcgggccagcttcaacaacccagacagagctgtggagtacctgctgatgatcatcgtgaagacaggcaacaagaagaagaagcagcccctgctgggcaagtag

SEQ ID NO: 87404 - DNA, 1230 bp, Artificial Sequence
  derived and/or modified sequence
atgcaggtgaccctgaagaccctgcagcagcagaccttcaagatcgatatcgatccagaggagaccgtgaaggcactgaaagagaagatcgagtctgagaaaggcaaggatgcatttcccgtagcaggtcagaagcttatctacgccggtaagatccttaacgacgacacggctctgaaagaatataagattgatgagaagaacttcgtggtggtcatggttactaaacccaaagctgtctcaacccctgcaccagccactactcagcagtctgctcccgcttctaccactgccgtcacttccagcacaacgacaacagtggcccaggctcctacaccagttcctgcactggcaccaacgtctactccagcttctattaccccagcatcagccaccgcgtcaagtgagcctgctcccgcttcagcggctaaacaggaaaagcccgctgagaaacccgccgagacacccgttgcaacgagcccgacagctacggacagcacctcgggagatagctcccggagcaatctctttgaagatgccacctccgccctcgtgacaggacagtcttatgaaaatatggtgacagagataatgtctatgggatacgagcgggagcaggtgatagcagcgcttagagctagcttcaacaatcccgaccgcgccgtggagtacctgctaatgggaatccctggggaccgggaatcccaggccgtggttgacccaccccaggcagcttccaccggcgcgccacagtcaagtgcggtcgccgcagcggctgccactaccacagctaccacaacgaccacctccagtggcggccaccctttagagtttctcaggaaccaaccccaatttcagcagatgagacagataatccaacagaatcccagtctcttacccgcactgctgcagcagatcgggagggagaatccacagctacttcagcagatctcccaacaccaggagcactttatccagatgctgaacgagcccgtgcaggaggcgggcggccaaggagggggtggaggtggcggcagcggcggaattgccgaggccggatctggacatatgaattatattcaagtgacccctcaagaaaaagaggcgatagagaggcttaaggcattagggtttccggagggtcttgtaatccaggcctacttcgcttgcgagaagaacgaaaacctggctgcgaattttttgttacagcagaacttcgacgaagactag

SEQ ID NO: 87405 - DNA, 519 bp, Artificial Sequence
  derived and/or modified sequence
atggtgaccaagcccaaggccgtgagcacccccgcccccgccaccacacagcagtcagccccagcaagtactacagccgtgaccagttccacaacaaccacagtcgcgcaggctccaacacctgtgcccgctctggcaccgactagcaccccagccagtattacacccgcatcagctacagcgtcctccgaacccgcaccagcttccgccgcaaagcaggagaagcccgccgaaaagccggcggagacccctgttgccacatcccccaccgccactgactctacatccggcgactcaagccgtagcaacctgtttgaagacgccacctcagcactggtaaccggccagtcatacgagaatatggtcactgaaatcatgtccatgggttacgaacgggagcaagtcatcgcagcactgcgggcatcatttaataatcccgaccgtgccgttgagtatctgctcatgatcatcgttaaaacagggaacaaaaagaaaaagcagccccttctcggaaagtag

SEQ ID NO: 87406 - DNA, 1014 bp, Artificial Sequence
  derived and/or modified sequence
atggtgaccaagcccaaggccgtgagcacccccgcccccgccaccacacaacagtcagcccctgcctccacaactgccgttaccagtagtacgactacaaccgtagctcaggctcccacacccgtccctgctctggcgccgaccagcacaccggcctccataacacccgcttcagctactgcctcctccgagcccgcaccagcttccgccgccaagcaggaaaaacccgccgagaagcctgctgagactcccgttgcgacgagccccaccgctacggactctacaagcggagattctagtaggtccaacttatttgaggatgctacaagtgcccttgttaccggtcaatcatatgagaatatggtgacagaaataatgagtatggggtacgagcgagagcaggtgatcgccgcgctgcgcgcatcgtttaacaatccagaccgggcggttgagtacttgctaatggggatacccggggacagagaaagccaggctgttgtcgaccctcctcaggccgccagcacaggagcacctcaaagttctgcagtggcagctgctgctgccaccacgaccgctaccacaactacaacctcctcaggtggtcaccctctggagttcctccgaaaccagccccagtttcagcagatgaggcagatcatccagcagaaccccagtctactgcccgcattgcttcaacaaatcggtcgtgagaatccccagctgcttcagcagatttctcagcatcaggagcactttatccagatgctcaatgagcccgtgcaagaagctggtggacagggaggcgggggtggaggtgggtctgggggcatcgcagaggctggttcagggcacatgaattatatccaagtgacacctcaggagaaggaggctattgagagactgaaggctctcgggttccctgaggggcttgtgatccaggcctatttcgcttgcgagaaaaacgaaaacctcgccgccaattttttgttacagcaaaatttcgatgaggattag

SEQ ID NO: 87407 - DNA, 345 bp, Artificial Sequence
  derived and/or modified sequence
tgaaccgccagcagcgagcccgcccccgccagcgccgccaagcaggagaagccagcggagaagccggccgagacccccgtcgctacctccccaaccgccacagatagcacctctggggattcatcccgctccaatctgttcgaggacgcaacaagtgctctcgtgacaggccagtcgtacgaaaacatggttaccgaaataatgtcaatgggttatgagcgggaacaagtgatcgcagcactcagggcaagcttcaataacccagacagggctgtggagtatttactcatgattattgtgaaaactggtaataagaaaaagaagcagccactgctgggtaaatag

SEQ ID NO: 87408 - DNA, 1230 bp, Artificial Sequence
  derived and/or modified sequence
atgcaagtgactttgaagaccctacagcagcagacattcaagatcgatatcgaccctgaggagaccgttaaagctctcaaggagaaaattgagtctgaaaaaggcaaagacgcattcccagtagctggacaaaaactgatatacgccggaaaaattctgaacgatgacacagccctgaaagagtacaagatcgacgagaagaactttgttgtggttatggttacaaagcccaaggctgtgtctaccccagcacctgccaccacccagcagtctgcgcctgcctccaccacagcagtgacgtcgtctaccacaaccacagtggcccaggctcctacgccagtgcccgctctggccccaacaagcacccccgcttcgatcacacctgcatccgcaaccgcatccagtgaaccggcacctgcctcggctgccaaacaggagaaaccggctgagaagcccgctgagacacccgtcgcgacaagtccaacagccaccgactcaacgagcggagactcatccagatccaacctgtttgaagacgccacttctgctctcgttaccggccagagttatgaaaatatggttacagagattatgtctatgggttatgagagagaacaagttatagcagcactgagggctagttttaacaaccccgacagggctgtggagtatctgctgatgggcattcccggtgatcgggagtcacaggcagtggtggatcctcctcaagctgcatctacaggcgctccccagtcttcagccgtcgcagccgcagccgcaacgaccactgccacaacgacaaccacaagttcaggaggacaccctctcgagtttctgcgcaatcagccacaattccagcagatgcgtcagataatccagcagaatccaagtctccttcctgcattactgcaacagattggcagagaaaacccacagctgttgcagcagatcagccagcatcaagagcactttattcagatgttgaacgaaccagtgcaagaggcaggcggacagggagggggaggcggtggcggatcgggcggaattgccgaagcagggagcggtcatatgaattatatccaggttacaccccaggaaaaagaggcaatcgaaaggctaaaagcgttgggttttcccgagggactcgtaattcaggcctacttcgcgtgcgaaaaaaacgaaaacctcgcggcaaattttctattgcagcagaatttcgatgaggactag

SEQ ID NO: 87409 - DNA, 519 bp, Artificial Sequence
  derived and/or modified sequence
atggttactaaacccaaggccgtcagcactcctgcccctgcaacgacacagcagagcgccccagcttcaactacggctgtcaccagttcgacaactactacggtagcacaggccccaacaccggtcccagctctggctcccacctccacacctgcaagtatcacccctgctagcgccacagcgagctctgaacctgctcctgcttcagccgcaaaacaagagaagccggcagagaagccagccgagactcccgtagctacctccccaacagcaactgatagtaccagtggagactccagtcgctcaaacctgtttgaagatgccacatcggccctcgttactggacagtcatatgaaaacatggtgacggaaattatgagtatgggctacgagagagaacaggtgattgcagcgcttagagcatcatttaacaaccctgatcgggctgtggagtacctgcttatgatcatcgttaagaccggtaacaaaaagaaaaagcagccgctattagggaagtag

SEQ ID NO: 87410 - DNA, 1014 bp, Artificial Sequence
  derived and/or modified sequence
atggtcacaaagccaaaggctgtgtcaactcctgcaccagctaccacgcagcagtctgccccagccagcactaccgccgtgactagcagtacaacgacaaccgtcgcccaggcacccacccccgtccccgcactggctccgacctcaactcctgcttctatcactcctgcatcggccacagcatcatctgagcctgcacccgcttctgccgctaagcaggagaaacccgctgagaaacccgctgagactcccgttgctacatcgccaactgctactgacagtacatccggagactcatcgcggtcaaacctctttgaggacgccacttctgcgttagtaacaggccagtcatatgagaatatggttacggaaatcatgtcaatgggctatgagcgggagcaagtgattgctgctctgcgggcatccttcaacaaccctgatagagcggttgagtaccttctaatgggcatcccaggggaccgggaatctcaggctgttgtagacccacctcaggccgcttccactggagctcctcagtctagtgcagtcgcagctgctgctgccaccaccaccgccaccaccaccacaacgagctccggtggccatcctctagagttccttcggaatcagcctcagtttcagcagatgcggcagatcatccagcagaatccctccctactgcccgcattgctgcaacaaatcggcagagagaacccgcaactgctgcagcaaatatcccagcaccaagagcattttatccagatgctcaatgagccagtgcaggaggcaggcggtcaaggcggaggtgggggtgggggatctggcggtatcgccgaggccggttctggacacatgaactatattcaggtcactccccaggagaaagaggctatcgagcgcctgaaggctctgggtttccctgagggactcgttatccaggcatacttcgcgtgtgagaagaatgaaaacctggctgccaatttcttactgcagcaaaattttgacgaggactag

SEQ ID NO: 87411 - DNA, 345 bp, Artificial Sequence
  derived and/or modified sequence
taaactgcgtctagtgagccagccccagcttccgcggcaaaacaggagaaacctgccgagaagcctgccgaaactccggtggcaactagcccgactgccaccgatagcacctccggagactcttctcggtcgaatctctttgaagatgccacaagtgcgctggttacaggacaaagttatgaaaacatggtgacagagattatgagcatgggctatgagagagagcaggttattgccgcactgcgggcaagtttcaacaatcctgatagagcagtggagtacttacttatgatcatcgttaaaactggcaacaaaaaaaaaaagcagccccttctggggaaatag

SEQ ID NO: 87412 - DNA, 4119 bp, Artificial Sequence
  derived and/or modified sequence
gagtcacgatgatggcggccaccatcctgtggtgagctagcggattccctgcttgtctcgccgaccccctcgcgccttctgcagactccgtggctggcgctcggcgcgtgaggaagcacggcggcccgagttcgcggggaaggccgcagtcgcggaggcagcggcgcggtccggggcacgggctgggggagaggccgctccgctgggcgaatgtgacaagcccccacccccaccgccttcctccccagagcgcgaggagcgcgggcgaccccggggccccgccaggccacagaccccgcccagcggccagcacccggcgcaggcccggcagccgagctgcgcggcggcaccatgcaggtcaccctgaagaccctccagcagcagaccttcaagatagacattgaccccgaggagacggtgaaagcactgaaagagaagattgaatctgaaaaggggaaagatgcctttccagtagcaggtcaaaaattaatttatgcaggcaaaatcctcaatgatgatactgctctcaaagaatataaaattgatgagaaaaactttgtggtggttatggtgaccaaacccaaagcagtgtccacaccagcaccagctacaactcagcagtcagctcctgccagcactacagcagttacttcctccaccaccacaactgtggctcaggctccaacccctgtccctgccttggcccccacttccacacctgcatccatcactccagcatcagcgacagcatcttctgaacctgcacctgctagtgcagctaaacaagagaagcctgcagaaaagccagcagagacaccagtggctactagcccaacagcaactgacagtacatcgggtgattcttctcggtcaaacctttttgaagatgcaacgagtgcacttgtgacgggtcagtcttacgagaatatggtaactgagatcatgtcaatgggctatgaacgagagcaagtaattgcagccctgagagccagtttcaacaaccctgacagagcagtggagtatcttttaatgggaatccctggagatagagaaagtcaggctgtggttgacccccctcaagcagctagtactggggctcctcagtcttcagcagtggctgcagctgcagcaactacgacagcaacaactacaacaacaagttctggaggacatccccttgaatttttacggaatcagcctcagtttcaacagatgagacaaattattcagcagaatccttccttgcttccagcgttactacagcagataggtcgagagaatcctcaattacttcagcaaattagccaacaccaggagcattttattcagatgttaaatgaaccagttcaagaagctggtggtcaaggaggaggaggtggaggtggcagtggaggaattgcagaagctggaagtggtcatatgaactacattcaagtaacacctcaggaaaaagaagctatagaaaggttaaaggcattaggatttcctgaaggacttgtgatacaagcgtattttgcttgtgagaagaatgagaatttggctgccaattttcttctacagcagaactttgatgaagattgaaagggacttttttatatctcacacttcacaccagtgcattacactaacttgttcactggattgtctgggatgacttgggctcatatccacaatacttggtataaggtagtagattgttgggggtggggagggagggatctaggatacagggcagggataaatacagtgcatgtctgcttcaattagcagatgccgcaactccacacagtgtgtaaaatatatacaaccaaaaatcagcttttgcaggtctttatttcttctgtaaaacagtaggtaacttttcctaggtttcactctttttagtgtactagatccagaaacttagtgtaatgccctgctttatatttctttgacttaacattggtttcagaaagaatcttagctacctagaatttacagtctctgtttcatggcaacactggataatggctttgtgaaatttaaaaaatttttgtagcgactgtaaacagaaatgccaaattgatggttaattgttgctgcttcaaaaataagtataaaattaatatgtaaggaagcccattctttcatgttaaatacttggggtgggaggggagaaagggaaccttttcttaaaatgaaaataattactgctattttaaaatttcttgatcattgaatgtgagacccttctaacatgatttgagaagctgtacaagtataggcagagttattttcctgtttacattttttttttgttttggggaaaaaattggtaggtgtctaattactgtttacttcattgttatattgcagtaaaagttttaaaacaaccattgcatgtttgcttttgatgtatccctttgtgaaattagcacttttggggccaatggagaaatgcagcattcactctccctgtcttttccccttccctcagcagaaacgtgtttatcagcaagtcgtgagtcaaactgctgccttttaaaaaacccacaaaatgctgattcagttcaaaattaatgcaaatgtttcaaaactgggtttctgatatttgtaaatgtgtttctttattagataagagtgtattaccattaaagtcattagtataatattgctttcaaaaagaaatggtagacaaaactataatccagcatcttttattgcattggaaagactggcaaagtcttttggatgggttgggagatgtggctggaaagtactttggaaaatatacaatcaagatatctcatggcatattaaaagaaaaatcttaatagcagtgttggcttttatttggattttttcatctcagttttttctgtggaatctccttcattggcattgttatttaatcataaacggggcagatgtctacttgttcagtttttcaaatctgttttcctgagtataaataagagtatttaaagaaataatttggattgcttttgttttttgtttccttttttttaaccatctgatactaagaagatgaatttgcacagatttctctgcataatttctcaatatctttagcacagtatggtgatgatgacttttaagcatttacatcacgtactcataacctattatgaaaataaatgaaactggctgggtatggtggctcatgcctataatcccagcactttgggaggccgaggtgggcagatcacttgaggccaggagattgagaccagcctgaccgtcatggcgaaaccccgtctatactaaaaatacaaaaaatagccaggcatggtggcgcacgcctgtggtcccagctacttgggaggctgaggcatgagaattgcttgaacccgggaagtgaaggttgccgtgagctgagatcacaccactgccataaacatgacaggcttttggactttgtattacctgtatgttttataatggatcatgcataatttctcaggagaataaaatgagaattcatatatacgttcatctttcaagtcagagcaatgagttgggaaaagaggtggcatttctgatcggataatggaatactctcatttattttatgacattctctgtctactcagatcatagtgaaaactggaaacaaaaaaaaaaaacagcctcttcttggaaagtgacagcagaaggtggcatggagcttgtgtccttggacaacaaatctggatatactaggattaattatcagaagacagctcaggccaagttttgatcgttccatacagtaccttgtttatctgcttcttaaagaatcagccgagacaccataaaagaaataggctttttgtgccttttgctgttaatgtttaatttacaaactgttttggtaaatctcttaatgtaagtagctatttgactttggaattttgcattcgaggtatactgtcatttcttgaaatctttttctcgtttagttgctctgtgggaaatgtgaggaagcctaagtttgtatttgtaaatttcttatgccatcctctagtcaaattttttttcattgtttaaaaatacggaagtgttccaatataattttttcctgtactggatggctaggattctagagaattgattataaaatattttcaatacatccaa

SEQ ID NO: 87413 - DNA, 1527 bp, Artificial Sequence
  derived and/or modified sequence
ggtgggggagggagacgtaggcgtcgccactacccctgtgtggacctggttagccgcttagttcccagagttggtaacccgagaagatgagccttaagaaaaaaaaaagtatcaggttccgtttgccgccgagaggtgaaagcactgaaagagaagattgaatctgaaaaggggaaagatgcctttccagtagcaggtcaaaaattaatttatgcaggcaaaatcctcaatgatgatactgctctcaaagaatataaaattgatgagaaaaactttgtggtggttatggtgaccaaacccaaagcagtgtccacaccagcaccagctacaactcagcagtcagctcctgccagcactacagcagttacttcctccaccaccacaactgtggctcaggctccaacccctgtccctgccttggcccccacttccacacctgcatccatcactccagcatcagcgacagcatcttctgaacctgcacctgctagtgcagctaaacaagagaagcctgcagaaaagccagcagagacaccagtggctactagcccaacagcaactgacagtacatcgggtgattcttctcggtcaaacctttttgaagatgcaacgagtgcacttgtgacgggtcagtcttacgagaatatggtaactgagatcatgtcaatgggctatgaacgagagcaagtaattgcagccctgagagccagtttcaacaaccctgacagagcagtggagtatcttttaatgggaatccctggagatagagaaagtcaggctgtggttgacccccctcaagcagctagtactggggctcctcagtcttcagcagtggctgcagctgcagcaactacgacagcaacaactacaacaacaagttctggaggacatccccttgaatttttacggaatcagcctcagtttcaacagatgagacaaattattcagcagaatccttccttgcttccagcgttactacagcagataggtcgagagaatcctcaattacttcagcaaattagccaacaccaggagcattttattcagatgttaaatgaaccagttcaagaagctggtggtcaaggaggaggaggtggaggtggcagtggaggaattgcagaagctggaagtggtcatatgaactacattcaagtaacacctcaggaaaaagaagctatagaaaggttaaaggcattaggatttcctgaaggacttgtgatacaagcgtattttgcttgtgagaagaatgagaatttggctgccaattttcttctacagcagaactttgatgaagattgaaagggacttttttatatctcacacttcacaccagtgcattacactaacttgttcactggattgtctgggatgacttgggctcatatccacaatacttggtataaggtagtagattgttgggggtggggagggagggatctaggatacagggcagggataaatacagtgcatgtctgcttcaattagcagatgccgcaactccacacagtgtgtaaaatatatacaacc

SEQ ID NO: 87414 - DNA, 811 bp, Artificial Sequence
  derived and/or modified sequence
cgacagcatcttctgaacctgcacctgctagtgcagctaaacaagagaagcctgcagaaaagccagcagagacaccagtggctactagcccaacagcaactgacagtacatcgggtgattcttctcggtcaaacctttttgaagatgcaacgagtgcacttgtgacgggtcagtcttacgagaatatggtaactgagatcatgtcaatgggctatgaacgagagcaagtaattgcagccctgagagccagtttcaacaaccctgacagagcagtggagtatcttttaatgatcatagtgaaaactggaaacaaaaaaaaaaaacagcctcttcttggaaagtgacagcagaaggtggcatggagcttgtgtccttggacaacaaatctggatatactaggattaattatcagaagacagctcaggccaagttttgatcgttccatacagtaccttgtttatctgcttcttaaagaatcagccgagacaccataaaagaaataggctttttgtgccttttgctgttaatgtttaatttacaaactgttttggtaaatctcttaatgtaagtagctatttgactttggaattttgcattcgaggtatactgtcatttcttgaaatctttttctcgtttagttgctctgtgggaaatgtgaggaagcctaagtttgtatttgtaaatttcttatgccatcctctagtcaaattttttttcattgtttaaaaatacggaagtgttccaatataattttttcctgtactggatggctaggattctagagaattgattataaaatattttcaataca

SEQ ID NO: 87415 - protein, 546 aa, Artificial Sequence
  derived and/or modified sequence
MSNDGRSRNRDRRYDEVPSDLPYQDTTIRTHPTLHDSERAVSADPLPPPPLPLQPPFGPDFYSSDTEEPAIAPDLKPVRRFVPDSWKNFFRGKKKDPEWDKPVSDIRYISDGVECSPPASPARPNHRSPLNSCKDPYGGSEGTFSSRKEADAVFPRDPYGSLDRHTQTVRTYSEKVEEYNLRYSYMKSWAGLLRILGVVELLLGAGVFACVTAYIHKDSEWYNLFGYSQPYGMGGVGGLGSMYGGYYYTGPKTPFVLVVAGLAWITTIIILVLGMSMYYRTILLDSNWWPLTEFGINVALFILYMAAAIVYVNDTNRGGLCYYPLFNTPVNAVFCRVEGGQIAAMIFLFVTMIVYLISALVCLKLWRHEAARRHREYMEQQECEMATSGDRQRDSEVNFKELRTAKMKPELLSGHIPPGHIPKPIVMPDYVAKYPVIQTDDERERYKAVFQDQFSEYKELSAEVQAVLRKFDELDAVMSRLPHHSESRQEHERISRIHEEFKKKKNDPTFLEKKERCDYLKNKLSHIKQRIQEYDKVMNWDVQGYS

SEQ ID NO: 87416 - DNA, 1329 bp, Artificial Sequence
  derived and/or modified sequence
atgtcaaatgatgggcggtcccggaatagggacagaaggtatgatgaggtcccatcagacctgccctatcaagatactaccatccgaacgcacccaacattgcatgattccgagcgggccgtgagtgcagaccctttgccccccccaccccttcccttacaaccgccattcggtccagatttctattcgagcgataccgaagaacctgccatcgctcctgacctcaaacccgtgcgtaggttcgtgccggactcatggaagaacttcttccgtggtaagaagaaggaccctgagtgggacaagcctgttagcgatatccggtatatcagcgatggggtcgagtgctctccaccggcttctccggccagacctaatcacaggagccctttgaactcatgcaaagacccatacggcggatcagaaggcacgtttagcagccgcaaagaggccgatgcggtgttcccacgtgacccttacgggagtttggacaggcacacccaaacagtccggacatactccgagaaggtggaagaatacaacctgcgatattcctacatgaagtcctgggcaggtctcctcaggatcctgggggtggtagagctgttactgggagcaggagtcttcgcctgcgttacagcgtatatccataaagactcagagtggtacaacctgttcggatacagccagccttacgggatgggtggtgtagggggcctgggatctatcgcactagtctgtcttaagctgtggcgccatgaagccgcacggcgacaccgagagtacatggaacagcaggagatcaacgaaccatctctttccagcaagcggaaaatgtgcgagatggccacatcaggcgaccgtcagcgcgattccgaggtcaacttcaaggagttgaggaccgcgaaaatgaagcccgagctcttgtcaggccatatcccccccgggcacatcccgaagcccattgtcatgccggactatgtggctaaatatcccgtcatccagacagatgatgaaagagagcggtataaagcagtcttccaggaccagttttctgaatacaaagagctctcggctgaggtgcaggctgttttaagaaaatttgatgaactggacgccgtaatgtccagactgccacaccacagcgagtcaaggcaggagcatgaacgtattagccgcatccatgaagaattcaagaagaagaagaatgatcctaccttcctggagaagaaggaaaggtgtgactatcttaagaacaagctgtcccatatcaagcagcgtatacaggaatacgataaggtcatgaattgggacgttcagggatattcttag

SEQ ID NO: 87417 - DNA, 1641 bp, Artificial Sequence
  derived and/or modified sequence
atgagcaacgacggccgttcccggaatcgagaccggagatatgatgaggtgccgtctgacctcccctaccaggacacaaccattaggactcatccaacgcttcacgattcggaacgggcagtgtccgctgaccccctgccacctccaccactgcccctgcagcctccatttggccctgatttctattcttctgacacagaagaacccgccattgctcccgacctcaaaccagtgaggcgcttcgtgcctgattcttggaagaacttttttaggggtaaaaagaaagaccccgaatgggacaagcccgtaagcgatatccgctatatttccgatggcgtggagtgcagtcctccagcctcccctgccagaccaaaccatcggagtcctctgaacagttgtaaggacccatacggcggctcggagggaacatttagttcccgaaaggaggccgatgccgtatttccccgggatccttatggctccctcgacaggcacacgcagacagtcagaacctactcagagaaggtcgaggaatataatctacgatactcttacatgaagtcttgggcaggactgctaaggatactcggagtggtagaattgctgctgggagcaggggtctttgcgtgcgtcacagcctatatacacaaagatagcgaatggtataacttgtttggatattctcagccttatggtatgggtggcgtggggggccttgggtcaatgtatgggggctattattataccggccctaagactccttttgtgttagtcgtcgcagggctagcttggattactacaatcattattctcgtgttagggatgtccatgtattatagaacaattctgctggacagcaactggtggcctctgacagagtttggtatcaacgtagcccttttcatcctgtatatggctgccgcgattgtgtacgtgaatgacactaatcggggcgggctctgttactacccgctgttcaatacgcctgtgaatgccgtgttctgtcgggttgaaggtgggcagatcgccgccatgatctttctcttcgtgacaatgatagtgtacctcataagtgcactggtctgcttgaaattatggcgacacgaggcagcccgtagacaccgggagtatatggaacagcaggaatgcgagatggcaacttcaggagacagacaacgggatagtgaggttaattttaaagagttacgtacagctaaaatgaagccagagttgctgagcgggcatatacccccgggccacatccccaagcctatcgtaatgccagactatgtggcaaaatacccagttatacagactgatgacgaaagagagaggtacaaggctgtgttccaggatcagttttccgaatataaagaactgagcgcggaggtgcaggccgtgctgaggaaatttgacgagctcgatgctgtgatgtctcgactcccccatcattcggagagtagacaggaacacgagaggatttcccgtattcacgaggagtttaagaagaagaagaacgaccccacattcttggaaaagaaagaacgatgtgactacctgaagaataagctctctcatattaagcaaagaatccaggaatacgacaaggttatgaattgggacgtccaaggctactcatag

SEQ ID NO: 87418 - DNA, 438 bp, Artificial Sequence
  derived and/or modified sequence
atgtctaacgacggtcgtagccggaatcgcgatcgtcggtacgatgaggtgccgagcgacctcccataccaggacaccaccatcagaacacaccccacattgcatgactccgagcgcgctgtatccgctgatcccctgcctccgcctccgcttccactccagccaccgttcggccccgatttctattcaagtgacactgaggagcctgcaatagcacccgatttgaagcctgttaggaggttcgtcccagattcctggaagaattttttccgaggcaagaaaaaggaccccgaatgggataagccagtgtccgatatccggtacatctcggatggggttgagtgttcccctcccgcatcacctgcaagacctaaccacaggtcccccctgaactcatgtaaggatccttacgggggcagtgaaggcacatttagctag

SEQ ID NO: 87419 - DNA, 1329 bp, Artificial Sequence
  derived and/or modified sequence
atgagcaatgatggccgcagcaggaacagagaccggcgctatgatgaggtgcccagcgacctgccctaccaggacaccaccatccgcacccaccccaccctgcatgattctgaaagagctgtgtctgctgaccccctgcccccaccacccctgcccctgcagcccccatttggaccagacttctacagcagtgacacagaggagcccgccatcgccccagacctgaagcctgtgagaagatttgtgcctgacagctggaagaacttcttccggggcaagaagaaggaccctgagtgggacaagcctgtgtctgacatccgctacatcagtgatggagtggagtgcagccccccagccagccctgcccggcccaaccacaggagccccctgaacagctgcaaggacccctatggaggcagcgagggcaccttcagcagcaggaaggaggctgatgctgtgttcccccgggacccctacggcagcctggacagacacacccagacagtgaggacctacagcgagaaggtggaggagtacaacctgcgctacagctacatgaagtcctgggccggcctgctgcgcatcctgggcgtggtggagctgctgctgggcgctggggtgtttgcctgtgtgacagcctacatccacaaggacagcgagtggtacaacctgtttggctacagccagccctacggcatgggcggcgtgggcggcctgggcagcatcgccctggtgtgcctgaagctgtggaggcatgaggccgcccggcggcaccgggagtacatggagcagcaggagatcaatgagcccagcctgagcagcaagaggaagatgtgtgagatggccaccagcggggaccggcagagggacagcgaggtgaacttcaaggagctgaggacagccaagatgaagccagagctgctgagcggccacatccccccaggccacatccccaagcccatcgtgatgccagactatgtggccaagtaccctgtgatccagacagatgatgagcgggagcgctacaaggctgtgttccaggaccagttcagcgagtacaaggagctgtctgctgaggtgcaggccgtgctgaggaagtttgatgagctggatgctgtgatgagccggctgccccaccacagcgagagccggcaggagcacgagcgcatcagccgcatccacgaggagttcaagaagaagaagaatgaccccaccttcctggagaagaaggagcgctgtgactacctgaagaacaagctgagccacatcaagcagaggatccaggagtatgacaaggtgatgaactgggatgtgcagggctacagctag

SEQ ID NO: 87420 - DNA, 1641 bp, Artificial Sequence
  derived and/or modified sequence
atgagcaatgatggccgcagcaggaacagagaccggcgctatgatgaggtgcccagcgacctgccctaccaggacaccaccatccgcacccaccccaccctgcatgattctgaaagagctgtgtctgctgaccccctgcccccaccacccctgcccctgcagcccccatttggaccagacttctacagcagtgacacagaggagcccgccatcgccccagacctgaagcctgtgagaagatttgtgcctgacagctggaagaacttcttccggggcaagaagaaggaccctgagtgggacaagcctgtgtctgacatccgctacatcagtgatggagtggagtgcagccccccagccagccctgcccggcccaaccacaggagccccctgaacagctgcaaggacccctatggaggcagcgagggcaccttcagcagcaggaaggaggctgatgctgtgttcccccgggacccctacggcagcctggacagacacacccagacagtgaggacctacagcgagaaggtggaggagtacaacctgcgctacagctacatgaagtcctgggccggcctgctgcgcatcctgggcgtggtggagctgctgctgggcgctggggtgtttgcctgtgtgacagcctacatccacaaggacagcgagtggtacaacctgtttggctacagccagccctacggcatgggcggcgtgggcggcctgggctccatgtatggaggctactactacacaggccccaagaccccatttgtgctggtggtggccggcctggcctggatcaccaccatcatcatcctggtgctgggcatgtccatgtactaccgcaccatcctgctggacagcaactggtggcccctgacagaatttggcatcaacgtggccctcttcatcctgtacatggctgctgccatcgtgtatgtgaatgacaccaacagaggaggcctgtgctactaccccctcttcaacacccctgtgaatgctgtgttctgccgggtggagggcggccagattgctgccatgatcttcctgtttgtgaccatgattgtgtacctgatcagcgccctggtgtgcctgaagctgtggaggcatgaggccgcccggcggcaccgggagtacatggagcagcaggagtgtgagatggccaccagcggggaccggcagagggacagcgaggtgaacttcaaggagctgaggacagccaagatgaagccagagctgctgagcggccacatccccccaggccacatccccaagcccatcgtgatgccagactatgtggccaagtaccctgtgatccagacagatgatgagcgggagcgctacaaggctgtgttccaggaccagttcagcgagtacaaggagctgtctgctgaggtgcaggccgtgctgaggaagtttgatgagctggatgctgtgatgagccggctgccccaccacagcgagagccggcaggagcacgagcgcatcagccgcatccacgaggagttcaagaagaagaagaatgaccccaccttcctggagaagaaggagcgctgtgactacctgaagaacaagctgagccacatcaagcagaggatccaggagtatgacaaggtgatgaactgggatgtgcagggctacagctag

SEQ ID NO: 87421 - DNA, 438 bp, Artificial Sequence
  derived and/or modified sequence
atgagcaatgatggccgcagcaggaacagagaccggcgctatgatgaggtgcccagcgacctgccctaccaggacaccaccatccgcacccaccccaccctgcatgattctgaaagagctgtgtctgctgaccccctgcccccaccacccctgcccctgcagcccccatttggaccagacttctacagcagtgacacagaggagcccgccatcgccccagacctgaagcctgtgagaagatttgtgcctgacagctggaagaacttcttccggggcaagaagaaggaccctgagtgggacaagcctgtgtctgacatccgctacatcagtgatggagtggagtgcagccccccagccagccctgcccggcccaaccacaggagccccctgaacagctgcaaggacccctatggaggcagcgagggcaccttctcctag

SEQ ID NO: 87422 - DNA, 1584 bp, Artificial Sequence
  derived and/or modified sequence
caggtgtgaaaatcacaaatgtcaaatgatggaagatccaggaatcgggacaggcgctacgatgaggtcccaagcgacctgccctatcaagataccaccataagaacccacccaactcttcatgacagtgagcgggcagtgagcgctgatcccttgccaccaccccctctcccattacagccaccattcggcccagacttctactcaagtgacacagaagaaccagctatagcgccagatctcaaaccagtaaggcgctttgtccctgactcctggaagaactttttcagagggaagaaaaaggaccccgaatgggataagccggtgtctgatatcaggtacatctccgatggagtggagtgttcaccaccagcctctccagcaagaccaaaccaccgttcgcccctcaactcctgcaaagatccctacggagggtcagaaggaacctttagttcccggaaagaggctgacgcagtgtttccccgggatccctatggatctctagaccgacacacacaaacagttcgaacatacagtgagaaggtggaggagtataacctgagatactcctacatgaagtcgtgggcaggcctgctgagaatactgggtgtggtggagctgcttttgggggccggtgtctttgcttgtgtcacagcttacattcacaaggacagtgagtggtacaacttgtttggatattcacaaccgtatggcatgggaggcgttggtggattgggcagtattgctttggtttgcctaaagttatggaggcatgaggcagctcggagacatagagaatatatggaacaacaggagataaatgagccatcattgtcatcgaaaaggaaaatgtgtgaaatggccaccagtggtgacagacaaagagactcagaagttaatttcaaggaactgagaacagcaaaaatgaaacctgaactactgagtggacacatccccccaggccacattcctaaacctatcgtgatgcccgactatgtggcaaaataccctgtgattcagacagatgatgagcgagaacgctataaagctgtgttccaagaccagttttcagagtacaaagagctgtctgcagaagttcaggctgtcctgaggaagtttgatgagctggatgcagtgatgagcagattgccacatcattcggaaagccgacaggaacatgagagaatttcaagaatccatgaagagtttaagaaaaaaaagaatgatcctacatttctggaaaaaaaagaacgctgtgattacctaaagaataaactttctcacataaagcaaagaattcaagaatatgataaagtaatgaattgggatgtacaaggttattcttaacgcttatttgaaaccactttatttttttattttattttatttttttgagatgaagtctcgctctgttacccaggctggaatgcagtggcacaatctcggctcactgcaacctccacctcccgggttcaagcaattctcctgttcaagcaattagcctccccacctcccaaagtgttgggattacaggcgtgagtcaccgcgcccagctggtattgcttttctattccctttggacat

SEQ ID NO: 87423 - DNA, 4376 bp, Artificial Sequence
  derived and/or modified sequence
cagagtcctgggcagcgtgcgcgctcttcctggcggctgcgcaggtgtgaaaatcacaaatgtcaaatgatggaagatccaggaatcgggacaggcgctacgatgaggtcccaagcgacctgccctatcaagataccaccataagaacccacccaactcttcatgacagtgagcgggcagtgagcgctgatcccttgccaccaccccctctcccattacagccaccattcggcccagacttctactcaagtgacacagaagaaccagctatagcgccagatctcaaaccagtaaggcgctttgtccctgactcctggaagaactttttcagagggaagaaaaaggaccccgaatgggataagccggtgtctgatatcaggtacatctccgatggagtggagtgttcaccaccagcctctccagcaagaccaaaccaccgttcgcccctcaactcctgcaaagatccctacggagggtcagaaggaacctttagttcccggaaagaggctgacgcagtgtttccccgggatccctatggatctctagaccgacacacacaaacagttcgaacatacagtgagaaggtggaggagtataacctgagatactcctacatgaagtcgtgggcaggcctgctgagaatactgggtgtggtggagctgcttttgggggccggtgtctttgcttgtgtcacagcttacattcacaaggacagtgagtggtacaacttgtttggatattcacaaccgtatggcatgggaggcgttggtggattgggcagtatgtatgggggctattactacactggccctaagaccccttttgtactcgtggttgctggattagcttggatcaccaccattattattctggttcttggcatgtccatgtattaccggaccattcttctggactctaattggtggcccctaactgaatttggaattaacgttgccttgtttattttgtatatggccgcagccatagtctatgtgaatgataccaaccgaggtggcctctgctactatccgttatttaatacaccagtgaatgcagtgttctgccgggtagaaggaggacagatagctgcaatgatcttcctgtttgtcaccatgatagtttatctcattagtgctttggtttgcctaaagttatggaggcatgaggcagctcggagacatagagaatatatggaacaacaggagtgtgaaatggccaccagtggtgacagacaaagagactcagaagttaatttcaaggaactgagaacagcaaaaatgaaacctgaactactgagtggacacatccccccaggccacattcctaaacctatcgtgatgcccgactatgtggcaaaataccctgtgattcagacagatgatgagcgagaacgctataaagctgtgttccaagaccagttttcagagtacaaagagctgtctgcagaagttcaggctgtcctgaggaagtttgatgagctggatgcagtgatgagcagattgccacatcattcggaaagccgacaggaacatgagagaatttcaagaatccatgaagagtttaagaaaaaaaagaatgatcctacatttctggaaaaaaaagaacgctgtgattacctaaagaataaactttctcacataaagcaaagaattcaagaatatgataaagtaatgaattgggatgtacaaggttattcttaacgcttatttgaaaccactttatttttttattttattttatttttttgagatgaagtctcgctctgttacccaggctggaatgcagtggcacaatctcggctcactgcaacctccacctcccgggttcaagcaattctcctgttcaagcaattagcctccccagtagctgggattacaggcgtgcgctgccacaccccgctaatttttgtatttttagtagagacgaggtttcaccatgttggtcaggctgggaaactactttttttaaaaaatagcaagtttactatttatttactgcctttttaatgctagcctctgtggtagagaagcaagcgcttcccaaatcagcttccaattggtttaaccagtatgcaacattaaagattttactcagacatttttaaacgaattcaaatgttctaagggcctttactaagaatggaaaaaatcctgtgttcatctttcatctgtgaccaatttcatattcatctatctcatttaaatgtgtcatcattttagagatcgtatcctggcagtgtgatgggcaagtggaccatcaattctggtgctactttttccttttttactcaggcaggttcctaggatttttctgggacaaatttctcttcctagagaaattcctaggggatttctaaaggatttttctaagggaaaaagggtgacatctttcaaaggtgtcatttattcccttgaaaggtgtttgaatcccagatcaacattttcagacatcctgatcttgggcaaattgcttaatctctctgtgcctgtttcctcttctgtaaaatggggctaataatagttccttcctcatagagttgttaggattaaaggagttactaatatggtaggaactatattagtgtttgtgaagtctactgaagtgtttgtgaaatgaataaattataaagaatgagtctcaagaaaaggtccttaatgagcaagcccaacctacttaaccaaaagcccaagtgtctggtgcctttctggtttgtggtgttaactcatggccttagcctggtgcttcactgtggctctgtggcccctggggttccacatggcctccctgtctttcatcagtgtgactgtacatctctccatctccccatagtccagcctgccctggacacattgaattgtatgaatggtattgcttttttttttttttttttgtgagacagagtcttactctgttgcccagactggagtgcagtggtgcgatctcggctcactgcaagctccgcctcccaagttcacgtcattttcctgcctcagcctcccgagtagctgggactacaggcacctgccaccacgcccagctaatttttttgtatttttagtagagatggggtttcaccgtgttagccaggatgatctcgatctcctgacctcatgatccacccgcctcagcctcccaaagtgttgggattacaggcgtgagtcaccgcgcccagctggtattgcttttctattccctttggacatacatgctacagtcccacaatgtagcatttccttggaaactccctttttttttttttttgagatggagtttcgctcttgttgcccaggctggagtacagtggtatgatcttggctcactgcagcctctgcctcctgggttcaagcgattctcctgcctctgcctcccaagtagctgggattacaggcacccaccaccatgcccagctaattttttgtatttttagtagagacaggatttcactatgttggccaggttggtctcaagctcctgacctcagatgatctaccagcctcggccttctgaagtgctgggattcaggtgtgagccactgtgcccagcagggatgcttcatctttctaagaattatcttggctttggactttattcataaatgttttatttctgttagtatgaacaatagactgccttaacaaagtttttttttaaacaaaatcgttcttgttggattttattcagcagcatctatcatgtagataaattcccaggtgtagcattacagcttctgactaatatagctgccattcagacaattaatgttcaaagagttttctaaagtgataaaaccaaagaaaagcatgtggaaaagcagaagcttagaaagttgtggtcactgaatgcactccctggtttttatttgtcagtgaaatctttatgcattcattgttaatattttaattccatggctttgtaggctgtgctgtgtctgaaggggtaacacctagggaaacatgaggccccttatgggaccccccaaatggaacaacttcactttctcttttatgtattgagccctgtgttaacatttcacttaagaagagcaccagtgctttaaaaaaaaaaaaaggtaaaatattaccattttgatagactgtaaagagttagattcctgttgaagtgttaaggaaatttaactttgtgaaacttttaaaataaagtttataaatgtagctaatctttgaaaaaccaatgcagtaacactgatttgtaaatgttgtggtcaatccctaggtgcattaaagtttcagtcacctgccgtgtgtgtgtgtgcccttttatgtttgccttcctagcattcctgtgttcactgtgcatgttcttgaaaatattttcacttgtcagaaaataaactggaaagtcattgaaaacccgta

SEQ ID NO: 87424 - DNA, 576 bp, Artificial Sequence
  derived and/or modified sequence
cccaggtgtgctgcgacggacggctgcccgcgctcggcgctcagcctgccatagcccgcgggggaggccggagccagggatccggggaggcccgcgtcccgccaggtttcgctctgcggacgcaggtgtgaaaatcacaaatgtcaaatgatggaagatccaggaatcgggacaggcgctacgatgaggtcccaagcgacctgccctatcaagataccaccataagaacccacccaactcttcatgacagtgagcgggcagtgagcgctgatcccttgccaccaccccctctcccattacagccaccattcggcccagacttctactcaagtgacacagaagaaccagctatagcgccagatctcaaaccagtaaggcgctttgtccctgactcctggaagaactttttcagagggaagaaaaaggaccccgaatgggataagccggtgtctgatatcaggtacatctccgatggagtggagtgttcaccaccagcctctccagcaagaccaaaccaccgttcgcccctcaactcctgcaaagatccctacggagggtcagaaggaacctttagtt

SEQ ID NO: 87425 - DNA, 1329 bp, Artificial Sequence
  derived and/or modified sequence
atgagcaacgacggccggagccggaaccgggaccggcggtacgacgaggttccatctgaccttccctatcaggataccaccattcgcacacaccctactttgcacgactccgagcgcgctgttagcgctgatccgctcccgccaccccctctgcccttgcagccaccgttcggccctgacttttactccagtgacactgaggagcccgcaattgcacctgatctcaaacctgtgcgacgattcgttccagatagttggaaaaatttcttcagagggaagaagaaggatcccgaatgggataaacctgtatccgatatcaggtacatatcagacggggttgagtgttcacctccagcctcacctgccaggcctaaccacaggtcgccccttaacagttgtaaggacccctatggaggatccgagggcacttttagctctaggaaagaggccgacgcggtgtttcctagggacccctacggctccctggaccggcacactcagacagtccgtacgtactctgagaaagttgaagaatacaacctccgttattcttatatgaagtcctgggcgggactgctgaggattctcggagtggtcgagctgttactgggcgccggggtgttcgcatgcgttaccgcatacattcacaaagacagcgagtggtacaacctgttcggatactctcagccctatgggatggggggcgtaggcgggcttgggagcatcgccttggtgtgcctcaaactgtggaggcacgaggctgcgcggagacaccgggaatacatggaacagcaggagatcaacgagccatccctgagcagcaaacgtaagatgtgtgagatggctacgagtggagatcggcaaagagatagtgaagtgaacttcaaagaattgagaactgctaagatgaagccggagctgctgtccggccacattccccctgggcatatccctaaacccatcgtgatgcccgattacgtggctaaatatccagtgattcagactgacgatgaacgagaacggtacaaggccgtgttccaggatcaatttagtgaatacaaagagttgtccgcagaagtgcaagccgtgctgagaaagttcgatgagctggatgccgtcatgtcaagacttccgcaccacagcgaaagccgacaagagcatgagaggatctctcggatccacgaggagtttaaaaaaaagaaaaacgatcccacgttcctcgagaaaaaggagcgctgtgattatttgaaaaacaagctctcgcatattaaacagagaattcaggaatatgacaaagtcatgaactgggacgtgcagggctactcgtag

SEQ ID NO: 87426 - DNA, 1641 bp, Artificial Sequence
  derived and/or modified sequence
atgagcaacgacggccggagccggaaccgggaccggcggtacgacgaagtgccatcagacctgccataccaagacaccaccattaggacacaccctacacttcacgactccgagcgtgccgtgtctgcggacccacttcctcctccgcctctccctctgcagcccccgtttgggcccgacttttattcctccgacaccgaagagcccgcgatagctccagatctcaagcctgtgcgccgctttgtccccgactcttggaagaactttttccggggaaagaagaaggaccctgagtgggataagccagtgagtgatatccggtacatcagtgatggagtggagtgttcgcccccagctagccctgcccgacccaaccatcggagccccttgaacagttgcaaagatccctacggaggctctgagggtaccttcagctcccgaaaggaagctgatgccgtgttcccacgagacccatacggatctctggatagacacactcagaccgtccggacatactccgaaaaggtggaggagtataacctgagatactcatatatgaagtcatgggctggtctgctgcgcatacttggcgtagtggagttattattgggcgcaggggtctttgcatgcgtaacggcttacattcacaaggattccgagtggtataacctgttcggatatagccagccctatggcatgggtggcgttggggggctcggaagcatgtacggtgggtattactatactggcccaaagaccccttttgtcctggtcgtggcgggactggcctggattacaacgattatcatcctggtgcttggaatgagcatgtattatagaaccattttgctggattccaactggtggccactgactgagtttgggattaatgtggccctattcattctctacatggcagccgccattgtttatgtgaacgacactaatagagggggcctgtgttactatcctctgtttaataccccagtgaatgcggtattttgtcgtgtggagggcggacagattgccgccatgattttcctgtttgtgaccatgatagtctacctcatctctgcactcgtgtgtctcaagctgtggagacacgaggccgcacgaaggcacagggagtatatggaacagcaagaatgtgagatggccacctcaggcgaccgtcagcgcgacagcgaggtcaatttcaaggagttgaggacagccaagatgaagccggagctgctaagcggacatattcctcccggtcatatccctaagcccatcgtgatgcctgactatgttgccaaatacccagttatccagacagatgacgagcgggaacggtacaaggcggtgttccaggatcagttctctgagtataaagaactgagcgcagaggtccaggctgtgcttcgaaaattcgacgagctggatgcagtcatgtccagactgccgcatcacagcgagtctagacaggagcacgagagaatatctagaattcacgaggagttcaagaaaaagaaaaatgatcctaccttcctggagaagaaagagcgctgtgactatttgaaaaataaactctcgcatatcaagcagcggatccaggagtatgataaggtgatgaattgggatgttcaaggatacagctag

SEQ ID NO: 87427 - DNA, 438 bp, Artificial Sequence
  derived and/or modified sequence
atgagcaacgacggccggagccggaaccgggaccggcggtacgacgaagtcccatctgatttaccttatcaggacaccaccatccggactcaccctactcttcatgattctgaaagagccgtctccgcagaccctctccctcctcctcctctcccccttcagccacctttcgggcctgacttttattccagcgatactgaagagccagccatcgccccagatcttaagcctgtgcgccgattcgtgcccgactcttggaagaacttcttcaggggaaaaaaaaaagacccagaatgggataagcctgtatctgatatcaggtatattagcgatggagttgaatgtagtcctccggcgagtccagcccggcctaaccacagatcaccacttaactcctgcaaggacccctatgggggatctgaaggcacatttagttag

SEQ ID NO: 87428 - DNA, 1329 bp, Artificial Sequence
  derived and/or modified sequence
atgtcaaatgacggcagatctagaaatcgagatcggcgatatgatgaggtaccgtctgacttgccctatcaagacactactatccgaacccatccaactctgcacgacagcgagagggcagtgtctgcagatccgctgcctcctcctccactgccactgcaacccccattcggaccagatttctattcaagtgatacagaagaacctgctattgcacctgatttgaagccagtgcgacgattcgtaccggactcctggaagaacttttttagaggcaaaaagaaagacccggagtgggataagcctgtgtccgacatccgctacattagcgatggggtagagtgcagccctcccgcttcacctgctaggcccaatcatagaagcccacttaactcttgcaaggatccttacggcggatccgaaggcacctttagctctagaaaggaagctgatgctgtgtttcctcgagacccctatggatctttggatcgccatacacaaacagtcaggacttactctgaaaaggtggaggaatataacctgagatactcatacatgaagtcctgggccggactcctgcgaatactgggggttgtggagcttcttttgggggcaggggtgtttgcatgcgtgactgcatatatccacaaagattcagagtggtataacctgttcggatacagtcagccttatggaatgggcggagtgggcggacttggctccatcgctttggtttgtctcaaactctggaggcacgaggctgcaagacgccacagagaatatatggagcaacaggaaattaatgaaccaagcctcagctcgaagagaaagatgtgcgagatggccacctcgggagaccggcagagggattctgaagtgaattttaaggaattgcgaactgccaaaatgaagcccgagttgctcagcggccacattccacctggtcacattccaaagcccattgttatgcctgattatgtggcgaaataccccgtgatccaaacagacgatgagagggagaggtataaggcagtttttcaggaccaattttccgagtataaggagctgtccgctgaggtccaagcagtcttgagaaagttcgacgagttagacgcagtgatgagcagattgccccaccacagtgaatcgagacaagagcatgaacgcatctctcggatccacgaggagttcaaaaagaaaaagaatgacccaactttcctcgaaaagaaagagcgctgcgactacctcaagaataagttgtctcacatcaagcagcgaatccaggaatatgacaaggtcatgaattgggacgtgcaggggtacagctag

SEQ ID NO: 87429 - DNA, 1641 bp, Artificial Sequence
  derived and/or modified sequence
atgtccaatgatgggaggagcaggaatcgggatcgcaggtacgatgaggtacctagtgatctcccttaccaggatactaccatcagaacgcatcccacactgcacgattccgagcgcgctgtctccgcggaccctctcccccctccacctctccccttgcagcctccgtttggcccagacttctatagcagcgacaccgaagaacctgctatcgctcccgacctcaagcctgtccgccgatttgttccggactcatggaagaactttttccgcggaaagaaaaaggaccccgagtgggataaaccagtgagtgatatccggtatatatcggacggcgtggagtgcagtccaccagccagccccgcacgaccaaaccacagatcgcccctgaatagctgtaaagacccttacggcggatcggagggaaccttctctagcaggaaggaagcagacgccgtctttccccgagacccttatggatcccttgatagacatactcaaaccgttagaacttactcagagaaggtggaggaatataacctgcgatacagttatatgaagtcttgggccggactcctgcgaatcctgggagtcgttgaattgttactcggggctggagtctttgcatgcgtgactgcctacatccataaagacagcgaatggtacaacctgttcggctactcacagccttatgggatgggcggagtaggaggattgggctccatgtacggcggatactactacaccggaccgaagactccctttgttctggtggtcgccggactggcctggataaccactatcattatcctggtgctggggatgagcatgtactatcgcacaattctgctggacagcaattggtggcccctgacagagttcgggatcaacgtggccctattcatcctgtacatggctgcagctattgtgtacgtgaacgatactaaccggggtggcctgtgttattacccactctttaacacccccgtgaatgccgtgttctgccgggtcgaagggggacaaatcgcagcaatgatctttctgttcgtgaccatgattgtgtacctcatatctgcccttgtctgcctgaagttgtggcgccacgaggcggctagaaggcaccgagaatatatggagcagcaggaatgcgaaatggcaaccagtggtgacaggcaaagggatagcgaggtcaacttcaaagaactacgtactgcaaaaatgaaacctgaattgctgtctgggcacataccacccggtcatatcccgaaacccattgtgatgccagactatgtcgcaaaatatccagtgattcagaccgacgatgaaagggagcgatacaaagcagtctttcaggaccagttcagcgaatacaaggagttgagcgccgaggtccaggccgttctgagaaagtttgatgaactcgacgccgtcatgtcaaggctgcctcaccactcagagtctaggcaggagcacgagcgcattagccgtatccacgaagagtttaaaaagaaaaagaacgaccctacttttctcgagaaaaaggaaaggtgtgactacctgaagaataagctgtctcatatcaagcagcggatccaggagtacgataaagtgatgaattgggatgtccaggggtacagttag

SEQ ID NO: 87430 - DNA, 438 bp, Artificial Sequence
  derived and/or modified sequence
atgtctaacgacggcagaagcagaaatcgcgaccgccgatacgatgaagtgccatcagacctgccttatcaggatacgacaattaggactcatcctacattgcacgactcggaacgtgccgtaagcgcggatccattaccgcctccgccactgccgttgcaacctccatttggccctgatttctatagtagcgataccgaggaaccagcaattgcgccagatttaaagcctgttcgtcggtttgtccctgactcctggaagaacttcttcagggggaaaaagaaggatcccgaatgggacaagcccgtatctgatatcagatacataagcgatggcgttgaatgttctccccctgcaagtcccgctcgcccaaaccaccggagcccactgaatagctgcaaagatccatatggcggaagcgaagggacatttagttag

SEQ ID NO: 87431 - DNA, 1329 bp, Artificial Sequence
  derived and/or modified sequence
atgagcaacgacggcagaagcagaaacagagacagaagatacgacgaggtgcccagcgacctgccctaccaggacaccaccatcagaacccaccccaccctgcacgacagcgagagagccgtgagcgccgaccccctgccccccccccccctgcccctgcagccccccttcggccccgacttctacagcagcgacaccgaggagcccgccatcgcccccgacctgaagcccgtgagaagattcgtgcccgacagctggaagaacttcttcagaggcaagaagaaggaccccgagtgggacaagcccgtgagcgacatcagatacatcagcgacggcgtggagtgcagcccccccgccagccccgccagacccaaccacagaagccccctgaacagctgcaaggacccctacggcggcagcgagggcaccttcagcagcagaaaggaggccgacgccgtgttccccagagacccctacggcagcctggacagacacacccagaccgtgagaacctacagcgagaaggtggaggagtacaacctgagatacagctacatgaagagctgggccggcctgctgagaatcctgggcgtggtggagctgctgctgggcgccggcgtgttcgcctgcgtgaccgcctacatccacaaggacagcgagtggtacaacctgttcggctacagccagccctacggcatgggcggcgtgggcggcctgggcagcatcgccctggtgtgcctgaagctgtggagacacgaggccgccagaagacacagagagtacatggagcagcaggagatcaacgagcccagcctgagcagcaagagaaagatgtgcgagatggccaccagcggcgacagacagagagacagcgaggtgaacttcaaggagctgagaaccgccaagatgaagcccgagctgctgagcggccacatcccccccggccacatccccaagcccatcgtgatgcccgactacgtggccaagtaccccgtgatccagaccgacgacgagagagagagatacaaggccgtgttccaggaccagttcagcgagtacaaggagctgagcgccgaggtgcaggccgtgctgagaaagttcgacgagctggacgccgtgatgagcagactgccccaccacagcgagagcagacaggagcacgagagaatcagcagaatccacgaggagttcaagaagaagaagaacgaccccaccttcctggagaagaaggagagatgcgactacctgaagaacaagctgagccacatcaagcagagaatccaggagtacgacaaggtgatgaactgggacgtgcagggctacagctag

SEQ ID NO: 87432 - DNA, 1641 bp, Artificial Sequence
  derived and/or modified sequence
atgagcaacgacggcagaagcagaaacagagacagaagatacgacgaggtgcccagcgacctgccctaccaggacaccaccatcagaacccaccccaccctgcacgacagcgagagagccgtgagcgccgaccccctgccccccccccccctgcccctgcagccccccttcggccccgacttctacagcagcgacaccgaggagcccgccatcgcccccgacctgaagcccgtgagaagattcgtgcccgacagctggaagaacttcttcagaggcaagaagaaggaccccgagtgggacaagcccgtgagcgacatcagatacatcagcgacggcgtggagtgcagcccccccgccagccccgccagacccaaccacagaagccccctgaacagctgcaaggacccctacggcggcagcgagggcaccttcagcagcagaaaggaggccgacgccgtgttccccagagacccctacggcagcctggacagacacacccagaccgtgagaacctacagcgagaaggtggaggagtacaacctgagatacagctacatgaagagctgggccggcctgctgagaatcctgggcgtggtggagctgctgctgggcgccggcgtgttcgcctgcgtgaccgcctacatccacaaggacagcgagtggtacaacctgttcggctacagccagccctacggcatgggcggcgtgggcggcctgggcagcatgtacggcggctactactacaccggccccaagacccccttcgtgctggtggtggccggcctggcctggatcaccaccatcatcatcctggtgctgggcatgagcatgtactacagaaccatcctgctggacagcaactggtggcccctgaccgagttcggcatcaacgtggccctgttcatcctgtacatggccgccgccatcgtgtacgtgaacgacaccaacagaggcggcctgtgctactaccccctgttcaacacccccgtgaacgccgtgttctgcagagtggagggcggccagatcgccgccatgatcttcctgttcgtgaccatgatcgtgtacctgatcagcgccctggtgtgcctgaagctgtggagacacgaggccgccagaagacacagagagtacatggagcagcaggagtgcgagatggccaccagcggcgacagacagagagacagcgaggtgaacttcaaggagctgagaaccgccaagatgaagcccgagctgctgagcggccacatcccccccggccacatccccaagcccatcgtgatgcccgactacgtggccaagtaccccgtgatccagaccgacgacgagagagagagatacaaggccgtgttccaggaccagttcagcgagtacaaggagctgagcgccgaggtgcaggccgtgctgagaaagttcgacgagctggacgccgtgatgagcagactgccccaccacagcgagagcagacaggagcacgagagaatcagcagaatccacgaggagttcaagaagaagaagaacgaccccaccttcctggagaagaaggagagatgcgactacctgaagaacaagctgagccacatcaagcagagaatccaggagtacgacaaggtgatgaactgggacgtgcagggctacagctag

SEQ ID NO: 87433 - DNA, 438 bp, Artificial Sequence
  derived and/or modified sequence
atgagcaacgacggcagaagcagaaacagagacagaagatacgacgaggtgcccagcgacctgccctaccaggacaccaccatcagaacccaccccaccctgcacgacagcgagagagccgtgagcgccgaccccctgccccccccccccctgcccctgcagccccccttcggccccgacttctacagcagcgacaccgaggagcccgccatcgcccccgacctgaagcccgtgagaagattcgtgcccgacagctggaagaacttcttcagaggcaagaagaaggaccccgagtgggacaagcccgtgagcgacatcagatacatcagcgacggcgtggagtgcagcccccccgccagccccgccagacccaaccacagaagccccctgaacagctgcaaggacccctacggcggcagcgagggcaccttcagctag

SEQ ID NO: 87434 - DNA, 378 bp, Artificial Sequence
  derived and/or modified sequence
atggccggcatccccttcctgaccaccgacctgacctacagatgcttcgtgagcttccccctgaacaccggcgacctggactgcgagacctgcaccatcaccagaagcggcctgaccggcctggtgatcggcggcctgtaccccgtgttcctggccatccccgtgaacggcggcctggccgccagataccagagcgccctgctgccccacaagggcaacatcctgagctactggatcagaaccagcaagcccgtgttcagaaagatgctgttccccatcctgctgcagaccatgttcagcgcctacctgggcagcgagcagtacaagctgctgatcaaggccctgcagctgagcgagcccggcaaggagatccactag

SEQ ID NO: 87435 - DNA, 378 bp, Artificial Sequence
  derived and/or modified sequence
atggccgggattcctttcttaactacagacttgacatacaggtgttttgtgagctttccactcaacacaggtgatctggattgtgagacctgcacgatcaccagatctgggctgaccgggctggttattgggggcctgtatccagtcttccttgccatccccgttaacgggggcctcgcagcccggtaccagtccgccctgctgccacacaagggtaacattcttagctactggattaggacttccaaacctgttttccgaaagatgttgttccctatcttgctacaaaccatgttctcagcgtatctcgggagcgagcaatacaagctgctgattaaagcgcttcagctgtccgagccaggcaaggaaatccactag

SEQ ID NO: 87436 - DNA, 378 bp, Artificial Sequence
  derived and/or modified sequence
atggccggcatccccttcctgaccacagacctgacctaccgctgctttgtgtccttccccctgaacacaggagacctggactgtgagacctgcaccatcaccaggagcggcctgaccggcctggtgattggaggcctgtaccctgtgttcctggccatccctgtgaatggaggcctggccgcccgctaccagagcgccctgctgccccacaagggcaacatcctgagctactggatccgcaccagcaagcctgtgttcaggaagatgctgttccccatcctgctgcagaccatgttcagcgcctacctgggcagcgagcagtacaagctgctgatcaaggccctgcagctgtctgagcccgggaaggagatccactag

SEQ ID NO: 87437 - DNA, 378 bp, Artificial Sequence
  derived and/or modified sequence
atggccggcatccccttcctgaccaccgacctgacctaccggtgcttcgtgtcctttccactgaacaccggcgacctcgactgcgaaacctgtactatcaccagaagtggactgaccggcctggtgattggggggttataccctgttttcctggctattccagtaaatggggggctcgcagccaggtaccaatctgcactgttaccacataaggggaatatcctgagttattggatccgcacctctaagccagtctttaggaagatgctatttcccattctgctgcagaccatgttctctgcctacctggggtccgagcaatataagctcctcattaaagctttacagctctccgagcctgggaaggagatccattag

SEQ ID NO: 87438 - DNA, 378 bp, Artificial Sequence
  derived and/or modified sequence
atggccggtatcccctttctgacaaccgatctgacttatcgatgctttgttagcttcccccttaacacaggagacctggactgtgaaacgtgtactattactcggtccggcctcaccggcctggtcatcggaggtttgtaccccgtgttcctcgctatcccagtgaacggaggtcttgctgctcgataccagagcgcactgttgcctcacaagggtaatatcttatcctattggatacgaacttctaaacctgtcttccgtaagatgctgttcccaatacttctccagacaatgttctccgcctacctgggctcagagcaatacaaattgctgataaaagccttgcagctgtcagaacccggtaaagagatccattag

SEQ ID NO: 87439 - DNA, 1778 bp, Artificial Sequence
  derived and/or modified sequence
gagaataaaaacatggcttttgatgaaaaatgcatttaacagattccatgtggatggctcatgaacaaaaatgagaaacacgacgataaactggtaatgttcaccaatcaatctgaagattctgaaagatgtgaaagcatggagctggacaaaaaaatccaggatctgattgagagaaatgcgtctcctcatccaaaacggttcaccccagaggccatgccaactcacagaaatctatgttctctgaagactccaggaaaaacagcttccatggcacattttgtacagggcacatctagaatgattgccgcagaaagttctacggagcataaagagtgtgctgaaccatcaacaagaaagaacttgatgaattctcttgaacaaaagataaggtgtttggaaaaacaaagaaaagagctcctggaagttaaccagcaatgggatcagcaatttagaagtatgaaagagttatatgaaagaaaggtagcagagctgaagacgaaactggacgccgcggaaagattcctcagcacgcgggagaaggatccgcatcagaggcagagaaaggacgacaggcagagagaggacgacaggcagcgcgacctgacccgggaccggctgcagcgggaggagaaggaaaaggaacgcctaaatgaagaattacatgaattgaaagaagagaataaacttttaaagggaaaaaatactcttgcgaacaaggaaaaggaacattacgaatgtgaaataaaacgcctcaataaggctcttcaggatgccttgaatatcaagtgttcattttccgaggactgtttgaggaagtctcgagtggaattctgccatgaggagatgagaacagaaatggaagttctgaagcagcaggtgcaaatatacgaagaagacttcaaaaaggaacgatcggatcgagagagacttaatcaagagaaagaggagctacagcaaattaatgaaacttcccaatcccagttgaacaggctgaattcccagataaaagcttgtcagatggagaaagaaaaactagaaaagcaattaaaacagatgtattgcccaccctgtaactgcggcttggttttccacctgcaagatccatgggtaccaacaggccctggagctgtgcagaagcaacgggagcacccagtttatcctcagtaaagaaagtccatccgtagaagtacacactaacagagagagacaacaggcaacgagggagcgtggctgaggaccctcttctttgtttatactgaggcttgtttctgccacaaaggcacatcatctaccctgttatttgtgcctggtcatgttttcctttggtatgaatacaggaaaaggcttctgacagctaagatcctgatcaaattggaggagccagttattatacaaccaaatacaacttccagtttccttgaaatgagacttggcagatggatgatgcacgactccctgaaaatctcttcagcatattgctgttggatgcacaaaaatgattctatgatttaggcaactcagtgtttgctgcagggatattgtatgttgatttaaagtgcatatgtgtgtgtgtgtgtgtgtgtgtgtgtgtgtgtgtgtgtttcctggggtaaaaatttctgcagttgtaaacgtttaacattgctcccattcttcttccacagggccttagttctttagctatttgactacatattgttgacctcagtgatcctaaacgtagaattgaagaggtgtatatacctcattaaattaaataagtggttcaatctgaa

SEQ ID NO: 87440 - DNA, 1446 bp, Artificial Sequence
  derived and/or modified sequence
ggcacgagctgcccttccccttcaacctcttgctcaaggcatgattccaacagaactgcagcagctctggaaagaagtgacaagtgctcatactgcagaagaaaccacaggcaacaatcacagcagtttggatctgaccacgacatgtgtctcctcctctgcaccttccaagacctccttaataatgaacccacatgcctctaccaatggacagctctcagtccacactcccaaaagggaaagtttgtcccatgaggagcacccccatagccatcctctctatggacatggtgtatgcaagtggccaggctgtgaagcagtgtgcgaagatttccaatcatttctaaaacatctcaacagtgagcatgcgctggacgatagaagtacagcccaatgtagagtacaaatgcaggttgtacagcagttagagctacagcttgcaaaagacaaagaacgcctgcaagccatgatgacccacctgcatgtgaagtctacagaacccaaagccgcccctcagcccttgaatctggtatcaagtgtcactctctccaagtccgcatcggaggcttctccacagagcttacctcatactccaacgaccccaaccgcccccctgactcccgtcacccaaggcccctctgtcatcacaaccaccagcatgcacacggtgggacccatccgcaggcggtactcagacaaatacaacgtgcccatttcgtcagatattgcgcagaaccaagaattttataagaacgcagaagttagaccaccatttacatatgcatctttaattaggcaggccattctcgaatctccagaaaagcagctaacactaaatgagatctataactggttcacacgaatgtttgcttacttccgacgcaacgcggccacgtggaagaatgcagtgcgtcataatcttagtcttcacaagtgttttgtgcgagtagaaaacgttaaaggggcagtatggacagtggatgaagtagaattccaaaaacgaaggccacaaaagatcagtggtaacccttcccttattaaaaacatgcagagcagccacgcctactgcacacctctcaatgcagctttacaggcttcaatggctgagaatagtatacctctatacactaccgcttccatgggaaatcccactctgggcaacttagccagcgcaatacgggaagagctgaacggggcaatggagcataccaacagcaacgagagtgacagcagtccaggcagatctcctatgcaagccgtgcatcctgtacacgtcaaagaagagcccctcgatccagaggaagctgaagggcccctgtccttagtgacaacagccaaccacagtccagattttgaccatgacagagattacgaagatgaaccagtaaacgaggacatggagtgactatcggggcgggccaaccccgagaatgaagattggaaaaa

SEQ ID NO: 87441 - DNA, 795 bp, Artificial Sequence
  derived and/or modified sequence
gtgcagtccgcctgcacgccgaggccgccggaccccacgcccggcccgcgcgggcgccccgagcccggctccgcgcgcctggcggctacatggagagtgtcaggttcccgtgtcagtggctatgatgacacctcaagttatcactccccagcaaatgcagcagatcctccagcaacaagtgctgagccctcagcagctccaggttctcctccagcagcagcaggccctcatgcttcaacagcagcagcttcaagagttttataaaaaacaacaggaacagttgcagcttcaacttttacaacaacaacatgctggaaaacagcctaaagagcaacagcaggtggctacccagcagttggcttttcagcagcagcttttacagatgcagcagttacagcagcagcacctcctgtctttgcagcgccaaggccttctgacaattcagcccgggcagcctgcccttccccttcaacctcttgctcaaggcatgattccaacagaactgcagcagctctggaaagaagtgacaagtgctcatactgcagaagaaaccacaggcaacaatcacagcagtttggatctgaccacgacatgtgtctcctcctctgcaccttccaagacctccttaataatgaacccacatgcctctaccaatggacagctctcagtccacactcccaaaagggaaagtttgtcccatgaggagcacccccatagccatcctctctatggacatggtgtatgcaagtggccaggctgtgaagcagtgtgcgaagatttccaatcatttctaaa

SEQ ID NO: 87442 - protein, 601 aa, Artificial Sequence
  derived and/or modified sequence
MMQESGTETKSNGSAIQNGSGGSNHLLECGGLREGRSNGETPAVDIGAADLAHAQQQQQQALQVARQLLLQQQQQQQVSGLKSPKRNDKQPALQQQQVATQQLAFQQQLLQMQQLQQQHLLSLQRQGLLTIQPGQPALPLQPLAQGMIPTELQQLWKEVTSAHTAEETTGNNHSSLDLTTTCVSSSAPSKTSLIMNPHASTNGQLSVHTPKRESLSHEEHPHSHPLYGHGVCKWPGCEAVCEDFQSFLKHLNSEHALDDRSTAQCRVQMQVVQQLELQLAKDKERLQAMMTHLHVKSTEPKAAPQPLNLVSSVTLSKSASEASPQSLPHTPTTPTAPLTPVTQGPSVITTTSMHTVGPIRRRYSDKYNVPISSADIAQNQEFYKNAEVRPPFTYASLIRQAILESPEKQLTLNEIYNWFTRMFAYFRRNAATWKNAVRHNLSLHKCFVRVENVKGAVWTVDEVEFQKRRPQKISGNPSLIKNMQSSHAYCTPLNAALQASMAENSIPLYTTASMGNPTLGNLASAIREELNGAMEHTNSNESDSSPGRSPMQAVHPVHVKEEPLDPEEAEGPLSLVTTANHSPDFDHDRDYEDEPVNEDME

SEQ ID NO: 87443 - DNA, 1996 bp, Artificial Sequence
  derived and/or modified sequence
agtctagagacttagaagcatttattaacagtgaggctgctgaaggtttttaataacaaaattacaaatactctatctaattggtaagacgtgaccttttgaggtgactataactgaagattgctttacagaagccaaaaaaggtttttgagtcatgatgcaagaatctgggactgagacaaaaagtaacggttcagccatccagaatgggtcgggcggcagcaaccacttactagagtgcggcggtcttcgggaggggcggtccaacggagagacgccggccgtggacatcggggcagctgacctcgcccacgcccagcagcagcagcaacaggcacttcaggtggcaagacagctccttcttcagcagcaacagcagcagcaagttagtggattaaaatctcccaagaggaatgacaaacaaccagctcttcagcaacagcaggtggctacccagcagttggcttttcagcagcagcttttacagatgcagcagttacagcagcagcacctcctgtctttgcagcgccaaggccttctgacaattcagcccgggcagcctgcccttccccttcaacctcttgctcaaggcatgattccaacagaactgcagcagctctggaaagaagtgacaagtgctcatactgcagaagaaaccacaggcaacaatcacagcagtttggatctgaccacgacatgtgtctcctcctctgcaccttccaagacctccttaataatgaacccacatgcctctaccaatggacagctctcagtccacactcccaaaagggaaagtttgtcccatgaggagcacccccatagccatcctctctatggacatggtgtatgcaagtggccaggctgtgaagcagtgtgcgaagatttccaatcatttctaaaacatctcaacagtgagcatgcgctggacgatagaagtacagcccaatgtagagtacaaatgcaggttgtacagcagttagagctacagcttgcaaaagacaaagaacgcctgcaagccatgatgacccacctgcatgtgaagtctacagaacccaaagccgcccctcagcccttgaatctggtatcaagtgtcactctctccaagtccgcatcggaggcttctccacagagcttacctcatactccaacgaccccaaccgcccccctgactcccgtcacccaaggcccctctgtcatcacaaccaccagcatgcacacggtgggacccatccgcaggcggtactcagacaaatacaacgtgcccatttcgtcagcagatattgcgcagaaccaagaattttataagaacgcagaagttagaccaccatttacatatgcatctttaattaggcaggccattctcgaatctccagaaaagcagctaacactaaatgagatctataactggttcacacgaatgtttgcttacttccgacgcaacgcggccacgtggaagaatgcagtgcgtcataatcttagtcttcacaagtgttttgtgcgagtagaaaacgttaaaggggcagtatggacagtggatgaagtagaattccaaaaacgaaggccacaaaagatcagtggtaacccttcccttattaaaaacatgcagagcagccacgcctactgcacacctctcaatgcagctttacaggcttcaatggctgagaatagtatacctctatacactaccgcttccatgggaaatcccactctgggcaacttagccagcgcaatacgggaagagctgaacggggcaatggagcataccaacagcaacgagagtgacagcagtccaggcagatctcctatgcaagccgtgcatcctgtacacgtcaaagaagagcccctcgatccagaggaagctgaagggcccctgtccttagtgacaacagccaaccacagtccagattttgaccatgacagagattacgaagatgaaccagtaaacgaggacatggagtgactatcggggcgggccaaccccgagaatgaagattgg

SEQ ID NO: 87444 - DNA, 1806 bp, Artificial Sequence
  derived and/or modified sequence
atgatgcaggagtccgggacggaaactaagtccaacggctcggctattcaaaacggaagcgggggtagcaatcacctgctcgagtgtggaggacttcgcgagggacgctcaaacggagaaaccccagcagtcgacataggagcagcagatctcgctcacgctcagcaacagcagcaacaggccctgcaagttgctcgtcagttgttgctccaacaacaacagcagcaacaggtgtctggactgaagtcaccaaaaaggaacgacaagcagcctgcactgcagcagcagcaagtggctacacagcagttggccttccaacagcagttacttcagatgcagcaactccagcagcagcatttactgtcactccaacgtcaaggtctgctgactatccaacccggccagccagcgctgcctcttcagcccctagcccaggggatgattccgacagagctccagcagctgtggaaagaggtcacctccgctcacactgccgaagagaccacaggtaacaatcactcaagtctggatcttactactacctgtgtgtcatctagtgctccaagcaagacctcccttatcatgaacccacacgcctccaccaacggccagctgtccgtgcatactcccaaacgcgaatccttaagccacgaggagcacccccacagtcaccctttgtacggccatggggtatgtaaatggcctggttgcgaggctgtttgtgaagattttcagagttttctcaaacatcttaattcagaacatgccctagacgatcgatccaccgcacagtgccgggtccagatgcaggtcgtccagcagttggagctccagttggcaaaagataaggaacgcctgcaagctatgatgacacatctgcacgtgaagtctacagagcccaaggcggcccctcaacctctaaacctcgtctccagtgtaacattgtccaaatccgcctcggaggcctccccacagtctctgccgcatacgcctacaacacccacagcgccccttaccccagtgacacagggcccctcagtcattactaccacatccatgcacacggtcgggcccattcggcgccgctattcggacaaatacaacgtgcctatatcatcggccgatatcgcccaaaatcaagagttttacaagaatgccgaagtgagaccacccttcacgtacgcctcgctgatcagacaggccatacttgagtctcctgaaaagcaactaacgttgaatgagatttacaactggttcacaaggatgtttgcatatttccgccggaatgcagcgacctggaagaatgcagtgagacacaatctgtcgctgcacaaatgcttcgtccgggtggagaacgtgaaaggcgcagtgtggactgtagacgaagtggagttccagaagcgcagacctcagaaaatcagcggaaaccctagcttaattaagaacatgcaatccagtcacgcttactgtactcccctgaacgccgccctgcaggcgtctatggcagagaattctatccccctgtatacaaccgcttccatggggaacccaacactcgggaatttggcctccgcaattagggaagagctcaacggtgccatggagcatactaattcgaatgagtcagacagcagcccaggtagaagcccaatgcaggcggtgcaccccgttcacgtcaaggaggaacctctggacccagaggaagccgagggtcccctgtcgttagtgacaacagctaaccactctccggattttgatcatgatcgggactatgaagacgaacccgtcaacgaggacatggaatag

SEQ ID NO: 87445 - DNA, 1806 bp, Artificial Sequence
  derived and/or modified sequence
atgatgcaggagagcggcacagagaccaagagcaatggcagcgccatccagaatggcagcggcggcagcaaccacctgctggagtgtggcggcctgcgggagggccgcagcaatggagagaccccagctgtggacatcggggctgctgacctggcccacgcccagcagcagcagcagcaggccctgcaggtggcccggcagctgctgctgcagcagcagcagcagcagcaggtgtctggcctgaagagccccaagagaaatgacaagcagcctgccctgcagcagcagcaggtggccacccagcagctggccttccagcagcagctgctgcagatgcagcagctgcagcagcagcacctgctgagcctgcagaggcagggcctgctgaccatccagcccggccagcctgccctgcccctgcagcccctggcccagggcatgatccccacagagctgcagcagctgtggaaggaggtgaccagcgcccacacagctgaggagaccactggaaacaaccacagcagcctggacctgaccaccacctgtgtgagcagcagcgcccccagcaagaccagcctcatcatgaacccccacgccagcaccaacggccagctgtctgtgcacacccccaagcgggagagcctgagccatgaggagcacccccacagccaccccctgtatggccatggagtgtgcaagtggccaggctgtgaggccgtgtgtgaggacttccagagcttcctgaagcacctgaacagcgagcacgccctggatgacaggagcacagcccagtgccgggtgcagatgcaggtggtgcagcagctggagctgcagctggccaaggacaaggagcggctgcaggccatgatgacccacctgcacgtgaagagcacagagcccaaggccgccccccagcccctgaacctggtgtcctctgtgaccctgagcaagagcgccagcgaggccagcccccagagcctgccccacacccccaccacccccacagcccccctgacccctgtgacccagggccccagcgtcatcaccaccacctccatgcacacagtgggccccatcagaagacgctacagcgacaagtacaacgtgcccatcagcagcgctgacatcgcccagaaccaggagttctacaagaatgctgaggtgcggccccccttcacctacgccagcctcatccggcaggccatcctggagagccctgagaagcagctgaccctgaatgagatctacaactggttcaccaggatgtttgcctacttcagaagaaatgctgccacctggaagaatgctgtgcgccacaacctgagcctgcacaagtgctttgtgcgggtggagaatgtgaagggagctgtgtggacagtggatgaggtggagttccagaagaggcggccccagaagatcagcggcaaccccagcctcatcaagaacatgcagagcagccacgcctactgcacccccctgaatgctgccctgcaggcctccatggctgaaaattccatccccctgtacaccacagcctccatgggcaaccccaccctgggcaacctggccagcgccatccgggaggagctgaatggagccatggagcacaccaacagcaatgaaagtgacagcagccctggccgcagccccatgcaggccgtgcaccctgtgcacgtgaaggaggagcccctggaccctgaggaggccgagggccccctgagcctggtgaccacagccaaccacagcccagactttgaccatgaccgggactatgaagatgagcctgtgaatgaagacatggagtag

SEQ ID NO: 87446 - DNA, 1806 bp, Artificial Sequence
  derived and/or modified sequence
atgatgcaggagagcggcaccgagaccaagagcaacggcagcgccatacaaaacggctccggcggctccaaccaccttctcgagtgcggtggcctgcgcgaaggcagatcgaacggagagacaccagcagtcgatatcggcgctgcggacctggcacacgcgcagcagcaacagcagcaggccttacaagtggcacggcagctcctgttacagcaacaacagcagcagcaggtgagcggtttgaagtccccgaaacggaacgacaaacagcccgctttgcagcagcaacaggttgctacacagcagctggcattccaacagcagctgctccagatgcagcagctgcagcaacagcatcttctctctctgcagcgccagggcctcttgaccatccaacccggtcaacccgcgcttccgctgcagcccctcgcccaaggaatgattccgaccgaactgcagcaactgtggaaagaagtcacatcagcacataccgccgaggaaactacaggcaataatcatagttcccttgacctgaccactacctgcgtgtctagctcagcacccagcaagacatctttgatcatgaaccctcatgccagcacaaatgggcagctgtccgttcacacaccaaaaagagagtccttatcccatgaggagcacccccactctcacccactgtacgggcatggagtgtgcaagtggccaggatgcgaggctgtttgtgaggacttccagagcttcctgaaacatctgaacagcgaacatgctctggacgatcgcagtactgcacagtgccgggtacagatgcaggtcgttcaacagctagagctgcagctggctaaagacaaggaacgcctgcaagcgatgatgacccacctacatgtgaaatccacagaaccaaaggcggctccccaaccactcaatctggtatcttccgtgacactgtcgaagtcagcatctgaagcctcacctcagtcccttccacacacccctacgacccccaccgccccactgacacctgtgacccaggggcctagtgtgataaccaccaccagcatgcacaccgtcggcccaattagaaggaggtattcagataaatataacgtgccaatctcctcggctgacatcgcacagaaccaggaattctacaaaaatgccgaggtcaggcctccctttacctacgctagcttgattcgccaggctatacttgaaagtccagagaagcagttaaccttaaacgagatctacaactggttcacaagaatgttcgcctacttccgtcgtaacgccgctacttggaaaaacgcagtgaggcacaacctgagcctgcataaatgtttcgtccgggtcgaaaacgtgaagggcgctgtgtggaccgtcgatgaagtggagtttcagaaacgtagaccccagaagatcagcggcaatccatctttaatcaaaaatatgcaatcctcccatgcctattgcactccgctgaacgctgcgttgcaggcttcaatggcagaaaattccattcctctctataccacggcttctatgggcaaccctacactcggaaacctggcttcagcaatacgggaagaactaaacggagcgatggaacacaccaatagtaatgagagcgattcgtcgcctggtcgatccccgatgcaggcggtccaccctgtccatgtgaaagaggagccccttgacccggaggaggcagagggtcccctgtctctggtaacaacagcaaaccattcacccgactttgaccacgatagggattacgaagatgagcccgttaatgaggacatggaatag

SEQ ID NO: 87447 - DNA, 1806 bp, Artificial Sequence
  derived and/or modified sequence
atgatgcaagagagtgggacggagaccaaaagcaatgggtcagccattcagaacggcagtggtggatcaaatcacctgctggagtgtggcggactaagagaaggtcggtcaaatggggagacaccagccgttgatatcggcgctgctgatttagctcacgcacagcaacagcagcagcaagctttgcaagtcgccagacagcttctgctgcagcagcaacaacaacagcaagtgagtgggctgaagtcaccaaagcggaacgataagcagcctgctctccaacagcaacaagtggccacccagcaattggcttttcagcagcagcttctgcaaatgcagcagttgcagcagcagcacctgctgtctttgcaacgccagggtctcttgaccattcaacctgggcagcccgctctgcccctccagcccctggcccagggaatgattcccaccgagcttcagcagctgtggaaggaggtaacgagcgctcataccgcagaggaaacaacgggaaataatcacagctctctcgatttaaccaccacctgcgtgtctagcagcgctccaagcaagacctccttaataatgaacccccacgccagtaccaatgggcagctgtccgtgcatactcccaagagagagtccctgtcccatgaggagcatccacacagccatcccttgtacggccacggcgtatgtaaatggccaggctgcgaagccgtctgtgaggacttccaatccttcctcaagcacctgaatagtgaacatgctctcgatgaccgatcaaccgcccagtgccgggtccagatgcaagttgtgcagcagctggaactccagttagccaaggacaaagaacggttacaggcgatgatgactcacctgcatgttaagtccactgaacccaaagcggctccacagccacttaacctggtgtcatctgtgacactgagcaagagtgcatccgaagcatccccccagtctcttcctcacacaccaacaaccccaactgcacccctgacgcctgtcacccagggcccatcggtgattacaacaacaagcatgcataccgtcggacctatcaggaggagatacagtgataaatataacgtgcctatatcctctgcagatatcgcccagaaccaagagttttacaaaaacgcggaagtgcgaccccctttcacttacgcctctctgatcagacaggcaattctcgagtctcccgagaaacagctgaccctgaacgagatttacaactggtttacacggatgtttgcgtactttcgacgaaatgccgctacgtggaaaaatgcggttcggcacaatctgagcctccataaatgctttgtgcgggttgaaaacgtgaagggtgctgtgtggacggtggatgaggtcgagtttcagaagcgcaggccacaaaagatcagtggcaacccttcgctcatcaaaaacatgcagagcagccacgcatattgtacacctctgaatgccgctctgcaggcttcaatggccgagaatagcattcctctgtatacaacagcgagcatggggaatccaactctggggaacctggcctcagctattcgcgaggagttaaatggcgcaatggagcataccaatagcaacgagtccgattccagtcctggcagatcccccatgcaggctgtccatcccgtgcacgtgaaggaggagccgctggaccctgaggaggccgaggggccactgagcctagtcaccaccgcaaatcacagtccggatttcgatcatgaccgcgactacgaggatgagcctgtgaacgaggacatggaatag

SEQ ID NO: 87448 - DNA, 1806 bp, Artificial Sequence
  derived and/or modified sequence
atgatgcaggagagcggcaccgagaccaagagcaacggcagcgccatccagaacggcagcggcggcagcaaccacctgctggagtgcggcggcctgagagagggcagaagcaacggcgagacccccgccgtggacatcggcgccgccgacctggcccacgcccagcagcagcagcagcaggccctgcaggtggccagacagctgctgctgcagcagcagcagcagcagcaggtgagcggcctgaagagccccaagagaaacgacaagcagcccgccctgcagcagcagcaggtggccacccagcagctggccttccagcagcagctgctgcagatgcagcagctgcagcagcagcacctgctgagcctgcagagacagggcctgctgaccatccagcccggccagcccgccctgcccctgcagcccctggcccagggcatgatccccaccgagctgcagcagctgtggaaggaggtgaccagcgcccacaccgccgaggagaccaccggcaacaaccacagcagcctggacctgaccaccacctgcgtgagcagcagcgcccccagcaagaccagcctgatcatgaacccccacgccagcaccaacggccagctgagcgtgcacacccccaagagagagagcctgagccacgaggagcacccccacagccaccccctgtacggccacggcgtgtgcaagtggcccggctgcgaggccgtgtgcgaggacttccagagcttcctgaagcacctgaacagcgagcacgccctggacgacagaagcaccgcccagtgcagagtgcagatgcaggtggtgcagcagctggagctgcagctggccaaggacaaggagagactgcaggccatgatgacccacctgcacgtgaagagcaccgagcccaaggccgccccccagcccctgaacctggtgagcagcgtgaccctgagcaagagcgccagcgaggccagcccccagagcctgccccacacccccaccacccccaccgcccccctgacccccgtgacccagggccccagcgtgatcaccaccaccagcatgcacaccgtgggccccatcagaagaagatacagcgacaagtacaacgtgcccatcagcagcgccgacatcgcccagaaccaggagttctacaagaacgccgaggtgagaccccccttcacctacgccagcctgatcagacaggccatcctggagagccccgagaagcagctgaccctgaacgagatctacaactggttcaccagaatgttcgcctacttcagaagaaacgccgccacctggaagaacgccgtgagacacaacctgagcctgcacaagtgcttcgtgagagtggagaacgtgaagggcgccgtgtggaccgtggacgaggtggagttccagaagagaagaccccagaagatcagcggcaaccccagcctgatcaagaacatgcagagcagccacgcctactgcacccccctgaacgccgccctgcaggccagcatggccgagaacagcatccccctgtacaccaccgccagcatgggcaaccccaccctgggcaacctggccagcgccatcagagaggagctgaacggcgccatggagcacaccaacagcaacgagagcgacagcagccccggcagaagccccatgcaggccgtgcaccccgtgcacgtgaaggaggagcccctggaccccgaggaggccgagggccccctgagcctggtgaccaccgccaaccacagccccgacttcgaccacgacagagactacgaggacgagcccgtgaacgaggacatggagtag

SEQ ID NO: 87449 - protein, 358 aa, Artificial Sequence
  derived and/or modified sequence
MMTPQVITPQQMQQILQQQVLSPQQLQVLLQQQQALMLQQQQLQEFYKKQQEQLQLQLLQQQHAGKQPKEQQQVATQQLAFQQQLLQMQQLQQQHLLSLQRQGLLTIQPGQPALPLQPLAQGMIPTELQQLWKEVTSAHTAEETTGNNHSSLDLTTTCVSSSAPSKTSLIMNPHASTNGQLSVHTPKRESLSHEEHPHSHPLYGHGVCKWPGCEAVCEDFQSFLKHLNSEHALDDRSTAQCRVQMQVVQQLELQLAKDKERLQAMMTHLHVKSTEPKAAPQPLNLVSSVTLSKSASEASPQSLPHTPTTPTPPDSRHPRPLCHHNHQHAHGGTHPQAVLRQIQRAHFVSRYCAEPRIL

SEQ ID NO: 87450 - protein, 224 aa, Artificial Sequence
  derived and/or modified sequence
MMTPQVITPQQMQQILQQQVLSPQQLQVLLQQQQALMLQQQQLQEFYKKQQEQLQLQLLQQQHAGKQPKEQQQVATQQLAFQQQLLQMQQLQQQHLLSLQRQGLLTIQPGQPALPLQPLAQGMIPTELQQLWKEVTSAHTAEETTGNNHSSLDLTTTCVSSSAPSKTSLIMNPHASTNGQLSVHTPKRESLSHEEHPHSHPLYGHGVCKWPGCEAVCEDFQSFL

SEQ ID NO: 87451 - protein, 123 aa, Artificial Sequence
  derived and/or modified sequence
MMTPQVITPQQMQQILQQQVLSPQQLQVLLQQQQALMLQQQQLQEFYKKQQEQLQLQLLQQQHAGKQPKEQQQVATQQLAFQQQLLQMQQLQQQHLLSLQRQGLLTIQPGQPALPLQPLAQGM

SEQ ID NO: 87452 - protein, 489 aa, Artificial Sequence
  derived and/or modified sequence
MMTPQVITPQQMQQILQQQVLSPQQLQVLLQQQQALMLQLQQLWKEVTSAHTAEETTGNNHSSLDLTTTCVSSSAPSKTSLIMNPHASTNGQLSVHTPKRESLSHEEHPHSHPLYGHGVCKWPGCEAVCEDFQSFLKHLNSEHALDDRSTAQCRVQMQVVQQLELQLAKDKERLQAMMTHLHVKSTEPKAAPQPLNLVSSVTLSKSASEASPQSLPHTPTTPTAPLTPVTQGPSVITTTSMHTVGPIRRRYSDKYNVPISSADIAQNQEFYKNAEVRPPFTYASLIRQAILESPEKQLTLNEIYNWFTRMFAYFRRNAATWKNAVRHNLSLHKCFVRVENVKGAVWTVDEVEFQKRRPQKISGNPSLIKNMQSSHAYCTPLNAALQASMAENSIPLYTTASMGNPTLGNLASAIREELNGAMEHTNSNESDSSPGRSPMQAVHPVHVKEEPLDPEEAEGPLSLVTTANHSPDFDHDRDYEDEPVNEDME

SEQ ID NO: 87453 - protein, 679 aa, Artificial Sequence
  derived and/or modified sequence
MFQCVFSSSVLQPHSTSCLFKHLFYHSATPASQKQPEPIYSKKTEIQRQTVRAPFAKLFIFSALQVARQLLLQQQQQQQVSGLKSPKRNDKQPALQVPVSVAMMTPQVITPQQMQQILQQQVLSPQQLQVLLQQQQALMLQQQQLQEFYKKQQEQLQLQLLQQQHAGKQPKEQQQVATQQLAFQQQLLQMQQLQQQHLLSLQRQGLLTIQPGQPALPLQPLAQGMIPTELQQLWKEVTSAHTAEETTGNNHSSLDLTTTCVSSSAPSKTSLIMNPHASTNGQLSVHTPKRESLSHEEHPHSHPLYGHGVCKWPGCEAVCEDFQSFLKHLNSEHALDDRSTAQCRVQMQVVQQLELQLAKDKERLQAMMTHLHVKSTEPKAAPQPLNLVSSVTLSKSASEASPQSLPHTPTTPTAPLTPVTQGPSVITTTSMHTVGPIRRRYSDKYNVPISSADIAQNQEFYKNAEVRPPFTYASLIRQAILESPEKQLTLNEIYNWFTRMFAYFRRNAATWKNAVRHNLSLHKCFVRVENVKGAVWTVDEVEFQKRRPQKISGNPSLIKNMQSSHAYCTPLNAALQASMAENSIPLYTTASMGNPTLGNLASAIREELNGAMEHTNSNESDSSPGRSPMQAVHPVHVKEEPLDPEEAEGPLSLVTTANHSPDFDHDRDYEDEPVNEDME

SEQ ID NO: 87454 - DNA, 2250 bp, Artificial Sequence
  derived and/or modified sequence
tgcaactttgaaaattacctgcaagctccaactgatctttcaactttgaaagtgaagaattacttgaggaattcttgtggtttctttgtcatttagtgagagcccagccagctactgtggaggcaaacctccctgaggttgcctacaaagggcaatgttccagtgtgttttctcttcgagtgtgcttcagccgcacagtacttcctgtttattcaaacatcttttttaccactcggcaacccccgcttcgcagaaacagccagaacccatctacagcaagaagacggaaatccaaaggcagacagtacgggctcccttcgccaaactcttcattttctctgcacttcaggtggcaagacagctccttcttcagcagcaacagcagcagcaagttagtggattaaaatctcccaagaggaatgacaaacaaccagctcttcaggttcccgtgtcagtggctatgatgacacctcaagttatcactccccagcaaatgcagcagatcctccagcaacaagtgctgagccctcagcagctccaggttctcctccagcagcagcaggccctcatgcttcaacagcagcagcttcaagagttttataaaaaacaacaggaacagttgcagcttcaacttttacaacaacaacatgctggaaaacagcctaaagagcaacagcaggtggctacccagcagttggcttttcagcagcagcttttacagatgcagcagttacagcagcagcacctcctgtctttgcagcgccaaggccttctgacaattcagcccgggcagcctgcccttccccttcaacctcttgctcaaggcatgattccaacagaactgcagcagctctggaaagaagtgacaagtgctcatactgcagaagaaaccacaggcaacaatcacagcagtttggatctgaccacgacatgtgtctcctcctctgcaccttccaagacctccttaataatgaacccacatgcctctaccaatggacagctctcagtccacactcccaaaagggaaagtttgtcccatgaggagcacccccatagccatcctctctatggacatggtgtatgcaagtggccaggctgtgaagcagtgtgcgaagatttccaatcatttctaaaacatctcaacagtgagcatgcgctggacgatagaagtacagcccaatgtagagtacaaatgcaggttgtacagcagttagagctacagcttgcaaaagacaaagaacgcctgcaagccatgatgacccacctgcatgtgaagtctacagaacccaaagccgcccctcagcccttgaatctggtatcaagtgtcactctctccaagtccgcatcggaggcttctccacagagcttacctcatactccaacgaccccaaccgcccccctgactcccgtcacccaaggcccctctgtcatcacaaccaccagcatgcacacggtgggacccatccgcaggcggtactcagacaaatacaacgtgcccatttcgtcagcagatattgcgcagaaccaagaattttataagaacgcagaagttagaccaccatttacatatgcatctttaattaggcaggccattctcgaatctccagaaaagcagctaacactaaatgagatctataactggttcacacgaatgtttgcttacttccgacgcaacgcggccacgtggaagaatgcagtgcgtcataatcttagtcttcacaagtgttttgtgcgagtagaaaacgttaaaggggcagtatggacagtggatgaagtagaattccaaaaacgaaggccacaaaagatcagtggtaacccttcccttattaaaaacatgcagagcagccacgcctactgcacacctctcaatgcagctttacaggcttcaatggctgagaatagtatacctctatacactaccgcttccatgggaaatcccactctgggcaacttagccagcgcaatacgggaagagctgaacggggcaatggagcataccaacagcaacgagagtgacagcagtccaggcagatctcctatgcaagccgtgcatcctgtacacgtcaaagaagagcccctcgatccagaggaagctgaagggcccctgtccttagtgacaacagccaaccacagtccagattttgaccatgacagagattacgaagatgaaccagtaaacgaggacatggagtgactatcggggcgggccaaccccgagaatgaagattggaaaaaggaaaaaaaaaaaaa

SEQ ID NO: 87455 - DNA, 2040 bp, Artificial Sequence
  derived and/or modified sequence
atgtttcagtgtgtttttagtagctcagtgttgcaaccccattctacatcatgcttattcaaacatctattctaccactccgctacgcccgccagccaaaagcagcccgagcctatttattcaaagaaaactgagattcaacgccagacagtgcgagccccatttgccaaattgttcatttttagcgctctgcaggtggcccgccagctgttgctacagcagcagcagcagcagcaagtgtccgggctgaagtctcctaaacgcaatgataaacagcccgccctccaagtgcctgtgagcgtcgcaatgatgactccccaggtgattacgccgcagcagatgcagcagatactccagcaacaagtgctcagcccacagcagctgcaggtgctgctccagcagcagcaggcactcatgctgcagcagcagcagctgcaggaattttataagaagcaacaggagcagctgcagctgcagctgctgcagcagcagcacgcagggaaacagcctaaagaacagcagcaagtggccacgcaacagctggccttccagcagcagttgctgcagatgcagcagcttcagcagcagcacctgctgtcactgcagagacagggccttcttaccattcaacctgggcagcctgcactaccactccaacctctggcgcaggggatgatcccaaccgagctacagcagttgtggaaggaagtgacatcagcccataccgccgaagaaactacgggtaataaccactcctccctggaccttacaaccacatgtgtatcttcatccgctccatcgaaaactagccttattatgaacccccatgcgtccactaacggccagctgtccgtccacactccgaagagggagtctttgagccacgaagagcaccctcacagccaccctctctatggtcacggagtgtgtaagtggccgggttgtgaagcagtctgtgaggacttccagagctttctcaaacatctcaattcggagcacgctctggacgacaggtccactgctcagtgtcgagtgcagatgcaggtggtccagcagctggaactccaactagctaaggataaggagagactgcaggctatgatgacgcatctgcatgtgaagtctaccgaaccaaaagccgcgccacagcccctaaacctcgtcagctctgtcaccctgtccaagtctgcatcggaggcatctccgcaatctctcccacacactccgaccacacctacagctccgctgacgcctgtcacccagggaccttccgtgataaccacaacttccatgcataccgtaggccccatcaggcgccgctattctgataagtacaatgtaccaatcagttccgcggatattgcacagaatcaggagttctacaaaaacgcagaagttagacctccttttacttatgctagcttgatccgccaggccattctggaatcacctgagaagcaactgacgctgaacgagatttacaattggtttacccggatgtttgcctacttcaggagaaacgccgctacctggaagaatgctgtgaggcataacctgagtcttcacaaatgttttgtcagagtcgaaaacgttaaaggcgccgtttggaccgtggatgaggtcgagtttcaaaaacgtcggccgcagaaaattagcggaaacccctcactaatcaaaaacatgcagagttcacatgcatattgtactcccctgaatgccgcacttcaggcatcgatggcagagaattccatccccctctacaccaccgcatctatgggaaaccctacactgggcaacctggcgtccgcgatcagagaggagctgaacggggctatggaacacacgaactcaaatgagtctgattcctcaccaggtcgctcaccaatgcaggcagtccaccccgtacacgtgaaggaagagcccttggatccagaggaagcagaggggcccttgtcacttgtaactaccgcaaaccactcgccagattttgatcatgatagggattacgaggatgagccagtcaacgaggacatggagtag

SEQ ID NO: 87456 - DNA, 2040 bp, Artificial Sequence
  derived and/or modified sequence
atgttccagtgtgtgttcagcagctctgtgctgcagccccacagcaccagctgcctcttcaagcacctgttctaccacagcgccaccccagccagccagaagcagcctgagcccatctacagcaagaagacagagatccagaggcagacagtgcgggccccctttgccaagctgttcatcttcagcgccctgcaggtggcccggcagctgctgctgcagcagcagcagcagcagcaggtgtctggcctgaagagccccaagagaaatgacaagcagcctgccctgcaggtgcctgtgtctgtggccatgatgaccccccaggtgatcaccccccagcagatgcagcagatcctgcagcagcaggtgctgagcccccagcagctgcaggtgctgctgcagcagcagcaggccctgatgctgcagcagcagcagctgcaggagttctacaagaagcagcaggagcagctgcagctgcagctgctgcagcagcagcacgccggcaagcagcccaaggagcagcagcaggtggccacccagcagctggccttccagcagcagctgctgcagatgcagcagctgcagcagcagcacctgctgagcctgcagaggcagggcctgctgaccatccagcccggccagcctgccctgcccctgcagcccctggcccagggcatgatccccacagagctgcagcagctgtggaaggaggtgaccagcgcccacacagctgaggagaccactggaaacaaccacagcagcctggacctgaccaccacctgtgtgagcagcagcgcccccagcaagaccagcctcatcatgaacccccacgccagcaccaacggccagctgtctgtgcacacccccaagcgggagagcctgagccatgaggagcacccccacagccaccccctgtatggccatggagtgtgcaagtggccaggctgtgaggccgtgtgtgaggacttccagagcttcctgaagcacctgaacagcgagcacgccctggatgacaggagcacagcccagtgccgggtgcagatgcaggtggtgcagcagctggagctgcagctggccaaggacaaggagcggctgcaggccatgatgacccacctgcacgtgaagagcacagagcccaaggccgccccccagcccctgaacctggtgtcctctgtgaccctgagcaagagcgccagcgaggccagcccccagagcctgccccacacccccaccacccccacagcccccctgacccctgtgacccagggccccagcgtcatcaccaccacctccatgcacacagtgggccccatcagaagacgctacagcgacaagtacaacgtgcccatcagcagcgctgacatcgcccagaaccaggagttctacaagaatgctgaggtgcggccccccttcacctacgccagcctcatccggcaggccatcctggagagccctgagaagcagctgaccctgaatgagatctacaactggttcaccaggatgtttgcctacttcagaagaaatgctgccacctggaagaatgctgtgcgccacaacctgagcctgcacaagtgctttgtgcgggtggagaatgtgaagggagctgtgtggacagtggatgaggtggagttccagaagaggcggccccagaagatcagcggcaaccccagcctcatcaagaacatgcagagcagccacgcctactgcacccccctgaatgctgccctgcaggcctccatggctgaaaattccatccccctgtacaccacagcctccatgggcaaccccaccctgggcaacctggccagcgccatccgggaggagctgaatggagccatggagcacaccaacagcaatgaaagtgacagcagccctggccgcagccccatgcaggccgtgcaccctgtgcacgtgaaggaggagcccctggaccctgaggaggccgagggccccctgagcctggtgaccacagccaaccacagcccagactttgaccatgaccgggactatgaagatgagcctgtgaatgaagacatggagtag

SEQ ID NO: 87457 - DNA, 2040 bp, Artificial Sequence
  derived and/or modified sequence
atgttccagtgcgtgttcagcagcagcgtgctgcagccccacagcacaagctgtctgtttaagcaccttttttaccattccgcgaccccggccagccagaaacagcccgaacctatctattctaagaagacggagattcagaggcaaaccgttcgggccccattcgctaaacttttcatcttcagtgccctgcaggtggccagacaacttcttcttcagcaacagcagcagcaacaagtgtcgggcctgaaatcacctaaaagaaacgataaacagccagcgctacaggtcccggtctctgtagccatgatgactccacaggttatcacaccacagcagatgcagcagatactgcagcagcaagtccttagccctcagcagctgcaggtgctgctccagcagcaacaggctctcatgttacagcaacagcaactccaggagttttataagaaacagcaggagcagctacaattacagctcctgcagcagcagcatgccggtaaacagcctaaggagcagcagcaagtggctacgcaacagctggccttccagcagcagctgctccagatgcagcagcttcagcaacagcacctgctgtccctgcaaaggcagggactgcttaccatccagccaggacaacccgccctgccacttcagccattggcccagggcatgatccctactgaactgcagcaactgtggaaagaagtaacctcagcccacacggcagaagagacaacgggcaacaaccactccagtctggatcttacgacaacctgcgtttcttccagtgccccctctaagacttctctcattatgaacccacacgcgagtaccaatgggcagctgtctgtgcacacgcctaaacgggaaagcttgagccacgaggagcatcctcactcacatccactttacggtcacggcgtatgcaaatggccaggatgtgaggcagtctgcgaagattttcaaagttttctcaaacacctgaactcggagcatgcccttgacgaccggtctacagctcagtgccgcgttcagatgcaggtggtccaacaacttgaacttcaactggcgaaagacaaggagcgcttgcaggccatgatgactcatttacatgtcaagtctaccgagcctaaggctgctccacaacccctgaatctagtctcaagcgtgactctgagtaaaagtgcttctgaggcgagccctcaaagcctcccccatacccccactactcccaccgccccactgacacccgtgacgcagggcccgtctgttatcaccaccacatccatgcacacagtaggcccaatcagacgacgatattcagataagtataatgttcccatctccagtgctgatatcgctcaaaatcaagaattttacaagaacgctgaagtccgacccccttttacatatgcctcactgatcaggcaggctatactagagtcaccagagaaacagttaacgttaaacgagatctacaattggttcactcgtatgttcgcctatttccgaagaaacgccgccacttggaaaaacgctgtccgccataacctgtccctgcacaagtgctttgtcagggtggaaaacgtgaaaggggccgtttggacagtggatgaagtggaatttcaaaaacggcgaccacagaaaatcagtgggaacccctcactcattaagaatatgcagtcatcccacgcctattgcactcctctgaatgccgcccttcaggctagcatggctgaaaatagcatacccctttacaccacagcttctatgggaaatcccacactaggcaacttagcaagcgcaataagagaggaactcaatggggcgatggagcacactaattctaacgagagcgatagctcccccgggcgatccccgatgcaggccgtgcatcctgtgcatgtgaaggaagaaccattagatcctgaggaggccgaaggccccctgagcttagtgacaaccgccaaccattctccggatttcgatcacgatagggactatgaggacgagcctgtgaacgaggatatggaatag

SEQ ID NO: 87458 - DNA, 2040 bp, Artificial Sequence
  derived and/or modified sequence
atgttccagtgcgtgttcagcagcagtgtgctgcagcctcactccaccagctgtctgttcaagcacttgttttaccactccgccacccccgcatctcaaaagcagccggagccgatctattccaagaagacagaaatacaacgccagacagtgcgggcacccttcgctaagctgttcatctttagcgcactgcaggtggcacgccaactcttgctgcagcagcagcagcagcaacaggtcagcggcctgaaatcccctaagaggaatgacaagcagccagcactccaggtcccagtgtctgtggccatgatgacaccccaggtgattactccacagcaaatgcagcagatcttacagcaacaggtcttgtcacctcagcagctccaagtgttgctacaacagcagcaggccctaatgctgcagcaacaacaattacaggaattctataagaagcagcaagaacaactgcaacttcagttgctccagcagcagcacgctggaaaacagccgaaggagcaacagcaggtggctacccaacagctggcattccagcagcagctcctacagatgcagcagctgcaacagcagcatcttttgagcctccagcggcaagggcttctgaccatccaaccaggacagccagctttgccattgcagcccttagcccagggcatgatccctacagaactgcagcagttgtggaaggaggtcacttccgcacacacagcagaggagactacaggtaacaaccactcttctctggacctgaccacaacatgcgtgtccagcagcgctccctctaaaaccagcctaataatgaacccccatgcctcaaccaacgggcagcttagtgtgcacactcccaaaagggagtccctgagtcatgaggagcatccccactctcacccgctctacgggcacggagtttgcaaatggcctggctgtgaagctgtctgtgaggatttccagagtttcctgaagcaccttaatagtgaacacgctttagacgacaggagcacagctcagtgtcgagttcagatgcaggtcgtgcagcaacttgaactgcagctcgccaaagacaaagagaggctgcaggccatgatgacccatttgcatgtcaagtctaccgagccgaaagccgcacctcagcctttgaacctcgtgtctagtgtcactctgtctaagagtgcctcggaagcttccccacagtcactccctcatactccgactaccccaaccgctccactgactccggtgacacaggggccatcagtcattactacaacaagcatgcacactgtcggcccaatccggcgacggtatagtgataaatataatgtgcctatttcctccgccgatatagcccagaatcaagaattctataaaaacgctgaagtaagacccccttttacttacgcttccttgattcgccaggctattttggaatcaccagaaaagcagttgacactgaacgagatctacaactggttcacgcgcatgtttgcatacttccgaagaaacgccgctacatggaagaacgctgtccggcataatttgtctctccacaagtgctttgtcagggtggaaaacgtgaaaggcgcagtatggaccgtagatgaggttgaatttcagaaacgaaggccccaaaagatctccggcaatccttccctgatcaaaaatatgcaaagcagtcacgcatattgcactcctttgaatgcggctttgcaggcatccatggcagagaactccatacccctctacactacggcctccatgggaaatccaacactaggcaatcttgcctcagcaatccgggaggagctcaatggagcaatggaacacactaattcaaacgaaagcgactcttcccctggccgatcccctatgcaggctgtgcacccagtacatgtaaaggaggaacccctggacccggaagaagccgaggggcctcttagtttggtgacaacagcgaatcactcccctgactttgatcacgaccgtgactacgaggatgaaccagttaacgaggatatggagtag

SEQ ID NO: 87459 - DNA, 2040 bp, Artificial Sequence
  derived and/or modified sequence
atgttccagtgcgtgttcagcagcagcgtgctgcagccccacagcaccagctgcctgttcaagcacctgttctaccacagcgccacccccgccagccagaagcagcccgagcccatctacagcaagaagaccgagatccagagacagaccgtgagagcccccttcgccaagctgttcatcttcagcgccctgcaggtggccagacagctgctgctgcagcagcagcagcagcagcaggtgagcggcctgaagagccccaagagaaacgacaagcagcccgccctgcaggtgcccgtgagcgtggccatgatgaccccccaggtgatcaccccccagcagatgcagcagatcctgcagcagcaggtgctgagcccccagcagctgcaggtgctgctgcagcagcagcaggccctgatgctgcagcagcagcagctgcaggagttctacaagaagcagcaggagcagctgcagctgcagctgctgcagcagcagcacgccggcaagcagcccaaggagcagcagcaggtggccacccagcagctggccttccagcagcagctgctgcagatgcagcagctgcagcagcagcacctgctgagcctgcagagacagggcctgctgaccatccagcccggccagcccgccctgcccctgcagcccctggcccagggcatgatccccaccgagctgcagcagctgtggaaggaggtgaccagcgcccacaccgccgaggagaccaccggcaacaaccacagcagcctggacctgaccaccacctgcgtgagcagcagcgcccccagcaagaccagcctgatcatgaacccccacgccagcaccaacggccagctgagcgtgcacacccccaagagagagagcctgagccacgaggagcacccccacagccaccccctgtacggccacggcgtgtgcaagtggcccggctgcgaggccgtgtgcgaggacttccagagcttcctgaagcacctgaacagcgagcacgccctggacgacagaagcaccgcccagtgcagagtgcagatgcaggtggtgcagcagctggagctgcagctggccaaggacaaggagagactgcaggccatgatgacccacctgcacgtgaagagcaccgagcccaaggccgccccccagcccctgaacctggtgagcagcgtgaccctgagcaagagcgccagcgaggccagcccccagagcctgccccacacccccaccacccccaccgcccccctgacccccgtgacccagggccccagcgtgatcaccaccaccagcatgcacaccgtgggccccatcagaagaagatacagcgacaagtacaacgtgcccatcagcagcgccgacatcgcccagaaccaggagttctacaagaacgccgaggtgagaccccccttcacctacgccagcctgatcagacaggccatcctggagagccccgagaagcagctgaccctgaacgagatctacaactggttcaccagaatgttcgcctacttcagaagaaacgccgccacctggaagaacgccgtgagacacaacctgagcctgcacaagtgcttcgtgagagtggagaacgtgaagggcgccgtgtggaccgtggacgaggtggagttccagaagagaagaccccagaagatcagcggcaaccccagcctgatcaagaacatgcagagcagccacgcctactgcacccccctgaacgccgccctgcaggccagcatggccgagaacagcatccccctgtacaccaccgccagcatgggcaaccccaccctgggcaacctggccagcgccatcagagaggagctgaacggcgccatggagcacaccaacagcaacgagagcgacagcagccccggcagaagccccatgcaggccgtgcaccccgtgcacgtgaaggaggagcccctggaccccgaggaggccgagggccccctgagcctggtgaccaccgccaaccacagccccgacttcgaccacgacagagactacgaggacgagcccgtgaacgaggacatggagtag

SEQ ID NO: 87460 - protein, 677 aa, Artificial Sequence
  derived and/or modified sequence
MMQESGTETKSNGSAIQNGSGGSNHLLECGGLREGRSNGETPAVDIGAADLAHAQQQQQQALQVARQLLLQQQQQQQVSGLKSPKRNDKQPALQVPVSVAMMTPQVITPQQMQQILQQQVLSPQQLQVLLQQQQALMLQQQQLQEFYKKQQEQLQLQLLQQQHAGKQPKEQQQVATQQLAFQQQLLQMQQLQQQHLLSLQRQGLLTIQPGQPALPLQPLAQGMIPTELQQLWKEVTSAHTAEETTGNNHSSLDLTTTCVSSSAPSKTSLIMNPHASTNGQLSVHTPKRESLSHEEHPHSHPLYGHGVCKWPGCEAVCEDFQSFLKHLNSEHALDDRSTAQCRVQMQVVQQLELQLAKDKERLQAMMTHLHVKSTEPKAAPQPLNLVSSVTLSKSASEASPQSLPHTPTTPTAPLTPVTQGPSVITTTSMHTVGPIRRRYSDKYNVPISSADIAQNQEFYKNAEVRPPFTYASLIRQAILESPEKQLTLNEIYNWFTRMFAYFRRNAATWKNAVRHNLSLHKCFVRVENVKGAVWTVDEVEFQKRRPQKISGNPSLIKNMQSSHAYCTPLNAALQASMAENSIPLYTTASMGNPTLGNLASAIREELNGAMEHTNSNESDSSPGRSPMQAVHPVHVKEEPLDPEEAEGPLSLVTTANHSPDFDHDRDYEDEPVNEDME

SEQ ID NO: 87461 - protein, 502 aa, Artificial Sequence
  derived and/or modified sequence
MMQESGTETKSNGSAIQNGSGGSNHLLECGGLREGRSNGETPAVDIGAADLAHAQQQQQQALQVARQLLLQQQQQQQVSGLKSPKRNDKQPALQVPVSVAMMTPQVITPQQMQQILQQQVLSPQQLQVLLQQQQALMLQQQQLQEFYKKQQEQLQLQLLQQQHAGKQPKEQQQVATQQLAFQQQLLQMQQLQQQHLLSLQRQGLLTIQPGQPALPLQPLAQGMIPTELQQLWKEVTSAHTAEETTGNNHSSLDLTTTCVSSSAPSKTSLIMNPHASTNGQLSVHTPKRESLSHEEHPHSHPLYGHGVCKWPGCEAVCEDFQSFLKHLNSEHALDDRSTAQCRVQMQVVQQLELQLAKDKERLQAMMTHLHVKSTEPKAAPQPLNLVSSVTLSKSASEASPQSLPHTPTTPTAPLTPVTQGPSVITTTSMHTVGPIRRRYSDKYNVPISSADIAQNQEFYKNAEVRPPFTYASLIRQAILESPEKKKKERQTLGTMPIHSTQQ

SEQ ID NO: 87462 - DNA, 7114 bp, Artificial Sequence
  derived and/or modified sequence
ggggggtgggcgccagcgccccggcgaacggcaaagagggagccgctcccgctcggggggccgctggagtgcccagcgggaacccgaaagtttgtaagaggaagagagcgcgcggcgagcgagcgagcgggccgggggcagcggcagcggcgccggggaccatggtgctgccggcgcctcctccgcgggcgtgaaggcggcgctcctactccctccccggactccgcggtgtcccagaagcttttgttgacaattccagtttccgaacaaaacatttcggcaatggtgagggcttcgatcccttctctgatttgctgtcagccatgaacggatggatgtgatgcctgctagccaaaaggcttccctctgtgtgttgcagtcctgtggcattatgcatgccccctcccagtgaccccaggctttttatggctgtgagacacgttaaaatttcaggggtaagacgtgaccttttgaggtgactataactgaagattgctttacagaagccaaaaaaggtttttgagtcatgatgcaagaatctgggactgagacaaaaagtaacggttcagccatccagaatgggtcgggcggcagcaaccacttactagagtgcggcggtcttcgggaggggcggtccaacggagagacgccggccgtggacatcggggcagctgacctcgcccacgcccagcagcagcagcaacaggcacttcaggtggcaagacagctccttcttcagcagcaacagcagcagcaagttagtggattaaaatctcccaagaggaatgacaaacaaccagctcttcaggttcccgtgtcagtggctatgatgacacctcaagttatcactccccagcaaatgcagcagatcctccagcaacaagtgctgagccctcagcagctccaggttctcctccagcagcagcaggccctcatgcttcaacagcagcagcttcaagagttttataaaaaacaacaggaacagttgcagcttcaacttttacaacaacaacatgctggaaaacagcctaaagagcaacagcaggtggctacccagcagttggcttttcagcagcagcttttacagatgcagcagttacagcagcagcacctcctgtctttgcagcgccaaggccttctgacaattcagcccgggcagcctgcccttccccttcaacctcttgctcaaggcatgattccaacagaactgcagcagctctggaaagaagtgacaagtgctcatactgcagaagaaaccacaggcaacaatcacagcagtttggatctgaccacgacatgtgtctcctcctctgcaccttccaagacctccttaataatgaacccacatgcctctaccaatggacagctctcagtccacactcccaaaagggaaagtttgtcccatgaggagcacccccatagccatcctctctatggacatggtgtatgcaagtggccaggctgtgaagcagtgtgcgaagatttccaatcatttctaaaacatctcaacagtgagcatgcgctggacgatagaagtacagcccaatgtagagtacaaatgcaggttgtacagcagttagagctacagcttgcaaaagacaaagaacgcctgcaagccatgatgacccacctgcatgtgaagtctacagaacccaaagccgcccctcagcccttgaatctggtatcaagtgtcactctctccaagtccgcatcggaggcttctccacagagcttacctcatactccaacgaccccaaccgcccccctgactcccgtcacccaaggcccctctgtcatcacaaccaccagcatgcacacggtgggacccatccgcaggcggtactcagacaaatacaacgtgcccatttcgtcagcagatattgcgcagaaccaagaattttataagaacgcagaagttagaccaccatttacatatgcatctttaattaggcaggccattctcgaatctccagaaaagcagctaacactaaatgagatctataactggttcacacgaatgtttgcttacttccgacgcaacgcggccacgtggaagaatgcagtgcgtcataatcttagtcttcacaagtgttttgtgcgagtagaaaacgttaaaggggcagtatggacagtggatgaagtagaattccaaaaacgaaggccacaaaagatcagtggtaacccttcccttattaaaaacatgcagagcagccacgcctactgcacacctctcaatgcagctttacaggcttcaatggctgagaatagtatacctctatacactaccgcttccatgggaaatcccactctgggcaacttagccagcgcaatacgggaagagctgaacggggcaatggagcataccaacagcaacgagagtgacagcagtccaggcagatctcctatgcaagccgtgcatcctgtacacgtcaaagaagagcccctcgatccagaggaagctgaagggcccctgtccttagtgacaacagccaaccacagtccagattttgaccatgacagagattacgaagatgaaccagtaaacgaggacatggagtgactatcggggcgggccaaccccgagaatgaagattggaaaaaggaaaaaaaaaaaaacacgtcaaaagttagcagtgaaattgttctccatttgttgtacagtctggaggattttcactacgttttgacaactctgaaatgtgttaactcttagtgccatcaagaaccccatttgggagtatttttgatttttctactttttgttgaaaaaaggaatttgtactctgtgcattggatggacttgtttggtacttgggattttcctctcttaaccgtcaacatcagtgttgtaaatttgctaaactgattcacttttagcagcagactttgaactgcagtcctgccaacgttggacactgaggacgcccgacagagcttgtgcacctaagctgcagaccaagcctttgcccagaatttaaggattccaatggacgacctatttgcacagtactgcatgttgattatcactgcctttactccttttttttttttttttttttttttttttttgcttccagttgggatggggaaggcctttgtgtgtgtattggggggaggggttaaaaaataattatcccaaactttttaatgtattgctttttttttttttttttttccttctactataccattttaagttctgacctcaggcctccatttgggccgatggcctcttggaggcttaaagttttctgtaccttgtgatgaatgttaataggtgtttttattatacaaagctgaatgtcatttctcgtttgtagctttctgtcactcattccatcttccttcagacatcaccacgtttctctaaagtcagaaaacattccgttttggtctttttcaaaaaggtcccaaatgctgcactctacacatgaaggccctctcacacagacgtgacgtcctgccagaaagagaatgaatgacagaaaaaaaaaagagagacaaactctaggaacaatgccgattcattccacgcagcagtattgggggtggttcgggggaggggtgtttcggattttctttttttcttttcttttctttttttttttttgcagcaaccattaataaatgccaccacattctaccagcacaaggaaacataggcagcactgaaaaaaaaaaaaaagctcatattaattagactgacaatatggccttggaaggctctcccttgtggaaccaagttgccatgggccttgggtgctctgcgataacgggtgtgggttggttttgtttgcaaaatggccaaaaaaaaaaaccggcttccccgagcagctgccctgaaagtaggggtggcggcggcggcgctgagtttatacattagttcagacctacttggtggcattaaactgtttgaatgcaaattcgatttcagattgaacttgttaagggagttaacgagggctgagttcagcaaatgctaaagtgttaatttcaaatatgcaaatttggtactgcagtttgttatgcaatattatatcaccaacccagtatcacaaaaactcatagaagatatcatgtaggccctgggctttgggggggtcccaaacatggtatgcagaaatgtgatggttacaggtcagtacaacctcagtccttagaacccctccacacttcagctctgcacccactttcctgtcatttatttatataggactgtagttttttttagttcgagagcctttcgaagcttaatttatattctttctttgtaccttttttctaaaattaccaaagatattacacaaaggtaaattatgttctctgttttatgctttatctgatgaagccaaatatcctcttattgttgatcaaaggaggcaaaagaatttagaggcaaatgacaagcgataggctattgcaacctgagaaagagaactgctccttcatcgtaaatttagaagaccaagtagataatggaaccaaagttgttacttttttctagtagttatttttcctttttctttttgtgtacctctacagagaccaaaactcattctcttaaagagattttatggggctactgcagataaaaataggacacaatattaaaggagctacagaaggaagggagtcccatctcaaaaaaaaaatgaatgtatgccactgcaattagagtatccaataaaggagacagtttagagtcaggacagaaaagcttccataattgaactagattacataatagtatttctagaaaaagagatatttttagattgtatgccacttttgtttaagaactgtgctgtgatcactgtattaattttggtttatcttggcatatatccttcagtttgtttttatttttaatttttcctttttttccgattaggctttggtcagcatttttcatttaaagaaaagtaacactcccatccactcataagcttggtacaaaaacttctctggcagttacttttgaagcttcactctgctttctgtataaagggcagtctgtggtcacgcaagactttaaaaaaaaaaaaaaaaaaaaaaaaaaaaaaaaaaaaaaaaacttttccaggcagcttcatgatgtgcaggcagtagccagacagggtcatgggaagggggccctgtgcttctaaactgagtggttgctggttagtttggtattcaaaagaggataaaaatctggtagattagttcattctcagcatgtgtagctagacatgagtaaagataacagcatgagaaactgttagtacgcatacctcagttcaaacctttagggaatgattaaaatttaaaaaaaaaacatttcactcagttgcacttagtcgtatgtcttgcatgcttagtctaaagactgtagcaaaaaaaaaaaaaaaagaaaaattagattttacatatctttgcaggtatcacagccttgcagaagaaccaactgaaaaaaaaattctcaggctttacagcaagcaaacttcactatgatttttacaattctgattctgtatcccctgggggttatcccagttgcttctttaggatggggtttattacgttgtacatatatcccgatgtgtctgtgtgaatctttgtcttttttgggggagggcagagggcggttctttttttagatattgttcctaaaaaggaataaatgcatacacctgtttgtcaaaacacctttgctttttgtgcaactgctttatattaacgatactaaaaaaaaatagctttggaaaaaaaactactgtatgtaacggaattgcagaatatgctgcacatgtattttatttagttatccttgctttaagaatattggatgacatttcctgacatgtgggagggagaaactccctaactttttttttctgcttttaaactgtaacatagttgaagatttcttttttctgttctcattgattggagcattttgtacaggttttgtgtgtgtgtgtgtgtgtgtgtgcgcgcgtgcgtgtgtgttaatctgttttttgatacattcctatcccttgtgtttatcctaccactgccttcctggctatcttaaacaagttcatacatttgaaaagaaaaaaaaatgttgtttaaaaaatgttttctcctgctgcagtaaatattttgcatgatgaaattccagggtcacacttttccaagtttatcagtgaagtagtgattaacaatggggagtgtcaaaactattgaacttttgtataaaaaaaaaaaaactttacaaggtgccaagatgtaaagaaaatctgttactttttttttctcaaagaaaagcatacattagggaggtagtcccgtgtgtcagacaaatgcactgtcaggaatgaggatccaacctacctgtccctagagtccgtcttgtaagatgagttaggctgccccttggaccagccacaaaatggaatatcaaggcttatgtacatacgtgaagagttaccaccagtcctgccacctttggacagctctaacaccatccccagcatccagtcagacctagtaaagaaaaccttggattcttaacccaagataggctgtaaatcactagcttttttttcctcatgaaaaaaaatagagttaaaaaatatttcctctcttttccatattccagctgaactccgtttccaaaggcacaaagaagagtgtgcttattcagattttgaatctttttggtaccttttggttaatgacatagcctcctgaaattctggatgtcttcaaagtcagttttgcttctttatcctgaaaatcagatttacaatgctgaaggcatttcttgggcccagtgtagctcacgcaatctctgctacccataagccttgatgaagatgatacagtccggactgtgagcatggtgcttcatgtatatgtgctgccagtaacaagaatttttttgttttgttttgttttgttttgataaggcataaaagaaactcattccttgacatcaactgtaattccatcattccatgtctgcggatacagacaataaaaaaaatgttgtgtagtcagtactaattactgacattataagcattctcaaatgcaataaaaatgctggttgttcacgctggtagtaaaagttgccacagcctaa

SEQ ID NO: 87463 - DNA, 6220 bp, Artificial Sequence
  derived and/or modified sequence
ggggggtgggcgccagcgccccggcgaacggcaaagagggagccgctcccgctcggggggccgctggagtgcccagcgggaacccgaaagtttgtaagaggaagagagcgcgcggcgagcgagcgagcgggccgggggcagcggcagcggcgccggggaccatggtgctgccggcgcctcctccgcgggcgtgaaggcggcgctcctactccctccccggactccgcggtgtcccagaagcttttgttgacaattccagtttccgaacaaaacatttcggcaatggtgagggcttcgatcccttctctgatttgctgtcagccatgaacggatggatgtgatgcctgctagccaaaaggcttccctctgtgtgttgcagtcctgtggcattatgcatgccccctcccagtgaccccaggctttttatggctgtgagacacgttaaaatttcaggggtaagacgtgaccttttgaggtgactataactgaagattgctttacagaagccaaaaaaggtttttgagtcatgatgcaagaatctgggactgagacaaaaagtaacggttcagccatccagaatgggtcgggcggcagcaaccacttactagagtgcggcggtcttcgggaggggcggtccaacggagagacgccggccgtggacatcggggcagctgacctcgcccacgcccagcagcagcagcaacaggcacttcaggtggcaagacagctccttcttcagcagcaacagcagcagcaagttagtggattaaaatctcccaagaggaatgacaaacaaccagctcttcaggttcccgtgtcagtggctatgatgacacctcaagttatcactccccagcaaatgcagcagatcctccagcaacaagtgctgagccctcagcagctccaggttctcctccagcagcagcaggccctcatgcttcaacagcagcagcttcaagagttttataaaaaacaacaggaacagttgcagcttcaacttttacaacaacaacatgctggaaaacagcctaaagagcaacagcaggtggctacccagcagttggcttttcagcagcagcttttacagatgcagcagttacagcagcagcacctcctgtctttgcagcgccaaggccttctgacaattcagcccgggcagcctgcccttccccttcaacctcttgctcaaggcatgattccaacagaactgcagcagctctggaaagaagtgacaagtgctcatactgcagaagaaaccacaggcaacaatcacagcagtttggatctgaccacgacatgtgtctcctcctctgcaccttccaagacctccttaataatgaacccacatgcctctaccaatggacagctctcagtccacactcccaaaagggaaagtttgtcccatgaggagcacccccatagccatcctctctatggacatggtgtatgcaagtggccaggctgtgaagcagtgtgcgaagatttccaatcatttctaaaacatctcaacagtgagcatgcgctggacgatagaagtacagcccaatgtagagtacaaatgcaggttgtacagcagttagagctacagcttgcaaaagacaaagaacgcctgcaagccatgatgacccacctgcatgtgaagtctacagaacccaaagccgcccctcagcccttgaatctggtatcaagtgtcactctctccaagtccgcatcggaggcttctccacagagcttacctcatactccaacgaccccaaccccccctgactcccgtcacccaaggcccctctgtcatcacaaccaccagcatgcacacggtgggacccatccgcaggcggtactcagacaaatacaacgtgcccatttcgtcagcagatattgcgcagaaccaagaattttataagaacgcagaagttagaccaccatttacatatgcatctttaattaggcaggccattctcgaatctccagaaaagcagctaacactaaatgagatctataactggttcacacgaatgtttgcttacttccgacgcaacgcggccacgtggaagaatgcagtgcgtcataatcttagtcttcacaagtgttttgtgcgagtagaaaacgttaaaggggcagtatggacagtggatgaagtagaattccaaaaacgaaggccacaaaagatcagtggtaacccttcccttattaaaaacatgcagagcagccacgcctactgcacacctctcaatgcagctttacaggcttcaatggctgagaatagtatacctctatacactaccgcttccatgggaaatcccactctgggcaacttagccagcgcaatacgggaagagctgaacggggcaatggagcataccaacagcaacgagagtgacagcagtccaggcagatctcctatgcaagccgtgcatcctgtacacgtcaaagaagagcccctcgatccagaggaagctgaagggcccctgtccttagtgacaacagccaaccacagtccagattttgaccatgacagagattacgaagatgaaccagtaaacgaggacatggagtgactatcggggcgggccaaccccgagaatgaagattggaaaaaggaaaaaaaaaaaaacacgtcaaaagttagcagtgaaattgttctccatttgttgtacagtctggaggattttcactacgttttgacaactctgaaatgtgttaactcttagtgccatcaagaaccccatttgggagtatttttgatttttctactttttgttgaaaaaaggaatttgtactctgtgcattggatggacttgtttggtacttgggattttcctctcttaaccgtcaacatcagtgttgtaaatttgctaaactgattcacttttagcagcagactttgaactgcagtcctgccaacgttggacactgaggacgcccgacagagcttgtgcacctaagctgcagaccaagcctttgcccagaatttaaggattccaatggacgacctatttgcacagtactgcatgttgattatcactgcctttactccttttttttttttttttttttttttttttttgcttccagttgggatggggaaggcctttgtgtgtgtattggggggaggggttaaaaaataattatcccaaactttttaatgtattgctttttttttttttttttttccttctactataccattttaagttctgacctcaggcctccatttgggccgatggcctcttggaggcttaaagttttctgtaccttgtgatgaatgttaataggtgtttttattatacaaagctgaatgtcatttctcgtttgtagctttctgtcactcattccatcttccttcagacatcaccacgtttctctaaagtcagaaaacattccgttttggtctttttcaaaaaggtcccaaatgctgcactctacacatgaaggccctctcacacagacgtgacgtcctgccagaaagagaatgaatgacagaaaaaaaaaagagagacaaactctaggaacaatgccgattcattccacgcagcagtattgggggtggttcgggggaggggtgtttcggattttctttttttcttttcttttctttttttttttttgcagcaaccattaataaatgccaccacattctaccagcacaaggaaacataggcagcactgaaaaaaaaaaaaaagctcatattaattagactgacaatatggccttggaaggctctcccttgtggaaccaagttgccatgggccttgggtgctctgcgataacgggtgtgggttggttttgtttgcaaaatggccaaaaaaaaaaaccggcttccccgagcagctgccctgaaagtaggggtggcggcggcggcgctgagtttatacattagttcagacctacttggtggcattaaactgtttgaatgcaaattcgatttcagattgaacttgttaagggagttaacgagggctgagttcagcaaatgctaaagtgttaatttcaaatatgcaaatttggtactgcagtttgttatgcaatattatatcaccaacccagtatcacaaaaactcatagaagatatcatgtaggccctgggctttgggggggtcccaaacatggtatgcagaaatgtgatggttacaggtcagtacaacctcagtccttagaacccctccacacttcagctctgcacccactttcctgtcatttatttatataggactgtagttttttttagttcgagagcctttcgaagcttaatttatattctttctttgtaccttttttctaaaattaccaaagatattacacaaaggtaaattatgttctctgttttatgctttatctgatgaagccaaatatcctcttattgttgatcaaaggaggcaaaagaatttagaggcaaatgacaagcgataggctattgcaacctgagaaagagaactgctccttcatcgtaaatttagaagaccaagtagataatggaaccaaagttgttacttttttctagtagttatttttcctttttctttttgtgtacctctacagagaccaaaactcattctcttaaagagattttatggggctactgcagataaaaataggacacaatattaaaggagctacagaaggaagggagtcccatctcaaaaaaaaaatgaatgtatgccactgcaattagagtatccaataaaggagacagtttagagtcaggacagaaaagcttccataattgaactagattacataatagtatttctagaaaaagagatatttttagattgtatgccacttttgtttaagaactgtgctgtgatcactgtattaattttggtttatcttggcatatatccttcagtttgtttttatttttaatttttcctttttttccgattaggctttggtcagcatttttcatttaaagaaaagtaacactcccatccactcataagcttggtacaaaaacttctctggcagttacttttgaagcttcactctgctttctgtataaagggcagtctgtggtcacgcaagactttaaaaaaaaaaaaaaaaaaaaaaaaaaaaaaaaaaaaaaaaacttttccaggcagcttcatgatgtgcaggcagtagccagacagggtcatgggaagggggccctgtgcttctaaactgagtggttgctggttagtttggtattcaaaagaggataaaaatctggtagattagttcattctcagcatgtgtagctagacatgagtaaagataacagcatgagaaactgttagtacgcatacctcagttcaaacctttagggaatgattaaaatttaaaaaaaaaacatttcactcagttgcacttagtcgtatgtcttgcatgcttagtctaaagactgtagcaaaaaaaaaaaaaaaagaaaaattagattttacatatctttgcaggtatcacagccttgcagaagaaccaactgaaaaaaaaattctcaggctttacagcaagcaaacttcactatgatttttacaattctgattctgtatcccctgggggttatcccagttgcttctttaggatggggtttattacgttgtacatatatcccgatgtgtctgtgtgaatctttgtcttttttgggggagggcagagggcggttctttttttagatattgttcctaaaaaggaataaatgcatacacctgtttgtcaaaacacctttgctttttgtgcaactgctttatattaacgatactaaaaaaaaatagctttggaaaaaaaactactgtatgtaacggaattgcagaatatgctgcacatgtattttatttagttatccttgctttaagaatattggatgacatttcctgacatgtgggagggagaaactccctaactttttttttctgcttttaaactgtaacatagttgaagatttcttttttctgttctcattgattggagcattttgtacaggttttgtgtgtgtgtgtgtgtgtgtgtgcgcgcgtgcgtgtgtgttaatctgttttttgatacattcctatcccttgtgtttatcctaccactgccttcctggctatcttaaacaagttcatacatttgaaaagaaaaaaaaatgttgtttaaaaaatgttttctcctgctgcagtaaatattttgcatgatgaaattccagggtcacacttttccaagtttatcagtgaagtagtgattaacaatggggagtgtcaaaactattgaacttttgta

SEQ ID NO: 87464 - DNA, 2032 bp, Artificial Sequence
  derived and/or modified sequence
ggggggtgggcgccagcgccccggcgaacggcaaagagggagccgctcccgctcggggggccgctggagtgcccagcgggaacccgaaagtttgtaagaggaagagagcgcgcggcgagcgagcgagcgggccgggggcagcggcagcggcgccggggaccatggtgctgccggcgcctcctccgcgggcgtgaaggcggcgctcctactccctccccggactccgcggtgtcccagaagcttttgttgacaattccagtttccgaacaaaacatttcggcaatggtgagggcttcgatcccttctctgatttgctgtcagccatgaacggatggatgtgatgcctgctagccaaaaggcttccctctgtgtgttgcagtcctgtggcattatgcatgccccctcccagtgaccccaggctttttatggctgtgagacacgttaaaatttcaggggtaagacgtgaccttttgaggtgactataactgaagattgctttacagaagccaaaaaaggtttttgagtcatgatgcaagaatctgggactgagacaaaaagtaacggttcagccatccagaatgggtcgggcggcagcaaccacttactagagtgcggcggtcttcgggaggggcggtccaacggagagacgccggccgtggacatcggggcagctgacctcgcccacgcccagcagcagcagcaacaggcacttcaggtggcaagacagctccttcttcagcagcaacagcagcagcaagttagtggattaaaatctcccaagaggaatgacaaacaaccagctcttcaggttcccgtgtcagtggctatgatgacacctcaagttatcactccccagcaaatgcagcagatcctccagcaacaagtgctgagccctcagcagctccaggttctcctccagcagcagcaggccctcatgcttcaacagcagcagcttcaagagttttataaaaaacaacaggaacagttgcagcttcaacttttacaacaacaacatgctggaaaacagcctaaagagcaacagcaggtggctacccagcagttggcttttcagcagcagcttttacagatgcagcagttacagcagcagcacctcctgtctttgcagcgccaaggccttctgacaattcagcccgggcagcctgcccttccccttcaacctcttgctcaaggcatgattccaacagaactgcagcagctctggaaagaagtgacaagtgctcatactgcagaagaaaccacaggcaacaatcacagcagtttggatctgaccacgacatgtgtctcctcctctgcaccttccaagacctccttaataatgaacccacatgcctctaccaatggacagctctcagtccacactcccaaaagggaaagtttgtcccatgaggagcacccccatagccatcctctctatggacatggtgtatgcaagtggccaggctgtgaagcagtgtgcgaagatttccaatcatttctaaaacatctcaacagtgagcatgcgctggacgatagaagtacagcccaatgtagagtacaaatgcaggttgtacagcagttagagctacagcttgcaaaagacaaagaacgcctgcaagccatgatgacccacctgcatgtgaagtctacagaacccaaagccgcccctcagcccttgaatctggtatcaagtgtcactctctccaagtccgcatcggaggcttctccacagagcttacctcatactccaacgaccccaaccgcccccctgactcccgtcacccaaggcccctctgtcatcacaaccaccagcatgcacacggtgggacccatccgcaggcggtactcagacaaatacaacgtgcccatttcgtcagcagatattgcgcagaaccaagaattttataagaacgcagaagttagaccaccatttacatatgcatctttaattaggcaggccattctcgaatctccagaaaaaaaaaaaaaagagagacaaactctaggaacaatgccgattcattccacgcagcag

SEQ ID NO: 87465 - DNA, 4967 bp, Artificial Sequence
  derived and/or modified sequence
atcacagcttggtgctggggctcagcatggccaggtggctaaccagggcttggtgtcaactacatttgggatgatgacacttggaggacacagagccactgtgcagcaggagtcgccactgctaacagccagagtgtcccagaagcttttgttgacaattccagtttccgaacaaaacatttcggcaatggtgagggcttcgatcccttctctgatttgctgtcagccatgaacggatggatgtgatgcctgctagccaaaaggcttccctctgtgtgttgcagtcctgtggcattatgcatgccccctcccagtgaccccaggctttttatggctgtgagacacgttaaaatttcaggggtaagacgtgaccttttgaggtgactataactgaagattgctttacagaagccaaaaaaggtttttgagtcatgatgcaagaatctgggactgagacaaaaagtaacggttcagccatccagaatgggtcgggcggcagcaaccacttactagagtgcggcggtcttcgggaggggcggtccaacggagagacgccggccgtggacatcggggcagctgacctcgcccacgcccagcagcagcagcaacaggcacttcaggtggcaagacagctccttcttcagcagcaacagcagcagcaagttagtggattaaaatctcccaagaggaatgacaaacaaccagctcttcaggttcccgtgtcagtggctatgatgacacctcaagttatcactccccagcaaatgcagcagatcctccagcaacaagtgctgagccctcagcagctccaggttctcctccagcagcagcaggccctcatgcttcaacagcagcagcttcaagagttttataaaaaacaacaggaacagttgcagcttcaacttttacaacaacaacatgctggaaaacagcctaaagagcaacagcaggtggctacccagcagttggcttttcagcagcagcttttacagatgcagcagttacagcagcagcacctcctgtctttgcagcgccaaggccttctgacaattcagcccgggcagcctgcccttccccttcaacctcttgctcaaggcatgattccaacagaactgcagcagctctggaaagaagtgacaagtgctcatactgcagaagaaaccacaggcaacaatcacagcagtttggatctgaccacgacatgtgtctcctcctctgcaccttccaagacctccttaataatgaacccacatgcctctaccaatggacagctctcagtccacactcccaaaagggaaagtttgtcccatgaggagcacccccatagccatcctctctatggacatggtgtatgcaagtggccaggctgtgaagcagtgtgcgaagatttccaatcatttctaaaacatctcaacagtgagcatgcgctggacgatagaagtacagcccaatgtagagtacaaatgcaggttgtacagcagttagagctacagcttgcaaaagacaaagaacgcctgcaagccatgatgacccacctgcatgtgaagtctacagaacccaaagccgcccctcagcccttgaatctggtatcaagtgtcactctctccaagtccgcatcggaggcttctccacagagcttacctcatactccaacgaccccaaccgcccccctgactcccgtcacccaaggcccctctgtcatcacaaccaccagcatgcacacggtgggacccatccgcaggcggtactcagacaaatacaacgtgcccatttcgtcagcagatattgcgcagaaccaagaattttataagaacgcagaagttagaccaccatttacatatgcatctttaattaggcaggccattctcgaatctccagaaaagcagctaacactaaatgagatctataactggttcacacgaatgtttgcttacttccgacgcaacgcggccacgtggaagaatgcagtgcgtcataatcttagtcttcacaagtgttttgtgcgagtagaaaacgttaaaggggcagtatggacagtggatgaagtagaattccaaaaacgaaggccacaaaagatcagtggtaacccttcccttattaaaaacatgcagagcagccacgcctactgcacacctctcaatgcagctttacaggcttcaatggctgagaatagtatacctctatacactaccgcttccatgggaaatcccactctgggcaacttagccagcgcaatacgggaagagctgaacggggcaatggagcataccaacagcaacgagagtgacagcagtccaggcagatctcctatgcaagccgtgcatcctgtacacgtcaaagaagagcccctcgatccagaggaagctgaagggcccctgtccttagtgacaacagccaaccacagtccagattttgaccatgacagagattacgaagatgaaccagtaaacgaggacatggagtgactatcggggcgggccaaccccgagaatgaagattggaaaaaggaaaaaaaaaaaaacacgtcaaaagttagcagtgaaattgttctccatttgttgtacagtctggaggattttcactacgttttgacaactctgaaatgtgttaactcttagtgccatcaagaaccccatttgggagtatttttgatttttctactttttgttgaaaaaaggaatttgtactctgtgcattggatggacttgtttggtacttgggattttcctctcttaaccgtcaacatcagtgttgtaaatttgctaaactgattcacttttagcagcagactttgaactgcagtcctgccaacgttggacactgaggacgcccgacagagcttgtgcacctaagctgcagaccaagcctttgcccagaatttaaggattccaatggacgacctatttgcacagtactgcatgttgattatcactgcctttactccttttttttttttttttttttttttttttttgcttccagttgggatggggaaggcctttgtgtgtgtattggggggaggggttaaaaaataattatcccaaactttttaatgtattgctttttttttttttttttttccttctactataccattttaagttctgacctcaggcctccatttgggccgatggcctcttggaggcttaaagttttctgtaccttgtgatgaatgttaataggtgtttttattatacaaagctgaatgtcatttctcgtttgtagctttctgtcactcattccatcttccttcagacatcaccacgtttctctaaagtcagaaaacattccgttttggtctttttcaaaaaggtcccaaatgctgcactctacacatgaaggccctctcacacagacgtgacgtcctgccagaaagagaatgaatgacagaaaaaaaaaagagagacaaactctaggaacaatgccgattcattccacgcagcagtattgggggtggttcgggggaggggtgtttcggattttctttttttcttttcttttctttttttttttttgcagcaaccattaataaatgccaccacattctaccagcacaaggaaacataggcagcactgaaaaaaaaaaaaaagctcatattaattagactgacaatatggccttggaaggctctcccttgtggaaccaagttgccatgggccttgggtgctctgcgataacgggtgtgggttggttttgtttgcaaaatggccaaaaaaaaaaaccggcttccccgagcagctgccctgaaagtaggggtggcggcggcggcgctgagtttatacattagttcagacctacttggtggcattaaactgtttgaatgcaaattcgatttcagattgaacttgttaagggagttaacgagggctgagttcagcaaatgctaaagtgttaatttcaaatatgcaaatttggtactgcagtttgttatgcaatattatatcaccaacccagtatcacaaaaactcatagaagatatcatgtaggccctgggctttgggggggtcccaaacatggtatgcagaaatgtgatggttacaggtcagtacaacctcagtccttagaacccctccacacttcagctctgcacccactttcctgtcatttatttatataggactgtagttttttttagttcgagagcctttcgaagcttaatttatattctttctttgtaccttttttctaaaattaccaaagatattacacaaaggtaaattatgttctctgttttatgctttatctgatgaagccaaatatcctcttattgttgatcaaaggaggcaaaagaatttagaggcaaatgacaagcgataggctattgcaacctgagaaagagaactgctccttcatcgtaaatttagaagaccaagtagataatggaaccaaagttgttacttttttctagtagttatttttcctttttctttttgtgtacctctacagagaccaaaactcattctcttaaagagattttatggggctactgcagataaaaataggacacaatattaaaggagctacagaaggaagggagtcccatctcaaaaaaaaaatgaatgtatgccactgcaattagagtatccaataaaggagacagtttagagtcaggacagaaaagcttccataattgaactagattacataatagtatttctagaaaaagagatatttttagattgtatgccacttttgtttaagaactgtgctgtgatcactgtattaattttggtttatcttggcatatatccttcagtttgtttttatttttaatttttcctttttttccgattaggctttggtcagcatttttcatttaaagaaaagtaacactcccatccactcataagcttggtacaaaaacttctctggcagttacttttgaagcttcactctgctttctgtataaagggcagtctgtggtcacgcaagactttaaaaaaaaaaaaaaaaaaaaaaaaaaaaa

SEQ ID NO: 87466 - DNA, 2400 bp, Artificial Sequence
  derived and/or modified sequence
agacaataagaaacaaacggtacaactccacaaaaggcttcccggaaaataagtgtcaaataaatcctacggaactctcgcttctgccactgagctctgtatatgcaaacctgtttttatgccatcgcttccccaggctgagctgcgtttgtttggaaatgtaagccactgccttttctttttttcttttttccttttttttttttcccccctcacttcatctgagggctctggattaattccttgagacatatctttgcatacatatctcatgagttatgtttcctggagccttttactaggaacattaaggtttttgagtcatgatgcaagaatctgggactgagacaaaaagtaacggttcagccatccagaatgggtcgggcggcagcaaccacttactagagtgcggcggtcttcgggaggggcggtccaacggagagacgccggccgtggacatcggggcagctgacctcgcccacgcccagcagcagcagcaacaggcacttcaggtggcaagacagctccttcttcagcagcaacagcagcagcaagttagtggattaaaatctcccaagaggaatgacaaacaaccagctcttcaggttcccgtgtcagtggctatgatgacacctcaagttatcactccccagcaaatgcagcagatcctccagcaacaagtgctgagccctcagcagctccaggttctcctccagcagcagcaggccctcatgcttcaacagcagcagcttcaagagttttataaaaaacaacaggaacagttgcagcttcaacttttacaacaacaacatgctggaaaacagcctaaagagcaacagcaggtggctacccagcagttggcttttcagcagcagcttttacagatgcagcagttacagcagcagcacctcctgtctttgcagcgccaaggccttctgacaattcagcccgggcagcctgcccttccccttcaacctcttgctcaaggcatgattccaacagaactgcagcagctctggaaagaagtgacaagtgctcatactgcagaagaaaccacaggcaacaatcacagcagtttggatctgaccacgacatgtgtctcctcctctgcaccttccaagacctccttaataatgaacccacatgcctctaccaatggacagctctcagtccacactcccaaaagggaaagtttgtcccatgaggagcacccccatagccatcctctctatggacatggtgtatgcaagtggccaggctgtgaagcagtgtgcgaagatttccaatcatttctaaaacatctcaacagtgagcatgcgctggacgatagaagtacagcccaatgtagagtacaaatgcaggttgtacagcagttagagctacagcttgcaaaagacaaagaacgcctgcaagccatgatgacccacctgcatgtgaagtctacagaacccaaagccgcccctcagcccttgaatctggtatcaagtgtcactctctccaagtccgcatcggaggcttctccacagagcttacctcatactccaacgaccccaaccgcccccctgactcccgtcacccaaggcccctctgtcatcacaaccaccagcatgcacacggtgggacccatccgcaggcggtactcagacaaatacaacgtgcccatttcgtcagcagatattgcgcagaaccaagaattttataagaacgcagaagttagaccaccatttacatatgcatctttaattaggcaggccattctcgaatctccagaaaagcagctaacactaaatgagatctataactggttcacacgaatgtttgcttacttccgacgcaacgcggccacgtggaagaatgcagtgcgtcataatcttagtcttcacaagtgttttgtgcgagtagaaaacgttaaaggggcagtatggacagtggatgaagtagaattccaaaaacgaaggccacaaaagatcagtggtaacccttcccttattaaaaacatgcagagcagccacgcctactgcacacctctcaatgcagctttacaggcttcaatggctgagaatagtatacctctatacactaccgcttccatgggaaatcccactctgggcaacttagccagcgcaatacgggaagagctgaacggggcaatggagcataccaacagcaacgagagtgacagcagtccaggcagatctcctatgcaagccgtgcatcctgtacacgtcaaagaagagcccctcgatccagaggaagctgaagggcccctgtccttagtgacaacagccaaccacagtccagattttgaccatgacagagattacgaagatgaaccagtaaacgaggacatggagtgactatcggggcgggccaaccccgagaatgaagattggaaaaagg

SEQ ID NO: 87467 - DNA, 2034 bp, Artificial Sequence
  derived and/or modified sequence
atgatgcaagagtctggaactgagacgaaatcgaacggctcggccatccagaatggaagtggagggtccaaccatctgcttgaatgcggggggttaagagagggtaggagtaacggcgagacgccggctgttgacatcggagccgcagatttggcccatgctcaacagcagcagcagcaggccctgcaggtagctcgacagctgcttctgcaacaacagcaacagcagcaagtgagtggactcaagtctccgaaaagaaatgataaacagcccgcactacaggtgcccgtgtccgtcgcaatgatgacacctcaggtaataaccccccaacagatgcagcagatcctacagcagcaagtgctgtcaccccagcagctgcaggtgctcctgcaacagcaacaggctctcatgttgcaacaacagcagctgcaggagttttataaaaagcagcaagagcagctacagctgcagctgttgcagcagcagcacgccggcaagcagcctaaggaacagcagcaggttgccacccagcagctcgcctttcaacagcagcttctgcaaatgcagcagctccagcagcagcatctcctatctcttcagagacagggactgctgacaatccagcccgggcaacccgctctgcctttacaaccgttagcccaggggatgattcccacagagctccagcagctgtggaaagaggtgacctcggcccacaccgccgaggaaactacgggtaacaatcattcttctctcgatctgaccaccacttgcgtgtcaagctccgcccccagtaaaacttcactaattatgaacccccacgcatctaccaatggccagctgtccgtgcacacccccaagagggagtctctgtcccatgaggagcacccccatagccatcccctctatgggcacggtgtatgtaagtggcctgggtgtgaagctgtgtgtgaggatttccagtcatttcttaaacatctgaattctgagcacgccttagatgatcgcagcacagctcaatgcagagtgcagatgcaggtagtccagcagctggaactgcaactggctaaggataaggaacgcctgcaggccatgatgactcacctgcatgtgaaaagcacggaacctaaggcagcaccccagccgttgaaccttgtgtctagcgtcaccctgtctaagtcggcatctgaagccagccctcagtcactccctcataccccaaccacacccacagcccccctgacccctgtgacccagggcccttctgtgattacaaccacgagcatgcacactgttggcccaattagaaggcggtattctgataagtataatgtgcccatcagctccgctgatatagcacagaaccaggaattctataaaaatgcggaagttagaccacccttcacatacgcaagtctaatacgccaagccatcctggagagccccgaaaagcaactgacactcaatgagatttacaactggtttacccgcatgtttgcttatttcagacgcaacgccgcaacctggaagaacgcggtgagacataacttatcgttgcacaagtgctttgtgcgggtcgagaacgtcaagggtgccgtatggacggtagacgaagtcgaatttcagaagaggaggccccaaaaaatatcaggcaatccaagcttgattaaaaacatgcagagctcccacgcatattgcactcccctgaacgctgcattgcaggcctccatggcagaaaactcaatacccctgtatacaacggctagcatgggaaatcccactctggggaacctggcgagcgctatcagagaggagctcaatggagccatggaacatactaatagcaatgagagtgatagctctccaggccgtagtccaatgcaagctgtgcatccagtgcacgtgaaggaggaaccattggaccctgaggaagcagagggacctctcagcctcgtgacgaccgcgaaccacagcccagattttgatcatgacagggattacgaagacgagcccgtgaacgaggacatggagtag

SEQ ID NO: 87468 - DNA, 1509 bp, Artificial Sequence
  derived and/or modified sequence
atgatgcaggagtccggtacggaaacaaaatctaacggtagtgctatccaaaacggctccggaggctctaatcacctgcttgaatgcggaggattaagggaggggaggagcaatggagaaactcctgctgtggatattggcgctgcagacctggcgcacgcacaacaacaacagcagcaggccctgcaggtggctcgccagctcctgttgcaacagcaacagcagcagcaggtgagcgggctgaaatcccctaagcgaaacgacaagcagcctgccttacaggtcccagtctctgttgccatgatgacacctcaggtgataacgccacagcagatgcaacagattctgcaacagcaggtgctttctccccaacagctgcaggtgctgttgcaacagcaacaagcacttatgctgcagcagcagcaactgcaggagttttataaaaaacagcaagagcagcttcagttgcagcttctccagcaacagcacgccggaaagcagccaaaggagcagcagcaagtggcgacccagcagttggcatttcagcaacagttgttgcagatgcagcagctgcagcagcaacacttgttatcactgcagcgacaggggctacttaccattcagcccggacaacccgcactccccttgcagcctttggctcagggtatgatccctacagaattgcaacagctctggaaagaggtcacatctgcacataccgctgaggaaacaacgggcaataatcattcctctctcgatctaactaccacttgcgtttcttccagcgccccctccaaaacttctctgataatgaatccacacgcctcaaccaatggccaactgtccgtgcacacccctaagcgagagagcctaagccatgaggaacatcctcacagccaccctctgtacggacacggggtgtgtaaatggcccgggtgcgaagccgtctgcgaggacttccagtcttttttgaagcatcttaatagcgaacacgcattagatgacagaagcacagcccaatgccgggtccaaatgcaagtggtgcagcagctcgaactgcaactagctaaagacaaagaacggctgcaggccatgatgacccatcttcatgtgaagtccaccgaaccaaaagccgccccgcagcctctgaacctcgtgagcagtgtgacgctgtcaaagtctgccagtgaagcatcaccccagtcattaccccacactcccaccacgcctactgcccccctcacacccgtaacacagggcccatctgtaatcaccacaactagcatgcatactgtcggacccatacgaagaaggtacagcgataagtataatgtgcctatatctagtgccgacattgcccagaatcaggagttctataaaaatgccgaggttagacccccattcacatacgcctctctcattcgccaggccatcctggagtctccagagaagaagaagaaagaacggcaaacactgggaaccatgcctatccactcaactcagcagtag

SEQ ID NO: 87469 - DNA, 2034 bp, Artificial Sequence
  derived and/or modified sequence
atgatgcaagagtcagggactgagaccaaatcaaatggtagtgcgatccagaatggcagcggaggcagtaaccacctgttggagtgtggcgggctccgagagggaagaagtaatggagaaacacccgcagtggacatcggcgctgcggatcttgcccatgctcagcagcaacagcagcaagctctgcaggtggcaagacaactgctcctgcagcagcagcagcagcagcaggtgagcggcctaaagtctcctaaaaggaatgataagcagccagccctgcaggtgcccgttagcgtggctatgatgactccccaggtcataaccccccagcagatgcaacagatcctccagcaacaagttttgtccccacaacagctccaggtgttacttcaacagcagcaagccctcatgttgcagcagcagcagctgcaggagttctataagaagcagcaggagcagcttcaattacaactgcttcagcaacaacacgccggcaagcaacctaaagagcagcagcaggtggctacgcagcaacttgcattccagcagcagctgctgcagatgcagcagctccaacaacaacatctcctgtctttgcagcgacagggcctgctgacgatccagccaggacaacccgctctgccccttcagcccttagctcaggggatgattccaaccgaactgcagcagctttggaaagaagtgacttctgcccacactgctgaggaaaccacagggaacaaccattctagcctggatttaaccactacgtgtgtcagcagctcagcacctagtaagacatccctaattatgaatccccacgcatccactaatggccaactgtccgtgcatacacctaagcgggaaagcctgtcccacgaggagcatccccatagccaccctttgtacggtcacggagtgtgcaaatggcctggctgcgaggcagtttgtgaggacttccagtcttttctcaagcacctgaatagcgagcacgcccttgatgatcggtcaacagcccaatgtagagttcagatgcaggtcgtccagcagctcgagctccagctagcgaaggataaggaaagattgcaagccatgatgacccacctgcatgtgaaatccacagagcccaaggcggccccccagcctctgaatctcgtgtcgagcgtcacactctccaaaagtgcatctgaagcctctccacagagtctaccgcatactccaactacccccaccgcacccctgacccccgtgactcaaggcccatctgtgattaccactaccagtatgcacaccgtcggacctattaggcgccggtactctgacaagtacaacgtgccgatctccagtgcagatatcgcccagaaccaggaattttataagaacgcggaggtcagacctccattcacttacgccagccttattaggcaggctatattggaaagtccagagaaacagctcactcttaacgaaatctataattggttcacccgtatgtttgcctacttccgaaggaacgcagcaacgtggaaaaacgctgtgaggcacaatctctccctgcacaagtgcttcgtgcgggtggaaaacgtcaagggcgccgtgtggacagtggatgaagtggagtttcagaagcgacggcctcagaagatctctggcaatccctctcttatcaaaaacatgcagtcctcccatgcatattgtacacccttgaacgccgcacttcaggcaagcatggctgagaactctatacctctgtataccacggcctccatgggtaaccctactttaggtaatctcgctagtgccattagagaggaactaaatggagcgatggaacacactaacagcaacgaatccgactcgtcccctggcagatcccctatgcaggccgtccaccctgttcacgtaaaggaggaacccctcgacccagaggaagctgagggtccactatctctagtgacaaccgcgaaccacagtccagattttgaccacgatcgcgattatgaggacgagcccgtgaacgaggacatggagtag

SEQ ID NO: 87470 - DNA, 2034 bp, Artificial Sequence
  derived and/or modified sequence
atgatgcaggagtcagggacagaaaccaagtccaacgggtccgccattcagaatggtagcggagggagtaatcacctgttagagtgcggcgggctgagggagggccgctcgaacggggaaacaccggccgtggacatcggcgccgcagatctggctcacgcccagcagcagcagcaacaagcccttcaagtggccaggcaactgctgttacagcagcagcagcagcagcaggtctctgggctcaaatcacccaaaaggaacgacaagcagcctgcgctccaagtgccggtgagcgtcgccatgatgactccacaggtgatcacaccacagcagatgcaacagattctccagcagcaggttctgtcccctcagcaactgcaggtcttactgcagcagcaacaggctcttatgttgcagcagcagcaactccaggagttctacaaaaaacagcaggagcagcttcagctccaactgctacaacaacaacatgcaggcaaacaacccaaggagcagcagcaggtggcaacacagcagttagccttccagcagcagttactgcagatgcaacaattgcaacagcagcacctgctctctcttcagaggcaggggttactcaccatccagcccgggcagccagccctgccattacaacccctcgcacaaggtatgatcccaactgagctgcaacagctgtggaaggaggtgacgtccgcccatacagccgaggaaacaaccgggaataaccacagttctctggacctcactactacatgtgtcagttcctcagcccccagcaaaaccagcctcattatgaatcctcacgcatctacaaatggtcagctgtcggtgcacactccaaagagggaatccttgtcccacgaagaacacccgcattcccacccgttgtatgggcatggcgtctgtaagtggccgggctgcgaagccgtctgtgaagacttccagtcgttcctcaagcatctgaactctgagcacgctctcgatgaccggagcacagcccagtgtcgcgtgcaaatgcaggtggtacagcaactggaactgcagctcgcaaaggacaaggagcggttgcaagccatgatgacacacctgcacgtgaagtctacagagccaaaggctgcacctcaaccactcaatttggtgtctagcgtgacactcagtaagagcgcgtcagaggcctcaccccagtctctgccacacactcctacaacacccacagccccactcaccccagttactcaagggcctagtgtcattactaccacctctatgcatacggtagggcccattcgccgacggtactccgacaaatataacgtcccaatttcctccgcggacattgctcagaaccaggagttttataagaatgcggaggttaggcccccattcacttatgccagccttataagacaggccattttggagagcccagaaaagcagctgacgctgaatgaaatctacaactggttcaccagaatgtttgcctatttcaggagaaatgccgcaacctggaaaaatgcggttagacacaacctcagcctgcataagtgttttgtgagagtggagaacgtcaagggagccgtttggaccgtcgacgaagtggaatttcagaaacgaaggcctcagaagatatccgggaacccaagcttaattaagaacatgcagtcaagccacgcttattgcacgcccttaaatgccgcgctgcaggcaagcatggcagagaattccattccattgtacacaacagccagcatggggaatccaactttaggcaacctcgcgtccgcaattagggaagagttgaatggcgccatggagcacacgaactctaatgaatccgacagttcccctggtcggtccccaatgcaggctgtccaccccgtgcatgtcaaagaggaacctctggatccagaagaggccgaaggaccactctccctggtgactactgccaatcacagccccgactttgaccatgatcgcgattacgaggatgagcccgtcaacgaagatatggaatag

SEQ ID NO: 87471 - DNA, 2034 bp, Artificial Sequence
  derived and/or modified sequence
atgatgcaggagagcggcacagagaccaagagcaatggcagcgccatccagaatggcagcggcggcagcaaccacctgctggagtgtggcggcctgcgggagggccgcagcaatggagagaccccagctgtggacatcggggctgctgacctggcccacgcccagcagcagcagcagcaggccctgcaggtggcccggcagctgctgctgcagcagcagcagcagcagcaggtgtctggcctgaagagccccaagagaaatgacaagcagcctgccctgcaggtgcctgtgtctgtggccatgatgaccccccaggtgatcaccccccagcagatgcagcagatcctgcagcagcaggtgctgagcccccagcagctgcaggtgctgctgcagcagcagcaggccctgatgctgcagcagcagcagctgcaggagttctacaagaagcagcaggagcagctgcagctgcagctgctgcagcagcagcacgccggcaagcagcccaaggagcagcagcaggtggccacccagcagctggccttccagcagcagctgctgcagatgcagcagctgcagcagcagcacctgctgagcctgcagaggcagggcctgctgaccatccagcccggccagcctgccctgcccctgcagcccctggcccagggcatgatccccacagagctgcagcagctgtggaaggaggtgaccagcgcccacacagctgaggagaccactggaaacaaccacagcagcctggacctgaccaccacctgtgtgagcagcagcgcccccagcaagaccagcctcatcatgaacccccacgccagcaccaacggccagctgtctgtgcacacccccaagcgggagagcctgagccatgaggagcacccccacagccaccccctgtatggccatggagtgtgcaagtggccaggctgtgaggccgtgtgtgaggacttccagagcttcctgaagcacctgaacagcgagcacgccctggatgacaggagcacagcccagtgccgggtgcagatgcaggtggtgcagcagctggagctgcagctggccaaggacaaggagcggctgcaggccatgatgacccacctgcacgtgaagagcacagagcccaaggccgccccccagcccctgaacctggtgtcctctgtgaccctgagcaagagcgccagcgaggccagcccccagagcctgccccacacccccaccacccccacagcccccctgacccctgtgacccagggccccagcgtcatcaccaccacctccatgcacacagtgggccccatcagaagacgctacagcgacaagtacaacgtgcccatcagcagcgctgacatcgcccagaaccaggagttctacaagaatgctgaggtgcggccccccttcacctacgccagcctcatccggcaggccatcctggagagccctgagaagcagctgaccctgaatgagatctacaactggttcaccaggatgtttgcctacttcagaagaaatgctgccacctggaagaatgctgtgcgccacaacctgagcctgcacaagtgctttgtgcgggtggagaatgtgaagggagctgtgtggacagtggatgaggtggagttccagaagaggcggccccagaagatcagcggcaaccccagcctcatcaagaacatgcagagcagccacgcctactgcacccccctgaatgctgccctgcaggcctccatggctgaaaattccatccccctgtacaccacagcctccatgggcaaccccaccctgggcaacctggccagcgccatccgggaggagctgaatggagccatggagcacaccaacagcaatgaaagtgacagcagccctggccgcagccccatgcaggccgtgcaccctgtgcacgtgaaggaggagcccctggaccctgaggaggccgagggccccctgagcctggtgaccacagccaaccacagcccagactttgaccatgaccgggactatgaagatgagcctgtgaatgaagacatggagtag

SEQ ID NO: 87472 - DNA, 1509 bp, Artificial Sequence
  derived and/or modified sequence
atgatgcaggagagcggcacagagaccaagagcaatggcagcgccatccagaatggcagcggcggcagcaaccacctgctggagtgtggcggcctgcgggagggccgcagcaatggagagaccccagctgtggacatcggggctgctgacctggcccacgcccagcagcagcagcagcaggccctgcaggtggcccggcagctgctgctgcagcagcagcagcagcagcaggtgtctggcctgaagagccccaagagaaatgacaagcagcctgccctgcaggtgcctgtgtctgtggccatgatgaccccccaggtgatcaccccccagcagatgcagcagatcctgcagcagcaggtgctgagcccccagcagctgcaggtgctgctgcagcagcagcaggccctgatgctgcagcagcagcagctgcaggagttctacaagaagcagcaggagcagctgcagctgcagctgctgcagcagcagcacgccggcaagcagcccaaggagcagcagcaggtggccacccagcagctggccttccagcagcagctgctgcagatgcagcagctgcagcagcagcacctgctgagcctgcagaggcagggcctgctgaccatccagcccggccagcctgccctgcccctgcagcccctggcccagggcatgatccccacagagctgcagcagctgtggaaggaggtgaccagcgcccacacagctgaggagaccactggaaacaaccacagcagcctggacctgaccaccacctgtgtgagcagcagcgcccccagcaagaccagcctcatcatgaacccccacgccagcaccaacggccagctgtctgtgcacacccccaagcgggagagcctgagccatgaggagcacccccacagccaccccctgtatggccatggagtgtgcaagtggccaggctgtgaggccgtgtgtgaggacttccagagcttcctgaagcacctgaacagcgagcacgccctggatgacaggagcacagcccagtgccgggtgcagatgcaggtggtgcagcagctggagctgcagctggccaaggacaaggagcggctgcaggccatgatgacccacctgcacgtgaagagcacagagcccaaggccgccccccagcccctgaacctggtgtcctctgtgaccctgagcaagagcgccagcgaggccagcccccagagcctgccccacacccccaccacccccacagcccccctgacccctgtgacccagggccccagcgtcatcaccaccacctccatgcacacagtgggccccatcagaagacgctacagcgacaagtacaacgtgcccatcagcagcgctgacatcgcccagaaccaggagttctacaagaatgctgaggtgcggccccccttcacctacgccagcctcatccggcaggccatcctggagagccctgagaagaagaagaaggagcggcagaccctgggcaccatgcccatccacagcacccagcagtag

SEQ ID NO: 87473 - DNA, 2034 bp, Artificial Sequence
  derived and/or modified sequence
atgatgcaggagagcggcaccgagaccaagagcaacggcagcgccatacaaaacgggagcgggggctccaaccacctgctcgaatgtggcggtttacgagagggtaggtcgaatggcgagacaccagcggtcgacattggggcagctgaccttgcgcacgcgcagcagcagcagcagcaggccctgcaggtcgctcggcaactgttgctccaacagcagcagcagcagcaagtcagtggactgaaatcgccgaaaaggaatgataagcaacccgcccttcaggtgcctgttagtgtggctatgatgacccctcaagtaatcactccacagcagatgcagcagattcttcagcaacaggtcttgtctccacagcagctgcaagtcctgctccaacaacaacaagccctgatgctccaacagcagcagcttcaggagttttacaagaagcaacaggaacaactacaactccagctgctacagcaacagcacgctggaaaacagccgaaagagcaacagcaggtggctacacagcagctggcatttcagcagcagctgctgcagatgcagcaattgcagcagcagcacctgcttagcttgcagcgacagggtctgctgactattcagcccgggcagccggcattgcccttgcaacccctggctcaagggatgatccccacagaactccaacagctgtggaaggaggtgacgagcgcacacactgcagaggagacgactggaaacaaccatagcagcctggacctaaccaccacttgcgtctccagctctgcccctagtaaaactagcctcatcatgaaccctcacgcctcaactaatggccagctgtcagtacatacaccaaaacgagagagtctttcccatgaggaacacccccatagccacccgctgtatggacacggcgtctgtaaatggccaggatgtgaagctgtctgtgaggactttcaatccttcctaaaacacttaaacagcgagcatgcgctggacgacagatctactgctcaatgccgggtgcagatgcaagtggtacagcagcttgagctgcagctcgccaaagacaaagaacgcctacaggctatgatgacgcaccttcacgttaaaagcacagaaccgaaagctgccccccaacccctgaacctggtcagtagcgtgaccctgtccaagtctgccagcgaggcctctccacaatctctgccacacaccccaaccacccctaccgcacctctaaccccagtgactcagggaccaagtgtgatcacaaccacgtccatgcacactgtggggccaatccggcgtcgttatagcgataaatacaacgtccctatctcttcagccgacatagcccagaaccaggagttttataagaacgcagaggtcaggcccccattcacatatgcatctctgattaggcaggcgattctggagtcaccggagaagcagctgacactgaatgaaatttacaactggtttacaaggatgtttgcttactttcgccgcaacgccgcgacctggaagaacgctgtacggcacaatttgagtctccataaatgttttgtgcgcgtggaaaatgtgaaaggggcagtctggaccgtcgacgaggttgagttccagaaacgcaggccacagaagatttcggggaacccgtctctaatcaaaaatatgcagtcgtctcacgcctattgtacccctctcaacgcagccctgcaggcatctatggccgagaattccatcccgttgtacacaacagcaagcatgggaaatccaacccttgggaatttggctagtgctatcagagaagagctcaacggggccatggagcacacaaattctaacgagagcgattctagccccggacgttcacctatgcaagccgtgcacccagttcacgtgaaagaggagcccctggacccggaagaggccgaagggccccttagtctggtgaccaccgccaatcactccccagattttgaccacgaccgggattacgaagatgaacccgtgaacgaggacatggaatag

SEQ ID NO: 87474 - DNA, 1509 bp, Artificial Sequence
  derived and/or modified sequence
atgatgcaggagagcggcaccgagaccaagagcaacggcagcgccatccaaaacggctcaggcgggtccaatcacttgctagaatgcggcggactgcgggagggcaggtcaaacggggagactcccgccgtggatattggggctgccgacctcgcacacgcacaacaacagcagcagcaagccctgcaggttgcgaggcagcttctgctgcaacaacagcagcaacagcaggtgtccggtctaaagtcccccaagagaaacgacaagcaacctgctctgcaggtacccgtcagtgtagcaatgatgacaccccaggtcatcactccacagcagatgcagcagatcctccagcagcaagttctttcccctcagcagctgcaagttctgctgcagcagcaacaggcccttatgcttcagcagcaacaactccaggagttttacaaaaaacaacaggaacagttgcagttgcagctgctgcagcagcaacacgccggcaagcagccgaaggaacagcagcaggtggccactcagcagttggctttccagcagcagcttctccagatgcagcaactgcagcagcagcacttgctaagtttgcagcgccagggactcctgactatccaaccaggccagccagccctccccttacagcctctggcccagggaatgatccctacggagcttcagcagctgtggaaggaggtcactagtgcccataccgctgaagaaacaacaggaaacaaccactcctctcttgacctgaccacaacttgtgtcagctctagcgcgccttcaaagacaagtctaattatgaatccacacgcttccacaaacgggcaactaagtgtgcatacacctaagagggagagcttgagccacgaagagcacccacactctcatcctctgtatgggcatggtgtgtgtaaatggcctggctgcgaagccgtttgcgaagactttcagagtttcctaaagcacctgaacagcgagcatgccctggatgaccggagcaccgcccaatgcagggtgcagatgcaggtcgtgcagcagctcgagctacagctggcgaaggataaggagcgactgcaggctatgatgactcatttgcacgtgaagtccaccgagccaaaagcagctccacagcccctcaatctggttagtagcgtcaccctttccaaatccgcctccgaggcgagccctcagagcctgcctcatactcctaccactccaacggctcctctcacacccgtcacgcaggggcccagtgtgataaccaccacatccatgcatactgtagggcctattcgcagacgatactcagacaaatataatgtcccaatatccagcgcagatattgcccagaaccaagaattttataagaatgcggaggtgaggccaccctttacttacgccagtctcatcaggcaggccatactggaatcccccgagaagaaaaagaaagagcgccagacactgggaaccatgcccattcactcaacacagcaatag

SEQ ID NO: 87475 - DNA, 2034 bp, Artificial Sequence
  derived and/or modified sequence
atgatgcaggagagcggcaccgagaccaagagcaacggcagcgccattcagaatgggtccggaggcagtaatcacctacttgagtgtggaggcctaagagagggtcggtccaatggagaaacacctgcagttgacatcggagctgccgacctcgcccacgcacagcagcagcagcagcaggcacttcaggtcgcaagacagttacttctgcaacagcagcagcagcaacaagtgtccggcctcaagagtcctaaacggaacgataagcagcccgccctccaggtccctgtgagtgtagcgatgatgacaccacaggttatcactccgcagcagatgcagcagattctgcaacagcaggttctaagcccgcaacagttgcaggtgttgctgcaacagcaacaggcactgatgctgcagcagcagcagttgcaagagttttacaaaaagcaacaggaacagttgcagctccagctgctacagcaacaacacgccggcaagcagcccaaagagcagcagcaggtggctacacaacagttggcatttcaacagcagttactacagatgcagcaattgcagcagcagcaccttctttctctacaacggcaagggctcctaaccatacagcctggacagccagcactacctctgcagcccctggcacaagggatgattcccacagagctgcagcaactgtggaaggaagtgacttctgcccacactgcggaggagacaactggtaacaaccattcctccctggacctcaccacgacctgtgtcagttcctccgctccaagcaagacatccctgatcatgaacccacatgcaagcaccaatggccagctctcggtccacaccccgaagagagagtccttatcccatgaagaacacccacacagccaccccctgtacggccacggcgtttgtaagtggcccgggtgcgaggctgtctgtgaagattttcaatcttttctgaaacatctaaactccgagcatgctctggatgacagaagcaccgctcagtgcagggtccagatgcaagttgtacagcagctggagctgcagctcgccaaagataaggagagactccaagctatgatgacccacctacacgttaagagcactgagcccaaggctgcccctcagccactaaatctggtgtcatccgtaacgttgtctaagtcagctagtgaggcatccccccagagcttaccccatactcctaccacccctaccgcccccttaacaccagtgacccagggcccaagcgtgatcaccaccacctcaatgcacacagttggccctatccggcggcggtacagcgataaatataacgtaccaattagctcagccgatattgcccaaaatcaggagttctacaagaacgccgaggttcggcctcctttcacttatgccagtctaattcgccaagcaatcttagagtccccagaaaaacaactcacgctgaatgagatttacaactggttcaccagaatgttcgcttacttccggaggaacgccgctacctggaagaacgcggtgcggcacaatctgtccctccacaaatgttttgtgagagtggagaacgttaagggggccgtgtggacagtcgacgaagtcgaattccaaaagagaaggcctcagaaaataagtggaaacccaagcctgatcaaaaacatgcagtctagtcacgcttactgcacacctctgaacgcagcactccaggcatccatggctgagaatagcatcccactctacacaaccgcttccatgggaaatcccacgctgggcaatttggccagcgccattcgggaggagcttaatggtgccatggagcacaccaatagcaatgaatctgactcatccccaggtcgaagcccgatgcaggcggtgcaccccgttcacgttaaagaggagccgctcgacccggaagaggcggaagggccattatctcttgttactaccgctaatcactcacccgattttgaccacgacagggattatgaggacgagcctgtgaatgaggacatggaatag

SEQ ID NO: 87476 - DNA, 2034 bp, Artificial Sequence
  derived and/or modified sequence
atgatgcaggagagcggcaccgagaccaagagcaacggcagcgccatccagaatgggtctggcggtagcaatcacctcctggaatgtggaggattgcgagaaggtcgcagcaacggggagacaccagccgtggacattggggccgcagacctggctcatgctcagcagcagcaacagcaggcccttcaagttgccaggcaactcctgctgcaacagcagcaacagcagcaggtgtcagggttaaagtcccctaagaggaatgataagcagcccgctctgcaggtgccagtctctgtcgcaatgatgaccccacaggtgatcacgcctcagcagatgcagcagatccttcaacagcaagtcctgtcgcctcaacagctccaggtcctgctgcagcagcaacaggctttgatgctgcagcagcaacagctacaggagttttataaaaagcagcaggaacaacttcagttgcagctgctccaacagcagcatgcaggaaaacagcctaaggaacagcaacaagtggcaactcagcaactggcgttccagcagcagcttctacagatgcagcaattgcagcagcagcatctgcttagtctgcagaggcaagggctgttgaccattcagcctggccagcccgctctgcccctgcagcctctcgcgcagggaatgatacccacggagctgcagcagctgtggaaggaagtcacatctgctcacaccgctgaggaaactactgggaataatcactcttctctcgatttgaccaccacttgtgtgtcttctagcgccccctccaaaaccagcctgatcatgaacccgcatgcgtcaacaaacgggcaacttagtgttcatacgccaaagcgggaaagcttgtcacatgaggagcatccgcacagccatccgctgtacggacatggagtgtgcaagtggccaggttgtgaggccgtgtgcgaggatttccagtctttcctgaaacatctaaactcagagcacgcccttgacgaccgctccactgcccagtgcagagttcagatgcaggttgttcagcagctcgagcttcagctggccaaggataaagaacgtctacaggcaatgatgacccatctacatgttaaatccaccgagcctaaggctgcacctcagccactgaatctcgtttcttctgtgaccctctcaaaatcagcatccgaggcctctccccagagtctaccccacacgccaactactccaaccgcacccctgacacccgtgactcaggggcctagcgtgattaccaccacttccatgcataccgtgggccctatccggaggcgctactccgataagtataatgtgcccatcagcagtgccgatatcgctcagaatcaagagttttacaagaacgctgaggtgcgacctccattcacctacgcctctctgatacggcaggcgattttagagagccctgaaaaacagctgacgctgaacgagatttataattggtttaccaggatgtttgcatattttcgacgtaatgctgccacttggaaaaacgccgttcgccacaatctatccctgcacaagtgtttcgtgcgggtggaaaacgtcaaaggcgcggtgtggaccgtagacgaggtcgaattccagaaaagacgtccgcagaaaatatccgggaacccttccctgatcaagaacatgcaatcttcccacgcatactgtactcctctcaatgccgccctgcaagcatcgatggctgagaacagcatccctctgtatacaactgcctctatgggtaaccctaccctgggaaatctcgcaagcgccattcgggaagaactgaacggagccatggagcacaccaacagcaacgaaagcgatagtagccctggccgctcacccatgcaagcggttcatcctgtgcatgtgaaggaagagcccttagatcccgaggaagcggaaggtccccttagcttagtcaccacagcaaaccactccccagacttcgatcatgacagagattatgaagacgagcccgttaatgaggacatggagtag

SEQ ID NO: 87477 - DNA, 2034 bp, Artificial Sequence
  derived and/or modified sequence
atgatgcaagaatccggcacagaaaccaaatccaatggttccgccatccaaaatggctccgggggatctaatcatcttctggagtgcggcggattgcgcgagggcagaagcaatggagagacacccgctgtggacatcggtgccgcagatctcgcacacgcccaacagcagcaacagcaggcgttacaggtggctcgccagctgctcctgcagcagcaacagcagcagcaagtgtcgggtctcaaaagtcccaagaggaatgataaacaacctgccctacaagtgcccgtctccgtggctatgatgaccccgcaggtcattactccccaacagatgcagcaaatactgcaacaacaggtactgtctccgcagcaactgcaagttctgcttcagcagcagcaggccctgatgctccagcagcagcaactccaagagttttacaagaaacaacaagagcaactccagcttcagctcttgcagcagcagcatgcaggcaagcagcctaaagagcagcagcaggtcgcaacccagcagctggcttttcagcagcagttgctccagatgcaacagcttcaacagcagcacctgcttagtctgcagcgtcagggactgctgacgatccagccaggtcagcctgctcttcccctgcagcccctcgctcaaggcatgatcccaaccgagctgcagcagctttggaaggaagtgacctcagctcatactgctgaggaaacaacagggaataaccactcctctctggatctgacaaccacctgcgtgagtagttcagcgccatctaaaacctcccttatcatgaacccccatgccagcacaaatgggcagctgagtgtacacacccctaaacgggaaagtctgtcccatgaagaacatcctcattctcaccccttgtatgggcacggggtgtgcaagtggcctgggtgtgaagccgtctgtgaagacttccagagttttctgaaacacctgaattcggagcatgctttggatgatcgctcgacagcccagtgcagagtgcaaatgcaagttgtgcagcagctcgagttgcagctcgccaaggataaagagcgccttcaagcaatgatgacacacctgcatgtcaagtcaactgaaccaaaagcagctccgcagcccctgaatttggtgtcatccgtcacactgtccaaatccgcaagtgaggcatctccccaatcgctgccccatactcccaccacccctacagccccactgacgcccgtcacccaaggcccttccgtcatcaccaccacctctatgcacactgttgggccaatcagaaggcgctactctgacaaatacaatgtccctatttcttcggccgacatcgcacaaaatcaggagttttataagaacgcggaagtccgtccaccatttacctacgcttcactgatccgtcaggcaatcctggagagccccgagaaacaactgactttgaacgaaatctacaattggttcaccagaatgttcgcctactttaggagaaatgccgctacctggaaaaacgcagtccgtcataatctgagcctgcataaatgttttgtaagggtggaaaatgtcaaaggggctgtctggacagttgatgaggtcgagtttcagaagagaaggccccagaaaattagcggcaaccctagtctgatcaagaacatgcagagctcacacgcttactgcactcctcttaacgccgctctgcaggcctctatggctgaaaacagtatacccttgtacactaccgccagcatgggaaacccaactttgggaaatctagcttcggccatccgggaggagttgaacggcgctatggagcatactaacagcaatgaaagtgatagctcacctgggaggtctcctatgcaggccgtacatccagtccacgtgaaagaggagccgctggatcctgaagaggctgagggacctctatcactggtgaccactgctaatcacagtccagattttgatcacgaccgggactacgaagacgaaccagtcaacgaggacatggagtag

SEQ ID NO: 87478 - DNA, 1509 bp, Artificial Sequence
  derived and/or modified sequence
atgatgcaggagtcggggactgaaacgaagtcgaatggatctgcaattcagaatggttctggcggaagcaatcatctgctggagtgtggaggattacgcgaagggaggtccaatggggaaacacccgctgtggacatcggcgcagcagatctggcacacgcacagcaacagcagcagcaagcactgcaagtagccaggcagcttttattacagcagcagcagcagcagcaggtctcgggcttgaaatcaccaaagagaaacgataagcagccagccctgcaggttcctgtctccgtcgctatgatgacaccgcaggtgatcacaccccaacagatgcagcagatcttacaacagcaagtcctgtctcctcagcagctgcaggtactcctgcagcagcagcaggcgctaatgctgcagcaacagcaattacaggagttttacaaaaaacagcaagagcagctgcagctccagcttctgcagcaacagcacgccggaaagcagcccaaagaacaacagcaggttgcaactcagcagcttgcctttcagcaacaactgcttcagatgcagcaactgcagcagcagcatctgttgagtctgcagcgccagggcctgctcactatccagcctggacaaccagccttgccattgcagcccctggcccagggcatgatccccacggagctgcagcagttgtggaaggaggtcacatctgcccacacagctgaagagaccactggaaacaaccattcctcacttgatctcacaactacatgcgtaagttcttccgctccgtcaaaaaccagcctgattatgaaccctcacgcttcaactaatggccagttgtccgtccacacccccaagcgcgagtctctgtcccacgaagagcatccgcattcgcaccccctctacggacacggagtctgtaaatggcctgggtgcgaagcagtatgcgaagacttccagtctttcctgaaacacttgaattccgagcacgcacttgacgaccgatcaactgcacagtgcagggttcagatgcaagtggttcagcagttggaactacaattagcgaaggataaggaacggttacaggccatgatgactcacctgcacgtgaagtctaccgaacccaaagctgcaccccaaccgttaaacttagttagctctgtcacactgtcaaagagcgcgtcggaagcatccccccaatccctacctcacacccctacaacaccaacggcaccccttacacctgtaacccagggcccatctgtgatcactacaacgtccatgcacaccgttggacctattcggcgtaggtactccgataagtacaacgtgccaatttcaagcgccgacattgcccagaaccaggagttttataagaacgctgaagtgcggccaccttttacctacgcatctttgatccgtcaggcgattctcgagtcgcccgagaaaaaaaagaaagaacgccagaccttaggcacgatgccaatccactcaacgcagcaatag

SEQ ID NO: 87479 - DNA, 2034 bp, Artificial Sequence
  derived and/or modified sequence
atgatgcaggaatccggaaccgaaacgaagtctaatggctcagccatacagaatggctccggaggcagtaatcatctgttggagtgcggtggccttcgagagggtcgctccaacggagagacacccgcagttgacattggggctgctgacctggctcacgcccagcagcagcagcaacaggctttgcaggtggccagacagctgctgctccagcagcagcaacagcagcaggtttcaggcctgaagtctcctaaacgtaacgacaaacagccagccctccaggtgcccgtgagcgttgccatgatgacacctcaagtgattactccacagcagatgcaacagattcttcagcagcaggtgctctcaccacaacagctgcaagtccttctccagcaacagcaggcgttgatgctacagcagcagcagctccaggaattttataagaagcaacaggagcagttgcaactgcagctgttacagcagcagcatgcaggcaagcagccaaaagagcagcagcaagttgccacacagcagttggcctttcagcaacagctgctccagatgcagcagcttcagcagcagcatctgttgtctctccagcgtcaaggcttgcttaccatccagcccggtcagccggcactgcccctccaacccttagcccaggggatgataccaacggagctgcagcagctgtggaaggaggtgacaagcgcacacacggccgaagagactacagggaataaccattccagcctggatctaacaacgacctgcgtcagctcctcagcacccagcaagactagcctgatcatgaacccccatgcgtcgacaaatgggcagctctccgtccacactccaaagagggaatcactgtcccacgaagagcaccctcatagtcaccctctctatggacacggagtttgcaaatggccgggttgcgaggccgtatgcgaggactttcagtctttcttgaagcacttaaacagcgagcatgcactggatgaccgttccactgcccagtgccgggtccaaatgcaggtcgttcagcagctggagttgcaactggcgaaagacaaggagagactgcaggccatgatgacgcacttgcacgtcaagtccaccgaacccaaagctgccccacagccactgaacttggtttctagcgtcaccctttcgaaatctgccagtgaggcatcaccacagtccctcccacacacccctactacgcctacagcccctctgacacctgtcacgcagggcccttccgtcataaccactaccagcatgcatacagtgggaccgattcggagaaggtactcagacaagtataacgtgccgatttcctctgctgacatagcccagaaccaagaattctacaagaatgcagaggtacgcccaccatttacgtacgcctccctcattcgtcaggctatactcgagtcccctgagaaacaattaacactgaacgaaatctataattggtttacgcggatgttcgcatatttccgcagaaatgcagccacatggaaaaatgccgttcggcacaatttaagtttacacaaatgttttgtgagggtggagaacgtgaaaggtgccgtgtggacggtagatgaggtggagtttcagaagcgaagacctcagaaaatcagcgggaatccctctctgatcaagaatatgcagtcatctcacgcgtactgtacacctctcaacgccgctctgcaagccagcatggccgaaaactcaattccattatacaccaccgcctctatgggaaatcccactctaggcaacctggcctctgccattcgggaggagctgaacggggcaatggagcacactaatagcaacgaaagtgatagctctcctggaagaagcccaatgcaggctgtccatccagtacacgtcaaggaggaacccctggatcccgaggaggccgaagggcctttaagtctcgtaaccaccgcgaatcatagtccagattttgaccatgacagggattatgaagatgagccggtaaacgaagatatggagtag

SEQ ID NO: 87480 - DNA, 2034 bp, Artificial Sequence
  derived and/or modified sequence
atgatgcaggagtcagggaccgaaaccaaaagcaatggaagtgcgatacagaatgggtcaggtgggtcaaatcaccttctcgaatgtggcggactgagggagggaaggagcaatggggaaacacccgctgtggatataggcgctgctgacctagctcatgcgcaacaacaacaacagcaagcattacaagtggcacggcagcttctcctgcagcaacagcagcagcagcaggtgtcaggactaaaatcccccaagcgcaatgacaaacagcctgcactgcaggtccctgtgagcgtagcgatgatgacgcctcaggtgattaccccacagcagatgcagcagatcctgcaacagcaggtccttagcccccagcaactgcaggtcttgttacagcagcagcaggctttaatgctgcagcaacaacaactgcaggagttttacaagaagcagcaggaacagctgcagctacaactcctccagcaacaacatgctgggaaacagcctaaagaacagcagcaggtggccacccagcagctggcctttcaacagcagttacttcagatgcagcagcttcagcagcagcatctgctgtctttgcagcgccaaggacttctcacaattcagccgggacaacccgctctacctcttcagccgttggcacaggggatgatcccaactgaactccagcagctctggaaggaagtaacaagcgcccatacagccgaggagacaacagggaacaaccactctagcctcgatctgaccacgacctgcgtctccagtagcgctccctcaaagacgtcactgatcatgaatccccacgcctccaccaatggccaattatccgtgcacactccgaagcgagagagcttgtcgcatgaagagcatccgcacagccatcccctgtacggccacggcgtctgcaagtggcccggatgcgaagccgtctgcgaggacttccaaagcttcctaaagcatctaaattccgagcacgcgctggacgaccggtcaaccgcccaatgccgtgtgcagatgcaagtggtgcagcaattagagctgcagctcgctaaggacaaagagaggctgcaggctatgatgacacacttacatgttaagagtaccgaacccaaggcggctccacaacctctcaacctggtgagctccgtgactctgagtaaatccgcatctgaggcctcaccccagtcccttcctcacacgccaactacaccgaccgcccctcttacgcctgtgacccagggcccaagcgtcatcactacaacgtccatgcacaccgtggggcctattcggcgacggtatagcgacaaatacaacgtgcccatcagctcagcggacattgcccagaatcaagagttttataagaatgcagaagtcaggcccccttttacctatgcctcgcttataaggcaggctatcctggagtcccccgaaaagcaactgacacttaacgagatctacaattggttcactcgaatgtttgcttactttaggcggaacgccgcaacctggaagaacgctgttcgccataatctgtctctgcacaaatgttttgtgcgtgtcgagaacgttaagggggctgtttggaccgtcgatgaggtggagttccagaaacggcgtccacagaagatctccggaaatccatccttgatcaaaaacatgcagtcctcgcacgcctactgtacaccacttaacgccgctcttcaggcttcgatggcagagaattcaattcctctttacaccaccgcatctatgggcaatccgacactcgggaaccttgcctctgccatacgagaagagctgaacggcgctatggaacacaccaattctaatgagagcgattcatctccaggccgttcccctatgcaggccgtacaccctgttcacgtgaaggaggagcctctcgacccagaggaagcagagggccctctgtccttggttactactgcaaaccactcaccagacttcgatcacgaccgcgactatgaagacgaaccagtgaacgaggacatggagtag

SEQ ID NO: 87481 - DNA, 2034 bp, Artificial Sequence
  derived and/or modified sequence
atgatgcaggagagcggcaccgagaccaagagcaacggcagcgccatccagaacggcagcggcggcagcaaccacctgctggagtgcggcggcctgagagagggcagaagcaacggcgagacccccgccgtggacatcggcgccgccgacctggcccacgcccagcagcagcagcagcaggccctgcaggtggccagacagctgctgctgcagcagcagcagcagcagcaggtgagcggcctgaagagccccaagagaaacgacaagcagcccgccctgcaggtgcccgtgagcgtggccatgatgaccccccaggtgatcaccccccagcagatgcagcagatcctgcagcagcaggtgctgagcccccagcagctgcaggtgctgctgcagcagcagcaggccctgatgctgcagcagcagcagctgcaggagttctacaagaagcagcaggagcagctgcagctgcagctgctgcagcagcagcacgccggcaagcagcccaaggagcagcagcaggtggccacccagcagctggccttccagcagcagctgctgcagatgcagcagctgcagcagcagcacctgctgagcctgcagagacagggcctgctgaccatccagcccggccagcccgccctgcccctgcagcccctggcccagggcatgatccccaccgagctgcagcagctgtggaaggaggtgaccagcgcccacaccgccgaggagaccaccggcaacaaccacagcagcctggacctgaccaccacctgcgtgagcagcagcgcccccagcaagaccagcctgatcatgaacccccacgccagcaccaacggccagctgagcgtgcacacccccaagagagagagcctgagccacgaggagcacccccacagccaccccctgtacggccacggcgtgtgcaagtggcccggctgcgaggccgtgtgcgaggacttccagagcttcctgaagcacctgaacagcgagcacgccctggacgacagaagcaccgcccagtgcagagtgcagatgcaggtggtgcagcagctggagctgcagctggccaaggacaaggagagactgcaggccatgatgacccacctgcacgtgaagagcaccgagcccaaggccgccccccagcccctgaacctggtgagcagcgtgaccctgagcaagagcgccagcgaggccagcccccagagcctgccccacacccccaccacccccaccgcccccctgacccccgtgacccagggccccagcgtgatcaccaccaccagcatgcacaccgtgggccccatcagaagaagatacagcgacaagtacaacgtgcccatcagcagcgccgacatcgcccagaaccaggagttctacaagaacgccgaggtgagaccccccttcacctacgccagcctgatcagacaggccatcctggagagccccgagaagcagctgaccctgaacgagatctacaactggttcaccagaatgttcgcctacttcagaagaaacgccgccacctggaagaacgccgtgagacacaacctgagcctgcacaagtgcttcgtgagagtggagaacgtgaagggcgccgtgtggaccgtggacgaggtggagttccagaagagaagaccccagaagatcagcggcaaccccagcctgatcaagaacatgcagagcagccacgcctactgcacccccctgaacgccgccctgcaggccagcatggccgagaacagcatccccctgtacaccaccgccagcatgggcaaccccaccctgggcaacctggccagcgccatcagagaggagctgaacggcgccatggagcacaccaacagcaacgagagcgacagcagccccggcagaagccccatgcaggccgtgcaccccgtgcacgtgaaggaggagcccctggaccccgaggaggccgagggccccctgagcctggtgaccaccgccaaccacagccccgacttcgaccacgacagagactacgaggacgagcccgtgaacgaggacatggagtag

SEQ ID NO: 87482 - DNA, 1509 bp, Artificial Sequence
  derived and/or modified sequence
atgatgcaggagagcggcaccgagaccaagagcaacggcagcgccatccagaacggcagcggcggcagcaaccacctgctggagtgcggcggcctgagagagggcagaagcaacggcgagacccccgccgtggacatcggcgccgccgacctggcccacgcccagcagcagcagcagcaggccctgcaggtggccagacagctgctgctgcagcagcagcagcagcagcaggtgagcggcctgaagagccccaagagaaacgacaagcagcccgccctgcaggtgcccgtgagcgtggccatgatgaccccccaggtgatcaccccccagcagatgcagcagatcctgcagcagcaggtgctgagcccccagcagctgcaggtgctgctgcagcagcagcaggccctgatgctgcagcagcagcagctgcaggagttctacaagaagcagcaggagcagctgcagctgcagctgctgcagcagcagcacgccggcaagcagcccaaggagcagcagcaggtggccacccagcagctggccttccagcagcagctgctgcagatgcagcagctgcagcagcagcacctgctgagcctgcagagacagggcctgctgaccatccagcccggccagcccgccctgcccctgcagcccctggcccagggcatgatccccaccgagctgcagcagctgtggaaggaggtgaccagcgcccacaccgccgaggagaccaccggcaacaaccacagcagcctggacctgaccaccacctgcgtgagcagcagcgcccccagcaagaccagcctgatcatgaacccccacgccagcaccaacggccagctgagcgtgcacacccccaagagagagagcctgagccacgaggagcacccccacagccaccccctgtacggccacggcgtgtgcaagtggcccggctgcgaggccgtgtgcgaggacttccagagcttcctgaagcacctgaacagcgagcacgccctggacgacagaagcaccgcccagtgcagagtgcagatgcaggtggtgcagcagctggagctgcagctggccaaggacaaggagagactgcaggccatgatgacccacctgcacgtgaagagcaccgagcccaaggccgccccccagcccctgaacctggtgagcagcgtgaccctgagcaagagcgccagcgaggccagcccccagagcctgccccacacccccaccacccccaccgcccccctgacccccgtgacccagggccccagcgtgatcaccaccaccagcatgcacaccgtgggccccatcagaagaagatacagcgacaagtacaacgtgcccatcagcagcgccgacatcgcccagaaccaggagttctacaagaacgccgaggtgagaccccccttcacctacgccagcctgatcagacaggccatcctggagagccccgagaagaagaagaaggagagacagaccctgggcaccatgcccatccacagcacccagcagtag

SEQ ID NO: 87483 - protein, 42 aa, Artificial Sequence
  derived and/or modified sequence
MAVPFVEDWDLVQTLGEGAYGEVQLAVNRVTEEAVAVKIVDM

SEQ ID NO: 87484 - protein, 127 aa, Artificial Sequence
  derived and/or modified sequence
MAVPFVEDWDLVQTLGEGAYGEVQLAVNRVTEEAVAVKIVDMKRAVDCPENIKKEICINKMLNHENVVKFYGHRREGNIQYLFLEYCSGGELFDRIEPDIGMPEPDAQRFFHQLMAGVVYLHGIGIT

SEQ ID NO: 87485 - protein, 442 aa, Artificial Sequence
  derived and/or modified sequence
MAVPFVEDWDLVQTLGEGAYGEVQLAVNRVTEEAVAVKIVDMKRAVDCPENIKKEICINKMLNHENVVKFYGHRREGNIQYLFLEYCSGGELFDRIEPDIGMPEPDAQRFFHQLMAGVVYLHGIGITHRDIKPENLLLDERDNLKISDFGLATVFRYNNRERLLNKMCGTLPYVAPELLKRREFHAEPVDVWSCGIVLTAMLAGELPWDQPSDSCQEYSDWKEKKTYLNPWKKIDSAPLALLHKILVENPSARITIPDIKKDRWYNKPLKKGAKRPRVTSGGVSESPSGFSKHIQSNLDFSPVNSASSEENVKYSSSQPEPRTGLSLWDTSPSYIDKLVQGISFSQPTCPDHMLLNSQLLGTPGSSQNPWQRLVKRMTRFFTKLDADKSYQCLKETCEKLGYQWKKSCMNQGDGLEFKRHFLKIKGKLIDIVSSQKIWLPAT

SEQ ID NO: 87486 - DNA, 402 bp, Artificial Sequence
  derived and/or modified sequence
atggccgtgcccttcgtggaggactgggacctggtgcagaccctgggcgagggcgcctacggcgaggtgcagctggccgtgaacagagtgaccgaggaggccgtggccgtgaagatcgtggacatgaagagagccgtggactgccccgagaacatcaagaaggagatctgcatcaacaagatgctgaaccacgagaacgtggtgaagttctacggccacagaagagagggcaacatccagtacctgttcctggagtactgcagcggcggcgagctgttcgacagaatcgagcccgacatcggcatgcccgagcccgacgcccagagattcttccaccagctgatggccggcgtggtgtacctgcacggcatcggcatcacccacagagacatcaagccctag

SEQ ID NO: 87487 - DNA, 769 bp, Artificial Sequence
  derived and/or modified sequence
aggcctgggcttcccccagcagcgctcgagcaccgcccagtcgagcctcacaccggatgccacttcatatttgggcccagagctcaattcgcgccgatgcggtccgccgtccttaaatctcttcagccaggatctctccccgactgcaaagcagccctgggcgggagcggcaacatctccacgtcacccttttggagccgccgacattcagaggggcaggacacgggaacgcgcgctgtcttgctttacggcgcgggtgcgcgagtttgcggcagcgtgacgccctcaagttttggcgggaaaagcgctgcatttggattcctgcagtggtgggcaaaggacagtccgccgaggtgctcggtggagtcatggcagtgccctttgtggaagactgggacttggtgcaaaccctgggagaaggtgcctatggagaagttcaacttgctgtgaatagagtaactgaagaagcagtcgcagtgaagattgtagatatgaagcgtgccgtagactgtccagaaaatattaagaaagagatctgtatcaataaaatgctaaatcatgaaaatgtagtaaaattctatggtcacaggagagaaggcaatatccaatatttatttctggagtactgtagtggaggagagctttttgacagaatagagccagacataggcatgcctgaaccagatgctcagagattcttccatcaactcatggcaggggtggtttatctgcatggtattggaataactcacagggatattaaaccaga

SEQ ID NO: 87488 - DNA, 513 bp, Artificial Sequence
  derived and/or modified sequence
atggccgtgcccttcgtggaggactgggacctggtgcagaccctgggcgagggcgcctacggcgaggtgcagctggccgtgaacagagtgaccgaggaggccgtggccgtgaagatcgtggacatgaagagagccgtggactgccccgagaacatcaagaaggagatctgcatcaacaagatgctgaaccacgagaacgtggtgaagttctacggccacagaagagagggcaacatccagtacctgttcctggagtactgcagcggcggcgagctgttcgacagaatcgagcccgacatcggcatgcccgagcccgacgcccagagattcttccaccagctgatggccggcgtggtgtacctgcacggcatcggcatcacccacagagacatcaagcccgagaacctgctgctggacgagagagacaacctgaagatcagcgacttcggcctggccaccgtgttcagatacaacaacagagagagactgctgaacaagatgtgcggcacctag

SEQ ID NO: 87489 - DNA, 615 bp, Artificial Sequence
  derived and/or modified sequence
atggccgtgcccttcgtggaggactgggacctggtgcagaccctgggcgagggcgcctacggcgaggtgcagctggccgtgaacagagtgaccgaggaggccgtggccgtgaagatcgtggacatgaagagagccgtggactgccccgagaacatcaagaaggagatctgcatcaacaagatgctgaaccacgagaacgtggtgaagttctacggccacagaagagagggcaacatccagtacctgttcctggagtactgcagcggcggcgagctgttcgacagaatcgagcccgacatcggcatgcccgagcccgacgcccagagattcttccaccagctgatggccggcgtggtgtacctgcacggcatcggcatcacccacagagacatcaagcccgagaacctgctgctggacgagagagacaacctgaagatcagcgacttcggcctggccaccgtgttcagatacaacaacagagagagactgctgaacaagatgtgcggcaccctgccctacgtggcccccgagctgctgaagagaagagagttccacgccgagcccgtggacgtgtggagctgcggcatcgtgctgaccgccatgctggccggctag

SEQ ID NO: 87490 - DNA, 129 bp, Artificial Sequence
  derived and/or modified sequence
atggccgtgcccttcgtggaggactgggacctggtgcagaccctgggcgagggcgcctacggcgaggtgcagctggccgtgaacagagtgaccgaggaggccgtggccgtgaagatcgtggacatgtag

SEQ ID NO: 87491 - DNA, 384 bp, Artificial Sequence
  derived and/or modified sequence
atggccgtgcccttcgtggaggactgggacctggtgcagaccctgggcgagggcgcctacggcgaggtgcagctggccgtgaacagagtgaccgaggaggccgtggccgtgaagatcgtggacatgaagagagccgtggactgccccgagaacatcaagaaggagatctgcatcaacaagatgctgaaccacgagaacgtggtgaagttctacggccacagaagagagggcaacatccagtacctgttcctggagtactgcagcggcggcgagctgttcgacagaatcgagcccgacatcggcatgcccgagcccgacgcccagagattcttccaccagctgatggccggcgtggtgtacctgcacggcatcggcatcacctag

SEQ ID NO: 87492 - DNA, 1329 bp, Artificial Sequence
  derived and/or modified sequence
atggccgtgcccttcgtggaggactgggacctggtgcagaccctgggcgagggcgcctacggcgaggtgcagctggccgtgaacagagtgaccgaggaggccgtggccgtgaagatcgtggacatgaagagagccgtggactgccccgagaacatcaagaaggagatctgcatcaacaagatgctgaaccacgagaacgtggtgaagttctacggccacagaagagagggcaacatccagtacctgttcctggagtactgcagcggcggcgagctgttcgacagaatcgagcccgacatcggcatgcccgagcccgacgcccagagattcttccaccagctgatggccggcgtggtgtacctgcacggcatcggcatcacccacagagacatcaagcccgagaacctgctgctggacgagagagacaacctgaagatcagcgacttcggcctggccaccgtgttcagatacaacaacagagagagactgctgaacaagatgtgcggcaccctgccctacgtggcccccgagctgctgaagagaagagagttccacgccgagcccgtggacgtgtggagctgcggcatcgtgctgaccgccatgctggccggcgagctgccctgggaccagcccagcgacagctgccaggagtacagcgactggaaggagaagaagacctacctgaacccctggaagaagatcgacagcgcccccctggccctgctgcacaagatcctggtggagaaccccagcgccagaatcaccatccccgacatcaagaaggacagatggtacaacaagcccctgaagaagggcgccaagagacccagagtgaccagcggcggcgtgagcgagagccccagcggcttcagcaagcacatccagagcaacctggacttcagccccgtgaacagcgccagcagcgaggagaacgtgaagtacagcagcagccagcccgagcccagaaccggcctgagcctgtgggacaccagccccagctacatcgacaagctggtgcagggcatcagcttcagccagcccacctgccccgaccacatgctgctgaacagccagctgctgggcacccccggcagcagccagaacccctggcagagactggtgaagagaatgaccagattcttcaccaagctggacgccgacaagagctaccagtgcctgaaggagacctgcgagaagctgggctaccagtggaagaagagctgcatgaaccagggcgacggcctggagttcaagagacacttcctgaagatcaagggcaagctgatcgacatcgtgagcagccagaagatctggctgcccgccacctag

SEQ ID NO: 87493 - DNA, 562 bp, Artificial Sequence
  derived and/or modified sequence
acagtccggtgaggaagggcggccggtagaccgaggtgctcggtggagtcatggcagtgccctttgtggaagactgggacttggtgcaaaccctgggagaaggtgcctatggagaagttcaacttgctgtgaatagagtaactgaagaagcagtcgcagtgaagattgtagatatgaagcgtgccgtagactgtccagaaaatattaagaaagagatctgtatcaataaaatgctaaatcatgaaaatgtagtaaaattctatggtcacaggagagaaggcaatatccaatatttatttctggagtactgtagtggaggagagctttttgacagaatagagccagacataggcatgcctgaaccagatgctcagagattcttccatcaactcatggcaggggtggtttatctgcatggtattggaataactcacagggatattaaaccagaaaatcttctgttggatgaaagggataacctcaaaatctcagactttggcttggcaacagtatttcggtataataatcgtgagcgtttgttgaacaagatgtgtggtacttt

SEQ ID NO: 87494 - DNA, 661 bp, Artificial Sequence
  derived and/or modified sequence
aggacagtccggtgaggaagggcggccgccgaggtgctcggtggagtcatggcagtgccctttgtggaagactgggacttggtgcaaaccctgggagaaggtgcctatggagaagttcaacttgctgtgaatagagtaactgaagaagcagtcgcagtgaagattgtagatatgaagcgtgccgtagactgtccagaaaatattaagaaagagatctgtatcaataaaatgctaaatcatgaaaatgtagtaaaattctatggtcacaggagagaaggcaatatccaatatttatttctggagtactgtagtggaggagagctttttgacagaatagagccagacataggcatgcctgaaccagatgctcagagattcttccatcaactcatggcaggggtggtttatctgcatggtattggaataactcacagggatattaaaccagaaaatcttctgttggatgaaagggataacctcaaaatctcagactttggcttggcaacagtatttcggtataataatcgtgagcgtttgttgaacaagatgtgtggtactttaccatatgttgctccagaacttctgaagagaagagaatttcatgcagaaccagttgatgtttggtcctgtggaatagtacttactgcaatgctcgctggag

SEQ ID NO: 87495 - DNA, 570 bp, Artificial Sequence
  derived and/or modified sequence
aagaaccccaaggaagagtcccagcccttcctttcgcctctgggggcagtttggccccgccccggcctttgggacgggtggggctgtggatggggatgggaattggaattgagcaattgggaggaggcgctgccgcaggcgttttctgccccataccgctccctatatcctcttcctctcttccccagacccccacctctccctcctccttccccagtcgttcgccggaaagcatttgtctcccacctcttcataacaacaattaatttcctctggggcctgaggagggcagaatttcaaccttcggtgtgcttgggagtggcgattgtgatttacacgacaaaatggtcaggtttagaatagttgttcgtggttgaaagacttggataaatgtggatgagatagaaggggaaggcaagagctccgaggtgctcggtggagtcatggcagtgccctttgtggaagactgggacttggtgcaaaccctgggagaaggtgcctatggagaagttcaacttgctgtgaatagagtaactgaagaagcagtcgcagtgaagattgtagatatga

SEQ ID NO: 87496 - DNA, 583 bp, Artificial Sequence
  derived and/or modified sequence
agtccggtgaggaagggcggccgacccccacctctccctcctccttccccagtcgttcgccggaaagcatttgtctcccacctcttcataacaacaattaatttcctctggggcctgaggagggcagaatttcaaccttcggtgtgcttgggagtggcgattgtgatttacacgacaaaatgccgaggtgctcggtggagtcatggcagtgccctttgtggaagactgggacttggtgcaaaccctgggagaaggtgcctatggagaagttcaacttgctgtgaatagagtaactgaagaagcagtcgcagtgaagattgtagatatgaagcgtgccgtagactgtccagaaaatattaagaaagagatctgtatcaataaaatgctaaatcatgaaaatgtagtaaaattctatggtcacaggagagaaggcaatatccaatatttatttctggagtactgtagtggaggagagctttttgacagaatagagccagacataggcatgcctgaaccagatgctcagagattcttccatcaactcatggcaggggtggtttatctgcatggtattggaataact

SEQ ID NO: 87497 - DNA, 1568 bp, Artificial Sequence
  derived and/or modified sequence
ggattcctgcagtggtgggcaaaggacagtccgccgaggtgctcggtggagtcatggcagtgccctttgtggaagactgggacttggtgcaaaccctgggagaaggtgcctatggagaagttcaacttgctgtgaatagagtaactgaagaagcagtcgcagtgaagattgtagatatgaagcgtgccgtagactgtccagaaaatattaagaaagagatctgtatcaataaaatgctaaatcatgaaaatgtagtaaaattctatggtcacaggagagaaggcaatatccaatatttatttctggagtactgtagtggaggagagctttttgacagaatagagccagacataggcatgcctgaaccagatgctcagagattcttccatcaactcatggcaggggtggtttatctgcatggtattggaataactcacagggatattaaaccagaaaatcttctgttggatgaaagggataacctcaaaatctcagactttggcttggcaacagtatttcggtataataatcgtgagcgtttgttgaacaagatgtgtggtactttaccatatgttgctccagaacttctgaagagaagagaatttcatgcagaaccagttgatgtttggtcctgtggaatagtacttactgcaatgctcgctggagaattgccatgggaccaacccagtgacagctgtcaggagtattctgactggaaagaaaaaaaaacatacctcaacccttggaaaaaaatcgattctgctcctctagctctgctgcataaaatcttagttgagaatccatcagcaagaattaccattccagacatcaaaaaagatagatggtacaacaaacccctcaagaaaggggcaaaaaggccccgagtcacttcaggtggtgtgtcagagtctcccagtggattttctaagcacattcaatccaatttggacttctctccagtaaacagtgcttctagtgaagaaaatgtgaagtactccagttctcagccagaaccccgcacaggtctttccttatgggataccagcccctcatacattgataaattggtacaagggatcagcttttcccagcccacatgtcctgatcatatgcttttgaatagtcagttacttggcaccccaggatcctcacagaacccctggcagcggttggtcaaaagaatgacacgattctttaccaaattggatgcagacaaatcttatcaatgcctgaaagagacttgtgagaagttgggctatcaatggaagaaaagttgtatgaatcagggtgatggattggagttcaagagacacttcctgaagattaaagggaagctgattgatattgtgagcagccagaagatttggcttcctgccacatgatcggaccatcggctctggggaatcctggtgaatatagtgctgctatgttgacattattcttcctagagaagattatcctgtcctgcaaactgcaaatagtagttcctgaagtgttcacttccctgtttatccaaacatcttccaatttattttgtttgttcggcatacaaataatacctatatctt

SEQ ID NO: 87498 - DNA, 402 bp, Artificial Sequence
  derived and/or modified sequence
atggccgttccctttgttgaagactgggacctggtgcagaccttaggggaaggagcctacggagaagttcagctggctgttaatcgggtgactgaagaggccgtcgcggtgaagatcgtcgatatgaagagagcagttgactgccccgagaatattaaaaaggaaatctgtatcaacaagatgttgaatcatgaaaacgtcgtaaagttttatggccataggcgggaaggaaacatccagtacctcttcttggagtattgttctggcggggagttatttgacagaattgaacctgacattggcatgcctgagcccgatgcccagaggttttttcaccagcttatggctggcgtcgtttacctgcatggtattggaattacccatagagacattaaaccctag

SEQ ID NO: 87499 - DNA, 513 bp, Artificial Sequence
  derived and/or modified sequence
atggccgttccgtttgtcgaggattgggatctggtgcaaacgctgggggaaggtgcctacggcgaagtgcagctcgctgtgaatagagtcacggaggaggccgtcgcagttaaaatcgtggatatgaaacgggccgtcgattgccccgaaaacataaaaaaagagatatgcatcaacaagatgcttaaccatgaaaacgtcgtgaaattctatgggcatcggagagaaggcaacatccagtatctttttctagagtactgttcaggaggcgagctctttgacaggatcgagccagatattgggatgcctgagcctgacgcacagaggtttttccaccagctgatggcgggcgtcgtgtacttgcacggaatcggaataacgcatagggacattaaacccgagaacctgcttctggacgagcgggacaatttaaaaatctcagacttcgggcttgcgacagtgttccgatataacaatcgcgaacggcttctgaataagatgtgcggcacttag

SEQ ID NO: 87500 - DNA, 615 bp, Artificial Sequence
  derived and/or modified sequence
atggcagttcccttcgtggaggactgggatctggtacaaacattaggcgagggggcatacggggaagtccagcttgcggtaaaccgagtcactgaggaagcggtcgctgtcaagatcgttgacatgaagcgagcggtcgactgccccgaaaacatcaagaaagaaatttgcatcaataaaatgctaaaccacgagaacgtggtaaaattttacggccataggcgggaaggcaacattcagtacctatttctagaatattgctccggcggagaactgtttgacaggatcgaacctgacattggtatgcccgaacccgacgcccagaggttctttcatcagctgatggcgggggtggtttacctgcacggaatcgggatcacgcacagggacattaagcctgagaatctgctcctggacgagagggataaccttaagattagcgactttggtcttgccaccgtcttcaggtataacaaccgggagcggctactaaataaaatgtgcgggaccctgccctacgtggccccagagctgctgaagcgccgggagtttcacgcagagcctgtggatgtgtggtcctgcggcattgttctgactgcaatgctggccggatag

SEQ ID NO: 87501 - DNA, 129 bp, Artificial Sequence
  derived and/or modified sequence
atggccgtgccttttgtggaggattgggacctagttcaaaccctgggcgagggtgcctatggggaagtccaactggctgtaaacagagtgacagaagaggccgtggccgtaaagattgttgatatgtag

SEQ ID NO: 87502 - DNA, 384 bp, Artificial Sequence
  derived and/or modified sequence
atggctgtgcctttcgtagaggactgggacctagtgcagaccctgggagaaggagcatacggagaggtgcagttggccgtgaacagagttaccgaggaagccgtcgcggttaagatcgtggacatgaagcgagccgtcgattgcccagagaatattaagaaagaaatctgtatcaacaaaatgctgaaccatgaaaatgtcgtgaaattttatggccatcgacgcgagggcaacatacagtatctttttctggagtattgcagtgggggggagttgttcgatcgaattgagcccgacattggcatgcctgagccagacgcacagaggttcttccaccagctgatggcgggcgtcgtctaccttcatggcatcggcataacgtag

SEQ ID NO: 87503 - DNA, 1329 bp, Artificial Sequence
  derived and/or modified sequence
atggccgtgcccttcgtcgaagattgggatctggtgcaaactctaggcgagggagcctatggcgaagtccagttagctgtgaacagggtcacagaagaggctgttgctgtcaagattgtagacatgaagagggccgtggattgcccagaaaatattaaaaaagagatttgcataaacaaaatgctgaatcacgaaaatgtcgtgaaattctacggacatcgacgggagggcaacatccagtatctgtttcttgagtactgctctggcggcgagttgttcgacaggatcgaacctgacatcggaatgccagagcccgacgcccaaaggttctttcatcagcttatggccggcgtggtctatttacacgggatcggtataacccatcgcgacattaaacctgagaaccttctgctggatgaaagagacaatctgaagatttcagattttggtctggctaccgtattccgatacaataaccgcgagaggctgctgaataaaatgtgtgggacattgccttacgtcgcgcccgagctgttgaaaagacgagagtttcatgccgagcccgtggacgtgtggtcctgcggaatcgttctgaccgcgatgctggctggggaattgccatgggaccagccctccgactcttgccaagagtacagcgactggaaagagaagaagacatatttgaatccttggaagaaaatcgatagtgcccccttagctctactacacaagatcctggtcgagaatccttccgcaagaatcaccatcccagacataaagaaggatagatggtataacaaacctctcaagaaaggagcaaaaagacctcgcgttacctccggaggggtgagcgaaagtccatctggattttcaaaacacattcaatctaatctggactttagtcctgtaaactccgcctcttctgaagaaaatgtgaagtacagcagttcgcagcctgaaccgcgaacaggcctgagtttatgggacacctcccctagctatatcgataagctggtgcaaggaataagcttcagtcagccgacctgcccagaccatatgctgcttaacagtcagttactgggaactcccgggtccagccaaaatccatggcagagattggtcaaacggatgactagattttttacaaaactggacgctgataagagctaccagtgtctcaaggagacgtgcgagaagttgggctatcaatggaaaaagtcctgtatgaaccagggagacgggctcgagtttaaacgacactttctgaaaatcaaaggtaagttaattgacatcgtctcatcacaaaaaatctggctgcccgccacttag

SEQ ID NO: 87504 - DNA, 402 bp, Artificial Sequence
  derived and/or modified sequence
atggctgtgccctttgtggaggactgggacctggtgcagaccctgggggagggcgcctacggggaggtgcagctggccgtgaacagagtgacagaggaggccgtggccgtgaagatcgtggacatgaagagagctgtggactgcccagagaacatcaagaaggagatctgcatcaacaagatgctgaaccatgaaaatgtggtgaagttctacggccaccggcgggagggcaacatccagtacctgttcctggagtactgcagcggcggggagctgtttgaccgcatcgagccagacatcggcatgcctgagccagatgcccagcgcttcttccaccagctgatggccggcgtggtgtacctgcacggcatcggcatcacccaccgggacatcaagccctag

SEQ ID NO: 87505 - DNA, 513 bp, Artificial Sequence
  derived and/or modified sequence
atggctgtgccctttgtggaggactgggacctggtgcagaccctgggggagggcgcctacggggaggtgcagctggccgtgaacagagtgacagaggaggccgtggccgtgaagatcgtggacatgaagagagctgtggactgcccagagaacatcaagaaggagatctgcatcaacaagatgctgaaccatgaaaatgtggtgaagttctacggccaccggcgggagggcaacatccagtacctgttcctggagtactgcagcggcggggagctgtttgaccgcatcgagccagacatcggcatgcctgagccagatgcccagcgcttcttccaccagctgatggccggcgtggtgtacctgcacggcatcggcatcacccaccgggacatcaagccagagaacctgctgctggatgagcgggacaacctgaagatcagtgactttggcctggccaccgtcttccgctacaacaaccgggagcggctgctgaacaagatgtgtggcacctag

SEQ ID NO: 87506 - DNA, 615 bp, Artificial Sequence
  derived and/or modified sequence
atggctgtgccctttgtggaggactgggacctggtgcagaccctgggggagggcgcctacggggaggtgcagctggccgtgaacagagtgacagaggaggccgtggccgtgaagatcgtggacatgaagagagctgtggactgcccagagaacatcaagaaggagatctgcatcaacaagatgctgaaccatgaaaatgtggtgaagttctacggccaccggcgggagggcaacatccagtacctgttcctggagtactgcagcggcggggagctgtttgaccgcatcgagccagacatcggcatgcctgagccagatgcccagcgcttcttccaccagctgatggccggcgtggtgtacctgcacggcatcggcatcacccaccgggacatcaagccagagaacctgctgctggatgagcgggacaacctgaagatcagtgactttggcctggccaccgtcttccgctacaacaaccgggagcggctgctgaacaagatgtgtggcaccctgccctacgtggcccctgagctgctgaagagaagagagttccacgccgagcctgtggatgtgtggagctgtggcatcgtgctgacagccatgctggccggctag

SEQ ID NO: 87507 - DNA, 129 bp, Artificial Sequence
  derived and/or modified sequence
atggctgtgccctttgtggaggactgggacctggtgcagaccctgggggagggcgcctacggggaggtgcagctggccgtgaacagagtgacagaggaggccgtggccgtgaagatcgtggacatgtag

SEQ ID NO: 87508 - DNA, 384 bp, Artificial Sequence
  derived and/or modified sequence
atggctgtgccctttgtggaggactgggacctggtgcagaccctgggggagggcgcctacggggaggtgcagctggccgtgaacagagtgacagaggaggccgtggccgtgaagatcgtggacatgaagagagctgtggactgcccagagaacatcaagaaggagatctgcatcaacaagatgctgaaccatgaaaatgtggtgaagttctacggccaccggcgggagggcaacatccagtacctgttcctggagtactgcagcggcggggagctgtttgaccgcatcgagccagacatcggcatgcctgagccagatgcccagcgcttcttccaccagctgatggccggcgtggtgtacctgcacggcatcggcatcacctag

SEQ ID NO: 87509 - DNA, 1329 bp, Artificial Sequence
  derived and/or modified sequence
atggctgtgccctttgtggaggactgggacctggtgcagaccctgggggagggcgcctacggggaggtgcagctggccgtgaacagagtgacagaggaggccgtggccgtgaagatcgtggacatgaagagagctgtggactgcccagagaacatcaagaaggagatctgcatcaacaagatgctgaaccatgaaaatgtggtgaagttctacggccaccggcgggagggcaacatccagtacctgttcctggagtactgcagcggcggggagctgtttgaccgcatcgagccagacatcggcatgcctgagccagatgcccagcgcttcttccaccagctgatggccggcgtggtgtacctgcacggcatcggcatcacccaccgggacatcaagccagagaacctgctgctggatgagcgggacaacctgaagatcagtgactttggcctggccaccgtcttccgctacaacaaccgggagcggctgctgaacaagatgtgtggcaccctgccctacgtggcccctgagctgctgaagagaagagagttccacgccgagcctgtggatgtgtggagctgtggcatcgtgctgacagccatgctggccggggagctgccctgggaccagcccagcgacagctgccaggagtacagcgactggaaggagaagaagacctacctgaacccctggaagaagattgacagcgcccccctggccctgctgcacaagatcctggtggagaaccccagcgcccgcatcaccatcccagacatcaagaaggaccgctggtacaacaagcccctgaagaagggggccaagaggccccgggtgaccagcggcggcgtgtctgagagccccagcggcttcagcaagcacatccagagcaacctggacttcagccctgtgaacagcgccagcagcgaggagaatgtgaagtacagcagcagccagcctgagcccaggacaggcctgagcctgtgggacaccagccccagctacatcgacaagctggtgcagggcatctccttcagccagcccacctgcccagaccacatgctgctgaacagccagctgctgggcaccccaggcagcagccagaacccctggcagaggctggtgaagaggatgacccgcttcttcaccaagctggatgctgacaagagctaccagtgcctgaaggagacctgtgagaagctgggctaccagtggaagaagagctgcatgaaccagggagatggcctggagttcaagaggcacttcctgaagatcaagggcaagctgattgatattgtgagcagccagaagatctggctgcctgccacctag

SEQ ID NO: 87510 - DNA, 402 bp, Artificial Sequence
  derived and/or modified sequence
atggccgtgcccttcgtggaggactgggacctggtgcagaccctgggcgaaggtgcttacggtgaggtgcagttagcagtcaatcgcgtgacggaggaagcagtcgcagtaaagatcgttgatatgaaacgggctgttgattgccccgagaatatcaaaaaggagatatgcatcaacaaaatgctcaaccatgagaatgtggtcaagttttatggccatcgaagggaagggaacatacagtatttgttcctggaatactgctctggcggggagctgtttgacagaatagagcctgacattggcatgccagagccggacgcacagcgattctttcaccagctcatggctggcgtggtttacctgcacggaatcgggatcactcacagagatattaagccgtag

SEQ ID NO: 87511 - DNA, 513 bp, Artificial Sequence
  derived and/or modified sequence
atggccgtgcccttcgtggaggactgggacctggtgcagaccctgggcgagggcgcttatggcgaagtgcagctggcagttaatcgggtgaccgaagaagcagtggctgttaaaatcgtagatatgaaacgggctgtcgactgccctgaaaacatcaaaaaggaaatatgcataaataagatgctaaatcatgagaacgtcgtcaagttctatgggcacaggcgggaagggaacatacagtatctgttcctggaatattgctccggcggagagctcttcgacagaattgagcctgacattggaatgccagaaccagatgcccaacggttttttcaccagctaatggcaggcgtcgtatatttgcatggcattggcataactcaccgcgacatcaagcccgaaaacctgttattggacgagcgggataatctcaagatcagtgacttcgggttggctacagtgtttaggtataataaccgagagcgcttattaaataaaatgtgcggtacctag

SEQ ID NO: 87512 - DNA, 615 bp, Artificial Sequence
  derived and/or modified sequence
atggccgtgcccttcgtggaggactgggacctggtgcagaccctgggagaaggagcatacggcgaggtgcagctcgccgtcaaccgtgtcacagaggaagctgtggctgtgaagatcgtggatatgaaacgggcagtggattgcccagagaacattaagaaagaaatctgcattaataaaatgctgaatcatgagaacgttgtcaaattttacgggcatcggcgcgagggaaatatccagtatctgtttctggagtattgctcggggggcgagctcttcgaccggattgagcccgacatcggcatgccagagcctgatgcccaacggttctttcatcagcttatggccggcgttgtttatcttcacggcattgggattacgcatcgcgacattaagccagagaaccttctcctagacgaacgggataatctgaagattagcgactttggcctggcaaccgtgttccgatataataacagagaaagactattaaataaaatgtgtggtacgttgccttacgtggccccagaactgttgaaacggcgggaatttcacgcagaacccgttgatgtgtggtcttgcggaatcgtcctgactgccatgctggccgggtag

SEQ ID NO: 87513 - DNA, 129 bp, Artificial Sequence
  derived and/or modified sequence
atggccgtgcccttcgtggaggactgggacctggtgcagaccctgggagagggagcgtatggcgaggtccagctggccgtgaacagagttacggaagaggcagtcgccgtaaagatagttgacatgtag

SEQ ID NO: 87514 - DNA, 384 bp, Artificial Sequence
  derived and/or modified sequence
atggccgtgcccttcgtggaggactgggacctggtgcagaccctgggcgagggggcctacggtgaggtccagcttgctgtgaatcgggtgactgaggaggccgtagctgtgaaaatcgtcgacatgaaacgcgccgtggactgtcccgaaaatattaagaaagaaatctgcataaacaagatgctgaatcacgagaacgtggtaaagttctatggacataggcgcgagggaaacattcagtatttgttcctcgagtattgcagtggcggagagctctttgaccgcattgaaccggatattggcatgccagaacccgacgcccaacgatttttccaccagctcatggccggcgtggtgtacctccatgggattgggattacatag

SEQ ID NO: 87515 - DNA, 1329 bp, Artificial Sequence
  derived and/or modified sequence
atggccgtgcccttcgtggaggactgggacctggtgcagaccctgggtgagggagcctacggagaggtccagctggctgtgaaccgcgtgactgaggaggccgtggcggttaaaattgtcgacatgaagagggccgtggattgcccagaaaacatcaagaaggagatatgcattaacaaaatgctgaatcatgagaacgttgttaagttttatggacaccgcagagaaggcaacattcagtacctgtttttagaatattgttctggaggcgagctgttcgatagaattgaaccggatatcggaatgcctgaaccggacgcccagcgctttttccatcagcttatggccggcgtggtgtacctgcacggcattgggatcactcaccgagatattaaacccgagaatttactccttgatgaacgggataaccttaagatctcagattttggactggcaacagtctttagatacaacaatagagaaagactgctgaacaaaatgtgtggcaccctgccctatgtggcacccgaactgctaaagagaagagagtttcacgccgagcctgtggatgtatggtcctgcgggattgtgctaacagccatgttggccggggaattgccctgggatcagccatcagactcttgccaggagtatagcgattggaaagagaagaagacttatctcaacccttggaagaagatcgactccgccccactagccctccttcataaaattctggtcgagaatccttccgcgagaatcactatccccgatataaaaaaggaccgttggtataataagccactcaagaagggagctaaacgccctcgcgtaacatctggtggcgtgtccgaatctccttcaggcttttcaaaacacattcagtcgaacttagatttttctccagtgaacagcgctagctccgaagagaacgtaaagtattctagctctcagccggagccgagaacaggactaagcctctgggacacctcgccgagctatattgacaaactggtgcagggcatcagtttttctcagcccacgtgcccagaccatatgctcctcaatagtcagctgctgggtacacccggcagtagccagaacccttggcaaaggctggtgaagagaatgacacgattctttaccaaattagatgcagacaagagttaccaatgcctgaaagagacttgcgaaaaacttggctaccagtggaagaagagctgcatgaaccagggagacggcttggaatttaaaagacatttcttgaaaataaagggcaagcttattgatatcgtcagctcccagaagatttggctgccagctacatag

SEQ ID NO: 87516 - DNA, 402 bp, Artificial Sequence
  derived and/or modified sequence
atggccgtgccatttgtggaggattgggatctggtgcagaccctgggcgagggggcatatggagaagtgcagttggcagtgaatagggtgacggaggaggcagtagctgtgaagatcgtcgacatgaagcgagctgtggactgccctgagaatataaagaaggagatctgtattaacaagatgctgaatcacgagaacgtcgtgaaattttacggccatagaagggaaggcaatatccagtacctgtttctggaatactgttccgggggagagcttttcgatcgtatagagcccgatattgggatgcctgagccggatgctcagcgctttttccaccaactcatggcgggtgtggtgtatctgcacggcatcggaataacccatagggacatcaaaccatag

SEQ ID NO: 87517 - DNA, 513 bp, Artificial Sequence
  derived and/or modified sequence
atggccgtcccttttgtggaggactgggaccttgtacagacactcggagagggtgcctatggggaggtgcagttggccgtaaaccgcgttactgaagaagccgtggccgtgaaaatagtagacatgaagagggcagtcgattgcccagagaatattaaaaaggagatctgcattaataaaatgctgaatcacgagaacgtcgtgaaattttatggacaccggagagaaggcaatattcagtacctgttcctggaatattgctcaggcggagagctgttcgatcgcatcgagcccgatattggaatgccagaacctgatgcccagaggttttttcatcaactgatggcaggggtggtctacttacacggaatcggaataacccacagggacataaaacccgaaaacttactactggacgagcgcgacaaccttaaaatatccgacttcgggctggcaacagtgttccgatataataatcgggagcggctcctgaataagatgtgtggaacttag

SEQ ID NO: 87518 - DNA, 615 bp, Artificial Sequence
  derived and/or modified sequence
atggcagtgccttttgtagaagactgggacttagtgcaaactctgggcgagggtgcctatggagaggtacaattggccgttaaccgagtgacggaggaggctgtggcagtcaaaatcgtggatatgaagagggccgtggactgtcccgagaacattaagaaggagatctgcattaacaagatgctgaaccatgaaaacgtagtgaaattctatggtcacagaagggagggtaacatccaatatctattcctggagtactgttcgggaggggagcttttcgacagaatcgagcccgacattggcatgcctgagccagatgcccagaggttctttcatcaacttatggccggagtggtgtacctgcatgggattgggatcactcatagggacattaagccagaaaatctgctgttggatgaaagagacaatcttaaaatcagtgacttcgggctggcaactgtgtttagatataataaccgtgagagattgctcaacaagatgtgcggaaccctgccttatgtggcaccggagctgcttaagaggcgcgaattccatgctgagcctgtggatgtctggagctgcggaatcgtactgaccgcgatgctggcgggttag

SEQ ID NO: 87519 - DNA, 129 bp, Artificial Sequence
  derived and/or modified sequence
atggcggttcccttcgttgaggactgggatctagttcagacgctgggagaaggggcttacggcgaggtacagctggcagtgaaccgcgtcacggaagaggccgtagccgtaaaaattgttgacatgtag

SEQ ID NO: 87520 - DNA, 384 bp, Artificial Sequence
  derived and/or modified sequence
atggctgttcctttcgtggaggattgggacctggtgcagactctgggcgagggggcatacggagaggttcaactggccgtgaatcgtgttaccgaggaagctgtggccgtgaaaattgtggacatgaagagggctgttgactgcccagagaacatcaagaaagagatatgcatcaacaaaatgctgaatcatgaaaacgtcgtcaagttttacgggcataggagggagggcaatatccagtacctgttcctcgaatactgcagcgggggagagctttttgaccgcattgaaccagacatcggtatgccggagcccgatgcccagagattctttcatcaactgatggccggtgtggtgtacctgcacggtataggtatcacttag

SEQ ID NO: 87521 - DNA, 1329 bp, Artificial Sequence
  derived and/or modified sequence
atggctgtacccttcgtcgaagactgggatttagtgcaaactctgggagagggcgcttacggggaggtacagttggctgtgaaccgggtgacagaagaggccgtggctgtcaagatcgtcgacatgaagagggccgtggattgtcctgaaaacattaaaaaggagatttgtattaacaagatgttaaatcatgaaaacgtcgtgaagttctacgggcaccgcagggagggaaatatccagtaccttttcctggaatactgcagcggcggtgagctgttcgatcgcattgaaccagatatcggaatgcctgagccagatgctcagagatttttccatcagttaatggcgggagtggtttacctgcatggaattggtattacccatcgggacatcaagcctgaaaatctgcttctagatgagcgggataatttaaagattagcgattttgggctcgctaccgtcttccgctataacaaccgggaacgcctgctcaataaaatgtgtggcacactgccatatgtggcccctgagttactcaagagacgggaattccatgcagagcctgttgacgtctggagttgcgggatcgtgctgactgccatgcttgcaggcgagctgccctgggaccagccatctgatagttgccaggagtactccgactggaaggaaaagaaaacgtaccttaatccctggaaaaaaattgatagcgccccactggcactccttcataaaattttggtggagaacccctccgcacggattacgatcccagacatcaaaaaagataggtggtataataaacctctaaagaaaggggcaaagcgccctcgagtgacgtctggcggagtaagtgaaagtccatccggcttcagcaagcacattcaatcgaacttggacttttctcccgttaacagcgcaagctccgaagagaatgtaaaatactcttcatcccagcccgagcctcggacaggtcttagcctttgggatacgtctccatcctatattgacaaactcgtccagggcatttcatttagccaaccaacgtgtcctgaccatatgttgctaaacagccagctgctcgggacaccaggaagctctcaaaatccatggcagcgcttggtcaaacgaatgacaaggttttttaccaagctggatgcagacaagtcctaccagtgcctcaaagagacctgtgaaaagctcggctaccaatggaagaaaagctgtatgaaccaaggtgatggcctggagttcaagaggcacttcctgaaaattaaaggcaagttgatcgacatagtgagcagccaaaagatctggctgcctgctacctag

SEQ ID NO: 87522 - protein, 252 aa, Artificial Sequence
  derived and/or modified sequence
MEQESALRELRERVTQGLAEAGRGREDVRTELFRALEAVRLQNNSCEPCPTSWLSFEGSCYFFSVPKTTWAAAQDHCADASAHLVIVGGLDEQGFLTRNTRGRGYWLGLRAVRHLGKVQGYQWVDGVSLSFSHWNQGEPNDAWGRENCVMMLHTGLWNDAPCDSEKDGWICEKAQLLTPPSALEPRPLQHVVSWGLLTSLAPGADCQRVFSSSSTAAESQKHLAQHSPVQPSAWALGPPCRPHPNSTHADPT

SEQ ID NO: 87523 - DNA, 759 bp, Artificial Sequence
  derived and/or modified sequence
atggagcaggagagcgccctgagagagctgagagagagagtgacccagggcctggccgaggccggcagaggcagagaggacgtgagaaccgagctgttcagagccctggaggccgtgagactgcagaacaacagctgcgagccctgccccaccagctggctgagcttcgagggcagctgctacttcttcagcgtgcccaagaccacctgggccgccgcccaggaccactgcgccgacgccagcgcccacctggtgatcgtgggcggcctggacgagcagggcttcctgaccagaaacaccagaggcagaggctactggctgggcctgagagccgtgagacacctgggcaaggtgcagggctaccagtgggtggacggcgtgagcctgagcttcagccactggaaccagggcgagcccaacgacgcctggggcagagagaactgcgtgatgatgctgcacaccggcctgtggaacgacgccccctgcgacagcgagaaggacggctggatctgcgagaaggcccagctgctgaccccccccagcgccctggagcccagacccctgcagcacgtggtgagctggggcctgctgaccagcctggcccccggcgccgactgccagagagtgttcagcagcagcagcaccgccgccgagagccagaagcacctggcccagcacagccccgtgcagcccagcgcctgggccctgggccccccctgcagaccccaccccaacagcacccacgccgaccccacctag

SEQ ID NO: 87524 - DNA, 759 bp, Artificial Sequence
  derived and/or modified sequence
atggagcaggagtcagctctgcgggagctacgcgagcgtgttacccaaggtcttgcagaggctggtcgaggccgcgaggacgtccgcacagagctctttcgcgccttggaggccgtgaggctacagaacaactcctgtgagccatgtccaacctcctggctttcatttgaagggagctgctacttcttttcagtccccaaaacaacctgggcagctgcccaggatcactgcgccgatgctagcgcacacttggtgattgtgggcgggctcgacgagcagggcttcctcacccggaacacgcggggacgcggctattggctgggactgcgcgctgtgaggcacctgggtaaggtccaggggtaccagtgggtggacggagtcagcctgtcattctcccattggaatcagggcgaacccaatgacgcctggggccgggagaactgtgtgatgatgttgcataccggcctttggaatgatgcaccatgcgatagcgagaaggacggttggatctgcgagaaggctcaactgctgacccctccttcggctcttgaaccacgtcccctgcagcacgtcgtatcgtggggcctcctaacatctcttgcacctggagccgactgccaacgggtgttctctagcagttctactgccgccgaaagccagaagcacttggcacaacactcccctgtgcagcctagtgcttgggccctgggtccgccatgtagaccgcatccaaacagtactcacgctgatccgacatag

SEQ ID NO: 87525 - DNA, 759 bp, Artificial Sequence
  derived and/or modified sequence
atggagcaggagagcgccctgcgggagctgcgggagcgggtgacccagggcctggccgaggccggccggggccgggaggatgtgaggacagagctgttccgggccctggaggccgtgcggctgcagaacaacagctgtgagccctgccccacctcctggctgagctttgagggcagctgctacttcttctctgtgcccaagaccacctgggccgccgcccaggaccactgtgctgatgccagcgcccacctggtgattgtgggcggcctggatgagcagggcttcctgaccaggaacacccggggccggggctactggctgggcctgcgggctgtgcgccacctgggcaaggtgcagggctaccagtgggtggatggagtgtccctgtccttcagccactggaaccagggcgagcccaatgatgcctggggccgggagaactgtgtgatgatgctgcacacaggcctgtggaatgatgccccctgtgacagcgagaaggatggctggatctgtgagaaggcccagctgctgaccccaccttctgccctggagccccggcccctgcagcacgtggtgtcctggggcctgctgaccagcctggcccctggagctgactgccagagggtcttcagcagcagcagcacagctgctgagagccagaagcacctggcccagcacagccctgtgcagcccagcgcctgggccctgggccccccctgccggccccaccccaacagcacccatgctgaccccacctag

SEQ ID NO: 87526 - DNA, 759 bp, Artificial Sequence
  derived and/or modified sequence
atggagcaggagagcgccctgcgggagctgcgggagcgggtgacccagggcctggccgaggcaggacgtggcagagaggatgtaaggactgagctctttagggccctcgaagccgtgagattacagaacaacagttgcgagccatgtcctactagttggctcagcttcgaggggtcatgctacttttttagtgtccccaaaacaacttgggccgccgctcaggaccattgcgcggatgcctcagctcatcttgtgatagttggcggactggacgaacaagggtttctcacgagaaacaccaggggacgcggatactggctgggactcagagcagtgcggcatctgggcaaggtgcaaggctaccagtgggtagacggagtctctctgtccttctctcactggaaccagggagagcccaatgacgcctgggggcgggagaattgcgtcatgatgctccacactggactttggaatgacgccccttgtgacagtgagaaagatggctggatctgtgaaaaagcacagttgcttacgccgccctcagcactggagcctcgacccctgcaacatgtagttagttggggcttgttaacatccctggctcctggagcggattgccaacgggttttcagttcttcctcaacagctgctgaatcccagaaacacttagcgcagcactcaccggtacagccctccgcctgggctcttggcccaccgtgcagacctcatcccaattctacacacgctgaccccacttag

SEQ ID NO: 87527 - DNA, 759 bp, Artificial Sequence
  derived and/or modified sequence
atggagcaagagagcgctcttcgcgaactccgggagcgcgtgacacagggcttagccgaggccggacggggtcgggaagacgtgagaacggagctctttcgcgcactggaagctgtgagactccagaataactcatgtgaaccctgcccaacctcctggctctcttttgaaggaagctgttacttcttctcagttcccaagaccacttgggctgctgcacaggatcactgtgcggatgcgtcagcccacttggtgattgtcgggggattggacgaacaggggtttttgacccggaatacacggggtaggggatattggctaggcctgcgagccgtgcggcatttaggtaaagtgcagggctatcaatgggtggacggtgtctccctgtcattctctcactggaaccaaggcgagcccaacgacgcatggggtcgagagaattgcgtgatgatgttgcacacaggcctttggaacgacgcaccctgcgatagcgaaaaggacgggtggatttgcgaaaaggctcagcttctgacccctcccagtgccctcgagcccaggcccctccaacatgtggtgtcatggggactgcttaccagcctcgcccctggcgcagattgccaacgcgtgtttagctctagcagcacagccgctgaaagtcaaaaacacttagcacaacacagccctgtacagccctccgcgtgggctttggggcctccttgtagacctcacccaaactctacccacgctgaccccacttag

SEQ ID NO: 87528 - protein, 67 aa, Artificial Sequence
  derived and/or modified sequence
MSNEVETSATNGQPDQQAAPKAPSKKEKKKGPEKTDEYLLARFKGDGVKYKAKLIGIDDVPDARGDK

SEQ ID NO: 87529 - protein, 76 aa, Artificial Sequence
  derived and/or modified sequence
MSNEVETSATNGQPDQQAAPKAPSKKEKKKGPEKTDEYLLARFKGDGVKYKAKLIGIDDVPDARGDKMSQDSMMKL

SEQ ID NO: 87530 - protein, 39 aa, Artificial Sequence
  derived and/or modified sequence
MSNEVETSATNGQPDQQAAPKAPSKKEKKKGPEKTDEYL

SEQ ID NO: 87531 - protein, 749 aa, Artificial Sequence
  derived and/or modified sequence
MSNEVETSATNGQPDQQAAPKAPSKKEKKKGPEKTDEYLLARFKGDGVKYKAKLIGIDDVPDARGDKMSQDSMMKLKGMAAAGRSQGQHKQRIWVNISLSGIKIIDEKTGVIEHEHPVNKISFIARDVTDNRAFGYVCGGEGQHQFFAIKTGQQAEPLVVDLKDLFQVIYNVKKKEEEKKKIEEASKAVENGSEALMILDDQTNKLKSESKDILLVDLNSEIDTNQNSLRENPFLTNGITSCSLPRPTPQASFLPENAFSANLNFFPTPNPDPFRDDPFTQPDQSTPSSFDSLKSPDQKKENSSSSSTPLSNGPLNGDVDYFGQQFDQISNRTGKQEAQAGPWPFSSSQTQPAVRTQNGVSEREQNGFSVKSSPNPFVGSPPKGLSIQNGVKQDLESSVQSSPHDSIAIIPPPQSTKPGRGRRTAKSSANDLLASDIFAPPVSEPSGQASPTGQPTALQPNPLDLFKTSAPAPVGPLVGLGGVTVTLPQAGPWNTASLVFNQSPSMAPGAMMGGQPSGFSQPVIFGTSPAVSGWNQPSPFAASTPPPVPVVWGPSASVAPNAWSTTSPLGNPFQSNIFPAPAVSTQPPSMHSSLLVTPPQPPPRAGPPKDISSDAFTALDPLGDKEIKDVKEMFKDFQLRQPPAVPARKGEQTSSGTLSAFASYFNSKVGIPQENADHDDFDANQLLNKINEPPKPAPRQVSLPVTKSTDNAFENPFFKDSFGSSQASVASSQPVSSEMYRDPFGNPFA

SEQ ID NO: 87532 - DNA, 1659 bp, Artificial Sequence
  derived and/or modified sequence
atgtctaatgaagtcgagacaagtgccacaaacgggcagccggaccagcaagctgcacctaaggccccatctaagaaagagaagaagaagggccctgaaaaaaccgacgaatacctgcttgctcgcttcaagggcgacggagtgaaatacaaagccaaactgattggcattgacgatgtgcccgatgcgcgaggagataagatgtcacaggacagtatgatgaaactgaagggaatggccgccgccggacggtcacaaggtcaacataagcagaggatctgggttaatattagtctgagcggcatcaaaattatcgatgagaagaccggtgtgattgagcatgagcaccccgttaataaaatcagcttcatcgctcgcgacgtgaccgacaacagagctttcgggtatgtgtgtggaggggagggacagcaccagttcttcgctattaagaccggtcagcaggccgagccgttggtcgtagacctgaaggacctatttcaggtgatttacaatgtgaagaagaaagaagaggagaaaaagaagattgaggaagcatccaaagccgtagagaacggatccgaagccttgatgatcttggacgatcagaccaataaactgaagtcaggcgtcgaccaaatggatttgttcggggacatgtcaacaccccctgatttgaactctcccacctccagcgcaaacgacttactggcaagcgatatttttgcccctccggtgtctgaacctagtggacaggctagccctacaggacagccgaccgcactgcagccaaatcctttagacttgttcaagacttctgcaccggcccccgtgggccctttggtgggactgggcggggtaaccgtgaccctgccgcaggcaggcccctggaacacagcctctctcgtgtttaatcaatcacctagtatggcaccgggggccatgatgggtgggcagccttcaggattctctcagccagtaatttttggaacatcccccgcagtttccggctggaatcaacctagccccttcgccgctagtactcctccacccgtgcctgtcgtgtgggggcccagcgctagcgtggcacctaatgcctggagtacaacttcacccctcggaaacccatttcagtccaatatattccctgcccccgccgtgtccacccaaccaccctctatgcactctagcctgctggtaactcctccccagcccccaccccgagccggacctccaaaggatatctcctcagatgccttcaccgccttagaccccttgggagataaggagattaaggatgtgaaagagatgtttaaggactttcagttgcgccagccacctgctgttccagccagaaagggtgagcaaacttctagtggaacactttccgcatttgcaagttattttaacagcaaagtgggcattcctcaggaaaacgccgaccatgatgactttgacgccaaccagttgctcaataaaattaatgaacccccgaaacctgctccgagacaggtgagcctgccagtcaccaagtctaccgacaatgctttcgagaaccctttttttaaggactcttttggctccagccaagcttcagtcgcttcaagtcaacccgtcagctcagagatgtatagggatcccttcggtaatccgtttgcctag

SEQ ID NO: 87533 - DNA, 204 bp, Artificial Sequence
  derived and/or modified sequence
atgtctaacgaggtcgagacgagcgcaacaaatgggcagcccgatcagcaagccgcgccgaaagccccgagcaaaaaggagaagaagaagggacccgaaaagactgatgagtatctgctggcccggttcaaaggcgacggcgtgaaatataaagctaagctgataggcattgacgatgtgcctgatgcccggggagacaaatag

SEQ ID NO: 87534 - DNA, 231 bp, Artificial Sequence
  derived and/or modified sequence
atgtccaatgaggtggagacatctgccacaaacggacagcccgaccaacaggccgcccctaaagcaccgtccaagaaagagaaaaagaagggaccagaaaagaccgatgagtatttattggcacggttcaaaggagatggagttaagtataaggccaaattgatcggtatagacgacgtacctgatgctagaggcgataagatgagccaggatagtatgatgaagctctag

SEQ ID NO: 87535 - DNA, 2250 bp, Artificial Sequence
  derived and/or modified sequence
atgagcaacgaggtggagacgtcagctaccaacggacagcccgaccagcaggccgcccctaaagcccctagcaaaaaggaaaagaagaagggcccggagaaaactgatgagtacctgttggctcgcttcaagggggacggcgtgaagtacaaggcaaagctgattggcatcgacgatgtgcccgatgccaggggggacaagatgagccaagatagcatgatgaagctgaaagggatggcagcagcgggacgcagccagggccagcacaaacagaggatatgggtcaacatcagcctttctggtattaagatcatcgatgaaaaaacaggggtcattgagcatgaacaccccgttaacaaaatctcatttatagcaagggacgtcaccgataatcgcgctttcggatatgtgtgtggcggggagggtcagcaccagtttttcgcgataaaaacgggccagcaggccgaaccgttggtggttgatcttaaagacctgttccaggtgatttacaacgtgaagaagaaggaagaggagaaaaaaaaaattgaggaagccagcaaggccgttgaaaacggtagcgaggctctgatgatcctcgatgaccagaccaataaactcaagtccgagtccaaagatatacttctcgtggatcttaactcggaaatagataccaaccagaatagcttaagagaaaatcctttcctgaccaacggcatcacttcttgcagcctgccgagaccgaccccccaggcctccttcctgcccgaaaacgccttctctgctaaccttaacttctttcctactccaaaccccgacccatttcgggatgatccttttacccagcctgaccagagcacaccatcttccttcgatagtctgaaatcaccggatcaaaagaaagagaacagtagctcatcttcaacacctttgtccaatggtcccttaaatggggatgtggattactttggccagcagttcgaccaaatatccaatagaactggtaaacaagaagctcaggccggaccgtggcctttttctagcagccagactcagccggccgtgcgaacccagaacggggtctctgagcgggagcagaatggctttagcgttaagtcctcccccaacccattcgttggaagtcctcctaagggcctgtcaatccaaaacggcgtcaaacaggacttggaaagctccgtacagtccagcccgcatgactcaatagctattatccctccgccccagtcgacaaagccgggacgcggtcgacgtacggctaagtcctcagcaaatgaccttctggccagcgacattttcgccccaccagtgagtgaacctagtgggcaggcatcccccactgggcaacctaccgccctacagcctaacccactcgacctgttcaagacaagtgctcccgcacccgtcggcccactggtgggcctcggaggcgtgaccgtcaccctgccccaggcaggtccttggaataccgcctctctcgtgttcaaccagtcccccagcatggcaccaggcgctatgatggggggacagccctccgggttcagtcaacccgttatcttcgggacttctcccgctgtgtcaggctggaatcagcctagcccattcgctgcatctacacccccccctgtgccagtggtgtggggtccaagtgcctccgtggcgcctaatgcctggtctactacttctcccctgggcaacccctttcagagcaatatctttccggcacccgcagttagcacccagcccccttctatgcactcttccctgttggtcacccctcctcaaccaccaccccgggccggaccacccaaggacatctctagtgacgcttttaccgccctggacccgttgggggacaaggagatcaaagatgttaaagaaatgtttaaggactttcagctacgccaacctccagcagtcccggcccggaagggcgaacaaacaagctctggcacgctctccgcctttgccagttacttcaatagcaaggttgggatccctcaggaaaatgcggatcacgatgatttcgatgccaatcagctcctcaacaaaatcaatgaaccacctaagccagcccctagacaggtcagtcttcccgtgacaaagagtactgataacgcttttgaaaatccgtttttcaaggatagcttcggatcttcacaggctagtgtcgcctcatcccagccagtctccagcgagatgtaccgagacccattcgggaatccttttgcatag

SEQ ID NO: 87536 - DNA, 1659 bp, Artificial Sequence
  derived and/or modified sequence
atgagcaatgaggtggagaccagcgccaccaacggccagcctgaccagcaggccgcccccaaggcccccagcaagaaggagaagaagaagggccctgagaagacagatgagtacctgctggcccgcttcaagggagatggagtgaagtacaaggccaagctgattggaattgatgatgtgcctgatgcccggggggacaagatgagccaggacagcatgatgaagctgaagggcatggctgctgctggccgcagccagggccagcacaagcagaggatctgggtgaacatcagcctgagcggcatcaagatcattgatgagaagacaggagtcatcgagcacgagcaccctgtgaacaagatctccttcatcgccagagatgtgacagacaacagagccttcggctacgtgtgtggcggggagggccagcaccagttctttgccatcaagacaggccagcaggccgagcccctggtggtggacctgaaggacctcttccaggtgatctacaacgtgaagaagaaggaggaggagaagaagaagattgaggaggccagcaaggctgtggagaatggaagtgaggccctgatgatcctggatgaccagaccaacaagctgaagagcggcgtggaccagatggacctgtttggagacatgagcaccccaccagacctgaacagccccaccagcagcgccaatgacctgctggccagtgacatctttgcccctcctgtgtctgagcccagcggccaggccagccccaccggccagcccacagccctgcagcccaaccccctggacctcttcaagaccagcgccccagcccctgtgggccccctggtgggcctgggcggcgtgacagtgaccctgccccaggccggcccctggaacacagccagcctggtgttcaaccagagccccagcatggcccctggggccatgatgggcggccagcccagcggcttcagccagcctgtgatcttcggcaccagccctgctgtgtctggctggaaccagcccagcccctttgctgccagcaccccacctcctgtgcctgtggtgtggggccccagcgcctctgtggccccaaatgcctggagcaccaccagccccctgggcaaccccttccagagcaacatcttccctgccccagctgtgtccacccagccccccagcatgcacagcagcctgctggtgaccccaccccagcccccaccccgggccggcccccccaaggacatcagcagtgatgccttcaccgccctggaccccctgggggacaaggagatcaaggatgtgaaggagatgttcaaggacttccagctgcggcagcccccagctgtgcctgccaggaagggggagcagaccagcagcggcaccctgagcgcctttgccagctacttcaacagcaaggtgggcatcccccaggagaatgctgaccatgatgactttgatgccaaccagctgctgaacaagatcaatgagccccccaagccagccccccggcaggtgtccctgcctgtgaccaagagcacagacaatgcctttgagaaccccttcttcaaggacagctttggcagcagccaggcctctgtggccagcagccagcctgtgagcagcgagatgtacagagacccctttggaaacccctttgcctag

SEQ ID NO: 87537 - DNA, 204 bp, Artificial Sequence
  derived and/or modified sequence
atgagcaatgaggtggagaccagcgccaccaacggccagcctgaccagcaggccgcccccaaggcccccagcaagaaggagaagaagaagggccctgagaagacagatgagtacctgctggcccgcttcaagggagatggagtgaagtacaaggccaagctgattggaattgatgatgtgcctgatgcccggggggacaagtag

SEQ ID NO: 87538 - DNA, 231 bp, Artificial Sequence
  derived and/or modified sequence
atgagcaatgaggtggagaccagcgccaccaacggccagcctgaccagcaggccgcccccaaggcccccagcaagaaggagaagaagaagggccctgagaagacagatgagtacctgctggcccgcttcaagggagatggagtgaagtacaaggccaagctgattggaattgatgatgtgcctgatgcccggggggacaagatgagccaggacagcatgatgaagctgtag

SEQ ID NO: 87539 - DNA, 2250 bp, Artificial Sequence
  derived and/or modified sequence
atgagcaatgaggtggagaccagcgccaccaacggccagcctgaccagcaggccgcccccaaggcccccagcaagaaggagaagaagaagggccctgagaagacagatgagtacctgctggcccgcttcaagggagatggagtgaagtacaaggccaagctgattggaattgatgatgtgcctgatgcccggggggacaagatgagccaggacagcatgatgaagctgaagggcatggctgctgctggccgcagccagggccagcacaagcagaggatctgggtgaacatcagcctgagcggcatcaagatcattgatgagaagacaggagtcatcgagcacgagcaccctgtgaacaagatctccttcatcgccagagatgtgacagacaacagagccttcggctacgtgtgtggcggggagggccagcaccagttctttgccatcaagacaggccagcaggccgagcccctggtggtggacctgaaggacctcttccaggtgatctacaacgtgaagaagaaggaggaggagaagaagaagattgaggaggccagcaaggctgtggagaatggaagtgaggccctgatgatcctggatgaccagaccaacaagctgaagtctgagagcaaggacatcctgctggtggacctgaacagcgagattgacaccaaccagaacagcctgcgggagaaccccttcctgaccaacggcatcaccagctgcagcctgccccggcccaccccccaggccagcttcctgcctgaaaatgccttcagcgccaacctgaacttcttccccacccccaacccagaccccttcagagatgaccccttcacccagcctgaccagagcacccccagcagctttgacagcctgaagagcccagaccagaagaaggagaacagcagcagcagcagcacccccctgagcaatggccccctgaatggagatgtggactacttcggccagcagtttgaccagatcagcaacagaacaggcaagcaggaggcccaggccggcccctggcccttcagcagcagccagacccagcctgctgtgaggacccagaatggagtgtctgagcgggagcagaatggcttctctgtgaagagcagccccaacccctttgtgggcagcccccccaagggcctgagcatccagaatggagtgaagcaggacctggagagctctgtgcagagcagcccccatgacagcatcgccatcatccccccaccccagagcaccaagccaggccggggccgcaggacagccaagagcagcgccaatgacctgctggccagtgacatctttgcccctcctgtgtctgagcccagcggccaggccagccccaccggccagcccacagccctgcagcccaaccccctggacctcttcaagaccagcgccccagcccctgtgggccccctggtgggcctgggcggcgtgacagtgaccctgccccaggccggcccctggaacacagccagcctggtgttcaaccagagccccagcatggcccctggggccatgatgggcggccagcccagcggcttcagccagcccgtcatcttcggcaccagccctgctgtgtctggctggaaccagcccagcccctttgctgccagcaccccacctcctgtgcctgtggtgtggggccccagcgcctctgtggccccaaatgcctggagcaccaccagccccctgggcaaccccttccagagcaacatcttccctgccccagctgtgtccacccagcccccatccatgcacagcagcctgctggtgaccccaccccagcccccacccagggctggcccccccaaggacatcagcagtgatgccttcaccgccctggaccccctgggggacaaggagatcaaggatgtgaaggagatgttcaaggacttccagctgcggcagcccccagctgtgcctgccaggaaaggagagcagaccagcagcggcaccctgagcgcctttgccagctacttcaacagcaaggtgggcatcccccaggagaatgctgaccatgatgactttgatgccaaccagctgctgaacaagatcaatgaaccacccaagccagccccccggcaggtgtccctgcctgtgaccaagagcacagacaatgcctttgagaaccccttcttcaaggacagctttggcagcagccaggcctctgtggccagcagccagcctgtgtcctctgagatgtacagagaccccttcggcaacccctttgcctag

SEQ ID NO: 87540 - DNA, 1659 bp, Artificial Sequence
  derived and/or modified sequence
atgagcaacgaggtggagaccagcgccaccaacggccagcccgaccagcaggctgcccccaaagcgcctagtaagaaagagaaaaaaaagggccccgagaagactgacgagtatctgttggcaagattcaagggagatggagtcaaatataaggccaagctgattggcattgatgatgtgcccgatgcacggggcgacaaaatgtcacaggattctatgatgaagctcaagggaatggccgccgcagggaggagccaggggcagcacaagcagcgcatctgggtcaacattagcctgtccggaatcaagattatcgatgagaagacaggagtaattgagcacgagcaccccgtcaataagatttcctttatcgcaagagatgtcaccgacaatagagccttcggttatgtatgtggcggtgaaggccaacatcagttctttgctattaagacgggtcaacaggctgagccactcgtggtcgacctgaaggatttgttccaagttatttataatgtgaaaaagaaggaagaggaaaagaagaaaatagaggaggcgagtaaggctgttgagaatggctccgaagccctgatgatactcgatgaccagactaacaaactgaagtcaggcgtcgaccaaatggacctttttggggatatgtccactcctcccgatcttaattcgcccacctctagcgcaaacgacctgctggcttccgacatctttgccccccccgtctccgagcccagcggccaggcatcccccacagggcagcctactgctctgcaaccaaatccgctggatctatttaaaacttccgctccagctccagtcggcccattggtgggtctaggaggtgttaccgtgaccctccctcaggcggggccatggaacactgcgtcattggtttttaaccaaagcccctcaatggcgcctggagccatgatgggggggcaaccttcagggtttagtcagccggttatcttcgggacctctccggcagtgtccgggtggaatcaaccaagccctttcgctgccagtacccctccccccgtgcccgttgtgtggggtccgtctgcgtctgtcgcaccgaacgcctggtccaccacatctcctctcggaaatccctttcagtccaacatttttccagcacccgccgtgtccacccagccaccttcaatgcattcttcacttctggtgactcccccccaaccgcctccccgagctggcccccctaaggatatcagtagtgatgccttcaccgccctggatccattgggggacaaggaaatcaaggacgttaaagaaatgtttaaggactttcagctccgacagccgcctgcggtacctgcccgaaagggagaacagacatcatctgggactctctccgctttcgccagctatttcaatagcaaagtcggcattccacaggagaacgctgatcatgatgactttgacgccaaccagttgctcaataagatcaatgagccaccaaagcccgcccctcgccaggtgtctctgccggtgacaaagagtactgataatgcttttgaaaacccctttttcaaggacagtttcggctccagtcaggcctcggtagcgagttcccagcctgtgagcagtgagatgtaccgtgatccttttggcaatccgtttgcatag

SEQ ID NO: 87541 - DNA, 204 bp, Artificial Sequence
  derived and/or modified sequence
atgagcaacgaggtggagaccagcgccaccaacggccagcccgaccagcaagctgccccgaaagccccctccaaaaaagagaagaagaaggggccggagaaaaccgacgaatacttattggctagatttaaaggtgacggcgtgaagtacaaggctaaactgatagggattgacgatgtgcccgacgctagaggtgacaaatag

SEQ ID NO: 87542 - DNA, 231 bp, Artificial Sequence
  derived and/or modified sequence
atgagcaacgaggtggagaccagcgccaccaacggccagcccgaccaacaggccgcaccaaaggccccatctaaaaaggagaagaagaaagggcccgagaagaccgacgagtatctcctggcgaggttcaaaggggacggggtgaaatacaaggcaaagctgattggaatagacgacgtgcccgatgccaggggggataaaatgtctcaggattcgatgatgaaactgtag

SEQ ID NO: 87543 - DNA, 2250 bp, Artificial Sequence
  derived and/or modified sequence
atgagcaacgaggtggagaccagcgccaccaacggccagcccgaccagcaggcagcccctaaggctcccagtaagaaggagaaaaaaaaaggtccagaaaagactgacgagtatttgctggccaggtttaagggcgacggggtaaagtacaaggccaagctgattggtatcgacgacgtgcccgatgccaggggtgacaagatgtctcaggattcaatgatgaagctgaaaggaatggcagccgcagggaggtctcagggccaacacaaacagcggatctgggttaatatcagtctctccggtatcaagatcattgacgagaagaccggcgttattgaacacgaacaccccgtaaacaagatcagctttattgcacgagatgttaccgataatcgagcctttgggtatgtttgcggaggggaagggcagcatcagttctttgccatcaagacggggcagcaggcagaacctctggtggtcgatctcaaggatctcttccaggtaatctataacgtcaagaagaaagaagaagaaaagaagaaaatcgaggaggcgagcaaggcggtggagaatgggtccgaggcattaatgatacttgacgatcagactaacaagcttaagtcggagtccaaagacattctgctggtcgacctgaattcagagatcgacacgaaccagaactcactacgcgagaaccctttcctgaccaacggcatcacgtcctgctctctaccccgccctacgccccaagcgagcttcctccccgaaaatgccttttcagccaatctgaacttttttccaactcccaatcccgaccctttccgggatgatccattcacccagcctgatcagagtacgccctcatccttcgatagcctgaaatctcctgatcagaagaaagagaattcaagttcgagtagcacacctctctccaatggaccgcttaatggggatgtggactattttggccagcaatttgatcagatttcaaaccgcacaggcaagcaggaggcccaggccggaccatggccattttctagcagtcagacacagcctgccgtgaggacgcagaatggtgtctccgaacgggagcagaacggtttttccgttaaatcctctcccaatccattcgtgggaagccctccaaagggactgtctatccagaacggagttaagcaggatctagaatcatctgtacaatcctcaccgcacgacagcattgcaatcatccccccaccccagagcacaaaaccgggacgcggcagaaggacagccaagagcagcgccaatgatcttctggcctctgacatctttgcacctccagtctcagagccttcaggccaggcgtcccctacaggccagcctacagctctgcagcccaaccctttagatttgttcaaaacctccgcccccgctcctgtgggtccattagtcggattgggtggtgtgacagttacactcccacaggcaggaccttggaatacggcctcattagtgtttaaccagtctcctagcatggccccaggcgccatgatgggtggccagcctagtggattctctcagcctgtaattttcggaacttctccggccgtgtctggatggaaccagcccagcccttttgccgcaagtacaccaccaccagtcccagtggtctggggtccatccgcctcggtcgcacctaacgcgtggagcaccaccagtcccctgggcaacccgttccaaagtaatatcttccccgcacctgccgtgtctacacaacctccctccatgcatagtagtctactggttactcctcctcagccaccaccgcgggcaggacctcccaaggacatcagcagcgacgcatttacggctctggatccgcttggcgataaagagataaaagacgttaaggagatgttcaaggacttccaacttcggcagccccccgccgtccctgccaggaagggggagcaaacctcttcaggaaccttgtccgcttttgcatcttatttcaattcgaaagtgggtatcccacaagaaaatgccgaccacgacgattttgacgcgaaccagctgttaaataaaataaacgagcctcccaagcctgcgccaagacaggtgagcctgcccgtgaccaaaagcactgacaatgccttcgagaaccccttcttcaaggatagctttggatcctcccaggcgagcgtagcgtcttcccagcctgtgagttctgagatgtacagggaccctttcggaaacccgttcgcctag

SEQ ID NO: 87544 - DNA, 1659 bp, Artificial Sequence
  derived and/or modified sequence
atgagtaatgaggtggaaacgagtgccaccaatggccagcctgaccagcaggctgcccctaaggccccaagcaaaaaggagaaaaaaaaaggcccagagaaaactgacgaatacttgttggctcgattcaagggggatggagtgaagtataaagctaagttaataggcattgatgatgtgcctgacgcacggggagacaaaatgtcacaggactccatgatgaagctgaaagggatggccgcagcagggaggtctcagggccagcacaagcagaggatctgggtaaatatttctctgtctggaattaagatcatagatgaaaagacaggtgtgattgaacatgagcaccctgtgaataaaatctcctttattgctcgggacgtgactgacaaccgggctttcggatacgtctgtggcggagaaggacagcaccagttctttgccattaagacaggccagcaggccgagcccttggtggtggacctcaaggatctatttcaagtcatctataatgtcaagaagaaggaggaggagaagaagaaaatagaggaggctagcaaggccgtggagaacggctccgaggctctgatgattcttgacgaccagaccaacaaattgaagagtggggtggaccagatggacctgtttggtgacatgtctacacccccagacctgaactcccccacctctagcgccaatgatctcttagcaagcgatattttcgcccctcccgtgtctgaaccttccggacaggcatctccgaccgggcagcctactgcgctgcagccaaatccgctggacctttttaagactagcgctcccgctccagtcggccctctcgtcggcttaggcggagttaccgtgactctgccccaggccggaccatggaacaccgcctccctcgtgttcaaccaatcaccttctatggctccgggtgccatgatgggtggccagccgtcagggtttagtcaacccgtgattttcgggacgagccctgccgtaagtggctggaatcagccctccccattcgctgcctctactccccctccagtccccgtcgtgtggggccctagtgcatcggtggctccaaatgcttggagcactacatccccgcttggtaatccttttcagagtaatatcttccccgctccagcagtgagcactcagcctcccagtatgcactcatccctgttagttacaccccctcagccacctccacgagccggaccccctaaggacatctcttctgatgccttcactgcccttgatccacttggcgataaagaaattaaagacgtgaaggaaatgttcaaggattttcagctgcgtcagccccctgccgtgcctgcccgtaagggggagcaaactagcagcggaacgctgagtgcatttgcctcctattttaatagcaaggtggggataccacaggaaaacgccgaccacgatgacttcgatgctaatcagctgctgaacaagatcaacgaacctcccaagccagcacccagacaagttagcctccctgtgactaaaagtaccgataacgcttttgagaacccattcttcaaggattcattcggatcttcacaggcaagcgtggccagctctcagcccgtatcctctgaaatgtatagggatcccttcgggaacccttttgcctag

SEQ ID NO: 87545 - DNA, 204 bp, Artificial Sequence
  derived and/or modified sequence
atgagcaacgaagtagaaacaagtgccacaaatggccaacctgaccaacaagctgccccaaaggccccttctaaaaaagaaaaaaaaaaggggcctgagaagacagatgagtacttacttgcccgtttcaagggggacggggtcaaatataaggccaaactgattggaattgacgacgtgcccgacgccagaggcgataagtag

SEQ ID NO: 87546 - DNA, 231 bp, Artificial Sequence
  derived and/or modified sequence
atgtccaacgaagtggagacatctgccacgaacggacaaccagatcagcaggcggctcccaaagccccttcaaagaaagagaaaaaaaagggcccagagaagaccgacgaatacctgctggcccgtttcaaaggcgacggcgtcaaatacaaagcaaagcttatcggcatcgacgatgtccccgacgcgcgaggcgacaaaatgtcgcaggactccatgatgaaattatag

SEQ ID NO: 87547 - DNA, 2250 bp, Artificial Sequence
  derived and/or modified sequence
atgtcgaacgaagttgaaacctcagccacaaacgggcagcccgaccaacaggcggcaccaaaggcacctagtaagaaagagaagaagaaaggccctgaaaaaacagatgaatacctgctagcaaggtttaaaggcgatggcgttaaatataaggccaagttaatcggcatagacgacgttccggacgcccgaggcgataaaatgtcccaggacagcatgatgaagctaaaggggatggctgccgcaggccgtagccagggccagcacaagcagagaatttgggttaatatctccttatctgggatcaagatcatagacgagaaaaccggagtgattgagcacgagcatcccgtgaataaaatttcatttattgcgagagatgtgacagacaatcgggcattcgggtacgtttgcggtggtgagggtcaacatcagttcttcgctattaagaccggtcagcaggccgagcccctcgtggttgacctgaaggatctttttcaggtaatatacaacgtcaagaagaaggaagaggagaaaaagaaaatcgaggaagcctcaaaagcagtcgagaatgggtcagaagcgctaatgattctagacgatcaaacgaacaagttaaagagcgagtccaaggatattcttctggttgacttgaactccgagattgacacaaaccaaaactcgctgcgagagaacccgtttcttactaatggcattacgagctgcagtctccctcgaccaacgccgcaggcgagtttcttgccagaaaacgcctttagcgccaatttgaatttctttccaacacccaatccagacccttttcgggacgacccatttactcaacctgaccaatccacgccatcctcctttgactctctgaaatctcccgatcaaaagaaggagaactcaagctctagctctacacctctttccaatggcccattgaatggagacgtggattatttcgggcaacagtttgatcagatcagcaataggaccggaaagcaagaggcacaagctgggccttggccctttagctccagccagactcagcccgcagttaggactcagaacggcgttagcgagcgggagcagaatggcttctctgttaaaagctctcctaatccattcgttggatcaccaccaaagggactttccattcaaaacggtgtaaagcaggacctcgagtcttcggtgcagtcctctccccacgattccattgcaattatccccccaccgcagagtacaaaacccggacgaggtagacgcacagctaaatcatccgctaacgatctcctggctagcgacatttttgctccccctgtgagcgagcccagcggccaagcgtctcccaccggacagcccaccgccctgcaaccaaaccctctcgatctgttcaaaacatccgctcctgcgccagtcggcccacttgtgggactcggtggagtcactgtgacactaccacaggctggcccatggaatactgcatccttggtttttaatcagagtccttctatggcgcctggggcaatgatggggggacaaccttcaggttttagtcaacccgttatatttggaacttctcccgcagtttctggatggaaccagccatcgccgtttgccgcatccactccaccacccgttcccgtagtttggggtccaagcgcctcggtggctcctaatgcttggagtaccacatctccactgggaaaccccttccagagcaatatctttcctgcacccgctgtgtctactcagccaccatctatgcacagtagtttgcttgtgacgccacctcagccccctcctcgcgctggcccaccaaaggatatctcaagtgatgcatttaccgccttggatcccctaggcgataaggaaatcaaggacgtcaaggagatgtttaaggactttcagttaagacagcctccagctgtgcctgcccgtaaaggggagcagacatcgagtggcaccctgagtgcattcgcctcctacttcaactctaaggtgggaattccgcaggagaatgctgaccatgatgacttcgacgccaatcagctgctgaacaagattaacgagccccctaaacccgctccgcgtcaggtctcacttccagtgaccaagtctaccgataacgcattcgaaaatccgttttttaaagatagcttcggcagcagtcaggcaagtgtagcctcctctcaaccggttagctccgagatgtacagggaccccttcgggaatcctttcgcttag

SEQ ID NO: 87548 - DNA, 1659 bp, Artificial Sequence
  derived and/or modified sequence
atgagcaacgaggtggagaccagcgccaccaacggccagcccgaccagcaggccgcccccaaggcccccagcaagaaggagaagaagaagggccccgagaagaccgacgagtacctgctggccagattcaagggcgacggcgtgaagtacaaggccaagctgatcggcatcgacgacgtgcccgacgccagaggcgacaagatgagccaggacagcatgatgaagctgaagggcatggccgccgccggcagaagccagggccagcacaagcagagaatctgggtgaacatcagcctgagcggcatcaagatcatcgacgagaagaccggcgtgatcgagcacgagcaccccgtgaacaagatcagcttcatcgccagagacgtgaccgacaacagagccttcggctacgtgtgcggcggcgagggccagcaccagttcttcgccatcaagaccggccagcaggccgagcccctggtggtggacctgaaggacctgttccaggtgatctacaacgtgaagaagaaggaggaggagaagaagaagatcgaggaggccagcaaggccgtggagaacggcagcgaggccctgatgatcctggacgaccagaccaacaagctgaagagcggcgtggaccagatggacctgttcggcgacatgagcaccccccccgacctgaacagccccaccagcagcgccaacgacctgctggccagcgacatcttcgccccccccgtgagcgagcccagcggccaggccagccccaccggccagcccaccgccctgcagcccaaccccctggacctgttcaagaccagcgcccccgcccccgtgggccccctggtgggcctgggcggcgtgaccgtgaccctgccccaggccggcccctggaacaccgccagcctggtgttcaaccagagccccagcatggcccccggcgccatgatgggcggccagcccagcggcttcagccagcccgtgatcttcggcaccagccccgccgtgagcggctggaaccagcccagccccttcgccgccagcacccccccccccgtgcccgtggtgtggggccccagcgccagcgtggcccccaacgcctggagcaccaccagccccctgggcaaccccttccagagcaacatcttccccgcccccgccgtgagcacccagccccccagcatgcacagcagcctgctggtgacccccccccagcccccccccagagccggcccccccaaggacatcagcagcgacgccttcaccgccctggaccccctgggcgacaaggagatcaaggacgtgaaggagatgttcaaggacttccagctgagacagccccccgccgtgcccgccagaaagggcgagcagaccagcagcggcaccctgagcgccttcgccagctacttcaacagcaaggtgggcatcccccaggagaacgccgaccacgacgacttcgacgccaaccagctgctgaacaagatcaacgagccccccaagcccgcccccagacaggtgagcctgcccgtgaccaagagcaccgacaacgccttcgagaaccccttcttcaaggacagcttcggcagcagccaggccagcgtggccagcagccagcccgtgagcagcgagatgtacagagaccccttcggcaaccccttcgcctag

SEQ ID NO: 87549 - DNA, 204 bp, Artificial Sequence
  derived and/or modified sequence
atgagcaacgaggtggagaccagcgccaccaacggccagcccgaccagcaggccgcccccaaggcccccagcaagaaggagaagaagaagggccccgagaagaccgacgagtacctgctggccagattcaagggcgacggcgtgaagtacaaggccaagctgatcggcatcgacgacgtgcccgacgccagaggcgacaagtag

SEQ ID NO: 87550 - DNA, 231 bp, Artificial Sequence
  derived and/or modified sequence
atgagcaacgaggtggagaccagcgccaccaacggccagcccgaccagcaggccgcccccaaggcccccagcaagaaggagaagaagaagggccccgagaagaccgacgagtacctgctggccagattcaagggcgacggcgtgaagtacaaggccaagctgatcggcatcgacgacgtgcccgacgccagaggcgacaagatgagccaggacagcatgatgaagctgtag

SEQ ID NO: 87551 - DNA, 2250 bp, Artificial Sequence
  derived and/or modified sequence
atgagcaacgaggtggagaccagcgccaccaacggccagcccgaccagcaggccgcccccaaggcccccagcaagaaggagaagaagaagggccccgagaagaccgacgagtacctgctggccagattcaagggcgacggcgtgaagtacaaggccaagctgatcggcatcgacgacgtgcccgacgccagaggcgacaagatgagccaggacagcatgatgaagctgaagggcatggccgccgccggcagaagccagggccagcacaagcagagaatctgggtgaacatcagcctgagcggcatcaagatcatcgacgagaagaccggcgtgatcgagcacgagcaccccgtgaacaagatcagcttcatcgccagagacgtgaccgacaacagagccttcggctacgtgtgcggcggcgagggccagcaccagttcttcgccatcaagaccggccagcaggccgagcccctggtggtggacctgaaggacctgttccaggtgatctacaacgtgaagaagaaggaggaggagaagaagaagatcgaggaggccagcaaggccgtggagaacggcagcgaggccctgatgatcctggacgaccagaccaacaagctgaagagcgagagcaaggacatcctgctggtggacctgaacagcgagatcgacaccaaccagaacagcctgagagagaaccccttcctgaccaacggcatcaccagctgcagcctgcccagacccaccccccaggccagcttcctgcccgagaacgccttcagcgccaacctgaacttcttccccacccccaaccccgaccccttcagagacgaccccttcacccagcccgaccagagcacccccagcagcttcgacagcctgaagagccccgaccagaagaaggagaacagcagcagcagcagcacccccctgagcaacggccccctgaacggcgacgtggactacttcggccagcagttcgaccagatcagcaacagaaccggcaagcaggaggcccaggccggcccctggcccttcagcagcagccagacccagcccgccgtgagaacccagaacggcgtgagcgagagagagcagaacggcttcagcgtgaagagcagccccaaccccttcgtgggcagcccccccaagggcctgagcatccagaacggcgtgaagcaggacctggagagcagcgtgcagagcagcccccacgacagcatcgccatcatcccccccccccagagcaccaagcccggcagaggcagaagaaccgccaagagcagcgccaacgacctgctggccagcgacatcttcgccccccccgtgagcgagcccagcggccaggccagccccaccggccagcccaccgccctgcagcccaaccccctggacctgttcaagaccagcgcccccgcccccgtgggccccctggtgggcctgggcggcgtgaccgtgaccctgccccaggccggcccctggaacaccgccagcctggtgttcaaccagagccccagcatggcccccggcgccatgatgggcggccagcccagcggcttcagccagcccgtgatcttcggcaccagccccgccgtgagcggctggaaccagcccagccccttcgccgccagcacccccccccccgtgcccgtggtgtggggccccagcgccagcgtggcccccaacgcctggagcaccaccagccccctgggcaaccccttccagagcaacatcttccccgcccccgccgtgagcacccagccccccagcatgcacagcagcctgctggtgacccccccccagcccccccccagagccggcccccccaaggacatcagcagcgacgccttcaccgccctggaccccctgggcgacaaggagatcaaggacgtgaaggagatgttcaaggacttccagctgagacagccccccgccgtgcccgccagaaagggcgagcagaccagcagcggcaccctgagcgccttcgccagctacttcaacagcaaggtgggcatcccccaggagaacgccgaccacgacgacttcgacgccaaccagctgctgaacaagatcaacgagccccccaagcccgcccccagacaggtgagcctgcccgtgaccaagagcaccgacaacgccttcgagaaccccttcttcaaggacagcttcggcagcagccaggccagcgtggccagcagccagcccgtgagcagcgagatgtacagagaccccttcggcaaccccttcgcctag

SEQ ID NO: 87552 - DNA, 3690 bp, Artificial Sequence
  derived and/or modified sequence
agtcctcagctgccagcatctgattagaaccatatctctcgccgggagtggccgcgcggctccgaagctcccggccggcggctatttaagcgaggcccgccgcatccgctgcgctgtagcctggaggctccgggcgcggggaagtcatgctcgcttcacggaggcaatagctagccggtgtctgtgggaggttatgtttatttgagacttctccatcgggatcgcctggtgtcaccaagtgtccactggtactgaggtttgctgcctgccttcttgccatgtctaacgaagtagaaacaagtgcaaccaatggtcagcccgaccaacaggccgcaccaaaagcaccctcaaagaaggaaaaaaagaaaggccctgaaaagacagatgaatatctcttagcaaggttcaaaggcgatggtgtaaaatataaggccaagctgattggcattgatgatgtgccagatgcaagaggggataaaatgagccaagactctatgatgaaactaaagggaatggcggcagctggtcggtctcagggacaacacaaacaaaggatctgggtcaacatttccctttctgggataaaaataattgatgagaaaactggggtaatagagcatgaacatccagtaaataagatttctttcattgcccgtgatgtgacagacaaccgggcatttggttacgtgtgtggaggagaaggccagcatcagttttttgccataaaaaccgggcaacaggctgaaccattagttgttgatcttaaagacctttttcaagttatctataatgtaaagaaaaaggaagaagaaaagaaaaagatagaggaagccagcaaagcagttgagaatgggagtgaggccctaatgattctagatgaccaaactaacaaactgaaatcgggtgttgaccagatggatttgtttggggacatgtctacacctcctgacctaaatagtccaacatcttcagccaatgacttgcttgcatcagacatctttgctcctcccgtctcagaaccttcaggccaggcgtcacccacaggacaacctacagccctgcagcccaaccctctggatctcttcaaaacaagtgctcctgccccagtggggcccctggtgggtctaggtggtgtaactgtcacactccctcaggcaggaccatggaacacagcatctttggtcttcaatcagtccccttcaatggctccgggagccatgatgggtggtcaaccttcaggttttagtcagcccgtcatttttggtacaagtccagctgtttcaggttggaaccagccttcaccctttgcagcctcaactccccctccagtgcctgttgtctggggcccttctgcatctgtggcacccaatgcttggtcaacaacaagccctttggggaatccttttcagagcaatatttttccagctcctgctgtgtccactcagcccccatccatgcactcctctctcctggtcactcctcctcagccacctcccagagctggccctcccaaggacatctccagtgatgccttcactgccttagacccacttggggataaagagatcaaggatgtgaaagaaatgtttaaggatttccaactgcggcagccacctgctgtgcccgcgcggaagggagagcagacttcttctgggactttgagtgcctttgccagttatttcaacagcaaggttggcattcctcaggagaatgcagaccatgatgactttgatgctaatcaactattgaacaagatcaatgaaccaccaaagccagctcccagacaagtttccctgccagttaccaaatctactgacaatgcatttgagaaccctttctttaaagattcttttggttcatcacaagcctctgtggcttcttctcaacctgtatcttctgagatgtatagggatccatttggaaatccttttgcctaaattctgaacttggtctgcagaccatccagaggaataaaaaggttggccttagtagtcaaaaacaaagctgatagccagacacgttctgatttctgcccttgttccagctttgacgtattatctgttgccttatttctcattgcctcttctacttgtaaaatgcttttcactttctgtctaggttaaagctaaactgaatctatggctttaaataaattaagatcctaaactctctagcttaagtgtaaatgaagtacagtagtttccctactgaaccctgcctcttgtgtccctggaaccttctagaacacctgccttctaccctctggttgggagatgcagccaccacatcccttcatatcatactgttttgaataaattttcaaatccttattgttcagagttgtttgggggttctgtttcagagcataaaacctaaaggttatagtagaacaaggcaccttcttaaaagaaatcttgcttcagaccatcagttacagagaatttctaaagtaaaattgaagcaactacaacttctccttagacactttggaatctaaccacttaaggacctttttaaagagatagcttctcttctttctgaagatcaatttctcccaaggccaagattgtccttttctcccatttcttgctagctattgcaaatgagggaagaacattattcatctctcctccccttttttttctgattcttttttcagtcagttttgctcctgggttcaagtagtattaccaccctttcacaagcaacagactctcacagggcaaaaaaaaaaaaaaatctaatgattcacagacagatctggagcctctcttcattctcagtaattgctagtcccaagaactagaattgcaaatgggcacaacctatatccttcctgtggaagaggaggccactctcttgagctgaagttccagaagagcagttaatgttcaagagaaattgaactcaactcagcaacaaaggactctattttgaagagcaacatatcacaaagctaaatgtgattgtgccaaacacattaggtgcttatttggggtcatgctaggcctttatcaagtaactggaaaacttttcttgcagccacaatctcaatgtcgttagtaggaagataagaggggagaaaaagctgtagaacaaatgtttggggttaccattgaaaatctaatgtctgcaatatttttctcctcacaacttggaaacgttcccagttcattttcagtcctgttgtgagcacagttctgaagggtttattattgtcaaaataagttttgttttgttttgtttatgttgggtttttaatgttgtctcttgacccttaatgctcaggttcttgtgggagttaatcagccacatccaatgttaccttgagggggaagaagagggtgatgctcagaagctaaacaagacaggggccacatgaccctctattgattagccccaagtagaaagtcctgtggttttatgtttaatggtaatagttgatcatatatggcataattttctatcagcttcctactcagtcactataaacacagacttgaaatagtactttaaatgtccaaatacctaaatgtgctaaactggaggtaactatttctaggtagttgaatttttgaaagtcatgatcagccacacaactgttttgtacatacttattttctcatgcacttttctgtatgcaaataaagctataaatttactcatttcaataaactggagtggcagaat

SEQ ID NO: 87553 - DNA, 561 bp, Artificial Sequence
  derived and/or modified sequence
gctgtagcctggaggctccgggcgcggggaagtcatgctcgcttcacggaggcaatagctagccgtttttgtttggaaggaagagagccgctctgtaaaccgagaagagcagaaacaagcttccagacacatggaaagacttaaaaattatggaggggcgacttcacgaatagtaaatgttgctattgctctataaagtgacttcatgaaaaaatttctggccttagtcaggcaaagcaggggcatgggggagaaggaggtgtctgtgggaggttatgtttatttgagacttctccatcgggatcgcctggtgtcaccaagtgtccactggtactgaggtttgctgcctgccttcttgccatgtctaacgaagtagaaacaagtgcaaccaatggtcagcccgaccaacaggccgcaccaaaagcaccctcaaagaaggaaaaaaagaaaggccctgaaaagacagatgaatatctcttagcaaggttcaaaggcgatggtgtaaaatataaggccaagctgattggcattgatgatgtgccagatgcaagaggggataaa

SEQ ID NO: 87554 - DNA, 551 bp, Artificial Sequence
  derived and/or modified sequence
gcacacatgaaacatggcaatgttcagggcagcatgtgattgactgccaaagtgtctcgagcaggaagtaccaagggaggatggagatggtaataatcagggttgggtggagaatatctgaggaaactgcacttgatttgggccttgaagagtaattgactggatttagatttatctagaaaggtcgttcccagcagaagcaacaagaacaacaagcttggaggtgtctgtgggaggttatgtttatttgagacttctccatcgggatcgcctggtgtcaccaagtgtccactggtactgaggtttgctgcctgccttcttgccatgtctaacgaagtagaaacaagtgcaaccaatggtcagcccgaccaacaggccgcaccaaaagcaccctcaaagaaggaaaaaaagaaaggccctgaaaagacagatgaatatctcttagcaaggttcaaaggcgatggtgtaaaatataaggccaagctgattggcattgatgatgtgccagatgcaagaggggataaaatgagccaagactctatgatgaaact

SEQ ID NO: 87555 - DNA, 651 bp, Artificial Sequence
  derived and/or modified sequence
ctcagctgccagcatctgattagaaccatatctctcgccgggagtggccgcgcggctccgaagctcccggccggcggctatttaagcgaggcccgccgcatccgctgcgctgtagcctggaggctccgggcgcggggaagtcatgctcgcttcacggaggcaatagctagccgtgcaacagaaataaaccaaatgtgtttgaacatatgtcagagggctgacataatcatatgaagaatgctataccagtttggctttgggacgaaatgtgaatctactagggcaacatacaactgccctctgagtcagaagatcagaagttgctgtggctacacataattctggggtacatgtggagaacatgcagttttgttacataggtatacatgtgccatggtggtttgctgcatccatcaacccatcacctacattaggtgtctgtgggaggttatgtttatttgagacttctccatcgggatcgcctggtgtcaccaagtgtccactggtactgaggtttgctgcctgccttcttgccatgtctaacgaagtagaaacaagtgcaaccaatggtcagcccgaccaacaggccgcaccaaaagcaccctcaaagaaggaaaaaaagaaaggccctgaaaagacagatgaatatct

SEQ ID NO: 87556 - DNA, 4534 bp, Artificial Sequence
  derived and/or modified sequence
gtccttatttgcacccgccccccgcccgcgtcggtctggggcttttgacttctccccgaacacatttcccctcccgtcgctgggtccctgcgatcgcccccagctggtggggctcgcggagctcaggggagcggggtcctctgcgccgctgcagcgcgagttaataaacagttaagtttggaagactctgcagacacgttgagggggagttaccaagcccaggcagcaaaaacatcctggcacattcctggggagtcctcagctgccagcatctgattagaaccatatctctcgccgggagtggccgcgcggctccgaagctcccggccggcggctatttaagcgaggcccgccgcatccgctgcgctgtagcctggaggctccgggcgcggggaagtcatgctcgcttcacggaggcaatagctagccggtgtctgtgggaggttatgtttatttgagacttctccatcgggatcgcctggtgtcaccaagtgtccactggtactgaggtttgctgcctgccttcttgccatgtctaacgaagtagaaacaagtgcaaccaatggtcagcccgaccaacaggccgcaccaaaagcaccctcaaagaaggaaaaaaagaaaggccctgaaaagacagatgaatatctcttagcaaggttcaaaggcgatggtgtaaaatataaggccaagctgattggcattgatgatgtgccagatgcaagaggggataaaatgagccaagactctatgatgaaactaaagggaatggcggcagctggtcggtctcagggacaacacaaacaaaggatctgggtcaacatttccctttctgggataaaaataattgatgagaaaactggggtaatagagcatgaacatccagtaaataagatttctttcattgcccgtgatgtgacagacaaccgggcatttggttacgtgtgtggaggagaaggccagcatcagttttttgccataaaaaccgggcaacaggctgaaccattagttgttgatcttaaagacctttttcaagttatctataatgtaaagaaaaaggaagaagaaaagaaaaagatagaggaagccagcaaagcagttgagaatgggagtgaggccctaatgattctagatgaccaaactaacaaactgaaatcggaaagcaaagatatcctgttagtggatctaaactctgaaatcgacaccaatcagaattctttaagagaaaatccattcttaacaaacggcatcacctcctgttctcttcctcgaccaacgcctcaggcatccttcttgcctgaaaatgccttttctgccaatctcaacttctttcccacccctaatcctgatcctttccgtgacgatcctttcacacagccagaccaatcgacaccttcttcgtttgattctctcaaatctccagatcagaagaaagagaattcgagtagctcgtctactccgctgagtaatgggcccctgaatggtgatgttgactactttggtcagcaatttgaccagatctctaaccggactggcaaacaggaagctcaggcaggcccatggcccttttcaagttcgcaaacccagccagcagtgagaactcaaaatggggtatctgaaagagaacagaacggcttctctgtcaaatcctccccgaacccttttgtgggaagccctcccaaaggactgtccatacagaatggcgtaaagcaggacttggaaagctctgtccagtcctcaccacatgactccatagccattatcccacctccacaaagtaccaaaccaggaagaggcagaaggactgctaagtcttcagccaatgacttgcttgcatcagacatctttgctcctcccgtctcagaaccttcaggccaggcgtcacccacaggacaacctacagccctgcagcccaaccctctggatctcttcaaaacaagtgctcctgccccagtggggcccctggtgggtctaggtggtgtaactgtcacactccctcaggcaggaccatggaacacagcatctttggtcttcaatcagtccccttcaatggctccgggagccatgatgggtggtcaaccttcaggttttagtcagcccgtcatttttggtacaagtccagctgtttcaggttggaaccagccttcaccctttgcagcctcaactccccctccagtgcctgttgtctggggcccttctgcatctgtggcacccaatgcttggtcaacaacaagccctttggggaatccttttcagagcaatatttttccagctcctgctgtgtccactcagcccccatccatgcactcctctctcctggtcactcctcctcagccacctcccagagctggccctcccaaggacatctccagtgatgccttcactgccttagacccacttggggataaagagatcaaggatgtgaaagaaatgtttaaggatttccaactgcggcagccacctgctgtgcccgcgcggaagggagagcagacttcttctgggactttgagtgcctttgccagttatttcaacagcaaggttggcattcctcaggagaatgcagaccatgatgactttgatgctaatcaactattgaacaagatcaatgaaccaccaaagccagctcccagacaagtttccctgccagttaccaaatctactgacaatgcatttgagaaccctttctttaaagattcttttggttcatcacaagcctctgtggcttcttctcaacctgtatcttctgagatgtatagggatccatttggaaatccttttgcctaaattctgaacttggtctgcagaccatccagaggaataaaaaggttggccttagtagtcaaaaacaaagctgatagccagacacgttctgatttctgcccttgttccagctttgacgtattatctgttgccttatttctcattgcctcttctacttgtaaaatgcttttcactttctgtctaggttaaagctaaactgaatctatggctttaaataaattaagatcctaaactctctagcttaagtgtaaatgaagtacagtagtttccctactgaaccctgcctcttgtgtccctggaaccttctagaacacctgccttctaccctctggttgggagatgcagccaccacatcccttcatatcatactgttttgaataaattttcaaatccttattgttcagagttgtttgggggttctgtttcagagcataaaacctaaaggttatagtagaacaaggcaccttcttaaaagaaatcttgcttcagaccatcagttacagagaatttctaaagtaaaattgaagcaactacaacttctccttagacactttggaatctaaccacttaaggacctttttaaagagatagcttctcttctttctgaagatcaatttctcccaaggccaagattgtccttttctcccatttcttgctagctattgcaaatgagggaagaacattattcatctctcctccccttttttttctgattcttttttcagtcagttttgctcctgggttcaagtagtattaccaccctttcacaagcaacagactctcacagggcaaaaaaaaaaaaaaatctaatgattcacagacagatctggagcctctcttcattctcagtaattgctagtcccaagaactagaattgcaaatgggcacaacctatatccttcctgtggaagaggaggccactctcttgagctgaagttccagaagagcagttaatgttcaagagaaattgaactcaactcagcaacaaaggactctattttgaagagcaacatatcacaaagctaaatgtgattgtgccaaacacattaggtgcttatttggggtcatgctaggcctttatcaagtaactggaaaacttttcttgcagccacaatctcaatgtcgttagtaggaagataagaggggagaaaaagctgtagaacaaatgtttggggttaccattgaaaatctaatgtctgcaatatttttctcctcacaacttggaaacgttcccagttcattttcagtcctgttgtgagcacagttctgaagggtttattattgtcaaaataagttttgttttgttttgtttatgttgggtttttaatgttgtctcttgacccttaatgctcaggttcttgtgggagttaatcagccacatccaatgttaccttgagggggaagaagagggtgatgctcagaagctaaacaagacaggggccacatgaccctctattgattagccccaagtagaaagtcctgtggttttatgtttaatggtaatagttgatcatatatggcataattttctatcagcttcctactcagtcactataaacacagacttgaaatagtactttaaatgtccaaatacctaaatgtgctaaactggaggtaactatttctaggtagttgaatttttgaaagtcatgatcagccacacaactgttttgtacatacttattttctcatgcacttttctgtatgcaaataaagctataaatttactcatttcaataaactggagtggcagaat

SEQ ID NO: 87557 - protein, 405 aa, Artificial Sequence
  derived and/or modified sequence
MNYQQQLANSAAIRAEIQRFESVHPNIYSIYELLERVEEPVLQNQIREHVIAIEDAFVNSQEWTLSRSVPELKVGIVGNLASGKSALVHRYLTGTYVQEESPEGGRFKKEIVVDGQSYLLLIRDEGGPPEAQFAMWVDAVIFVFSLEDEISFQTVYHYYSRMANYRNTSEIPLVLVGTQDAISSANPRVIDDARARKLSNDLKRCTYYETCATYGLNVERVFQDVAQKIVATRKKQQLSIGPCKSLPNSPSHSSVCSAQVSAVHISQTSNGGGSLSDYSSSVPSTPSTSQKELRIDVPPTANTPTPVRKQSKRRSNLFTSRKGSDPDKEKKGLESRADSIGSGRAIPIKQGLPFFVLALTASTYLRPAGARARQSSPWPGPRGGQTSPHCAEGPQSAQLSGAMMN

SEQ ID NO: 87558 - DNA, 1218 bp, Artificial Sequence
  derived and/or modified sequence
atgaactaccagcagcagctggccaacagcgccgccatcagagccgagatccagagattcgagagcgtgcaccccaacatctacagcatctacgagctgctggagagagtggaggagcccgtgctgcagaaccagatcagagagcacgtgatcgccatcgaggacgccttcgtgaacagccaggagtggaccctgagcagaagcgtgcccgagctgaaggtgggcatcgtgggcaacctggccagcggcaagagcgccctggtgcacagatacctgaccggcacctacgtgcaggaggagagccccgagggcggcagattcaagaaggagatcgtggtggacggccagagctacctgctgctgatcagagacgagggcggcccccccgaggcccagttcgccatgtgggtggacgccgtgatcttcgtgttcagcctggaggacgagatcagcttccagaccgtgtaccactactacagcagaatggccaactacagaaacaccagcgagatccccctggtgctggtgggcacccaggacgccatcagcagcgccaaccccagagtgatcgacgacgccagagccagaaagctgagcaacgacctgaagagatgcacctactacgagacctgcgccacctacggcctgaacgtggagagagtgttccaggacgtggcccagaagatcgtggccaccagaaagaagcagcagctgagcatcggcccctgcaagagcctgcccaacagccccagccacagcagcgtgtgcagcgcccaggtgagcgccgtgcacatcagccagaccagcaacggcggcggcagcctgagcgactacagcagcagcgtgcccagcacccccagcaccagccagaaggagctgagaatcgacgtgccccccaccgccaacacccccacccccgtgagaaagcagagcaagagaagaagcaacctgttcaccagcagaaagggcagcgaccccgacaaggagaagaagggcctggagagcagagccgacagcatcggcagcggcagagccatccccatcaagcagggcctgcccttcttcgtgctggccctgaccgccagcacctacctgagacccgccggcgccagagccagacagagcagcccctggcccggccccagaggcggccagaccagcccccactgcgccgagggcccccagagcgcccagctgagcggcgccatgatgaactag

SEQ ID NO: 87559 - DNA, 1218 bp, Artificial Sequence
  derived and/or modified sequence
atgaactaccagcagcagctcgccaacagcgctgcgatccgcgcagagattcagcggttcgaatctgtccaccccaatatatatagcatctacgagctgcttgagcgcgtcgaagaaccagtgctccaaaatcagattcgggaacatgtaattgctatcgaagacgcattcgtcaactcacaggaatggaccttgtcgcgcagtgtgcccgagctaaaagtaggcatcgtcggtaacctcgcaagtgggaagtccgcgctggtgcatcgttacctgactggcacttacgtgcaggaggaaagcccagaaggcggcagatttaaaaaagagatcgtcgtagacgggcagagctacttgttattgatcagagatgagggggggccaccagaagcccagttcgccatgtgggttgacgcggtgatctttgtgttttccctcgaagatgagatctcatttcagacagtgtatcactattatagccgaatggcaaactatcgtaacacctcagagattccgcttgtgctcgtgggcactcaagacgccatttctagtgctaaccctcgcgtgattgatgatgcacgcgcaagaaagcttagcaacgatcttaagcgatgcacctattatgagacctgcgcgacctatggtctgaacgtcgaacgcgtcttccaggatgtggcccaaaaaatcgtggccactagaaaaaagcagcagttaagcataggcccatgcaaaagtctgcctaactcgcccagccatagcagtgtctgcagcgcccaagtgtcagccgtgcatatctcacagaccagtaacggtggagggtccctcagcgactatagctctagcgttccttccacccccagtacatctcagaaagagctgcgcatcgacgttccccctaccgctaatacgccaactcccgtacgtaagcagtccaaacgaaggagcaacctcttcacgagcagaaagggctctgaccccgacaaggaaaagaagggattggagagcagggccgattccattggttctgggcgcgctatccctattaaacagggattacctttcttcgtgctggctttaaccgctagtacttatcttcgtcctgccggggccagggcccgccaatcatcgccctggccaggcccgagagggggacagacctcccctcactgtgccgagggtccccagtcagctcaactatccggcgccatgatgaattag

SEQ ID NO: 87560 - DNA, 1218 bp, Artificial Sequence
  derived and/or modified sequence
atgaactaccagcagcagctggccaacagcgctgccatccgggcagagatccagagatttgagagcgtgcaccccaacatctacagcatctatgagctgctggagcgggtggaggagcctgtgctgcagaaccagatccgggagcacgtgattgccattgaagatgcctttgtgaacagccaggagtggaccctgagccgctctgtgcctgagctgaaggtgggcatcgtgggcaacctggccagcggcaagagcgccctggtgcaccgctacctgaccggcacctacgtgcaggaggagagccctgagggcggccgcttcaagaaggagatcgtggtggatggccagagctacctgctgctgatcagagatgagggcggccccccagaggcccagtttgccatgtgggtggatgctgtgatctttgtgttcagcctggaggatgagatctccttccagacagtgtaccactactacagcaggatggccaactacagaaacaccagcgagatccccctggtgctggtgggcacccaggatgccatcagcagcgccaacccccgggtgattgatgatgcccgggccaggaagctgagcaatgacctgaagcgctgcacctactatgagacctgtgccacctacggcctgaatgtggagagggtcttccaggatgtggcccagaagatcgtggccaccaggaagaagcagcagctgagcatcggcccctgcaagagcctgcccaacagccccagccacagctctgtgtgcagcgcccaggtgtctgctgtgcacatcagccagaccagcaatggaggcggcagcctgagtgactacagcagctctgtgcccagcacccccagcaccagccagaaggagctgagaattgatgtgcccccaacagccaacacccccacccctgtgaggaagcagagcaagagaagaagcaacctcttcaccagcaggaagggcagtgaccctgacaaggagaagaagggcctggagagcagagctgacagcatcggcagcggccgggccatccccatcaagcagggcctgcccttctttgtgctggccctgacagccagcacctacctgcggcctgctggggcccgggcccggcagagcagcccctggccaggcccccggggcggccagaccagcccccactgtgccgagggcccccagagcgcccagctgagcggggccatgatgaactag

SEQ ID NO: 87561 - DNA, 1218 bp, Artificial Sequence
  derived and/or modified sequence
atgaactaccagcagcagctggccaacagcgccgccatccgggccgaaatacagagattcgagagcgtgcaccccaacatctatagcatctatgaattgctggagcgggtcgaagaacctgttcttcaaaaccagattcgggaacatgtaatcgccattgaggacgcctttgtgaactcccaggaatggactctttcgcgcagtgtgcccgaactcaaggtcgggatcgtcgggaatcttgcatctggtaagtctgccctggtacacaggtatctaactgggacgtatgtgcaggaagagagtcctgaggggggtcggtttaagaaagagatagtagttgacggtcagtcctatcttttattgattagggacgaaggcggtccgcccgaagctcaattcgcgatgtgggtagatgccgtgatctttgtattttcattggaggacgagatttcatttcaaacagtttatcattattattctaggatggccaactaccgcaatacttcagaaattccactggtgttggtaggcacacaggacgctatttcaagtgcgaatccacgcgtgatcgatgatgctagggctcggaagttgagtaacgacctcaaaaggtgtacttattacgaaacttgcgctacatatggcttaaacgtagaacgcgttttccaggacgtagcccagaagattgtcgcaacacgtaaaaagcagcagctgtccattggcccctgcaaatctctgcccaactccccctcacactcctccgtatgttcagcacaagtgagcgcagtccatatatcacagaccagtaacggaggcggatccctctcggattatagctccagcgtgccttccaccccctcaacaagccaaaaagaactccggatcgatgtcccacccacagccaacacacccacccccgttagaaagcagagcaaacgacgtagtaatctgtttactagcaggaaagggagtgaccctgacaaggaaaagaaggggctagagtcccgagctgactctatcgggtcaggcagggcaattcctattaaacagggcctgccgttcttcgtgctcgcgctgaccgcatccacttacctgcgccccgcaggagcgagggcccgacaatctagcccttggccaggcccgagaggcggccagacttccccccactgcgctgaaggtcctcagtccgctcagctgtcaggggccatgatgaactag

SEQ ID NO: 87562 - DNA, 2165 bp, Artificial Sequence
  derived and/or modified sequence
ggcgctcggagcgggctccgcggcttgcaaggcgcctgcgactcggtcccaggtcggcgggcggcgcacggcgggctcgcgcgggggccccggcgcgccgggcggcgcagtacgcagcgcgcggacccacgccacggccaggagcccagagcagcgcggccacactgcccaggggtcggccctcggccccggcgctcggagcgcggcggctgcctgggctttaatggctgctccgcggagcagcgcctagggctggaaggcggctgcggctcaggaagtcacccgagcaagcctccttcggggccggccgcacccgccgcggcgcgctccatgggggcgcgctccccccgggcggcccgctgacccgggacgccggggcccgctcgctcgccggccgcgcgtcccggccatgaactgagcccgcgggccagccccgcgcctgctccgcccgcgcctttcttctcgcgcctcctccgcccgccgccggcgggcccggctccccgggggctgcggcgccccgggctcggcggcccgcgggccccggggcgcggggcggcggcggcggggggcgcgcggctccgggcgcggcgcctgcaccatgaactaccagcagcagctggccaactcggctgccatccgggccgagatccagcgcttcgagtcggtccaccccaacatctactccatctacgagctgctggagcgcgtggaggagccggtgctgcagaaccagatccgggagcacgtcatcgccatcgaagatgccttcgtgaacagccaggaatggacgctgagtcgatctgtcccggagctcaaagtgggaattgtgggtaacttggccagcggcaagtctgccctggtgcaccggtacctgacgggcacatatgtccaggaggagtctccggaaggtggcaggttcaagaaagagattgtcgttgatggacagagctatctgctgctgatcagagatgaagggggccccccggaggcgcagtttgccatgtgggtggacgctgttatatttgtcttcagcttggaggatgaaataagtttccagaccgtttaccactactacagtcgaatggccaactatcggaacacgagcgagattcctctggttctggtgggaacccaggatgccataagttctgctaacccgagggtcatcgatgacgccagggcgaggaagctctccaacgacctgaaacggtgcacgtactacgagacgtgtgctacatacgggctgaatgtggagagggtcttccaggacgttgcccagaagattgttgccacaaggaagaagcagcagctgtccataggaccctgcaagtcgctacctaattctcccagccattcctccgtctgttccgcgcaggtgtctgccgtgcacatcagccagacaagtaatggaggtgggagtttaagcgactattcctcctccgttccatcgactcccagcaccagccagaaggaacttcggatcgatgttcctcccactgccaacacgcccacgcccgttcgcaagcagtctaagcgccggtccaacctgttcacctctcggaaagggagcgacccagacaaagagaagaaaggcctggagagtcgtgcggacagcattgggagcggccgagccatcccaattaaacagggcctgcccttctttgtccttgcactgacagccagcacttatctcaggcctgctggagcccgtgcccgtcagtcctccccctggccagggccgaggggtggtcagaccagcccgcattgtgctgaaggcccacaatcagcccagctgtccggggccatgatgaattagcggtgggagttaacatagaggtgaactccagatcggccgatagcttgcaggccgctgctgtttgtcctgacttcagcgcatctctgatagacctttgacaccttccaacaaagaggttacaggagggagagctggagaaatggagcgctcctccagaaagttcggcaactcacaaaagaccccttaatttctatagcgggcaattcagtccacaaaggaaggaaatcaatgagcgtttacgctctttctttgaggaacctttttttaaagaaaaaaacatttactggcgctttgcatgttttgggtacaagcagtggtagaaacataaaacattaaaatccaagattga

SEQ ID NO: 87563 - DNA, 1218 bp, Artificial Sequence
  derived and/or modified sequence
atgaattaccaacaacaactcgcgaacagtgctgccattagggccgagatacagcgttttgagtctgttcaccccaatatttactccatatacgaactgttagaaagggtcgaggagccagttctgcagaaccagattagagagcatgtcatcgccatagaagacgccttcgtgaacagccaggagtggacgctctccagatcagtgcccgaactgaaggtagggattgtaggaaacctagcctcgggtaagtccgccctggtccaccggtatctgaccggcacatacgtgcaggaggaatctccagaaggtgggcgattcaagaaagaaattgtcgttgacggacaaagttatctactgctgataagggatgaaggaggaccgccagaagctcagtttgcgatgtgggtggatgcagtcatattcgtattctctctagaagatgaaatctcctttcagactgtgtaccactattactctcggatggctaactaccgaaataccagcgagatccctctcgtacttgtgggcactcaggacgctatttcatccgctaacccgagagttattgacgatgctagagctcgcaagctgtcaaacgacttgaaaagatgcacctattacgaaacatgcgcaacttatggtctcaatgtggaacgcgtgttccaggatgtcgcccagaaaattgtggctacccggaaaaagcagcagctgtcaataggcccatgtaagtctttgcccaattctccctctcacagctccgtgtgcagcgcgcaggtgtctgccgtgcatatctcccagacctctaacggcggagggtcactgtctgattatagttcttccgtgcctagcaccccatcaacttctcaaaaggaattgaggatcgatgtcccccctaccgcaaatacacccacccccgtgagaaaacagagtaaacgcagatccaacctcttcacctctcggaaaggatcagaccccgacaaggagaagaaaggcctggaaagccgggctgactctatcggatcaggccgagctattcccatcaagcagggcctgccattctttgttctcgccttaactgcttcaacttacttgcgccctgcaggagccagggccagacagtcctctccctggcctggtccgaggggaggccaaactagcccacactgtgcggagggccctcagagcgcacagctgagtggagcaatgatgaactag

SEQ ID NO: 87564 - protein, 934 aa, Artificial Sequence
  derived and/or modified sequence
MGARSGARGALLLALLLCWDPRLSQAGTDSGSEVLPDSFPSAPAEPLPYFLQEPQDAYIVKNKPVELRCRAFPATQIYFKCNGEWVSQNDHVTQEGLDEATGLRVREVQIEVSRQQVEELFGLEDYWCQCVAWSSAGTTKSRRAYVRIAYLRKNFDQEPLGKEVPLDHEVLLQCRPPEGVPVAEVEWLKNEDVIDPTQDTNFLLTIDHNLIIRQARLSDTANYTCVAKNIVAKRRSTTATVIVYVNGGWSSWAEWSPCSNRCGRGWQKRTRTCTNPAPLNGGAFCEGQAFQKTACTTICPVDGAWTEWSKWSACSTECAHWRSRECMAPPPQNGGRDCSGTLLDSKNCTDGLCMQMLEASGDAALYAGLVVAIFVVVAILMAVGVVVYRRNCRDFDTDITDSSAALTGGFHPVNFKTARPSNPQLLHPSVPPDLTASAGIYRGPVYALQDSTDKIPMTNSPLLDPLPSLKVKVYSSSTTGSGPGLADGADLLGVLPPGTYPSDFARDTHFLHLRSASLGSQQLLGLPRDPGSSVSGTFGCLGGRLSIPGTGVSLLVPNGAIPQGKFYEMYLLINKAESTLPLSEGTQTVLSPSVTCGPTGLLLCRPVILTMPHCAEVSARDWIFQLKTQAHQGHWEEVVTLDEETLNTPCYCQLEPRACHILLDQLGTYVFTGESYSRSAVKRLQLAVFAPALCTSLEYSLRVYCLEDTPVALKEVLELERTLGGYLVEEPKPLMFKDSYHNLRLSLHDLPHAHWRSKLLAKYQEIPFYHIWSGSQKALHCTFTLERHSLASTELTCKICVRQVEGEGQIFQLHTTLAETPAGSLDTLCSAPGSTVTTQLGPYAFKIPLSIRQKICNSLDAPNSRGNDWRMLAQKLSMDRYLNYFATKASPTGVILDLWEALQQDDGDLNSLASALEEMGKSEMLVAVATDGDC

SEQ ID NO: 87565 - DNA, 2805 bp, Artificial Sequence
  derived and/or modified sequence
atgggcgccagaagcggcgccagaggcgccctgctgctggccctgctgctgtgctgggaccccagactgagccaggccggcaccgacagcggcagcgaggtgctgcccgacagcttccccagcgcccccgccgagcccctgccctacttcctgcaggagccccaggacgcctacatcgtgaagaacaagcccgtggagctgagatgcagagccttccccgccacccagatctacttcaagtgcaacggcgagtgggtgagccagaacgaccacgtgacccaggagggcctggacgaggccaccggcctgagagtgagagaggtgcagatcgaggtgagcagacagcaggtggaggagctgttcggcctggaggactactggtgccagtgcgtggcctggagcagcgccggcaccaccaagagcagaagagcctacgtgagaatcgcctacctgagaaagaacttcgaccaggagcccctgggcaaggaggtgcccctggaccacgaggtgctgctgcagtgcagaccccccgagggcgtgcccgtggccgaggtggagtggctgaagaacgaggacgtgatcgaccccacccaggacaccaacttcctgctgaccatcgaccacaacctgatcatcagacaggccagactgagcgacaccgccaactacacctgcgtggccaagaacatcgtggccaagagaagaagcaccaccgccaccgtgatcgtgtacgtgaacggcggctggagcagctgggccgagtggagcccctgcagcaacagatgcggcagaggctggcagaagagaaccagaacctgcaccaaccccgcccccctgaacggcggcgccttctgcgagggccaggccttccagaagaccgcctgcaccaccatctgccccgtggacggcgcctggaccgagtggagcaagtggagcgcctgcagcaccgagtgcgcccactggagaagcagagagtgcatggccccccccccccagaacggcggcagagactgcagcggcaccctgctggacagcaagaactgcaccgacggcctgtgcatgcagatgctggaggccagcggcgacgccgccctgtacgccggcctggtggtggccatcttcgtggtggtggccatcctgatggccgtgggcgtggtggtgtacagaagaaactgcagagacttcgacaccgacatcaccgacagcagcgccgccctgaccggcggcttccaccccgtgaacttcaagaccgccagacccagcaacccccagctgctgcaccccagcgtgccccccgacctgaccgccagcgccggcatctacagaggccccgtgtacgccctgcaggacagcaccgacaagatccccatgaccaacagccccctgctggaccccctgcccagcctgaaggtgaaggtgtacagcagcagcaccaccggcagcggccccggcctggccgacggcgccgacctgctgggcgtgctgccccccggcacctaccccagcgacttcgccagagacacccacttcctgcacctgagaagcgccagcctgggcagccagcagctgctgggcctgcccagagaccccggcagcagcgtgagcggcaccttcggctgcctgggcggcagactgagcatccccggcaccggcgtgagcctgctggtgcccaacggcgccatcccccagggcaagttctacgagatgtacctgctgatcaacaaggccgagagcaccctgcccctgagcgagggcacccagaccgtgctgagccccagcgtgacctgcggccccaccggcctgctgctgtgcagacccgtgatcctgaccatgccccactgcgccgaggtgagcgccagagactggatcttccagctgaagacccaggcccaccagggccactgggaggaggtggtgaccctggacgaggagaccctgaacaccccctgctactgccagctggagcccagagcctgccacatcctgctggaccagctgggcacctacgtgttcaccggcgagagctacagcagaagcgccgtgaagagactgcagctggccgtgttcgcccccgccctgtgcaccagcctggagtacagcctgagagtgtactgcctggaggacacccccgtggccctgaaggaggtgctggagctggagagaaccctgggcggctacctggtggaggagcccaagcccctgatgttcaaggacagctaccacaacctgagactgagcctgcacgacctgccccacgcccactggagaagcaagctgctggccaagtaccaggagatccccttctaccacatctggagcggcagccagaaggccctgcactgcaccttcaccctggagagacacagcctggccagcaccgagctgacctgcaagatctgcgtgagacaggtggagggcgagggccagatcttccagctgcacaccaccctggccgagacccccgccggcagcctggacaccctgtgcagcgcccccggcagcaccgtgaccacccagctgggcccctacgccttcaagatccccctgagcatcagacagaagatctgcaacagcctggacgcccccaacagcagaggcaacgactggagaatgctggcccagaagctgagcatggacagatacctgaactacttcgccaccaaggccagccccaccggcgtgatcctggacctgtgggaggccctgcagcaggacgacggcgacctgaacagcctggccagcgccctggaggagatgggcaagagcgagatgctggtggccgtggccaccgacggcgactgctag

SEQ ID NO: 87566 - DNA, 2805 bp, Artificial Sequence
  derived and/or modified sequence
atgggggcccgcagtggagcccgtggcgccctgttgctcgcactccttctttgttgggacccacgcctgagccaggcgggtacagactcaggttccgaggttctgccagacagtttcccctcggctcccgccgagccccttccctatttcctgcaggagcctcaagatgcctacattgtgaaaaacaagcccgtggagctgaggtgtagagcctttccggcgacccagatttacttcaagtgtaacggggaatgggtatcgcaaaatgaccacgtcacacaggaagggttggacgaagcgacgggattacgcgtgcgggaagtgcagatcgaggttagccggcagcaggtcgaagaactgttcggtcttgaagactattggtgccagtgtgttgcatggagttccgcgggcaccaccaaatctcggcgggcctatgtcaggattgcttatcttaggaaaaacttcgatcaggagcccctggggaaggaagtgccactcgatcatgaggtgctgcttcagtgtaggccccccgaaggcgtgccggttgctgaggtagaatggcttaagaatgaagacgtgatcgaccctacacaggatacaaatttcctgctcactatcgaccacaatcttatcatccgccaggcgcgactgagtgacaccgccaattatacctgtgtggccaagaatatcgttgctaaaagacgctccaccactgccacagtaattgtgtacgtgaacggaggctggagctcctgggcggagtggtcaccatgctcgaatcgctgcggtaggggctggcagaaacgcactcggacgtgcactaatcctgcaccccttaacggtggcgcattttgtgagggtcaggcttttcagaagacagcgtgtaccacaatttgccccgtagacggcgcttggaccgagtggagcaaatggtcagcttgtagcacagagtgcgctcactggcgatcgcgggaatgtatggcccctccacctcagaacggaggcagggattgctcgggcactctgctagatagcaagaattgcacagacggcctgtgcatgcagatgttggaagcttctggcgacgcggccctctatgctgggttggtggtcgctatttttgttgtggtggcaattttaatggcagtgggtgtggttgtgtaccgccgcaattgtcgcgatttcgataccgacatcactgattccagtgcagccctgacaggagggttccaccccgtcaactttaaaaccgctaggccaagtaacccccagctcttgcatcccagtgtgccgccagacctgacagcctcggcagggatctatcgcggtcctgtgtatgctctgcaggattccaccgacaagattcctatgacaaattccccactcctggatcccctgcctagcctaaaagtgaaagtctattcttcaagcacaaccggatccggccctggactggcagatggggccgatctgttaggcgttctaccacctgggacctacccatctgactttgcgcgcgacacccactttttgcacttgagatcagcaagtctgggaagccagcaactcttgggattacctcgagatcctggatcctccgtttcaggaactttcgggtgcctagggggcagactgtctattcccggcaccggtgtgtctctgctggtcccgaacggggcaatcccccaaggtaaattttacgagatgtacttgctgattaacaaggcagagtccactttacccctttctgaaggaacgcagacagtgctcagcccgagtgttacatgcgggcccacaggattgttattgtgcaggccagttatactaaccatgccacattgtgcagaagtgagtgcaagggactggatttttcagttaaaaactcaggctcatcaggggcactgggaggaggtagtcacccttgacgaggaaacacttaacaccccgtgttactgtcagttggaaccccgagcctgccatatacttctggatcagctcggcacttacgtcttcaccggcgaatcctactcacgctctgctgttaagcgactgcaactcgctgtcttcgcccccgcactgtgcacatcgctggaatattccctaagagtttattgtctcgaagatacacccgtggccctgaaggaagtactggaacttgagcgaaccttaggagggtatctggtcgaagagcccaagcccctcatgtttaaggattcgtatcataatctgaggctaagtcttcatgacctgccacatgcccactggcgttctaagttgctggcaaagtatcaggagatccctttctatcacatctggtcgggctcccaaaaagccttacactgcacttttactctcgagaggcacagtttagcttccaccgagttaacctgcaagatttgcgtacgacaggtcgaaggtgaaggccagatcttccagcttcacaccacgctggcggagacacctgccggctctctggacaccctctgttcggcacctggctccacggtcacgacccaattaggtccttacgcttttaagattcctctgagtatccgacagaagatctgtaacagcctcgatgcacccaacagtcgaggaaacgattggagaatgctggctcagaagctttccatggatcggtacttaaattactttgcgactaaggcctctcccacgggcgtcatattagacttgtgggaagccttgcagcaagatgatggtgacctgaactctttggctagtgccctggaagaaatggggaaatccgagatgctagtggccgttgccaccgacggcgattgttag

SEQ ID NO: 87567 - DNA, 2805 bp, Artificial Sequence
  derived and/or modified sequence
atgggcgcccggagcggggcccggggggccctgctgctggccctgctgctgtgctgggacccccggctgagccaggccggcacagacagcggcagcgaggtgctgcctgacagcttccccagcgccccagctgagcccctgccctacttcctgcaggagccccaggatgcctacatcgtgaagaacaagcctgtggagctgcgctgccgggccttccctgccacccagatctacttcaagtgcaatggagagtgggtgtcccagaatgaccacgtgacccaggagggcctggatgaggccaccggcctgcgggtgcgggaggtgcagatcgaggtgtcccggcagcaggtggaggagctgtttggcctggaggactactggtgccagtgtgtggcctggagcagcgctggcaccaccaagagccggcgggcctacgtgcgcatcgcctacctgaggaagaactttgaccaggagcccctgggcaaggaggtgcccctggaccacgaggtgctgctgcagtgccggcccccagagggcgtgcctgtggccgaggtggagtggctgaagaatgaagatgtgattgaccccacccaggacaccaacttcctgctgaccatcgaccacaacctgatcatccggcaggcccggctgagtgacacagccaactacacctgtgtggccaagaacatcgtggccaagaggaggagcaccacagccaccgtcatcgtgtatgtgaatggaggctggagctcctgggccgagtggagcccctgcagcaacagatgtggccggggctggcagaagaggaccaggacctgcaccaacccagcccccctgaatggaggagccttctgtgagggccaggccttccagaagacagcctgcaccaccatctgccctgtggatggagcctggacagagtggagcaagtggagcgcctgcagcacagaatgtgcccactggaggagccgggagtgcatggcccccccaccccagaatggaggccgggactgcagcggcaccctgctggacagcaagaactgcacagatggcctgtgcatgcagatgctggaggccagcggagatgctgccctgtatgccggcctggtggtggccatctttgtggtggtggccatcctgatggctgtgggcgtggtggtgtacagaagaaactgccgggactttgacacagacatcacagacagcagcgctgccctgactggaggcttccaccctgtgaacttcaagacagcccggcccagcaacccccagctgctgcaccccagcgtgcccccagacctgacagccagcgctggcatctaccggggccctgtgtatgccctgcaggacagcacagacaagatccccatgaccaacagccccctgctggaccccctgcccagcctgaaggtgaaggtgtacagcagcagcaccactggaagtggccctggcctggctgatggagctgacctgctgggcgtgctgcccccaggcacctaccccagcgactttgcccgggacacccacttcctgcacctgcggagcgccagcctgggcagccagcagctgctgggcctgccccgggaccccggcagctctgtgtctggcaccttcggctgcctgggcggccgcctgagcatccctggcaccggggtgtccctgctggtgcccaacggggccatcccccagggcaagttctatgagatgtacctgctgatcaacaaggccgagagcaccctgcccctgtctgagggcacccagacagtgctgagccccagcgtgacctgtggccccaccggcctgctgctgtgcaggcctgtgatcctgaccatgccccactgtgccgaggtgtctgcccgggactggatcttccagctgaagacccaggcccaccagggccactgggaggaggtggtgaccctggatgaggagaccctgaacaccccctgctactgccagctggagccccgggcctgccacatcctgctggaccagctgggcacctacgtgttcaccggggagagctacagccgctctgctgtgaagaggctgcagctggccgtgtttgccccagccctgtgcaccagcctggagtacagcctgcgggtgtactgcctggaggacacccctgtggccctgaaggaggtgctggagctggagaggaccctgggcggctacctggtggaggagcccaagcccctgatgttcaaggacagctaccacaacctgcggctgagcctgcatgacctgccccacgcccactggaggagcaagctgctggccaagtaccaggagatccccttctaccacatctggagcggcagccagaaggccctgcactgcaccttcaccctggagcggcacagcctggccagcacagagctgacctgcaagatctgtgtgcggcaggtggagggggagggccagatcttccagctgcacaccaccctggccgagaccccagctggcagcctggacaccctgtgcagcgcccctggcagcacagtgaccacccagctgggcccctatgccttcaagatccccctgagcatccggcagaagatctgcaacagcctggatgcccccaacagcagaggaaatgactggaggatgctggcccagaagctgtccatggaccgctacctgaactactttgccaccaaggccagccccaccggggtcatcctggacctgtgggaggccctgcagcaggatgatggagacctgaacagcctggccagcgccctggaggagatgggcaagtctgagatgctggtggccgtggccacagatggagactgctag

SEQ ID NO: 87568 - DNA, 2805 bp, Artificial Sequence
  derived and/or modified sequence
atgggcgcccggagcggcgcccggggcgccctgctgctggccctgctgctgtgttgggacccccgcctaagccaagctggcaccgactccgggagcgaagtgctgcccgattcctttccatcagccccagctgaacccctgccttactttctgcaggaaccgcaggacgcctatatcgtcaagaacaaaccagtagagttgcggtgtcgggccttcccggctacgcagatctattttaaatgtaatggggagtgggtgtcccagaacgatcacgttacacaagaaggcctggacgaagctactggcctgcgcgttagagaagtgcagattgaggtgagtaggcagcaagttgaggagctcttcggcctcgaggactactggtgccagtgtgtggcctggagttctgcaggaacaacgaaaagcagaagagcttatgtgcgcatagcctatttacgtaaaaattttgatcaggaaccactaggaaaggaagtccccttggaccacgaggtgctcctccagtgcagaccacctgagggggtaccagtagcggaggtcgaatggctcaaaaatgaggatgttatcgaccccactcaggacacaaattttctgctgacgatcgatcataatctgatcattaggcaggccagactgagcgacactgcaaactacacctgtgtggccaagaacattgttgcaaaaagacggtccaccaccgcaacagtgattgtatacgtaaacgggggttggtcgagttgggcagagtggagcccctgttcaaaccgttgtggacgtggctggcagaagcgaacacgcacttgtaccaaccctgcgcccctgaacgggggcgccttctgtgaggggcaggcttttcagaaaactgcttgtacaactatttgtcctgtcgacggggcctggacggagtggtctaagtggagcgcctgttcaactgaatgtgcacattggagatcccgcgaatgtatggcccctcctccccaaaacggggggcgggattgttccgggacattactggacagtaaaaactgcacggatggcctctgcatgcagatgttggaggccagtggggacgccgctctgtacgccgggttggtggtagccatctttgtggtagtggctattctgatggccgtcggagttgttgtatacaggaggaactgccgagattttgatacggacatcacagattcatcggcggccctcacaggaggattccatcccgtgaattttaagaccgcaagaccttccaatccacaactgctgcacccctcggtacctcccgatcttaccgcttctgccggcatttaccgagggccagtctacgcgctgcaagattccactgataagatccccatgaccaactcacctttgttagatcctttgccatcccttaaagtgaaagtttattcatcttcaaccactggttccggcccaggcctggccgacggggcagatttgctgggagtgttgccaccaggaacatatccctccgatttcgcccgcgacacccacttcctgcacctcaggagcgcctccttaggcagccagcaactgctaggcctcccacgcgatcccggctccagtgtctccggtacctttggatgtctcggcgggaggttatccatccccggaacaggagtgtcactccttgtgcctaacggtgctatcccccaggggaagttctatgaaatgtatttacttatcaacaaggccgaaagtaccctgcctttgtccgagggcactcaaactgtgctaagcccaagtgtgacctgtggtcccacaggcctgttactatgtaggccggtgattctcaccatgccccactgcgccgaggtgagtgcccgcgactggatctttcagctgaaaacccaggcccatcaagggcattgggaggaggttgtgaccctggacgaggaaacgctgaatacgccttgctactgccagctagagccccgcgcctgtcacatcttactcgaccagctagggacatacgtcttcaccggagaaagctattccaggtccgctgtcaagagattgcagctggcagtcttcgcacccgcgctgtgtacctctctggagtactctctgagggtgtactgtctcgaggatacacccgtggcactgaaggaagttctggagctggagcgcaccctcgggggctacctcgttgaggaaccaaaaccacttatgttcaaggactcataccataacctgcgcctgagccttcacgatctaccgcatgctcactggagaagcaaacttttagccaagtatcaagagattcccttctatcatatctggtctggatctcagaaagctctgcattgtacgtttaccttagaaagacattccctggcttccactgaacttacatgcaagatctgtgttcggcaggtggaaggagagggccagatttttcagttgcatactactctcgcagaaacccccgctggtagccttgatacactatgtagcgcccccggctctactgtcacaactcagcttggaccgtacgccttcaaaatccccctgtccatccggcaaaagatttgtaatagcctggatgcacctaattcccggggcaatgattggcgcatgctggcccagaagctgagtatggatcggtacctcaactatttcgcgactaaggcttcacctaccggggtgattctggatctgtgggaggcactgcaacaggatgacggtgatctcaatagcctcgcaagcgccttggaagagatgggcaaatcagagatgctggtggctgttgccaccgacggcgattgctag

SEQ ID NO: 87569 - DNA, 2805 bp, Artificial Sequence
  derived and/or modified sequence
atgggagccaggagcggcgcacggggtgccctcttgttggccttgttattatgctgggatccgagattgagccaggccggaacagacagtggctcagaagtcctgcccgactcttttccatcagcaccagcagaaccactgccttactttttacaagagcctcaggacgcttacatcgtgaagaataagccggtggaactccggtgtcgtgccttccccgctacacagatctattttaagtgtaatggggaatgggtttcccagaatgaccacgtgacccaggaaggattggatgaggcaaccggtctgcgtgtgcgggaagtccagattgaggtgagtcggcagcaggttgaagaactattcgggttagaagattactggtgtcaatgcgtggcatggtcttctgccggaactacaaagtctcgtcgggcatacgtacggatcgcatacttgcggaagaatttcgatcaagagcccctgggcaaggaagttcccctggaccatgaggtcctgctccagtgtagacctcccgaaggggtgccagtggccgaggttgaatggttgaaaaatgaagacgtaatagaccctacccaggatactaattttctcctcactattgaccacaacctcatcatccgccaggctagactgagtgataccgctaattatacatgcgtcgcaaagaatattgtcgccaagagaagatcaacaaccgctacagtcattgtttacgtgaacggcggttggtctagttgggccgaatggtctccctgtagcaacagatgcggcagggggtggcagaagaggaccaggacctgcacaaatccagcccctttaaacggaggcgcattctgtgaggggcaggccttccagaaaacagcatgcacgacaatatgtcctgtggacggagcatggaccgagtggtccaaatggtccgcttgttcaacggaatgcgctcactggcggtctcgagagtgtatggcacctccgccacagaacggtggcagggattgcagcggtactcttctggatagcaagaattgtacagacggcctgtgtatgcagatgctggaagcaagcggcgacgccgcactatacgcagggctcgtggtcgcgatctttgtcgtggtggcaatccttatggccgttggtgtcgtcgtctaccggcgtaattgccgcgatttcgataccgatattacagattccagcgccgctttaactggtgggtttcatcccgtgaattttaagactgcgagaccttcaaatccacagctgctccacccatctgtcccaccagacctgacggccagcgccggaatttatagaggacccgtgtatgcattgcaggacagtaccgacaaaattccaatgaccaattcccccctcctggatccccttccctctctgaaggttaaagtttatagtagctctaccacgggaagcggaccagggctggcagacggagctgatctcttgggcgtgctgccgcctggaacctatccttcagacttcgcgagagacacacacttcttgcacctccggtctgcttctttgggcagccaacaactgctgggtctgccgagagatccaggctcatcagtgtccggtacattcggttgcctgggcggaagactctcgatccccggaacgggtgtgagcctgttggtgcccaatggggctatcccccaggggaaattttatgaaatgtacctcctcatcaataaagccgagagcaccctcccgctttcggagggcacacagacagtgctgtcaccctccgtcacgtgcggacccacgggactccttctttgccgacccgttattctaacaatgccccattgcgccgaggtcagcgctagggactggattttccaacttaagactcaagcccaccaggggcattgggaagaagtggttacactcgatgaagaaaccctgaatacaccgtgctattgtcagttagaaccaagggcctgccacattcttctggatcaactggggacctacgtgtttactggtgagagttactcccgcagtgccgttaaaaggctccagctggccgttttcgctccagccctgtgtacgtctctggaatactcactgcgggtatattgtctggaagacacccccgtggccctgaaagaggtcctggaactggaacgcacattagggggatatcttgtggaagaacccaaacccctgatgttcaaggattcctaccataatctccgcctgtctctccatgatcttccgcatgcccactggaggtctaaactgctggcaaagtaccaggaaatcccgttctaccatatatggtcggggtcccagaaagctcttcattgtacattcacattagagcgccactcattggcttctactgagctgacctgcaaaatctgcgtcagacaggtcgagggcgaaggtcaaatcttccagctgcacaccactctcgcggagactccagcaggatccctcgataccctttgcagcgcacccggaagcactgtaacgactcagttgggaccatatgcctttaaaattcctctgagcataaggcaaaaaatctgtaactccctagacgcccctaattcccgcggaaatgattggcgcatgctggctcagaagctcagcatggacaggtatctgaattatttcgccaccaaagcttcgccaactggggtcatactggacctctgggaagctctgcagcaggacgatggagacctgaatagcttagcaagtgctctcgaggagatgggcaagagtgaaatgcttgtcgccgtagctacagacggagattgctag

SEQ ID NO: 87570 - DNA, 6451 bp, Artificial Sequence
  derived and/or modified sequence
gagactggggccagggagacagccctgggggagaggcgcccgaaccaggccgcgggagcatgggggcccggagcggagctcggggcgcgctgctgctggcactgctgctctgctgggacccgaggctgagccaagcaggcactgattctggcagcgaggtgctccctgactccttcccgtcagcgccagcagagccgctgccctacttcctgcaggagccacaggacgcctacattgtgaagaacaagcctgtggagctccgctgccgcgccttccccgccacacagatctacttcaagtgcaacggcgagtgggtcagccagaacgaccacgtcacacaggaaggcctggatgaggccaccggcctgcgggtgcgcgaggtgcagatcgaggtgtcgcggcagcaggtggaggagctctttgggctggaggattactggtgccagtgcgtggcctggagctccgcgggcaccaccaagagtcgccgagcctacgtccgcatcgcctacctgcgcaagaacttcgatcaggagcctctgggcaaggaggtgcccctggaccatgaggttctcctgcagtgccgcccgccggagggggtgcctgtggccgaggtggaatggctcaagaatgaggatgtcatcgaccccacccaggacaccaacttcctgctcaccatcgaccacaacctcatcatccgccaggcccgcctgtcggacactgccaactatacctgcgtggccaagaacatcgtggccaaacgccggagcaccactgccaccgtcatcgtctacgtgaatggcggctggtccagctgggcagagtggtcaccctgctccaaccgctgtggccgaggctggcagaagcgcacccggacctgcaccaaccccgctccactcaacggaggggccttctgcgagggccaggcattccagaagaccgcctgcaccaccatctgcccagtcgatggggcgtggacggagtggagcaagtggtcagcctgcagcactgagtgtgcccactggcgtagccgcgagtgcatggcgcccccaccccagaacggaggccgtgactgcagcgggacgctgctcgactctaagaactgcacagatgggctgtgcatgcaaatgctggaggcctcaggggatgcggcgctgtatgcggggctcgtggtggccatcttcgtggtcgtggcaatcctcatggcggtgggggtggtggtgtaccgccgcaactgccgtgacttcgacacagacatcactgactcatctgctgccctgactggtggtttccaccccgtcaactttaagacggcaaggcccagcaacccgcagctcctacacccctctgtgcctcctgacctgacagccagcgccggcatctaccgcggacccgtgtatgccctgcaggactccaccgacaaaatccccatgaccaactctcctctgctggaccccttacccagccttaaggtcaaggtctacagctccagcaccacgggctctgggccaggcctggcagatggggctgacctgctgggggtcttgccgcctggcacataccctagcgatttcgcccgggacacccacttcctgcacctgcgcagcgccagcctcggttcccagcagctcttgggcctgccccgagacccagggagcagcgtcagcggcacctttggctgcctgggtgggaggctcagcatccccggcacaggggtcagcttgctggtgcccaatggagccattccccagggcaagttctacgagatgtatctactcatcaacaaggcagaaagtaccctcccgctttcagaagggacccagacagtattgagcccctcggtgacctgtggacccacaggcctcctgctgtgccgccccgtcatcctcaccatgccccactgtgccgaagtcagtgcccgtgactggatctttcagctcaagacccaggcccaccagggccactgggaggaggtggtgaccctggatgaggagaccctgaacacaccctgctactgccagctggagcccagggcctgtcacatcctgctggaccagctgggcacctacgtgttcacgggcgagtcctattcccgctcagcagtcaagcggctccagctggccgtcttcgcccccgccctctgcacctccctggagtacagcctccgggtctactgcctggaggacacgcctgtagcactgaaggaggtgctggagctggagcggactctgggcggatacttggtggaggagccgaaaccgctaatgttcaaggacagttaccacaacctgcgcctctccctccatgacctcccccatgcccattggaggagcaagctgctggccaaataccaggagatccccttctatcacatttggagtggcagccagaaggccctccactgcactttcaccctggagaggcacagcttggcctccacagagctcacctgcaagatctgcgtgcggcaagtggaaggggagggccagatattccagctgcataccactctggcagagacacctgctggctccctggacactctctgctctgcccctggcagcactgtcaccacccagctgggaccttatgccttcaagatcccactgtccatccgccagaagatatgcaacagcctagatgcccccaactcacggggcaatgactggcggatgttagcacagaagctctctatggaccggtacctgaattactttgccaccaaagcgagccccacgggtgtgatcctggacctctgggaagctctgcagcaggacgatggggacctcaacagcctggcgagtgccttggaggagatgggcaagagtgagatgctggtggctgtggccaccgacggggactgctgagcctcctgggacagcgggctggcagggactggcaggaggcaggtgcagggaggcctggggcagcctcctgatggggatgtttggcctctgcttcctcccagttcacagccagagttgcctctcctcctcctcttccccaacccccagaccatgaccagccttagaaaatccatgtactctgttgttagagggcccagagttccttctccacccccgctctctctctcttggcctgagatctctgtgcaggaaccaagatggggctgaagcctctggaggcagttggttgggggcgggcaggcaggaggccctccctccacccccccaccctcagcccggcaacttctgggttccatgggttttagttccgttctcgttttcttcctccgttattgatttctcctttctccctaagcccccttctgcttccacgcccttttcctctttgaagagtcaagtacaattcagacaaactgctttctcctgtccaaaagcaaaaaggcaaaggaaagaaagaaagcttcagaccgctagtaaggctcaaagaagaagaaaaacaccaaaaccacaagggaaaagaaaaacccagtttcttaggaaacgcaaacgatttattatccagattatttggataagtcctttttaagaaaaaaaaagaaaatgaaaaacaacacaaaaaaaatagaaaactcttttcttgagtgtggatgagaatgggcacgctcacacttctggccaggagtgaatgtgcctgtgtgtgtgtgtgtgtgtgtgtgtgtgtgtgtacatgtacgcgtgtgcattgaggagagagagactgaacagagagtactttgctgctaacgaatccatcttggactaaattctgacaaggcctcagtttccccagttgtgcagggagtaggtcagacagggttttcactgtctagatttagctggttagattttcctctaaaatcttaagcagatgctgaatccataaagccaaggagtgctgagggctggagtgggtgggccctccctcccacagccccagggagatacatctggactcctgggaatctggattaagaaagttgggatgaaagaggaggactgctcaggccagttgtgagccagggagaatgttccagtctggttttggtctggtggctcctagaaagggatgtggcccagaagtgggactcaaacagagagatgaagtaggggaggggagtcctccacgggcatctctctcctggcggctggatagctttaccctagggtggggccagccctgacaccctcatcccctcctcagcccagcagcctctagagcagcgtggtgctctcttgatggccaggaatccagaatctgcccttccccaaccttggtttctccttctgtaaagcagagtgatggctgagaagtcctctctagctgcagaagcctgagcttcccggtgtcagtcagctctgcaacgtgggagccttggaggcgggtggcctggctgtgcttcatatgcccaggagtggagaaggaggctgagaagctggtttcccagctctgatctccacaggcacctcctataaccctcctctcacccaccccgctacggtctgagagatctgaaataacctttcccagtgggcagggttgccagggttgaggggacagcacataccacccccacccaacctgttcgaggggccctgcatggcacgggatgagtccctgccctgtgcagctgcctggcagtggctgggacaaggatcttgcagccagcacagaggcctcttcaaaggcctctccctcttggcactccaggcaaggcaggtgcccgcttccccaacacctccaggcagtgaccctagggcatgccccagcaggtctccgagcagccactgggacccgtctcagcacatcctggcctttgaaagtctgatatcctgagaggagggcaggttttagggccgcagttccagccagcgtccccagcctggcttccctgccatggactcagtagctcgtggggcttcttaccacccaccagccccgctggggtgcggcctggctgtgggcaaaggaggacttgcctggagatttgagagaagattccttctaccagggctgctgaggggccaggcctgcatcaggggctaggctctggctgggcccggaggctgagactaaggctttcgaccctggtgcctccatgtggatgctgcctcagacaaaggcagtgagccttccctgccaaagtgcccatcccatgggctcggcctcactggtcactgttagcccatgaacacgtgtgggcctcggtcacgtggctttgagggcagtctgaccaggctagaccacacgtgccgtgacagggggtgccattcccctcgcaggctctaatgtgcccacatgtagcctggcagtccaaagaccaagaatcaacttgcaaatctgccattaaactgctgtgcgacttcaggcatatcactgccttctctgggcttcagtgtccttttcatacctagaagtctgcggtctgaggctctttgggttcagacacactgttctaggcttctgtaggggaccttgtgatctgccgtgcccctcctccctgttcttttctgtcctccccaccccaccctcagaagctgcttgctctgcccccaggacaggagcttgacggatgaagtgcagccagccacccaggtgccatttccagtctgacttccagaaatgtgcaccatgtcctagagcacagacccattggctggagcctcctgggagggttcaaaccatcagctctatgagaaatgcccagaaaggctttgccgactccatccgtctgtggaggctgcctgcctccggggtgggatgggtggtttctcctccaattcagacccaagaggtagcccccgagggcatgtacctggtgggaagcagctcaggtacccttgggggttgcagggcccttacgcaggtatttctctctctctcctctctggggtgcgtgtgtgcgtgcgcgtgtgcgtgcctatgcttttctctgtgggcacatcaggatgcccctcggagagcatgtgcacgtgtccccacctgagcgagcgtgtgtgtgtgctcctctgcgtcccaggtttggacgtctagggtttggtgtgcctgtcttctgccctccctgagcccacagggtcagtcaatgtatcttctacgtgcctctccctctgccttctctcacagtgcccccggctccagagctcaggggtaggggttctcctgagggtgcaggggatccttctcatctcctggaccctccagggcactctggtccctattccccagctcctaggcagctgagccgggtcccttaggggaggtgaccaggagctttggtgcagggagctcttggtggggcaaagggctggacccctgccaggtctgtggacatggttatatgcccgggagaggggggtgcagggccccagggatggcccccaatcccacctctgtttattctgtaaactgcaacctataaataacctttagcattcctattgtaacaaaattaatttttatgaaataaattatatttcctagtctaataaaa

SEQ ID NO: 87571 - protein, 521 aa, Artificial Sequence
  derived and/or modified sequence
MASSRASSTATKTKAPDDLVAPVVKKPHIYYGSLEEKERERLAKGESGILGKDGLKAGIEAGNINITSGEVFEIEEHISERQAEVLAEFERRKRARQINVSTDDSEVKACLRALGEPITLFGEGPAERRERLRNILSVVGTDALKKTKKDDEKSKKSKEEYQQTWYHEGPNSLKVARLWIANYSLPRAMKRLEEARLHKEIPETTRTSQMQELHKSLRSLNNFCSQIGDDRPISYCHFSPNSKMLATACWSGLCKLWSVPDCNLLHTLRGHNTNVGAIVFHPKSTVSLDPKDVNLASCAADGSVKLWSLDSDEPVADIEGHTVRVARVMWHPSGRFLGTTCYDRSWRLWDLEAQEEILHQEGHSMGVYDIAFHQDGSLAGTGGLDAFGRVWDLRTGRCIMFLEGHLKEIYGINFSPNGYHIATGSGDNTCKVWDLRQRRCVYTIPAHQNLVTGVKFEPIHGNFLLTGAYDNTAKIWTHPGWSPLKTLAGHEGKVMGLDISSDGQLIATCSYDRTFKLWMAE

SEQ ID NO: 87572 - DNA, 1566 bp, Artificial Sequence
  derived and/or modified sequence
atggctagctctcgtgcgagctccacagctacaaaaactaaggcccccgacgaccttgttgctcccgtcgtgaaaaaaccacacatctattatggtagcctggaagagaaagagcgggaaaggctcgcgaagggagagtccgggattctgggtaaggacggtctgaaggctgggatcgaggccggtaatatcaatattacctccggtgaagtcttcgagatcgaggagcatataagcgagaggcaagcggaagttctcgctgagtttgaaaggcgtaagagggcgagacagatcaacgtctccaccgacgactccgaggttaaggcctgtctacgagcactgggcgagcctatcacactctttggagagggcccggccgagcgcagagagcgcctgcggaatatcctctcagtggtgggcactgacgccttaaagaagacaaagaaggatgatgaaaaaagcaagaaatctaaggaagagtatcagcaaacatggtaccatgaaggcccaaatagcctgaaagtcgcccgcctgtggatagcaaattatagcttgcctcgggctatgaagaggttagaagaggcgcgcctgcacaaggaaatccccgagacgacccggacgtcccagatgcaggaactgcacaagtccctgcggtccttgaacaacttctgtagccagatcggtgatgatagacccatttcgtactgccatttttcccccaattcaaagatgctggcaactgcctgctggagcgggctctgcaagttgtggtccgtcccagattgtaatctgttgcacacactgcggggccacaacaccaacgtgggtgctattgtgttccatcctaaatccacggtctctttagatccaaaggatgttaacttggcatcctgtgcggctgatggctcggtcaaactgtggagtctggatagtgatgaacctgtggccgatatagaagggcatacagttcgagtggctagggtgatgtggcacccctcaggtagattcctgggaactacgtgctacgaccgcagctggcgtctgtgggacctggaagcacaggaagagatcctccatcaagaagggcactcaatgggagtttatgacattgcatttcatcaagatggaagcttagctggaaccgggggcctggacgcatttggcagggtgtgggacctcaggacaggcagatgcatcatgtttcttgaaggacatttaaaagagatatacggaattaacttttctccgaacggctatcacatcgccacaggatcaggcgataacacttgtaaagtttgggacctgcgtcagcggcgctgcgtatacacgatcccagcacaccagaatctggtcacaggtgtcaagtttgagcccatacacgggaatttcttgttgacaggagcctacgataacaccgccaaaatttggacccacccgggctggagccctttgaaaaccctggcaggtcacgagggaaaggtgatgggcttagatatctcttctgacggacaattgatagcaacctgttcttacgatagaacctttaaactttggatggccgagtag

SEQ ID NO: 87573 - DNA, 1566 bp, Artificial Sequence
  derived and/or modified sequence
atggccagcagccgggccagcagcacagccaccaagaccaaggccccagatgacctggtggcccctgtggtgaagaagccccacatctactacggcagcctggaggagaaggagcgggagcggctggccaagggggagagcggcatcctgggcaaggatggcctgaaggccggcattgaagctggcaacatcaacatcaccagcggggaggtgtttgaaattgaggagcacatcagcgagcggcaggccgaggtgctggccgagtttgaaagaaggaagagggcccggcagatcaacgtgtccacagatgattctgaggtgaaggcctgcctgcgggccctgggggagcccatcaccctgtttggagagggccctgctgagcggcgggagcggctgaggaacatcctgtctgtggtgggcacagatgccctgaagaagaccaagaaggatgatgagaagagcaagaagagcaaggaggagtaccagcagacctggtaccacgagggccccaacagcctgaaggtggcccggctgtggatcgccaactacagcctgccccgggccatgaagaggctggaggaggcccggctgcacaaggagatccctgagaccaccaggaccagccagatgcaggagctgcacaagagcctgcggagcctgaacaacttctgcagccagattggagatgaccggcccatctcctactgccacttcagccccaacagcaagatgctggccacagcctgctggagcggcctgtgcaagctgtggagcgtgcctgactgcaacctgctgcacaccctgcggggccacaacaccaacgtgggcgccatcgtgttccaccccaagagcacagtgtccctggaccccaaggatgtgaacctggccagctgtgccgcagatggctctgtgaagctgtggagcctggacagtgatgagcctgtggccgacatcgagggccacacagtgcgggtggcccgggtgatgtggcaccccagcggccgcttcctgggcaccacctgctatgaccgctcctggaggctgtgggacctggaggcccaggaggagatcctgcaccaggagggccacagcatgggcgtgtatgacatcgccttccaccaggacggcagcctggccggcactggaggcctggatgccttcggccgggtgtgggacctgaggacaggccgctgcatcatgttcctggagggccacctgaaggagatctacggcatcaacttcagccccaacggctaccacatcgccactggaagtggggacaacacctgcaaggtgtgggacctgcggcagaggcgctgtgtgtacaccatcccagcccaccagaacctggtgactggagtgaagtttgagcccatccacggcaacttcctgctgaccggggcctatgacaacacagccaagatctggacccaccctggctggagccccctgaagaccctggccggccacgagggcaaggtgatgggcctggacatcagcagtgatggccagctgattgccacctgcagctatgacaggaccttcaagctgtggatggccgagtag

SEQ ID NO: 87574 - DNA, 1566 bp, Artificial Sequence
  derived and/or modified sequence
atggccagcagccgggccagcagcaccgccaccaagaccaaggcccccgacgatcttgtagcacccgtcgtgaaaaagcctcacatatactacgggtccctggaagagaaagagcgtgagaggctcgctaagggggagagtgggattctcgggaaggatggcctgaaggccggcatagaggccgggaacatcaatatcaccagtggtgaagtctttgagatcgaggagcacatctccgagagacaggcagaggtgcttgcggagttcgaacggagaaagagggctaggcagatcaacgtgagtacagatgacagcgaagtgaaagcctgtctccgagccctcggggagcccatcactctgttcggagaggggcctgccgaacgcagagaacgcctccgaaatatcctgtccgtggtcggaaccgatgccctgaagaagacgaagaaagacgacgagaagtcaaaaaaatccaaagaagagtaccaacagacctggtatcacgaagggcccaattcactgaaagtggctagattatggattgccaactattctctccctcgagccatgaagcgactcgaagaggcacgcctgcataaagagattcccgaaactactcgcacttctcagatgcaggagctccataaatcgttgcgcagtttgaacaacttttgtagccagattggcgatgatagacccatttcatactgccactttagccctaattctaaaatgctcgccaccgcttgttggtcagggttatgcaagctgtggagtgttccagactgcaacctattacacaccctgcgcgggcacaatacaaacgttggtgccatagtgtttcatcccaagagcacagtcagtttagatccgaaggacgtgaacttagcttcatgcgctgcagacggctccgtgaaactgtggtccctagattccgatgagccggtcgcagatattgaagggcatactgtcagagtggccagagtgatgtggcacccaagcggaaggttcttgggtaccacttgctatgatcggtcttggaggctttgggatctcgaggctcaggaggaaatcctgcaccaagaggggcatagcatgggagtgtacgatatcgctttccaccaagacgggagtcttgccggcacaggaggcttagacgccttcggccgcgtctgggatctgcgcaccggaagatgtattatgttcctggaggggcatctcaaggagatatacggaattaatttctctcctaacggatatcatattgcaacgggctctggtgataacacctgcaaggtgtgggatctgcgccagcggcggtgcgtctataccatacctgcccaccagaacctcgtaacaggcgtgaagttcgaaccgatccatggcaactttctgctgactggcgcttacgacaatacagctaagatatggacacaccctggctggagcccccttaagacactggcaggccacgagggcaaggtgatggggctggatattagctcagatgggcagctgatagctacttgttcttatgatagaacgtttaaactttggatggcagaatag

SEQ ID NO: 87575 - DNA, 1566 bp, Artificial Sequence
  derived and/or modified sequence
atggctagcagccgggcatcaagcactgcaacaaagaccaaggccccagatgatcttgtcgctcccgtagtcaagaaaccccacatctactatggatccctggaagaaaaggagagagagcgcctggcgaagggtgagagtggcatccttggaaaggatggattgaaggcgggaatcgaagcagggaacatcaatatcaccagcggagaagtgttcgagatcgaagaacacatttcagagcgacaagccgaagtcctcgccgaattcgagagacggaagcgtgctcgccaaatcaacgtgtccaccgacgattcagaagtgaaggcctgcctacgagcacttggcgaaccaatcacactgtttggcgagggcccagcggagcggcgtgaacggctcagaaacattctgtcagtggttggtacagacgccctgaagaaaaccaagaaggacgacgagaaaagcaaaaaaagcaaagaggaataccagcagacatggtaccacgagggcccaaattctctgaaagtggccaggctgtggattgccaactattcattaccaagggccatgaaacgcctggaggaggccagactacataaggaaattcccgaaaccacccggacctcccagatgcaggaactccacaagtcattgcgatccctgaacaacttctgttctcagatcggggatgataggcctatttcttactgccacttctcccccaattccaaaatgcttgccacagcttgttggagtgggctgtgcaagctgtggtcagtgcccgattgcaacttattgcatacactgcgcggacacaacacaaacgttggcgcaatcgtcttccacccaaaatccaccgtgtctttagaccctaaggatgtgaatttggccagttgcgccgctgacggctctgtcaaactgtggtccttggattcggacgagcctgtcgcagatatagagggtcatactgtgagagtggccagagtgatgtggcacccgtcggggaggtttctaggtactacatgctatgataggagttggcggctgtgggacctagaagcccaggaagagatactgcaccaggagggacatagcatgggggtctatgatattgcattccatcaggacggtagcctggccggtacaggcggactcgatgcctttggcagagtgtgggacctgcggactgggcgatgcatcatgtttctcgagggtcacctgaaggagatctatgggatcaatttctcccctaatggctatcacattgcaacaggctcgggtgataacacatgcaaggtatgggacctgagacaacgcaggtgcgtctacacaattccagctcatcaaaacctggtcaccggagtgaaatttgagccgattcatggaaattttctattgactggggcatacgacaatacggccaagatctggactcaccctggatggtccccactgaaaaccctggccggacacgagggcaaagtgatggggctggatatttccagcgacggtcagttgatcgcaacctgctcctacgatagaacctttaagttgtggatggcagaatag

SEQ ID NO: 87576 - DNA, 3493 bp, Artificial Sequence
  derived and/or modified sequence
cagagttcagccccgagccgcgcgagtcgactcacctacctcttttcaagccggcctagccccttcccggaacctcggctcccccccaacgaaactactgctaagccaactggactacacttcccagactgcttggagcctctctctccgcagaacctcgtcttccgcgagcttttcctggaggttctaggagggatgcccctcaatgccacgacgccatttcctactacgacttccatcatgctccgcgccgctccgggggcggtgacccctcttggcccacgtcttgtcagtgacgcacttcctgtcagtgacgcacttcccctctgctgggcgcgcggtggacggtctgaaagggagtgttcgggtttcgctggggcctcgcggctccagagcccagcatggcttcctcgcgagcctcttccacggcaaccaaaactaaagcacccgacgacttagttgctccggtcgtgaagaaaccacacatctattatggaagtttggaagagaaggagagggagcgtctggccaaaggagagtctgggattttggggaaagacggacttaaagcagggatcgaagctggaaatattaatataacctctggagaagtgtttgaaattgaagagcatatcagcgagcgacaggcagaagtattggctgagtttgagagaaggaagcgagcccggcagatcaatgtttccacagatgactcagaggtcaaagcttgccttagagccttgggggaacccatcacactttttggagagggtcctgctgaaagaagagaaaggttaagaaatatcctctcagttgtcggtactgatgccttgaaaaagaccaaaaaggatgatgagaagtctaaaaagtccaaagaagagtatcagcaaacctggtatcatgaaggaccaaatagcttgaaggtggcaagactatggattgctaattattcgttgcccagggcaatgaaacgcttggaagaggcccgactccataaggagattcctgagacaacaaggacctcccagatgcaagagctgcacaagtctctccggtctttgaataatttttgcagtcagattggggatgatcggcctatctcctactgtcactttagtcccaattccaagatgctggccacagcttgttggagtgggctttgcaagctctggtctgttcctgattgcaacctccttcacactcttcgagggcataacacaaatgtaggagcaattgtattccatcccaaatccactgtctccttggacccaaaagatgtcaacctggcctcttgtgcggctgatggctctgtgaagctttggagtctcgacagtgatgaaccagtggcagatattgaaggccatacagtgcgtgtggcgcgggtaatgtggcatccttcaggacgtttcctgggcaccacctgctatgaccgttcatggcgcttatgggatttggaggctcaagaggagatcctgcatcaggaaggccatagcatgggtgtgtatgacattgccttccatcaagatggctctttggctggcactgggggactggatgcatttggtcgagtttgggacctacgcacaggacgttgtatcatgttcttagaaggccacctgaaagaaatctatggaataaatttctcccccaatggctatcacattgcaaccggcagtggtgacaacacctgcaaagtgtgggacctccgacagcggcgttgcgtctacaccatccctgctcatcagaacttagtgactggtgtcaagtttgagcctatccatgggaacttcttgcttactggtgcctatgataacacagccaagatctggacgcacccaggctggtccccgctgaagactctggctggccacgaaggcaaagtgatgggcctagatatttcttccgatgggcagctcatagccacttgctcatatgacaggaccttcaagctgtggatggctgaatagatgacaatgggaaaaggacttgaacctcaagctctctctaaggagctgttttcctcaaacgagaagaattgaagtgtttagttctatcatgttttctgccaattaccatgcatagaccctcagtagaattggatttccatgtcagcccccactccaggaaggcagcccaatccctaggtgatggggaacccctctcacggttgaaaatttattacctttttacgccctgccacgaactgtgtagacattgtttttattaatcttttgtttggccgggcgtggtggctcacgcctgtaatcctagcactttgggaggccgaggtgggtagatcgcttgagctcaggagttcaagacgagcctgggcaacatggcaaatgccgtctctgcaaaaaaatactaaaattagctggtcgcggtggcttctgcctgtgattccggctacttgggaggctgaggtgggagggattgcttaagcctgggaggcagaggttgcagtgagccgagattgcgccattgcactctagcctgtgtgacagagcaagaccctgtctcaaaaaaaaaaaaaatttgttcgaatgccttatagccttcctcacagcacccaggattgtgactgactctgcatttttaattcttgaaacttggctttccataacatggtacatgcttcaggactacatatgacccagagagcaaggtggctgaactatagtctggaagccctcaggtaaagaggcacatctcaccactcattggttaaacaatgcatcatagcgagcacttttcctttccctggagaatgggatgtgaagcagtagaccgcagccacgccgatggttatacagtgaagaagacttcacctcttcctattgagtttgcttggaatgctgacagcatcaggcaactctgaactgaacatttgctttgtcagaaaatatctttttttttactttgaagtttggcaaccttcatgttaccccaaagcaaaaccattgtgtcaggagtcaaacaaatgtttagaaagcaaacatgacgtctctattgtacaacctcctttctcttggctgtttaaaggatgtacttcgtgtattaaagggtactttatgttgaagtaacgaaaaaaccctaatgggtgttcctaaacctaaaccttttctttattccacatttgctacggtaaaatcctgttacaaaactaccctataaagaattattttctatagttaagcattttctgaatcctagccattggtccatagaggtctcttttttttggtttgggatataatggatgatctcaaatatggattactctgatttatgtctccttagcaccttgttaacaattttttttaaaatagaaggctgtttgcattttgggccagactgccagtaagccaggcctggactcaattacaattcttaacttgtctgtcatgcacctcttttcacctcaactatacagcctctgaactctcaaattacacagtaaattcaaaaaaatatataggaatttggaagaaga

SEQ ID NO: 87577 - DNA, 1566 bp, Artificial Sequence
  derived and/or modified sequence
atggccagcagcagagccagcagcaccgccaccaagaccaaggcccccgacgacctggtggcccccgtggtgaagaagccccacatctactacggcagcctggaggagaaggagagagagagactggccaagggcgagagcggcatcctgggcaaggacggcctgaaggccggcatcgaggccggcaacatcaacatcaccagcggcgaggtgttcgagatcgaggagcacatcagcgagagacaggccgaggtgctggccgagttcgagagaagaaagagagccagacagatcaacgtgagcaccgacgacagcgaggtgaaggcctgcctgagagccctgggcgagcccatcaccctgttcggcgagggccccgccgagagaagagagagactgagaaacatcctgagcgtggtgggcaccgacgccctgaagaagaccaagaaggacgacgagaagagcaagaagagcaaggaggagtaccagcagacctggtaccacgagggccccaacagcctgaaggtggccagactgtggatcgccaactacagcctgcccagagccatgaagagactggaggaggccagactgcacaaggagatccccgagaccaccagaaccagccagatgcaggagctgcacaagagcctgagaagcctgaacaacttctgcagccagatcggcgacgacagacccatcagctactgccacttcagccccaacagcaagatgctggccaccgcctgctggagcggcctgtgcaagctgtggagcgtgcccgactgcaacctgctgcacaccctgagaggccacaacaccaacgtgggcgccatcgtgttccaccccaagagcaccgtgagcctggaccccaaggacgtgaacctggccagctgcgccgccgacggcagcgtgaagctgtggagcctggacagcgacgagcccgtggccgacatcgagggccacaccgtgagagtggccagagtgatgtggcaccccagcggcagattcctgggcaccacctgctacgacagaagctggagactgtgggacctggaggcccaggaggagatcctgcaccaggagggccacagcatgggcgtgtacgacatcgccttccaccaggacggcagcctggccggcaccggcggcctggacgccttcggcagagtgtgggacctgagaaccggcagatgcatcatgttcctggagggccacctgaaggagatctacggcatcaacttcagccccaacggctaccacatcgccaccggcagcggcgacaacacctgcaaggtgtgggacctgagacagagaagatgcgtgtacaccatccccgcccaccagaacctggtgaccggcgtgaagttcgagcccatccacggcaacttcctgctgaccggcgcctacgacaacaccgccaagatctggacccaccccggctggagccccctgaagaccctggccggccacgagggcaaggtgatgggcctggacatcagcagcgacggccagctgatcgccacctgcagctacgacagaaccttcaagctgtggatggccgagtag

SEQ ID NO: 87578 - protein, 1351 aa, Artificial Sequence
  derived and/or modified sequence
MELLPPLPQSFLLLLLLPAKPAAGEDWQCPRTPYAASRDFDVKYVVPSFSAGGLVQAMVTYEGDRNESAVFVAIRNRLHVLGPDLKSVQSLATGPAGDPGCQTCAACGPGPHGPPGDTDTKVLVLDPALPALVSCGSSLQGRCFLHDLEPQGTAVHLAAPACLFSAHHNRPDDCPDCVASPLGTRVTVVEQGQASYFYVASSLDAAVAASFSPRSVSIRRLKADASGFAPGFVALSVLPKHLVSYSIEYVHSFHTGAFVYFLTVQPASVTDDPSALHTRLARLSATEPELGDYRELVLDCRFAPKRRRRGAPEGGQPYPVLRVAHSAPVGAQLATELSIAEGQEVLFGVFVTGKDGGPGVGPNSVVCAFPIDLLDTLIDEGVERCCESPVHPGLRRGLDFFQSPSFCPNPPGLEALSPNTSCRHFPLLVSSSFSRVDLFNGLLGPVQVTALYVTRLDNVTVAHMGTMDGRILQVELVRSLNYLLYVSNFSLGDSGQPVQRDVSRLGDHLLFASGDQVFQVPIQGPGCRHFLTCGRCLRAWHFMGCGWCGNMCGQQKECPGSWQQDHCPPKLTEFHPHSGPLRGSTRLTLCGSNFYLHPSGLVPEGTHQVTVGQSPCRPLPKDSSKLRPVPRKDFVEEFECELEPLGTQAVGPTNVSLTVTNMPPGKHFRVDGTSVLRGFSFMEPVLIAVQPLFGPRAGGTCLTLEGQSLSVGTSRAVLVNGTECLLARVSEGQLLCATPPGATVASVPLSLQVGGAQVPGSWTFQYREDPVVLSISPNCGYINSHITICGQHLTSAWHLVLSFHDGLRAVESRCERQLPEQQLCRLPEYVVRDPQGWVAGNLSARGDGAAGFTLPGFRFLPPPHPPSANLVPLKPEEHAIKFEVCVDGECHILGRVVRPGPDGVPQSTLLGILLPLLLLVAALATALVFSYWWRRKQLVLPPNLNDLASLDQTAGATPLPILYSGSDYRSGLALPAIDGLDSTTCVHGASFSDSEDESCVPLLRKESIQLRDLDSALLAEVKDVLIPHERVVTHSDRVIGKGHFGVVYHGEYIDQAQNRIQCAIKSLSRITEMQQVEAFLREGLLMRGLNHPNVLALIGIMLPPEGLPHVLLPYMCHGDLLQFIRSPQRNPTVKDLISFGLQVARSMEYLAEQKFVHRDLAARNCMLDESFTVKVADFGLARDILDREYYSVQQHRHARLPVKWMALESLQTYRFTTKSDVWSFGVLLWELLTRGAPPYRHIDPFDLTHFLAQGRRLPQPEYCPDSLYQVMQQCWEADPAVRPTFRVLVGEVEQIVSALLGDHYVQLPATYMNLGPSTSHEMNVRPEQPQFSPMPGNVRRPRPLSEPPRPT

SEQ ID NO: 87579 - DNA, 4056 bp, Artificial Sequence
  derived and/or modified sequence
atggaactgttgccgcctctgccacagtcttttctcctcctgttgctattacctgctaagcctgctgccggggaggactggcaatgcccccgcactccctatgcagcatcacgtgactttgacgtcaagtacgtggtgccatccttcagcgctggcgggctcgtgcaagcgatggtgacatacgagggcgacaggaatgagtccgcagttttcgttgctattagaaataggctgcatgttctcggccccgatctcaagagtgtccagtcgctcgctaccgggcccgccggcgacccaggttgccagacatgcgcagcctgcggaccggggccccatggccctcctggcgatactgacaccaaggtcctggtactggaccctgcgttgcccgcactggtgtcttgcggtagtagtctgcagggccgttgctttttgcacgatctcgaaccacaagggacagctgtgcatttagccgcacctgcctgtctgttttcagcacatcataaccggcccgacgattgcccagactgtgtggcctcacctctgggcacgcgtgtcaccgtggtcgagcagggccaggctagctacttctacgtggcctcatctctggacgccgccgtggccgctagcttttcgcctcggagcgtgtccatcaggcggctgaaggccgatgcgagcggatttgccccaggctttgtggccttgtcagtgctgccaaaacacctggtttcctactctatcgagtacgtgcactctttccacacaggggctttcgtctactttcttaccgtccaacccgcgagtgtgaccgatgacccttccgccctgcacacaaggcttgcaagactgagcgctacggagccggaacttggcgactaccgcgaactagtgctagactgtcggtttgctcctaaaaggaggcgccgcggtgcaccggaaggaggacagccatacccggtgctgcgggtggcccacagcgctcccgttggtgcccagctggccacggaactgagcatcgccgaaggacaggaagttctgttcggagtgttcgtgactgggaaggacgggggacctggagtgggacccaattccgtggtgtgtgccttccccatcgatctcctggacaccctgattgacgagggcgtagagcggtgctgtgagtctcctgtgcatcctggcttgagacgagggcttgacttcttccaatcaccatctttctgtccaaatccaccagggctcgaggcgctatcccccaacacgtcttgtcgacacttccctctcctcgtgtcatcgagttttagccgcgttgacttatttaacggactcctgggcccggtccaggtcaccgcactctatgttacaaggctagataacgtcaccgtcgcccatatgggaaccatggatggacgtatcctgcaagtggagctggtgcgatcactcaactacttactttatgtgtcaaatttcagcctcggcgactccggccagcctgtccagagggatgtgtccaggctcggtgatcacttgctgtttgcatccggggaccaggttttccaggtgccaattcagggacctggttgtcgtcactttctaacgtgcggaagatgtctcagagcctggcactttatgggatgtggctggtgcggtaacatgtgcggacaacaaaaggagtgccccggcagttggcaacaggatcattgccctccgaagctgaccgaattccacccccacagtgggcccctccgcggtagcaccagacttacgctctgtgggagtaatttttatctccacccgagtggacttgtccctgaaggaacacaccaggtgaccgtgggtcaatctccatgccgccccttgcccaaggactcctccaaactccgtcccgtaccacgcaaagacttcgtcgaagaatttgagtgtgagctagaacccctcggcacacaggccgtgggccccacaaacgtttcactgacagtcacgaacatgcccccagggaaacattttcgtgttgacggtacttccgttttgcgcgggtttagctttatggagccagttctgattgcagtgcagcccctattcggcccccgggccggcggaacctgcttgacactcgaagggcagtctcttagcgtgggtacctctagagccgttttagtgaatggaacagagtgtctactggcgagggtgtcagaaggccagctgctttgtgccaccccgccaggcgccaccgtggcgtctgtccccttgtccctgcaggtgggcggagcccaggtgcccggatcttggacattccaataccgggaagatccagtggtgctctctatcagccccaattgcgggtacattaactcccacatcacaatctgcggccaacacctaaccagtgcctggcacctcgtcctgtcctttcatgacggactgagagcagtggagtctaggtgtgaacggcagctcccagagcagcagctttgtcgtctgccagaatacgtcgtgcgggatccccagggctgggttgctggtaatctgagcgctcgcggcgatggagccgccgggttcactttaccggggtttcggttcctcccccctcctcacccacccagcgctaacttggtgcctctcaaacccgaggagcacgctatcaagtttgaagtctgtgtggatggggagtgtcatatcctaggcagagtggttagacctggtcccgatggtgtgccccaatccactctactgggcatcctgctgccgctgctcctcttggtcgctgcacttgccaccgctctggtgttcagttactggtggcgaagaaagcagctggtgttgcctccaaatttaaatgacctcgcctcactggaccagaccgccggtgccaccccgctgccgatcctctactctggctccgattatcgctccggtcttgccctccctgccatagatggactggactcgacaacatgcgtccacggggctagctttagtgacagtgaggacgaaagctgtgtccctctgctgcggaaggagtctattcaactgcgcgacctggactccgctctcttggccgaagtgaaagatgtgctgatccctcacgagagggtcgttactcattcggatcgtgtaataggcaagggccactttggcgtcgtgtaccacggtgagtatatcgatcaggctcagaatagaatccaatgtgccatcaagagcttatcacgtatcacggaaatgcaacaggtggaggcctttctgcgggaaggcctgctcatgaggggactgaaccacccaaatgttcttgcgctgatcgggattatgctccctccagaaggactcccgcatgttttgttgccttacatgtgccacggagatcttctgcaatttatccgttcaccccagcgcaatcctaccgtgaaagatctgatctcatttggtttacaagtggcccgctcaatggaataccttgcggagcaaaaatttgtgcaccgcgatttggccgctagaaattgtatgctggacgagagcttcaccgtaaaggttgcggattttggtttggcccgtgacatccttgacagagagtactactcagttcagcagcaccgccacgctcgccttcccgtaaaatggatggccttggagtctctgcagacctataggttcaccacaaagagcgatgtctggtctttcggggtgctgctgtgggaacttctgactcgcggcgcccccccatacaggcacattgaccccttcgatctgacccacttcctagcacagggtcgtaggctgcctcagccggaatattgtcccgattccctgtaccaggtgatgcagcagtgttgggaggctgacccagcggttaggcccacattccgcgtcttggtgggcgaagttgagcagatagtatcggcattactgggcgatcattatgtccaactgccagcaacgtatatgaacctcgggccttctacgtcacacgagatgaacgtgcgcccagagcagcctcagttttctccaatgcccggcaacgtaagacgccccaggcctttgtccgagcctccgagacccacttag

SEQ ID NO: 87580 - DNA, 4056 bp, Artificial Sequence
  derived and/or modified sequence
atggagctgctgccccccctgccccagagcttcctgctgctgctgctgctgcctgccaagccagctgctggggaggactggcagtgccccaggaccccctatgctgccagccgggactttgatgtgaagtatgtggtgcccagcttctctgctgggggcctggtgcaggccatggtgacctatgaaggagacagaaatgaatctgctgtgtttgtggccatccggaaccggctgcacgtgctgggccctgacctgaagtctgtgcagagcctggccactggacctgctggggaccccggctgccagacctgtgccgcctgtggccctggcccccacggccccccaggggacacagacaccaaggtgctggtgctggaccctgccctgcctgccctggtgtcctgtggcagcagcctgcagggccgctgcttcctgcatgacctggagccccagggcacagctgtgcacctggccgccccagcctgcctcttcagcgcccaccacaacagaccagatgactgcccagactgtgtggccagccccctgggcaccagggtgacagtggtggagcagggccaggccagctacttctacgtggccagcagcctggatgctgctgtggccgccagcttcagccccaggtctgtgtccatccggcggctgaaggcagatgccagcggctttgcccctggctttgtggccctgtctgtgctgcccaagcacctggtgtcctacagcattgaatatgtgcacagcttccacactggagcctttgtgtacttcctgactgtgcagcctgcctctgtgacagatgaccccagcgccctgcacacccggctggcccggctgagcgccacagagcctgagctgggggactaccgggagctggtgctggactgccgctttgcccccaagagaagaagaagaggagcccctgagggcggccagccctaccctgtgctgcgggtggcccacagcgcccctgtgggcgcccagctggccacagagctgagcattgctgagggccaggaggtgctgtttggagtgtttgtgacaggcaaggatggcggccctggggtgggccccaacagcgtggtgtgtgccttccccatcgacctgctggacaccctgattgatgaaggagtggagcgctgctgtgagagccctgtgcaccctggcctgcggcggggcctggacttcttccagagccccagcttctgccccaaccccccaggcctggaggccctgagccccaacaccagctgccgccacttccccctgctggtgagcagcagcttcagccgggtggacctcttcaacggcctgctgggccctgtgcaggtgacagccctgtatgtgacccggctggacaacgtgacagtggcccacatgggcaccatggatggccgcatcctgcaggtggagctggtgcgcagcctgaactacctgctgtatgtgagcaacttcagcctgggggacagcggccagcctgtgcagagagatgtgtcccggctgggggaccacctgctgtttgccagcggggaccaggtgttccaggtgcccatccagggccctggctgccgccacttcctgacctgtggccgctgcctgcgggcctggcacttcatgggctgcggctggtgtggcaacatgtgtggccagcagaaggaatgtcctggctcctggcagcaggaccactgcccccccaagctgacagagttccacccccacagcggccccctgcggggcagcacccggctgaccctgtgtggcagcaacttctacctgcaccccagcggcctggtgcctgagggcacccaccaggtgacagtgggccagagcccctgccggcccctgcccaaggacagcagcaagctgcggcctgtgcccaggaaggactttgtggaggagtttgaatgtgagctggagcccctgggcacccaggccgtgggccccaccaacgtgtccctgactgtgaccaacatgcctcctgggaagcacttccgggtggatggcacctctgtgctgcggggcttctccttcatggagcctgtgctgattgctgtgcagcccctgtttggccccagggctgggggcacctgcctgaccctggagggccagagcctgtctgtgggcaccagcagagctgtgctggtgaatggaacagaatgtctgctggcccgggtgtctgagggccagctgctgtgtgccaccccacctggggccaccgtggcctctgtgcccctgagcctgcaggtgggcggggcccaggtgcccggctcctggaccttccagtaccgggaggaccctgtggtgctgagcatcagccccaactgtggctacatcaacagccacatcaccatctgtggccagcacctgaccagcgcctggcacctggtgctgtccttccatgatggcctgcgggctgtggagagccgctgtgagcggcagctgcctgagcagcagctgtgccgcctgcctgaatatgtggtgcgggacccccagggctgggtggccggcaacctgagcgcccggggagatggagctgctggcttcaccctgcccggcttccgcttcctgcccccaccccaccccccatctgccaacctggtgcccctgaagccagaggagcacgccatcaagtttgaggtgtgtgtggatggagagtgccacatcctgggccgggtggtgcggcccggcccagatggagtgccccagagcaccctgctgggcatcctgctgcccctgctgctgctggtggccgccctggccacagccctggtgttctcctactggtggaggaggaagcagctggtgctgccccccaacctgaatgacctggccagcctggaccagacagctggggccacccccctgcccatcctgtacagcggcagtgactaccgcagcggcctggccctgcctgccattgatggcctggacagcaccacctgtgtgcatggagccagcttcagtgacagtgaagatgagagctgtgtgcccctgctgaggaaggagagcatccagctgcgggacctggacagcgccctgctggccgaggtgaaggatgtgctgatcccccatgagcgggtggtgacccacagcgacagagtgattggcaagggccactttggagtggtgtaccatggagagtacatcgaccaggcccagaaccgcatccagtgtgccatcaagagcctgagccgcatcacagagatgcagcaggtggaggccttcctgcgggagggcctgctgatgaggggcctgaaccaccccaacgtgctggccctgattggcatcatgctgcccccagagggcctgccccacgtgctgctgccctacatgtgccacggggacctgctgcagttcatccgcagcccccagaggaaccccaccgtgaaggacctgatcagctttggcctgcaggtggcccgctccatggagtacctggccgagcagaagtttgtgcaccgggacctggccgccaggaactgcatgctggatgagagcttcaccgtgaaggtggccgactttggcctggcccgggacatcctggaccgggagtactacagcgtgcagcagcacagacatgcccggctgcctgtgaagtggatggccctggagagcctgcagacctaccgcttcaccaccaagagtgatgtgtggagctttggagtgctgctgtgggagctgctgaccaggggggccccaccctaccgccacatcgacccctttgacctgacccacttcctggcccagggccgccgcctgccccagcctgagtactgcccagacagcctgtaccaggtgatgcagcagtgctgggaggccgaccctgctgtgcggcccaccttccgggtgctggtgggggaggtggagcagatcgtgtctgccctgctgggggaccactacgtgcagctgcctgccacctacatgaacctgggccccagcaccagccatgagatgaatgtgcggcctgagcagccccagttcagccccatgcctggaaatgtgagaagaccccggcccctgtctgagcccccccggcccacctag

SEQ ID NO: 87581 - DNA, 4198 bp, Artificial Sequence
  derived and/or modified sequence
atggagctcctcccgccgctgcctcagtccttcctgttgctgctgctgttgcctgccaagcccgcggcgggcgaggactggcagtgcccgcgcaccccctacgcggcctctcgcgactttgacgtgaagtacgtggtgcccagcttctccgccggaggcctggtacaggccatggtgacctacgagggcgacagaaatgagagtgctgtgtttgtagccatacgcaatcgcctgcatgtgcttgggcctgacctgaagtctgtccagagcctggccacgggccctgctggagaccctggctgccagacgtgtgcagcctgtggcccaggaccccacggccctcccggtgacacagacacaaaggtgctggtgctggatcccgcgctgcctgcgctggtcagttgtggctccagcctgcagggccgctgcttcctgcatgacctagagccccaagggacagccgtgcatctggcagcgccagcctgcctcttctcagcccaccataaccggcccgatgactgccccgactgtgtggccagcccattgggcacccgtgtaactgtggttgagcaaggccaggcctcctatttctacgtggcatcctcactggacgcagccgtggctgccagcttcagcccacgctcagtgtctatcaggcgtctcaaggctgacgcctcgggattcgcaccgggctttgtggcgttgtcagtgctgcccaagcatcttgtctcctacagtattgaatacgtgcacagcttccacacgggagccttcgtatacttcctgactgtacagccggccagcgtgacagatgatcctagtgccctgcacacacgcctggcacggcttagcgccactgagccagagttgggtgactatcgggagctggtcctcgactgcagatttgctccaaaacgcaggcgccggggggccccagaaggcggacagccctaccctgtgctgcgggtggcccactccgctccagtgggtgcccaacttgccactgagctgagcatcgccgagggccaggaagtactatttggggtctttgtgactggcaaggatggtggtcctggcgtgggccccaactctgtcgtctgtgccttccccattgacctgctggacacactaattgatgagggtgtggagcgctgttgtgaatccccagtccatccaggcctccggcgaggcctcgacttcttccagtcgcccagtttttgccccaacccgcctggcctggaagccctcagccccaacaccagctgccgccacttccctctgctggtcagtagcagcttctcacgtgtggacctattcaatgggctgttgggaccagtacaggtcactgcattgtatgtgacacgccttgacaacgtcacagtggcacacatgggcacaatggatgggcgtatcctgcaggtggagctggtcaggtcactaaactacttgctgtatgtgtccaacttctcactgggtgacagtgggcagcccgtgcagcgggatgtcagtcgtcttggggaccacctactctttgcctctggggaccaggttttccaggtacctatccaaggccctggctgccgccacttcctgacctgtgggcgttgcctaagggcatggcatttcatgggctgtggctggtgtgggaacatgtgcggccagcagaaggagtgtcctggctcctggcaacaggaccactgcccacctaagcttactgagttccacccccacagtggacctctaaggggcagtacaaggctgaccctgtgtggctccaacttctaccttcacccttctggtctggtgcctgagggaacccatcaggtcactgtgggccaaagtccctgccggccactgcccaaggacagctcaaaactcagaccagtgccccggaaagactttgtagaggagtttgagtgtgaactggagcccttgggcacccaggcagtggggcctaccaacgtcagcctcaccgtgactaacatgccaccgggcaagcacttccgggtagacggcacctccgtgctgagaggcttctctttcatggagccagtgctgatagcagtgcaacccctctttggcccacgggcaggaggcacctgtctcactcttgaaggccagagtctgtctgtaggcaccagccgggctgtgctggtcaatgggactgagtgtctgctagcacgggtcagtgaggggcagcttttatgtgccacaccccctggggccacggtggccagtgtcccccttagcctgcaggtggggggtgcccaggtacctggttcctggaccttccagtacagagaagaccctgtcgtgctaagcatcagccccaactgtggctacatcaactcccacatcaccatctgtggccagcatctaacttcagcatggcacttagtgctgtcattccatgacgggcttagggcagtggaaagcaggtgtgagaggcagcttccagagcagcagctgtgccgccttcctgaatatgtggtccgagacccccagggatgggtggcagggaatctgagtgcccgaggggatggagctgctggctttacactgcctggctttcgcttcctacccccaccccatccacccagtgccaacctagttccactgaagcctgaggagcatgccattaagtttgaggtctgcgtagatggtgaatgtcatatcctgggtagagtggtgcggccagggccagatggggtcccacagagcacgctccttggtatcctgctgcctttgctgctgcttgtggctgcactggcgactgcactggtcttcagctactggtggcggaggaagcagctagttcttcctcccaacctgaatgacctggcatccctggaccagactgctggagccacacccctgcctattctgtactcgggctctgactacagaagtggccttgcactccctgccattgatggtctggattccaccacttgtgtccatggagcatccttctccgatagtgaagatgaatcctgtgtgccactgctgcggaaagagtccatccagctaagggacctggactctgcgctcttggctgaggtcaaggatgtgctgattccccatgagcgggtggtcacccacagtgaccgagtcattggcaaaggccactttggagttgtctaccacggagaatacatagaccaggcccagaatcgaatccaatgtgccatcaagtcactaagtcgcatcacagagatgcagcaggtggaggccttcctgcgagaggggctgctcatgcgtggcctgaaccacccgaatgtgctggctctcattggtatcatgttgccacctgagggcctgccccatgtgctgctgccctatatgtgccacggtgacctgctccagttcatccgctcacctcagcggaaccccaccgtgaaggacctcatcagctttggcctgcaggtagcccgcagcatggagtacctggcagagcagaagtttgtgcacagggacctggctgcgcggaactgcatgctggacgagtcattcacagtcaaggtggctgactttggtttggcccgcgacatcctggacagggagtactatagtgttcaacagcatcgccacgctcgcctacctgtgaagtggatggcgctggagagcctgcagacctatagatttaccaccaagtctgatgtgtggtcatttggtgtgctgctgtgggaactgctgacacggggtgccccaccataccgccacattgacccttttgaccttacccacttcctggcccagggtcggcgcctgccccagcctgagtattgccctgattctctgtaccaagtgatgcagcaatgctgggaggcagacccagcagtgcgacccaccttcagagtactagtgggggaggtggagcagatagtgtctgcactgcttggggaccattatgtgcagctgccagcaacctacatgaacttgggccccagcacctcgcatgagatgaatgtgcgtccagaacagccgcagttctcacccatgccagggaatgtacgccggccccggccactctcagagcctcctcggcccacttgacttagttcttgggctggacctgcttagctgccttgagctaaccccaagctgcctctgggccatgccaggccagagggcagtggccctccaccttgttcctgccctttaactttcagaggcaataggtaaatggggcccatta

SEQ ID NO: 87582 - DNA, 4056 bp, Artificial Sequence
  derived and/or modified sequence
atggagctgctgccccccctgccccagagcttcctgctgctgctgctcttgccagccaaacccgccgctggcgaagattggcagtgccccaggacaccatacgcggcaagcagagattttgatgttaagtatgtcgtgccctcattttccgcggggggccttgttcaagccatggttacatacgaaggggatagaaacgaaagtgcagtgtttgttgctatcaggaaccggcttcatgttttgggcccagaccttaagtccgtacaaagcctcgctaccggtcccgccggcgacccggggtgtcagacttgtgcggcatgcggacctggaccacatggtcctcccggtgacaccgataccaaggtattagtgttagacccagcccttcccgccttagtgtcctgcggatcatctctccaaggccgttgcttcctgcatgaccttgaaccacaaggaaccgcggtgcaccttgccgctcctgcctgcctgttttccgcacaccacaaccggccagacgattgcccggattgcgtcgcctccccactcggtacccgggttactgtcgtggaacagggccaggcatcttatttttacgtagcgtcatccttggacgccgcagtcgctgcctcgttttctccgcgatcggtttcaatcaggcggctcaaggccgacgcgagcggctttgctccaggctttgttgcattaagcgtgctccctaaacatttggtgtcatattctattgagtacgtgcactcattccacactggtgcatttgtctatttcctgacagttcagccagcctccgtgaccgacgacccgagtgctcttcatacacgtcttgccagacttagcgccactgaacccgaactgggagactacagggaattagtgctagattgcaggttcgcccccaagcggcgtcggcggggggcccccgagggagggcagccctacccagtgctgcgcgtggcccactccgcccccgttggcgctcagctagcaacagagttgtcaatagcggagggtcaggaagtcttgtttggagtattcgtaaccgggaaagacggaggtcccggtgtgggccctaattccgtggtttgtgcatttcccatcgatcttctggacactctaatcgacgagggggtggagcgatgctgcgagtctccagtgcatccgggacttaggcgtggcctagacttctttcagagcccttcattctgtcccaatcccccaggactggaagccctgagtccaaacaccagctgtcgccattttcccctgctcgtatcaagcagcttttcacgtgtggacctgtttaacggactgctaggtcccgtgcaggtaacagccctctacgtaacgcgacttgacaacgttacagtagcgcatatgggtacaatggatggacggattttgcaagtcgagctcgtacgctccctgaactatctcctgtatgtctccaacttcagcctgggtgactccggacagccagttcaaagagacgtttccagactgggcgaccatctgttattcgcctcaggggaccaggtcttccaggtgcctattcaaggtccaggttgcagacacttcctgacttgcggcagatgccttagggcctggcacttcatgggctgcgggtggtgcggaaacatgtgcggacaacaaaaagaatgtcccgggagctggcagcaagatcattgcccaccaaagttgaccgagtttcatcctcattcggggccgctccgagggtctacaaggctgacactttgtgggtccaatttctatctgcacccgtctggcttagtgccagaagggactcaccaagtcaccgtcggtcaatccccatgcagaccactgcccaaggactcatctaaactccgacctgtaccccgcaaggacttcgttgaggaatttgagtgcgagttggagccattggggacccaggccgttgggccaacaaatgtgtctctgacagtgactaatatgccccccgggaagcacttcagggttgatggaacttctgtcttgaggggcttttctttcatggaaccagtgctgatcgcagtgcagccattgttcggaccgcgcgcaggcggcacatgcctgactctcgagggccaatcattaagcgttggcacctccagggccgtgctggtcaacggcacggagtgcttgcttgctagagtcagcgagggtcagctcctttgcgccaccccacccggggccactgtggccagtgttcctctgtccctacaagtgggcggtgcccaggtgcctggctcctggacattccaataccgcgaggaccccgtggtgctgagtatctcccccaactgtgggtacatcaactctcacataactatctgcgggcagcatctgacctccgcctggcacttggtgttgagttttcacgacggactgagggccgtggaatcccgctgcgagaggcagctgcctgaacagcagctctgtcgcctcccagaatatgttgtgcgagatccgcagggctgggtcgctggcaatctgagcgctaggggagacggcgccgctggctttaccctgccggggtttaggttcctgcctccaccccatccaccaagcgcaaatctagttcctctgaagcccgaggagcacgctataaaattcgaagtgtgtgtcgacggggagtgccacatccttgggcgagtggtcaggccaggcccagacggcgtgccccagagcaccctcctgggaatcctactgccgctgctcctacttgtggcggcccttgccacggccctggttttcagttactggtggaggaggaagcagctagtactgccaccgaatctgaacgacctcgcctcattagaccagaccgccggagctaccccattacccatcctgtatagcgggagcgactacaggtctggcctggcactgcccgccattgacgggctggactcaaccacctgcgtacatggcgcttctttctccgatagcgaagacgaaagctgcgtgcctctcttaagaaaagaatccattcagctgcgagaccttgactctgctttgctcgccgaagttaaagacgttctcatcccacacgaaagagtggtgacacattcggacagagttattggaaaggggcactttggcgttgtgtatcatggggagtacatcgaccaagcccagaatcgtattcagtgtgcaatcaaatctctgagcagaatcacagaaatgcagcaggtcgaggcattcttgcgtgagggtcttttaatgcgcggattgaatcatccaaacgtcctggcccttataggaatcatgcttccacccgagggcctgccacacgtcctcctgccttacatgtgccacggcgatctgttgcagtttatcagatccccccagcgcaatccaactgtcaaagatctcatttcctttggcctgcaggtagccagatctatggaatatctggcagaacagaagttcgtccaccgcgacctggctgctagaaattgcatgctcgatgaaagcttcactgttaaggtagcagattttggtctcgcccgggacattcttgacagggaatactactcagtacagcagcaccggcatgccaggttgcctgtgaaatggatggccctagagtcgctccagacctatcgcttcacaaccaagtctgatgtttggtcattcggcgtactgctttgggaactcttgacccgcggggctccaccttaccgccatattgacccctttgatcttacccacttcctggcacaggggaggcgcctgccacagcctgaatattgccccgacagcctataccaggtgatgcagcagtgctgggaagctgacccggccgtgcgtccaacatttcgagtgctggttggcgaagttgagcagattgtttctgctctgcttggcgaccactacgtgcagctgccggctacctacatgaacttgggaccaagtaccagtcacgagatgaacgtgaggcctgaacaaccgcagtttagtcccatgcctggaaatgtaaggagacccagaccactgtccgagccccctagacctacatag

SEQ ID NO: 87583 - DNA, 4056 bp, Artificial Sequence
  derived and/or modified sequence
atggagttgctccctcctctccctcagtcgttcttgctgctgctgctgctgcccgctaagcccgctgccggagaggactggcagtgccctaggaccccttacgccgcttccagagattttgacgtgaaatacgtggtgcccagcttcagcgcgggaggcttggttcaggcgatggtcacatatgaaggggaccgcaacgagtctgctgtgtttgttgccattcggaaccgcctccacgtattggggcctgatctcaagtctgttcagtccctggccacggggccagccggagaccccggatgtcagacatgtgcggcttgcggcccaggcccacatggcccaccgggagatacagataccaaggtgttagtactcgacccagctctacctgccctggtgtcatgcggcagttctctccaaggacgttgcttccttcatgatctggagccgcagggcactgctgtccaccttgcagcacccgcttgcttgttctcagcccatcacaatagacctgacgactgcccagattgtgtggcctctccgctcggcacacgcgtgacggtggtggagcagggccaagcctcctacttctacgtcgcgagtagcctagacgctgccgtcgccgcaagcttttccccccgttctgtgtccattcggcgattgaaggctgatgccagtgggtttgccccagggttcgtggcattgtctgtgctgcctaaacacctggtatcctacagcattgagtatgtgcactcattccacacgggagcatttgtctactttttgacagtccagcccgcaagtgtgaccgacgatcctagcgccctccacacccggctagccaggctgagtgctaccgaacccgagctgggcgattatagagaactggtgttggattgcagatttgcacccaaaagacggcgaagaggcgcacctgagggtggacagccttacccagttcttagagttgctcattccgctcccgtgggagcccagctggcaactgagcttagcattgccgagggacaggaagtactgttcggcgtgttcgtgaccggcaaggatggcggacccggagtaggcccaaattctgtggtttgcgcatttcccattgatctgctcgacacccttatagacgaaggagtggagaggtgttgcgagtctcccgtgcatcccggacttaggagagggttggactttttccagtccccctccttttgccccaatcctccagggcttgaagcactgtctccaaacacgagttgtcgccacttccctctgcttgtgagctctagcttctctcgcgtggacctcttcaatggcctgctgggcccagttcaggttaccgccttgtatgtgacaaggttggataatgtaaccgtggctcacatggggaccatggacgggagaattctccaggtcgaacttgtccgtagtctaaactacctgctgtacgtaagcaacttctcccttggggacagtggtcagccagttcagcgagacgttagccggctgggcgaccatctgttgtttgcttccggtgatcaggtgttccaggttcctatccaagggccaggttgtaggcacttccttacttgcggccgttgcttacgagcctggcactttatggggtgcggatggtgtgggaatatgtgcggccaacagaaggagtgtccgggttcatggcagcaagaccactgtcccccaaagctcacagagtttcatccccacagtggcccactgaggggtagtactcgcctgaccctctgcgggagtaatttttatctgcaccccagtgggcttgtgccagaaggtacccaccaagtcaccgtggggcaatccccttgtcggcctctgccaaaagattcatctaaactaaggccagtgcccagaaaagattttgtggaagagttcgagtgcgagttggagccacttggaactcaggcagtgggcccaacaaatgtgagcctgacagtgaccaacatgcctccaggcaaacacttccgtgtggatgggaccagtgtcttgcgtggcttcagctttatggaaccagtcctcattgcagtgcagcccctgtttggcccacgtgcaggaggaacctgtcttacactggagggacagtcgctatcagtgggaacaagcagagctgttctggtaaatggaactgagtgcttgctcgctagagtgtcagaagggcagcttctttgtgctacacccccaggcgctaccgtagcatccgtccccctctcacttcaagttggcggagctcaggtcccgggttcctggacctttcagtaccgcgaggacccggtggtgctgtccattagccccaattgtggttacatcaacagccacatcacgatctgtggccagcacttgacaagtgcctggcatctggtgcttagttttcacgatggtctgcgcgctgtggaatcccggtgtgaaagacaactgccagagcagcaactatgtaggctgcccgaatatgtggtccgcgacccacagggctgggttgctggaaatctcagtgcacgcggtgatggcgctgccggattcacattgcccggtttcagatttttgccacctccacatccaccctcagcaaatttagtgcccttgaagccagaggagcacgcaatcaagttcgaagtatgcgtggacggcgaatgccacatactgggccgtgtggttcgaccgggtccagatggcgtgccccaatccactctactagggatactcctgcctttgcttctactagtcgccgcactggccactgctctcgtcttctcctactggtggcgcagaaagcagttagtgcttcccccaaatctgaacgatttggcttctctggaccagacagcaggagcaacgccactgccaatcctgtactcgggttctgattaccggtcaggtctagccctgcccgctatcgacggactggattcaacgacatgcgttcacggggcaagcttttcagatagtgaggacgaatcttgcgtgccgctgcttaggaaagagtctatccaactgcgcgatctcgatagcgcgttgttggctgaagtcaaggacgtactgataccacatgagagagtagtcactcattctgatcgagtgattgggaaggggcattttggcgtggtgtaccacggggagtacatcgatcaggctcagaatcggatccagtgtgccattaagtctctaagtcgcattactgagatgcagcaggtggaggcctttttgcgcgaaggactgctaatgaggggactaaatcacccaaacgtgctggcgctgattggcattatgctgcctccggagggactgccccacgtgctcctcccttatatgtgtcacggcgacctcctgcaatttatcagaagcccccagcgaaatcctaccgtgaaagatctgatatctttcggcctgcaggtcgcaagatctatggaatatcttgcagaacagaaattcgtccaccgggatctcgctgcccgaaattgtatgctggatgagtccttcacagtgaaggtagcagatttcggcctcgccagggacatccttgacagggaatattacagcgtgcagcagcatcggcacgcccgtctcccagtgaaatggatggctctcgagtcactccagacgtaccgattcacgaccaaatctgacgtgtggagcttcggcgtactcttatgggaactgctcactagaggagcaccgccataccggcacattgacccatttgacttgactcacttcctggcacagggaagaagactcccgcagcccgaatactgtcccgattccttataccaggttatgcagcagtgttgggaagcagacccagcggttcgaccaacatttagggtgttagtgggggaggttgaacaaatagtgtctgctctgcttggcgatcactatgtacagcttcccgctacgtatatgaatctgggaccgtccacttctcacgaaatgaacgtaagaccggaacagccacaattcagtcccatgcccggaaacgtgcgccgaccccgaccactgtccgagccccctcggccaacttag

SEQ ID NO: 87584 - DNA, 4056 bp, Artificial Sequence
  derived and/or modified sequence
atggagctgctgccccccctgccccagagcttcctgctgctgctgctgctgcccgccaagcccgccgccggcgaggactggcagtgccccagaaccccctacgccgccagcagagacttcgacgtgaagtacgtggtgcccagcttcagcgccggcggcctggtgcaggccatggtgacctacgagggcgacagaaacgagagcgccgtgttcgtggccatcagaaacagactgcacgtgctgggccccgacctgaagagcgtgcagagcctggccaccggccccgccggcgaccccggctgccagacctgcgccgcctgcggccccggcccccacggcccccccggcgacaccgacaccaaggtgctggtgctggaccccgccctgcccgccctggtgagctgcggcagcagcctgcagggcagatgcttcctgcacgacctggagccccagggcaccgccgtgcacctggccgcccccgcctgcctgttcagcgcccaccacaacagacccgacgactgccccgactgcgtggccagccccctgggcaccagagtgaccgtggtggagcagggccaggccagctacttctacgtggccagcagcctggacgccgccgtggccgccagcttcagccccagaagcgtgagcatcagaagactgaaggccgacgccagcggcttcgcccccggcttcgtggccctgagcgtgctgcccaagcacctggtgagctacagcatcgagtacgtgcacagcttccacaccggcgccttcgtgtacttcctgaccgtgcagcccgccagcgtgaccgacgaccccagcgccctgcacaccagactggccagactgagcgccaccgagcccgagctgggcgactacagagagctggtgctggactgcagattcgcccccaagagaagaagaagaggcgcccccgagggcggccagccctaccccgtgctgagagtggcccacagcgcccccgtgggcgcccagctggccaccgagctgagcatcgccgagggccaggaggtgctgttcggcgtgttcgtgaccggcaaggacggcggccccggcgtgggccccaacagcgtggtgtgcgccttccccatcgacctgctggacaccctgatcgacgagggcgtggagagatgctgcgagagccccgtgcaccccggcctgagaagaggcctggacttcttccagagccccagcttctgccccaacccccccggcctggaggccctgagccccaacaccagctgcagacacttccccctgctggtgagcagcagcttcagcagagtggacctgttcaacggcctgctgggccccgtgcaggtgaccgccctgtacgtgaccagactggacaacgtgaccgtggcccacatgggcaccatggacggcagaatcctgcaggtggagctggtgagaagcctgaactacctgctgtacgtgagcaacttcagcctgggcgacagcggccagcccgtgcagagagacgtgagcagactgggcgaccacctgctgttcgccagcggcgaccaggtgttccaggtgcccatccagggccccggctgcagacacttcctgacctgcggcagatgcctgagagcctggcacttcatgggctgcggctggtgcggcaacatgtgcggccagcagaaggagtgccccggcagctggcagcaggaccactgcccccccaagctgaccgagttccacccccacagcggccccctgagaggcagcaccagactgaccctgtgcggcagcaacttctacctgcaccccagcggcctggtgcccgagggcacccaccaggtgaccgtgggccagagcccctgcagacccctgcccaaggacagcagcaagctgagacccgtgcccagaaaggacttcgtggaggagttcgagtgcgagctggagcccctgggcacccaggccgtgggccccaccaacgtgagcctgaccgtgaccaacatgccccccggcaagcacttcagagtggacggcaccagcgtgctgagaggcttcagcttcatggagcccgtgctgatcgccgtgcagcccctgttcggccccagagccggcggcacctgcctgaccctggagggccagagcctgagcgtgggcaccagcagagccgtgctggtgaacggcaccgagtgcctgctggccagagtgagcgagggccagctgctgtgcgccaccccccccggcgccaccgtggccagcgtgcccctgagcctgcaggtgggcggcgcccaggtgcccggcagctggaccttccagtacagagaggaccccgtggtgctgagcatcagccccaactgcggctacatcaacagccacatcaccatctgcggccagcacctgaccagcgcctggcacctggtgctgagcttccacgacggcctgagagccgtggagagcagatgcgagagacagctgcccgagcagcagctgtgcagactgcccgagtacgtggtgagagacccccagggctgggtggccggcaacctgagcgccagaggcgacggcgccgccggcttcaccctgcccggcttcagattcctgccccccccccacccccccagcgccaacctggtgcccctgaagcccgaggagcacgccatcaagttcgaggtgtgcgtggacggcgagtgccacatcctgggcagagtggtgagacccggccccgacggcgtgccccagagcaccctgctgggcatcctgctgcccctgctgctgctggtggccgccctggccaccgccctggtgttcagctactggtggagaagaaagcagctggtgctgccccccaacctgaacgacctggccagcctggaccagaccgccggcgccacccccctgcccatcctgtacagcggcagcgactacagaagcggcctggccctgcccgccatcgacggcctggacagcaccacctgcgtgcacggcgccagcttcagcgacagcgaggacgagagctgcgtgcccctgctgagaaaggagagcatccagctgagagacctggacagcgccctgctggccgaggtgaaggacgtgctgatcccccacgagagagtggtgacccacagcgacagagtgatcggcaagggccacttcggcgtggtgtaccacggcgagtacatcgaccaggcccagaacagaatccagtgcgccatcaagagcctgagcagaatcaccgagatgcagcaggtggaggccttcctgagagagggcctgctgatgagaggcctgaaccaccccaacgtgctggccctgatcggcatcatgctgccccccgagggcctgccccacgtgctgctgccctacatgtgccacggcgacctgctgcagttcatcagaagcccccagagaaaccccaccgtgaaggacctgatcagcttcggcctgcaggtggccagaagcatggagtacctggccgagcagaagttcgtgcacagagacctggccgccagaaactgcatgctggacgagagcttcaccgtgaaggtggccgacttcggcctggccagagacatcctggacagagagtactacagcgtgcagcagcacagacacgccagactgcccgtgaagtggatggccctggagagcctgcagacctacagattcaccaccaagagcgacgtgtggagcttcggcgtgctgctgtgggagctgctgaccagaggcgcccccccctacagacacatcgaccccttcgacctgacccacttcctggcccagggcagaagactgccccagcccgagtactgccccgacagcctgtaccaggtgatgcagcagtgctgggaggccgaccccgccgtgagacccaccttcagagtgctggtgggcgaggtggagcagatcgtgagcgccctgctgggcgaccactacgtgcagctgcccgccacctacatgaacctgggccccagcaccagccacgagatgaacgtgagacccgagcagccccagttcagccccatgcccggcaacgtgagaagacccagacccctgagcgagccccccagacccacctag

SEQ ID NO: 87585 - protein, 85 aa, Artificial Sequence
  derived and/or modified sequence
MVKQIESKTAFQEALDAAGDKLVVVDFSATWCGPCKMIKPFFHDVASECEVKCMPTFQFFKKGQKVGEFSGANKEKLEATINELV

SEQ ID NO: 87586 - DNA, 258 bp, Artificial Sequence
  derived and/or modified sequence
atggtgaagcagatcgagagcaagaccgccttccaggaggccctggacgccgccggcgacaagctggtggtggtggacttcagcgccacctggtgcggcccctgcaagatgatcaagcccttcttccacgacgtggccagcgagtgcgaggtgaagtgcatgcccaccttccagttcttcaagaagggccagaaggtgggcgagttcagcggcgccaacaaggagaagctggaggccaccatcaacgagctggtgtag

SEQ ID NO: 87587 - DNA, 258 bp, Artificial Sequence
  derived and/or modified sequence
atggtcaaacagatagaatcaaagacagcctttcaggaggcgttggacgccgccggtgacaagctggtggtggtcgacttctctgctacatggtgcggcccctgcaagatgattaagccatttttccacgatgtagcctcagagtgtgaagtgaaatgtatgcctaccttccaattcttcaagaagggacagaaggtgggtgagttctcgggggcaaataaggaaaagctagaggccacaatcaacgaattggtatag

SEQ ID NO: 87588 - DNA, 258 bp, Artificial Sequence
  derived and/or modified sequence
atggtgaagcagatcgagagcaagacagccttccaggaggccctggatgctgctggggacaagctggtggtggtggacttcagcgccacctggtgtggcccctgcaagatgatcaagcccttcttccatgatgtggcctctgaatgtgaggtgaagtgcatgcccaccttccagttcttcaagaagggccagaaggtgggggagttcagcggggccaacaaggagaagctggaggccaccatcaatgagctggtgtag

SEQ ID NO: 87589 - DNA, 258 bp, Artificial Sequence
  derived and/or modified sequence
atggtgaagcagatcgagagcaagaccgccttccaggaggccctggacgctgccggtgataagttggtcgtagttgacttttcagctacctggtgtggcccgtgtaaaatgataaaaccattttttcacgatgtagcatccgaatgtgaagtcaagtgcatgccgaccttccaatttttcaaaaagggacagaaggtgggcgagttttctggagccaacaaagaaaaattagaggctaccataaacgagctcgtttag

SEQ ID NO: 87590 - DNA, 258 bp, Artificial Sequence
  derived and/or modified sequence
atggtcaagcagatcgagagcaagacagccttccaggaggctctagacgctgcgggagacaagctggtcgtagtagatttttcagccacttggtgcggtccctgtaagatgatcaagccatttttccacgatgtcgcgtcagaatgtgaggttaagtgtatgccaacattccagtttttcaaaaagggacagaaagttggggaattctcgggggctaataaggaaaagttggaggcaacaataaatgagttagtgtag

SEQ ID NO: 87591 - DNA, 635 bp, Artificial Sequence
  derived and/or modified sequence
tacagccgctcgtcagactccagcagccaagatggtgaagcagatcgagagcaagactgcttttcaggaagccttggacgctgcaggtgataaacttgtagtagttgacttctcagccacgtggtgtgggccttgcaaaatgatcaagcctttctttcatgatgttgcttcagagtgtgaagtcaaatgcatgccaacattccagttttttaagaagggacaaaaggtgggtgaattttctggagccaataaggaaaagcttgaagccaccattaatgaattagtctaatcatgttttctgaaaatataaccagccattggctatttaaaacttgtaatttttttaatttacaaaaatataaaatatgaagacataaacccagttgccatctgcgtgacaataaaacattaatgctaacactttttaaaaccgtctcatgtctgaatagctttcaaaataaatgtgaaatggtcatttaatgtattttcctatattctcaatcactttttagtaaccttgtaggccactgattattttaagattttaaaaattattattgctaccttaatgtattgctacaaaaatctcttgttgggggcaatgcaggtaataaagtagtatgttgttatttgtt

SEQ ID NO: 87592 - protein, 490 aa, Artificial Sequence
  derived and/or modified sequence
MESISMMGSPKSLSETFLPNGINGIKDARKVTVGVIGSGDFAKSLTIRLIRCGYHVVIGSRNPKFASEFFPHVVDVTHHEDALTKTNIIFVAIHREHYTSLWDLRHLLVGKILIDVSNNMRINQYPESNAEYLASLFPDSLIVKGFNVVSAWALQLGPKDASRQVYICSNNIQARQQVIELARQLNFIPIDLGSLSSAREIENLPLRLFTLWRGPVVVAISLATFFFLYSFVRDVIHPYARNQQSDFYKIPIEIVNKTLPIVAITLLSLVYLAGLLAAAYQLYYGTKYRRFPPWLETWLQCRKQLGLLSFFFAMVHVAYSLCLPMRRSERYLFLNMAYQQVHANIENSWNEEEVWRIEMYISFGIMSLGLLSLLAVTSIPSVSNALNWREFSFIQSTLGYVALLISTFHVLIYGWKRAFEEEYYRFYTPPNFVLALVLPSIVILGKIILFLPCISRKLKRIKKGWEKSQFLEEGMGGTIPHVSPERVTVM

SEQ ID NO: 87593 - DNA, 1473 bp, Artificial Sequence
  derived and/or modified sequence
atggagagcatcagcatgatgggcagccccaagagcctgagcgagaccttcctgcccaacggcatcaacggcatcaaggacgccagaaaggtgaccgtgggcgtgatcggcagcggcgacttcgccaagagcctgaccatcagactgatcagatgcggctaccacgtggtgatcggcagcagaaaccccaagttcgccagcgagttcttcccccacgtggtggacgtgacccaccacgaggacgccctgaccaagaccaacatcatcttcgtggccatccacagagagcactacaccagcctgtgggacctgagacacctgctggtgggcaagatcctgatcgacgtgagcaacaacatgagaatcaaccagtaccccgagagcaacgccgagtacctggccagcctgttccccgacagcctgatcgtgaagggcttcaacgtggtgagcgcctgggccctgcagctgggccccaaggacgccagcagacaggtgtacatctgcagcaacaacatccaggccagacagcaggtgatcgagctggccagacagctgaacttcatccccatcgacctgggcagcctgagcagcgccagagagatcgagaacctgcccctgagactgttcaccctgtggagaggccccgtggtggtggccatcagcctggccaccttcttcttcctgtacagcttcgtgagagacgtgatccacccctacgccagaaaccagcagagcgacttctacaagatccccatcgagatcgtgaacaagaccctgcccatcgtggccatcaccctgctgagcctggtgtacctggccggcctgctggccgccgcctaccagctgtactacggcaccaagtacagaagattccccccctggctggagacctggctgcagtgcagaaagcagctgggcctgctgagcttcttcttcgccatggtgcacgtggcctacagcctgtgcctgcccatgagaagaagcgagagatacctgttcctgaacatggcctaccagcaggtgcacgccaacatcgagaacagctggaacgaggaggaggtgtggagaatcgagatgtacatcagcttcggcatcatgagcctgggcctgctgagcctgctggccgtgaccagcatccccagcgtgagcaacgccctgaactggagagagttcagcttcatccagagcaccctgggctacgtggccctgctgatcagcaccttccacgtgctgatctacggctggaagagagccttcgaggaggagtactacagattctacaccccccccaacttcgtgctggccctggtgctgcccagcatcgtgatcctgggcaagatcatcctgttcctgccctgcatcagcagaaagctgaagagaatcaagaagggctgggagaagagccagttcctggaggagggcatgggcggcaccatcccccacgtgagccccgagagagtgaccgtgatgtag

SEQ ID NO: 87594 - DNA, 1473 bp, Artificial Sequence
  derived and/or modified sequence
atggagtcaatcagtatgatgggatctcctaagagcctgtctgagacttttctgcccaatggcatcaacggcataaaagatgccagaaaggtcaccgtaggcgtcattggatctggggattttgccaagagtctcaccataagactgattcgctgcgggtaccacgtagttattggctcccggaacccaaagttcgcaagcgaattttttcctcatgtagtggacgtgacgcatcacgaggacgccctgacaaagacgaatatcatctttgtcgctatccaccgggagcactacacctccctctgggatctcaggcacctgttagtagggaagatcctgatcgacgtgtcgaacaatatgcggattaaccagtaccctgagagtaatgccgaatacctagccagtctgttcccggattcccttattgtaaaaggcttcaacgttgttagcgcctgggcactgcaactgggcccgaaggatgcatcacgacaagtttacatttgctccaataatatccaggctcgacaacaggtgatcgagcttgctcgacagctgaatttcatccccatagacctgggctctttgagctcagccagagagatcgaaaacttgcctctgaggctattcaccctgtggcgagggcccgtcgtcgttgcaataagcttggcgacctttttcttcctgtattccttcgtgagagatgtcatccacccctacgccaggaaccaacagagtgatttttataagatcccgatcgagattgtaaacaagacccttcccatcgtggctatcactttgcttagtcttgtctatcttgcaggactcttggccgcggcataccagttgtattacggcaccaagtatagacggttcccaccctggctggagacctggttacagtgccgaaaacaactgggcctgctcagcttcttctttgccatggttcacgtggcttacagcctatgtctccctatgcgacggagtgagcgctacctgtttttgaacatggcatatcagcaagtgcacgctaatatcgagaactcctggaatgaagaggaggtgtggaggatcgagatgtacatttcctttggcattatgtctctcggtctcctttcgttgctcgccgtaacatccatcccttctgtgtccaacgccttaaactggagggaattcagctttatccaatcgacactgggctacgtggctttattaatttcgacttttcacgtccttatttacggctggaaacgtgctttcgaggaggagtactaccgcttctacactccccctaatttcgttctggctctggtgctgccctctattgtgattctgggcaagataatcctgttcttgccctgtatatccagaaaattaaaacggataaagaagggctgggaaaagtcccagttcctggaagaaggcatggggggcaccatcccacacgtatctccagagagggtaacggtgatgtag

SEQ ID NO: 87595 - DNA, 1473 bp, Artificial Sequence
  derived and/or modified sequence
atggaaagcatttctatgatgggtagccctaaatcactgagcgagaccttcttaccaaacggaatcaacgggattaaggatgctcgcaaggttacagtgggggtgattggctctggcgatttcgctaaatccctgacgattaggctgattagatgcggataccacgttgtcatcggcagcagaaaccccaagttcgcatcagagttcttcccccacgttgtggatgtgactcaccacgaggatgcgcttaccaaaactaacatcattttcgttgccatccaccgggaacactacacgtccctctgggacttacggcatttgttggtaggaaaaatcctgatagacgtgtccaataacatgcgcattaatcaatacccagaatcaaacgccgaatacctggccagtctgttcccagattctctcatcgtcaaagggttcaacgttgtctccgcctgggccctgcagcttgggcctaaggatgctagcaggcaggtgtacatctgctcgaacaacattcaggctcgccagcaggtcattgagctggctcgccagctgaacttcatacccatcgaccttggatctctttcctccgctcgggagatcgagaacctccctctgcgtctcttcacgctgtggcgtggacctgtagtggtcgcaattagcctagccaccttcttttttttgtacagcttcgttagagacgtaatccacccgtatgcccggaaccaacagtctgacttctataagattcccattgagattgttaacaagacattaccaattgttgcaataaccctcctgtccttggtctatcttgcagggctcctggctgctgcctatcagctttactacggaaccaagtatcggcgatttccaccatggctggaaacatggcttcagtgtagaaaacagcttggcctcctctccttcttcttcgccatggtgcacgtggcttactctctttgcctaccgatgcgccgttctgaaaggtacttattcttgaacatggcctaccaacaggtgcacgcaaacatagagaatagctggaacgaagaggaggtatggagaattgaaatgtacatttcattcggaataatgtccctggggctactgagccttctggcagttaccagtatccccagcgtgtcaaacgccctaaactggagagagttctctttcatccagagcacgttaggctacgtggccctccttatctccacctttcacgtgttaatctatggctggaaacgtgcattcgaagaggaatactaccggttctatacacctcctaatttcgttctggctcttgtactaccctccattgttatccttgggaaaatcatcctattcctcccatgtatctcaaggaaactcaagagaattaaaaagggctgggaaaagtctcagttcctggaagagggcatgggcggcaccatccctcacgtgagtcctgagagggtcactgtgatgtag

SEQ ID NO: 87596 - DNA, 1473 bp, Artificial Sequence
  derived and/or modified sequence
atggaaagcataagcatgatgggtagtcccaaatccctctctgagaccttcctcccaaacgggatcaatggaattaaagacgctcgtaaggttacagttggagtgattgggtccggcgacttcgcgaagtccctgaccatccgcttaattcgctgcgggtatcatgtggtaatagggagcaggaaccccaaattcgcaagtgagttcttcccccacgtcgtagatgtcactcaccatgaggatgctctgacaaaaactaatatcatctttgtcgctatccatcgcgagcactacaccagtctctgggacctccggcatctcctggttggaaaaattctgattgatgtctctaacaacatgcgcatcaaccaataccctgagtcaaatgctgagtacctcgcatcgcttttccctgattccctcatagtgaaagggttcaatgtggtgtcagcctgggcacttcaactaggaccaaaagacgcttctaggcaagtgtacatctgttccaacaacatccaagctcgacagcaggtgattgaactggctcgtcaactaaactttatcccgatcgacctgggctcactgagcagcgcacgcgaaatagagaatctgccattacgcttatttacgctgtggcgcggccccgtggttgtggcgattagcttggccactttcttctttttatactctttcgtcagagacgtcatccacccctacgcaagaaaccagcaatctgacttttataaaatcccaatcgaaattgtgaacaagaccttgccaattgtagcaatcaccctactgtcgttagtgtacctggcaggtcttttggcggcggcgtatcagctttactacggcaccaagtaccgccgctttccaccatggctcgaaacatggctccagtgtcggaagcagctaggtctgcttagcttctttttcgcaatggtgcacgtcgcctatagtctatgccttcctatgaggagaagcgagcgctacttattcctgaacatggcatatcagcaggtccacgccaatatcgagaacagttggaacgaagaagaggtctggcggatagagatgtacatatcatttggaataatgtcccttggactgctctccctgttagccgtgaccagcatcccctcagtttcaaatgccctgaactggcgagaattttccttcatccagtccactctggggtatgtggccctgctgatctctacctttcacgtgctcatctacggttggaaacgcgccttcgaggaggaatactacagattttatactcctccaaacttcgtgctggcgctggttctgccctctatagtgattctggggaaaattattctctttctgccttgtatctcacgtaaactaaaacgaattaagaagggctgggagaagtcccagttcttggaggaggggatggggggtactatcccacatgtgtccccagaaagggtgaccgtgatgtag

SEQ ID NO: 87597 - DNA, 1473 bp, Artificial Sequence
  derived and/or modified sequence
atggagagcatctccatgatgggcagccccaagagcctgtctgagaccttcctgcccaacggcatcaatggcatcaaggatgccaggaaggtgacagtgggcgtcatcggcagcggggactttgccaagagcctgaccatccgcctcatccgctgtggctaccacgtggtgattggcagcaggaaccccaagtttgccagcgagttcttcccccacgtggtggatgtgacccaccatgaagatgccctgaccaagaccaacatcatctttgtggccatccaccgggagcactacaccagcctgtgggacctgcggcacctgctggtgggcaagatcctgattgatgtgagcaacaacatgaggatcaaccagtacccagagagcaatgctgagtacctggccagcctcttcccagacagcctcatcgtgaagggcttcaacgtggtgtctgcctgggccctgcagctgggccccaaggatgccagccggcaggtgtacatctgcagcaacaacatccaggcccggcagcaggtgattgagctggcccggcagctgaacttcatccccatcgacctgggcagcctgagcagcgcccgggagattgagaacctgcccctgcggctcttcaccctgtggaggggccctgtggtggtggccatcagcctggccaccttcttcttcctgtacagctttgtgagagatgtgatccacccctatgccaggaaccagcagagcgacttctacaagatccccatcgagatcgtgaacaagaccctgcccatcgtggccatcaccctgctgagcctggtgtacctggccggcctgctggccgccgcctaccagctgtactacggcaccaagtaccgccgcttccccccctggctggagacctggctgcagtgcaggaagcagctgggcctgctgtccttcttctttgccatggtgcacgtggcctacagcctgtgcctgcccatgagaagaagtgagcgctacctgttcctgaacatggcctaccagcaggtgcacgccaacatcgagaacagctggaatgaggaggaggtgtggagaattgagatgtacatcagctttggcatcatgagcctgggcctgctgagcctgctggccgtgaccagcatccccagcgtgtccaatgccctgaactggagggagttctccttcatccagagcaccctgggctacgtggccctgctgatcagcaccttccacgtgctgatctacggctggaagagggcctttgaggaggagtactaccgcttctacaccccacccaactttgtgctggccctggtgctgcccagcatcgtcatcctgggcaagatcatcctcttcctgccctgcatcagcaggaagctgaagaggatcaagaagggctgggagaagagccagttcctggaggagggcatgggcggcaccatcccccacgtgtccccagagcgggtgacagtgatgtag

SEQ ID NO: 87598 - DNA, 1473 bp, Artificial Sequence
  derived and/or modified sequence
atggagagcatcagcatgatgggcagccccaagagcctgagcgagaccttcttgccaaatgggatcaatgggattaaggacgcaaggaaagttaccgtaggggtgattggcagcggcgattttgctaagtcactcacgattagattgatacggtgcggataccacgtcgttatcggctccagaaaccccaaattcgccagcgaattttttcctcatgtggtagatgtaacacaccacgaagatgcccttacaaaaacaaacatcatctttgtggcaattcacagggaacactacacttccctctgggatctgcggcatctattagtaggcaaaatactgatagacgtgagcaataacatgagaattaatcagtatcctgaatcaaacgctgagtaccttgcgtccctgtttcctgacagcctgatagtgaaagggttcaacgtggtttccgcatgggcgctgcagctggggccaaaagacgctagtaggcaggtctatatttgcagcaacaatattcaggcccggcaacaggttattgagctcgccaggcagctcaatttcataccaattgatctggggagcctgtcttctgccagggagattgaaaacctaccgttacgcttgtttacactttggcgcggacctgtcgtggtggcgatctctctcgcgactttcttttttctgtacagcttcgtgcgggacgtgatccatccctacgctaggaaccagcaatccgacttctacaagattcctatcgagatagtgaataaaacacttccaatcgtcgccatcaccttactgtcgttggtgtacctggccggcttgcttgcggcagcgtaccagctctattacggtacaaaatatcgcagattcccaccgtggctcgaaacatggcttcaatgtcgaaagcagctcgggctcctgtccttcttttttgcaatggtacacgttgcttatagtctgtgtttacctatgaggcggagtgaaaggtatttatttttaaatatggcctaccagcaggtgcatgccaatatagagaatagctggaatgaagaggaggtttggcgcattgagatgtacatatcattcgggattatgagtctggggctcctgtctttgctggcggttacctctattccttctgtcagcaatgcactcaattggagggaattctcttttatccaatccacacttggatacgtcgccctgctgatctctacgttccacgtgctcatttatgggtggaaaagggcattcgaagaggaatactataggttctacactccgcctaacttcgtcctggccttggtgctaccgtccatcgtgatactaggtaaaattatactcttcttgccctgtatttcgaggaagctgaagcgcataaaaaaggggtgggaaaaatcacagtttctggaggagggaatgggtggaactataccgcacgtatctcccgagcgtgtgaccgtgatgtag

SEQ ID NO: 87599 - DNA, 1473 bp, Artificial Sequence
  derived and/or modified sequence
atggagagcatcagcatgatgggcagccccaagagcctgagcgagacatttcttcccaatgggataaatgggatcaaagacgccaggaaggtcaccgtgggggtgattgggtccggggacttcgcgaaaagcctcaccatcaggctgattcgctgcgggtatcatgtggtgataggtagccggaatcccaagttcgctagcgagtttttcccgcacgtggtagacgtgacccatcatgaggatgctctgacaaagaccaatattattttcgtcgctatccaccgtgagcattacacatcactgtgggacctgcgccatctactggtgggaaagatattaatcgatgtgtcgaataacatgcgcataaatcagtatccagaatcaaatgctgaatacctcgcaagcctatttcccgacagcctgatcgtgaaaggttttaatgtcgtgtcagcatgggccctccagttagggcccaaagacgccagtagacaggtatacatttgttctaacaacatccaggcccggcagcaggtaatagaactggctcggcaattaaactttatcccaatcgacctcgggagcctcagctctgcgcgtgaaattgagaacctgcccctcaggctgtttacactatggcgcggccctgtcgtggtcgccatttctcttgctacatttttttttctctactcattcgtccgggacgttattcacccctacgcgcgaaaccagcagtccgatttttataagattcccattgagatcgttaacaaaactctgccaattgtggccatcacattactgagcctggtgtacttagcgggcttgctggctgccgcctaccagctttattatggtacgaaataccgaaggtttcccccctggctagaaacctggctgcaatgccggaagcagctagggctgttgtcgtttttttttgctatggtccacgttgcatacagcctgtgcctgcctatgaggagaagcgaaagatacttgtttctgaatatggcctaccagcaggtgcacgccaatatcgagaacagctggaatgaggaggaggtatggcgcattgagatgtatatctcttttggcatcatgagcctgggactccttagtctgctggctgttacttctattccatcagtatcaaacgctcttaattggagggagttttccttcattcagagcacactgggatatgtggctctgctcatctccacgttccacgtgctaatctatgggtggaagcgcgccttcgaagaagagtattatcggttttataccccacctaatttcgtcctcgccctcgtcttgcccagtattgtcatcctgggtaagataatactgtttttaccttgtatctccagaaagctgaagcgcatcaagaaggggtgggaaaagtctcagttcctcgaagagggcatgggtgggactattcctcatgtcagcccagaacgagtgaccgtcatgtag

SEQ ID NO: 87600 - DNA, 1473 bp, Artificial Sequence
  derived and/or modified sequence
atggagagcatcagcatgatgggcagccccaagagcctgagcgagacgttcctaccaaacggaatcaatggcatcaaagacgctcgcaaggtcactgtgggcgtgataggatcaggagacttcgccaaatctctcaccatccgtctgatccgctgtggctaccacgttgtgattggatctcgcaacccaaagtttgcaagtgaattctttccacatgttgtggacgtcacgcatcacgaggatgcacttacaaagaccaacattatcttcgtcgcaatacatcgggagcattacactagcctgtgggatctgcggcatctcctcgtggggaagattcttatcgacgtatccaataacatgcggattaaccagtacccagagtccaatgctgaatacttggccagtctgtttcccgattcactgatcgtgaaagggttcaacgttgtatcagcctgggccctgcaactgggacccaaggacgcatctaggcaggtgtatatttgttcaaataacatccaggccagacaacaggtcattgagttagccaggcagttgaatttcattcccatcgaccttggatcgctgtcttctgccagagagatcgagaatctccctctccgcctttttacactgtggaggggccctgttgttgtcgcgatctcgctggccacatttttctttctctatagctttgtgcgggatgttatccatccctatgcccggaaccagcagagcgacttctacaagatccctattgagattgttaataaaacacttcctatagtcgcaatcaccctcctttctctggtgtacttggctgggttgcttgcagctgcctatcagctgtactatggcactaagtacagaagattccctccctggctggagacctggcttcaatgtaggaagcaactgggactcctcagcttttttttcgctatggtgcacgttgcctacagcctgtgtttgccaatgcggcgcagcgagcggtacctcttccttaacatggcctaccaacaggtgcatgccaatatagaaaacagttggaacgaagaagaagtgtggcgcattgagatgtatatcagttttggtatcatgtctctgggtctactgtctttgctggcggtgacaagtatcccatcagtgagcaacgccttgaactggagagagttctcgttcatccagagcacactgggttacgtggcattgctgatatccactttccatgtgctgatctacgggtggaagagagcattcgaagaggagtattataggttctacacaccccccaacttcgtcctggcccttgtactgccttccattgtgatactggggaaaattattctattcctgccgtgtatcagtcggaaactgaagaggattaaaaagggatgggagaaatcccagtttctggaagaaggcatgggaggcaccatcccgcacgtgtccccagagagagtcaccgtgatgtag

SEQ ID NO: 87601 - DNA, 1473 bp, Artificial Sequence
  derived and/or modified sequence
atggaaagcatcagcatgatgggatcccctaagtccctttccgaaactttcctgccaaatggaatcaatgggatcaaggatgccagaaaggtgaccgtcggagtcatcggatctggagatttcgcaaaaagcctcactatcagattgatccgctgtggataccatgtcgtcataggcagtcggaaccctaagttcgcctccgagttttttccccacgttgtggatgtgactcaccatgaggacgcacttacaaaaacaaatattatcttcgtggctatccacagagaacattacacttccttgtgggacctgcggcacctgctcgtgggtaaaattctcatcgatgtgtcaaataatatgcgcatcaaccagtacccagaatccaatgcggaatacttagcctctctttttcctgactccctgattgttaaggggtttaacgtggtttcagcctgggcactgcaactgggaccgaaggacgcgtcacgacaagtgtatatctgcagtaacaatatccaggccaggcagcaggtgattgagctggcaagacagctaaatttcattccaatcgatctaggaagccttagctccgccagagagattgaaaatctccctcttagactgtttaccctttggcgaggcccagtcgtcgtggccatctcgcttgcgacgttcttttttctctactcgttcgtgagggacgtaattcatccatacgctagaaaccagcagagcgacttttataagatcccaatcgagatcgtgaataaaaccttgcccattgtagctatcacgctcctgtcgcttgtctatctggccggactgttagcggcagcttatcagctttactatgggacgaaatataggcgttttccaccatggttggagacatggctgcagtgccggaagcaattgggcttgctgtcgtttttttttgcaatggtacacgtagcctactctctctgtttacctatgcgcaggagtgagcgctacctgttcctgaatatggcttaccaacaagtgcacgccaatattgagaactcctggaatgaggaagaggtatggaggatcgagatgtatatctcgtttgggatcatgtctcttgggctgctgagcttgctggctgttacaagtatccccagcgtcagcaatgctctgaattggcgggagttctcattcatccagagcacactcggttatgtggcactcctgatatcgacatttcatgtgcttatctacggctggaagagagcgttcgaggaggagtactaccggttctatacacctcccaatttcgtgctagcattggtgctgcccagcattgtcatcctcggtaagatcattctctttctgccttgcatcagccggaagctcaagcgcattaaaaagggctgggagaagtcacagttcctggaagagggcatgggcggtactatcccacatgtcagtccagaacgggtgacagttatgtag

SEQ ID NO: 87602 - DNA, 1473 bp, Artificial Sequence
  derived and/or modified sequence
atggaaagtatttccatgatgggctcacccaaatccctatctgagacatttctgcctaacggcattaatgggattaaagatgcccgaaaggttaccgtaggagtcattgggagtggtgacttcgccaaatctctgacgatccggttgatccggtgtgggtaccacgttgttattggttccagaaatccaaagttcgctagcgagttttttcctcatgtggtcgatgtcacacaccatgaggacgctctgacaaaaaccaacatcattttcgtcgccatccaccgcgagcattacacctccctgtgggacttgcgacacctcttggtcggtaaaatccttattgacgtgtcgaataacatgcgcattaatcagtatcccgagagcaatgccgagtacctggcctccctgttccctgacagcctgatcgtcaagggcttcaatgttgtgagtgcttgggcactacagctgggcccaaaagacgcctccaggcaggtttacatctgttcaaataatatccaggcgaggcagcaggtcattgaactggccagacaactgaacttcatccccattgatctggggagcctctccagcgctcgcgagatcgagaatctgcccctgcgattattcactctgtggcgaggtcccgtcgtggtggccatttcactcgccacgttcttcttcctctattccttcgtgagggacgttattcacccatatgccaggaatcagcagtcagacttctacaaaatcccaatcgaaatcgttaataagaccctacccatagttgcgatcactttgctgtcactagtctacctggcagggcttctggctgcagcttatcagttgtattatgggaccaaataccgccgttttccaccatggctggaaacctggttgcagtgtagaaagcagctaggtttgctgagcttcttttttgcgatggtccacgtcgcctacagcctctgtctccctatgcggagaagtgagcgttatctgttcctcaacatggcataccagcaagtccacgccaacattgaaaacagctggaatgaggaagaagtgtggaggattgaaatgtacataagcttcggaatcatgtctctgggacttcttagcctgttggccgtgacttcaattccctccgtgtccaatgctctgaattggcgcgagttcagctttatccagagcacccttgggtacgtcgctcttcttatttctacttttcacgttctgatctatgggtggaaacgcgcatttgaggaggagtattaccgcttctatacccccccaaattttgttctcgccctggtgctaccctccatcgttatcctgggtaaaatcattctttttctgccgtgtatctccaggaaactgaagcgcataaagaagggatgggaaaaatcacagtttctggaagaggggatgggaggcactattcctcacgtgtcgcccgaaagagtcaccgtgatgtag

SEQ ID NO: 87603 - DNA, 1473 bp, Artificial Sequence
  derived and/or modified sequence
atggagtccattagcatgatgggtagccctaaaagcctctctgaaaccttcctaccaaatggaatcaatggcattaaggatgcgagaaaagttacggtgggcgtaattgggtccggagacttcgccaaaagcctgaccatacggctcattcggtgcggctaccacgttgtcattggctcgcgcaaccccaagtttgcctccgagttctttccacatgtggtggacgttacacaccacgaagacgcccttaccaagacgaatatcatcttcgtggcaatccacagagaacactacacctccctgtgggacctccgacaccttttggtcggtaaaattctcattgatgtgtcgaataacatgaggattaatcaatacccagaatctaacgcggaataccttgccagcctgtttccggacagtctgattgtgaaaggctttaatgtggtctccgcatgggctctgcagctagggccaaaagacgcatcaagacaggtttacatttgctcaaataacatccaggcaaggcagcaagtgatcgagttagcacgacagcttaacttcatccctatagacctaggctcccttagcagcgccagggagatcgagaatctgccattgcggctgtttacgctctggcggggtccagtggtggtagccatctctctggcgacctttttctttttgtactcattcgtacgggacgtgatccacccctatgctcgcaatcagcagtctgacttttacaaaatcccaatcgaaatcgtcaataaaactcttccaatcgttgctataacactcctgtcactggtgtaccttgccggactgctggctgccgcatatcaactgtattatgggaccaagtataggcgctttccaccctggctggagacttggctccagtgtcgcaagcagttggggctgctcagcttttttttcgccatggtgcacgtagcttatagcctgtgtcttccaatgagacggtcagagagataccttttcctaaacatggcctaccagcaagtgcatgctaacattgagaactcttggaacgaagaagaggtctggagaatcgaaatgtacatttcattcggaatcatgtctctggggttactatccctacttgccgtgacttctattccatccgtttccaatgccttgaactggcgtgagttttcgttcattcagagtactctcggctatgtcgctctgttaatctccacctttcatgtcctcatatatggttggaaaagagcatttgaagaggaatactaccgcttctacacaccgcctaatttcgtgttagccctggtgctaccctccattgtgatcttgggaaaaataattttattcctcccctgcattagccggaaactgaagaggatcaagaagggctgggagaagagtcagtttctggaagagggcatggggggtacaattccacatgtttccccggaacgagttacggtcatgtag

SEQ ID NO: 87604 - DNA, 6873 bp, Artificial Sequence
  derived and/or modified sequence
gccccctccgagctccccgactcctccccgcgctccacggctcttcccgactccagtcagcgttcctcgggccctcggcgccacgagctgtccgggcacgcagcccctagcggcgcgtcgctgccaagccggcctccgcgcgcctccctccttccttctcccctggctgttcgcgatccagcttgggtaggcggggaagcagctggagtgcgaccgccgcggcagccaccctgcaaccgccagtcggaggtgcagtccgtaggccctggcccccgggtgggcccttggggagtcggcgccgctcccggggagctgcaaggctcgcccctgcccggcgtggagggcgcggggggcgcggaggatattcttggtgatcttggaagtgtccgtatcatggaatcaatctctatgatgggaagccctaagagccttagtgaaacttttttacctaatggcataaatggtatcaaagatgcaaggaaggtcactgtaggtgtgattggaagtggagattttgccaaatccttgaccattcgacttattagatgcggctatcatgtggtcataggaagtagaaatcctaagtttgcttctgaattttttcctcatgtggtagatgtcactcatcatgaagatgctctcacaaaaacaaatataatatttgttgctatacacagagaacattatacctccctgtgggacctgagacatctgcttgtgggtaaaatcctgattgatgtgagcaataacatgaggataaaccagtacccagaatccaatgctgaatatttggcttcattattcccagattctttgattgtcaaaggatttaatgttgtctcagcttgggcacttcagttaggacctaaggatgccagccggcaggtttatatatgcagcaacaatattcaagcgcgacaacaggttattgaacttgcccgccagttgaatttcattcccattgacttgggatccttatcatcagccagagagattgaaaatttacccctacgactctttactctctggagagggccagtggtggtagctataagcttggccacattttttttcctttattcctttgtcagagatgtgattcatccatatgctagaaaccaacagagtgacttttacaaaattcctatagagattgtgaataaaaccttacctatagttgccattactttgctctccctagtatacctcgcaggtcttctggcagctgcttatcaactttattacggcaccaagtataggagatttccaccttggttggaaacctggttacagtgtagaaaacagcttggattactaagttttttcttcgctatggtccatgttgcctacagcctctgcttaccgatgagaaggtcagagagatatttgtttctcaacatggcttatcagcaggttcatgcaaatattgaaaactcttggaatgaggaagaagtttggagaattgaaatgtatatctcctttggcataatgagccttggcttactttccctcctggcagtcacttctatcccttcagtgagcaatgctttaaactggagagaattcagttttattcagtctacacttggatatgtcgctctgctcataagtactttccatgttttaatttatggatggaaacgagcttttgaggaagagtactacagattttatacaccaccaaactttgttcttgctcttgttttgccctcaattgtaattctgggtaagattattttattccttccatgtataagccgaaagctaaaacgaattaaaaaaggctgggaaaagagccaatttctggaagaaggtatgggaggaacaattcctcatgtctccccggagagggtcacagtaatgtgatgacaaatggtgttcacagctgccatataaagttctactcatgccattatttttatgacttctacgttcagttacaagtatgctgtcaaattatcgtgggttgaaacttgttaaatgagatttcaactgacttagtgatagagttttcttcaagttaattttcacaaatgtcatgtttgccaatatgaatttttctagtcaacatattattgtaatttaggtatgttttgttttgttttgcacaactgtaaccctgttgttactttatatttcataatcaggcaaaaatacttacagttaataatatagatataatgttaaaaacaatttgcaaaccagcagaattttaagcttttaaaataattcaatggatatacatttttttctgaagattaagattttaattattcaacttaaaaagtagaaatgcattattatacatttttttaagaaaggacacgttatgttagcatctaggtaaggctgcatgatagcattcctatatttctctcataaaataggatttgaaggatgaaattaattgtatgaagcaatgtgattatatgaagagacacaaattaaaaagacaaattaaacctgaaattatatttaaaatatatttgagacatgaaatacatactgataatacatacctcatgaaagattttattctttattgtgttacagagcagtttcattttcatattaatatactgatcaggaagaggattcagtaacatttggcttccaaaactgctatctctaatacggtaccaatcctaggaactgtatactagttcctacttagaacaaaagtatcaagtttgcacacaagtaatctgccagctgacctttgtcgcaccttaaccagtcaccacttgctatggtataggattatactgatgttctttgagggattctgatgtgctaggcatggttctaagtactttacttgtattatcccatttaatacttagaacaaccccgtgagataagtagttattatcctcattttacacatgagggaccgaaggatagaaaagttatttttcaaaggtcttgcagttaataaatggcagagtgagcattcaagtccaggtagtcatattccagaggccacggttttaaccactaggctctagagctcccgccgcgcccctatgcattatgttcacaatgccaatctagatgcttcctcttttgtataaagtcactgacattctttagagtgggttgggtgcatccaaaaatgtataaaaatattattataataaacttattactgcttgtagggtaattcacagttacttaccctattcttgcttggaacatgagcctggagacccatggcagtccatatgcctccctatgcagtgaagggccctagcagtgttaacaaattgctgagatcccacggagtctttcaaaaatctctgtagagttagtcttctccttttctcttcctgagaagttctcctgcctgcataaccattcattagggagtactttacaagcatgaaggatattagggtaagtggctaattataaatctactctagagacatataatcatacagattattcataaaatttttcagtgctgtccttccacatttaattgcattttgctcaaactgtagaatgccctacattccccccaccccaatttgctatttccttattaaaatagaaaattataggcaagatacaattatatgcgttcctcttcctgaaattataacatttctaaacttacccacgtaggtactactgaatccaactgccaacaataaaaagacttttatttagtagaggctacctttcccaccagtgactctttttctacaactgccttgtcagtttggtaattcacttatgattttctaatgttctcttggtgaattttattatcttgtaccctctttttttttttttttttttttaaagacagagtcttgctctgtcacccaggctggagtgcagtggcacgatctcggctcactgcaagctctgcctcccgggttcacgccattctcctgcctcagcctcccgagtagctgggactacaggtgcccgccaccatgcccggctgatttctttttgtatttttagtagagacggagtttcaccgtgttagccaggatggtctcgatctcctgacctcgtgatccgcccgccttggcctccaaagtgctgggattacaggtgtgagctaccgcgcccggcctattatcttgtactttctaactgagccctctattttctttattttaataatatttctccccacttgagaatcacttgttagttcttggtaggaattcagttgggcaatgataacttttatgggcaaaaacattctattatagtgaactaatgaaaataacagcgtattttcaatattttcttattccttaaattccactcttttaacactatgcttaaccacttaatgtgatgaaatattcctaaaagttaaatgactattaaagcatatattgttgcatgtatatattaagtagccgatactctaaataaaaataccactgttacagataaatggggcctttaaaaatatgaaaaacaaacttgtgaaaatgtataaaagatgcatctgttgtttcaaatggcactatcttcttttcagtactacaaaaacagaataattttgaagttttagaataaatgtaatatatttactataattctaaatgtttaaatgcttttctaaaaatgcaaaactatgatgtttagttgctttattttacctctatgtgattatttttcttaattgttattttttataatcattatttttctgaaccattcttctggcctcagaagtaggactgaattctactattgctaggtgtgagaaagtggtggtgagaaccttagagcagtggagatttgctacctggtctgtgttttgagaagtgccccttagaaagttaaaagaatgtagaaaagatactcagtcttaatcctatgcaaaaaaaaaaatcaagtaattgttttcctatgaggaaaataaccatgagctgtatcatgctacttagcttttatgtaaatatttcttatgtctcctctattaagagtatttaaaatcatatttaaatatgaatctattcatgctaacattatttttcaaaacatacatggaaatttagcccagattgtctacatataaggtttttatttgaattgtaaaatatttaaaagtatgaataaaatatatttataggtatttatcagagatgattattttgtgctacatacaggttggctaatgagctctagtgttaaactacctgattaatttcttataaagcagcataaccttggcttgattaaggaattctactttcaaaaattaatctgataatagtaacaaggtatattatactttcattacaatcaaattatagaaattacttgtgtaaaagggcttcaagaatatatccaatttttaaatattttaatatatctcctatctgataacttaattcttctaaattaccacttgccattaagctatttcataataaattctgtacagtttccccccaaaaaagagatttatttatgaaatatttaaagtttctaatgtggtattttaaataaagtatcataaatgtaataagtaaatatttatttaggaatactgtgaacactgaactaattattcctgtgtcagtctatgaaatccctgttttgaaatacgtaaacagcctaaaatgtgttgaaattattttgtaaatccatgacttaaaacaagatacatacatagtataacacacctcacagtgttaagatttatattgtgaaatgagacaccctaccttcaattgttcatcagtgggtaaaacaaattctgatgtacattcaggacaaatgattagccctaaatgaaactgtaataatttcagtggaaactcaatctgtttttacctttaaacagtgaattttacatgaatgaatgggttcttcactttttttttagtatgagaaaattatacagtgcttaattttcagagattctttccatatgttactaaaaaatgttttgttcagcctaacatactgagttttttttaactttctaaattattgaatttccatcatgcattcatccaaaattaaggcagactgtttggattcttccagtggccagatgagctaaattaaatcacaaaagcagatgcttttgtatgatctccaaattgccaactttaaggaaatattctcttgaaattgtctttaaagatcttttgcagctttgcagatacccagactgagctggaactggaatttgtcttcctattgactctacttctttaaaagcggctgcccattacattcctcagctgtccttgcagttaggtgtacatgtgactgagtgttggccagtgagatgaagtctcctcaaaggaaggcagcatgtgtcctttttcatcccttcatcttgctgctgggattgtggatataacaggagccctggcagctgtctccagaggatcaaagccacacccaaagagtaaggcagattagagaccagaaagaccttgactacttccctacttccactgctttttcctgcatttaagccattgtaaatctgggtgtgttacatgaagtgaaaattaattctttctgcccttcagttctttatcctgataccatttaacactgtctgaattaactagactgcaataattctttcttttgaaagcttttaaaggataatgtgcaattcacattaaaattgattttccattgtcaattagttatactcattttcctgccttgatctttcattagatattttgtatctgcttggaatatattatcttctttttaactgtgtaattggtaattactaaaactctgtaatctccaaaatattgctatcaaattacacaccatgttttctatcattctcatagatctgccttataaacatttaaataaaaagtactatttaatgatttaacttctgttttgaaa

SEQ ID NO: 87605 - DNA, 1779 bp, Artificial Sequence
  derived and/or modified sequence
agctggagtgcgaccgccgcggcagccaccctgcaaccgccagtcggaggtgcagtccgtaggccctggcccccgggtgggcccttggggagtcggcgccgctcccggggagctgcaaggctcgcccctgcccggcgtggagggcgcggggggcgcggagaaagtgaagagaggaaattggaaaattgtgagtggaccttctgatactgctcctccttgcgtggaaaaggggaaagaactgcatgcatattattcagcgtcctatattcaaaggatattcttggtgatcttggaagtgtccgtatcatggaatcaatctctatgatgggaagccctaagagccttagtgaaacttttttacctaatggcataaatggtatcaaagatgcaaggaaggtcactgtaggtgtgattggaagtggagattttgccaaatccttgaccattcgacttattagatgcggctatcatgtggtcataggaagtagaaatcctaagtttgcttctgaattttttcctcatgtggtagatgtcactcatcatgaagatgctctcacaaaaacaaatataatatttgttgctatacacagagaacattatacctccctgtgggacctgagacatctgcttgtgggtaaaatcctgattgatgtgagcaataacatgaggataaaccagtacccagaatccaatgctgaatatttggcttcattattcccagattctttgattgtcaaaggatttaatgttgtctcagcttgggcacttcagttaggacctaaggatgccagccggcaggtttatatatgcagcaacaatattcaagcgcgacaacaggttattgaacttgcccgccagttgaatttcattcccattgacttgggatccttatcatcagccagagagattgaaaatttacccctacgactctttactctctggagagggccagtggtggtagctataagcttggccacattttttttcctttattcctttgtcagagatgtgattcatccatatgctagaaaccaacagagtgacttttacaaaattcctatagagattgtgaataaaaccttacctatagttgccattactttgctctccctagtatacctcgcaggtcttctggcagctgcttatcaactttattacggcaccaagtataggagatttccaccttggttggaaacctggttacagtgtagaaaacagcttggattactaagttttttcttcgctatggtccatgttgcctacagcctctgcttaccgatgagaaggtcagagagatatttgtttctcaacatggcttatcagcaggttcatgcaaatattgaaaactcttggaatgaggaagaagtttggagaattgaaatgtatatctcctttggcataatgagccttggcttactttccctcctggcagtcacttctatcccttcagtgagcaatgctttaaactggagagaattcagttttattcagtctacacttggatatgtcgctctgctcataagtactttccatgttttaatttatggatggaaacgagcttttgaggaagagtactacagattttatacaccaccaaactttgttcttgctcttgttttgccctcaattgtaattctgggtaagattattttattccttccatgtataagccgaaagctaaaacgaattaaaaaaggctgggaaaagagccaatttctggaagaaggtatgggaggaacaattcctcatgtctccccggagagggtcacagtaatgtga

SEQ ID NO: 87606 - DNA, 6612 bp, Artificial Sequence
  derived and/or modified sequence
gatccagcttgggtaggcggggaagcagctggagtgcgaccgccgcggcagccaccctgcaaccgccagtcggagagctaagggcaagtcctgaggttgggcccaggagaaagaaggcaaggagacattgtcccaggatattcttggtgatcttggaagtgtccgtatcatggaatcaatctctatgatgggaagccctaagagccttagtgaaacttttttacctaatggcataaatggtatcaaagatgcaaggaaggtcactgtaggtgtgattggaagtggagattttgccaaatccttgaccattcgacttattagatgcggctatcatgtggtcataggaagtagaaatcctaagtttgcttctgaattttttcctcatgtggtagatgtcactcatcatgaagatgctctcacaaaaacaaatataatatttgttgctatacacagagaacattatacctccctgtgggacctgagacatctgcttgtgggtaaaatcctgattgatgtgagcaataacatgaggataaaccagtacccagaatccaatgctgaatatttggcttcattattcccagattctttgattgtcaaaggatttaatgttgtctcagcttgggcacttcagttaggacctaaggatgccagccggcaggtttatatatgcagcaacaatattcaagcgcgacaacaggttattgaacttgcccgccagttgaatttcattcccattgacttgggatccttatcatcagccagagagattgaaaatttacccctacgactctttactctctggagagggccagtggtggtagctataagcttggccacattttttttcctttattcctttgtcagagatgtgattcatccatatgctagaaaccaacagagtgacttttacaaaattcctatagagattgtgaataaaaccttacctatagttgccattactttgctctccctagtatacctcgcaggtcttctggcagctgcttatcaactttattacggcaccaagtataggagatttccaccttggttggaaacctggttacagtgtagaaaacagcttggattactaagttttttcttcgctatggtccatgttgcctacagcctctgcttaccgatgagaaggtcagagagatatttgtttctcaacatggcttatcagcaggttcatgcaaatattgaaaactcttggaatgaggaagaagtttggagaattgaaatgtatatctcctttggcataatgagccttggcttactttccctcctggcagtcacttctatcccttcagtgagcaatgctttaaactggagagaattcagttttattcagtctacacttggatatgtcgctctgctcataagtactttccatgttttaatttatggatggaaacgagcttttgaggaagagtactacagattttatacaccaccaaactttgttcttgctcttgttttgccctcaattgtaattctgggtaagattattttattccttccatgtataagccgaaagctaaaacgaattaaaaaaggctgggaaaagagccaatttctggaagaaggtatgggaggaacaattcctcatgtctccccggagagggtcacagtaatgtgatgacaaatggtgttcacagctgccatataaagttctactcatgccattatttttatgacttctacgttcagttacaagtatgctgtcaaattatcgtgggttgaaacttgttaaatgagatttcaactgacttagtgatagagttttcttcaagttaattttcacaaatgtcatgtttgccaatatgaatttttctagtcaacatattattgtaatttaggtatgttttgttttgttttgcacaactgtaaccctgttgttactttatatttcataatcaggcaaaaatacttacagttaataatatagatataatgttaaaaacaatttgcaaaccagcagaattttaagcttttaaaataattcaatggatatacatttttttctgaagattaagattttaattattcaacttaaaaagtagaaatgcattattatacatttttttaagaaaggacacgttatgttagcatctaggtaaggctgcatgatagcattcctatatttctctcataaaataggatttgaaggatgaaattaattgtatgaagcaatgtgattatatgaagagacacaaattaaaaagacaaattaaacctgaaattatatttaaaatatatttgagacatgaaatacatactgataatacatacctcatgaaagattttattctttattgtgttacagagcagtttcattttcatattaatatactgatcaggaagaggattcagtaacatttggcttccaaaactgctatctctaatacggtaccaatcctaggaactgtatactagttcctacttagaacaaaagtatcaagtttgcacacaagtaatctgccagctgacctttgtcgcaccttaaccagtcaccacttgctatggtataggattatactgatgttctttgagggattctgatgtgctaggcatggttctaagtactttacttgtattatcccatttaatacttagaacaaccccgtgagataagtagttattatcctcattttacacatgagggaccgaaggatagaaaagttatttttcaaaggtcttgcagttaataaatggcagagtgagcattcaagtccaggtagtcatattccagaggccacggttttaaccactaggctctagagctcccgccgcgcccctatgcattatgttcacaatgccaatctagatgcttcctcttttgtataaagtcactgacattctttagagtgggttgggtgcatccaaaaatgtataaaaatattattataataaacttattactgcttgtagggtaattcacagttacttaccctattcttgcttggaacatgagcctggagacccatggcagtccatatgcctccctatgcagtgaagggccctagcagtgttaacaaattgctgagatcccacggagtctttcaaaaatctctgtagagttagtcttctccttttctcttcctgagaagttctcctgcctgcataaccattcattagggagtactttacaagcatgaaggatattagggtaagtggctaattataaatctactctagagacatataatcatacagattattcataaaatttttcagtgctgtccttccacatttaattgcattttgctcaaactgtagaatgccctacattccccccaccccaatttgctatttccttattaaaatagaaaattataggcaagatacaattatatgcgttcctcttcctgaaattataacatttctaaacttacccacgtaggtactactgaatccaactgccaacaataaaaagacttttatttagtagaggctacctttcccaccagtgactctttttctacaactgccttgtcagtttggtaattcacttatgattttctaatgttctcttggtgaattttattatcttgtaccctctttttttttttttttttttttaaagacagagtcttgctctgtcacccaggctggagtgcagtggcacgatctcggctcactgcaagctctgcctcccgggttcacgccattctcctgcctcagcctcccgagtagctgggactacaggtgcccgccaccatgcccggctgatttctttttgtatttttagtagagacggagtttcaccgtgttagccaggatggtctcgatctcctgacctcgtgatccgcccgccttggcctccaaagtgctgggattacaggtgtgagctaccgcgcccggcctattatcttgtactttctaactgagccctctattttctttattttaataatatttctccccacttgagaatcacttgttagttcttggtaggaattcagttgggcaatgataacttttatgggcaaaaacattctattatagtgaactaatgaaaataacagcgtattttcaatattttcttattccttaaattccactcttttaacactatgcttaaccacttaatgtgatgaaatattcctaaaagttaaatgactattaaagcatatattgttgcatgtatatattaagtagccgatactctaaataaaaataccactgttacagataaatggggcctttaaaaatatgaaaaacaaacttgtgaaaatgtataaaagatgcatctgttgtttcaaatggcactatcttcttttcagtactacaaaaacagaataattttgaagttttagaataaatgtaatatatttactataattctaaatgtttaaatgcttttctaaaaatgcaaaactatgatgtttagttgctttattttacctctatgtgattatttttcttaattgttattttttataatcattatttttctgaaccattcttctggcctcagaagtaggactgaattctactattgctaggtgtgagaaagtggtggtgagaaccttagagcagtggagatttgctacctggtctgtgttttgagaagtgccccttagaaagttaaaagaatgtagaaaagatactcagtcttaatcctatgcaaaaaaaaaaatcaagtaattgttttcctatgaggaaaataaccatgagctgtatcatgctacttagcttttatgtaaatatttcttatgtctcctctattaagagtatttaaaatcatatttaaatatgaatctattcatgctaacattatttttcaaaacatacatggaaatttagcccagattgtctacatataaggtttttatttgaattgtaaaatatttaaaagtatgaataaaatatatttataggtatttatcagagatgattattttgtgctacatacaggttggctaatgagctctagtgttaaactacctgattaatttcttataaagcagcataaccttggcttgattaaggaattctactttcaaaaattaatctgataatagtaacaaggtatattatactttcattacaatcaaattatagaaattacttgtgtaaaagggcttcaagaatatatccaatttttaaatattttaatatatctcctatctgataacttaattcttctaaattaccacttgccattaagctatttcataataaattctgtacagtttccccccaaaaaagagatttatttatgaaatatttaaagtttctaatgtggtattttaaataaagtatcataaatgtaataagtaaatatttatttaggaatactgtgaacactgaactaattattcctgtgtcagtctatgaaatccctgttttgaaatacgtaaacagcctaaaatgtgttgaaattattttgtaaatccatgacttaaaacaagatacatacatagtataacacacctcacagtgttaagatttatattgtgaaatgagacaccctaccttcaattgttcatcagtgggtaaaacaaattctgatgtacattcaggacaaatgattagccctaaatgaaactgtaataatttcagtggaaactcaatctgtttttacctttaaacagtgaattttacatgaatgaatgggttcttcactttttttttagtatgagaaaattatacagtgcttaattttcagagattctttccatatgttactaaaaaatgttttgttcagcctaacatactgagttttttttaactttctaaattattgaatttccatcatgcattcatccaaaattaaggcagactgtttggattcttccagtggccagatgagctaaattaaatcacaaaagcagatgcttttgtatgatctccaaattgccaactttaaggaaatattctcttgaaattgtctttaaagatcttttgcagctttgcagatacccagactgagctggaactggaatttgtcttcctattgactctacttctttaaaagcggctgcccattacattcctcagctgtccttgcagttaggtgtacatgtgactgagtgttggccagtgagatgaagtctcctcaaaggaaggcagcatgtgtcctttttcatcccttcatcttgctgctgggattgtggatataacaggagccctggcagctgtctccagaggatcaaagccacacccaaagagtaaggcagattagagaccagaaagaccttgactacttccctacttccactgctttttcctgcatttaagccattgtaaatctgggtgtgttacatgaagtgaaaattaattctttctgcccttcagttctttatcctgataccatttaacactgtctgaattaactagactgcaataattctttcttttgaaagcttttaaaggataatgtgcaattcacattaaaattgattttccattgtcaattagttatactcattttcctgccttgatctttcattagatattttgtatctgcttggaatatattatcttctttttaactgtgtaattggtaattactaaaactctgtaatctccaaaatattgctatcaaattacacaccatgttttctatcattctcatagatctgccttataaacatttaaata

SEQ ID NO: 87607 - protein, 454 aa, Artificial Sequence
  derived and/or modified sequence
MESISMMGSPKSLSETFLPNGINGIKDARKVTVGVIGSGDFAKSLTIRLIRCGYHVVIGSRNPKFASEFFPHVVDVTHHEDALTKTNIIFVAIHREHYTSLWDLRHLLVGKILIDVSNNMRINQYPESNAEYLASLFPDSLIVKGFNVVSAWALQLGPKDASRQVYICSNNIQARQQVIELARQLNFIPIDLGSLSSAREIENLPLRLFTLWRGPVVVAISLATFFFLYSFVRDVIHPYARNQQSDFYKIPIEIVNKTLPIVAITLLSLVYLAGLLAAAYQLYYGTKYRRFPPWLETWLQCRKQLGLLSFFFAMVHVAYSLCLPMRRSERYLFLNMAYQQVHANIENSWNEEEVWRIEMYISFGIMSLGLLSLLAVTSIPSVSNALNWREFSFIQSTLGYVALLISTFHVLIYGWKRAFEEEYYRFYTPPNFVLALVLPSIVILDLLQLCRYPD

SEQ ID NO: 87608 - DNA, 1365 bp, Artificial Sequence
  derived and/or modified sequence
atggagagcatcagcatgatgggcagccccaagagcctgagcgagaccttcctgcccaacggcatcaacggcatcaaggacgccagaaaggtgaccgtgggcgtgatcggcagcggcgacttcgccaagagcctgaccatcagactgatcagatgcggctaccacgtggtgatcggcagcagaaaccccaagttcgccagcgagttcttcccccacgtggtggacgtgacccaccacgaggacgccctgaccaagaccaacatcatcttcgtggccatccacagagagcactacaccagcctgtgggacctgagacacctgctggtgggcaagatcctgatcgacgtgagcaacaacatgagaatcaaccagtaccccgagagcaacgccgagtacctggccagcctgttccccgacagcctgatcgtgaagggcttcaacgtggtgagcgcctgggccctgcagctgggccccaaggacgccagcagacaggtgtacatctgcagcaacaacatccaggccagacagcaggtgatcgagctggccagacagctgaacttcatccccatcgacctgggcagcctgagcagcgccagagagatcgagaacctgcccctgagactgttcaccctgtggagaggccccgtggtggtggccatcagcctggccaccttcttcttcctgtacagcttcgtgagagacgtgatccacccctacgccagaaaccagcagagcgacttctacaagatccccatcgagatcgtgaacaagaccctgcccatcgtggccatcaccctgctgagcctggtgtacctggccggcctgctggccgccgcctaccagctgtactacggcaccaagtacagaagattccccccctggctggagacctggctgcagtgcagaaagcagctgggcctgctgagcttcttcttcgccatggtgcacgtggcctacagcctgtgcctgcccatgagaagaagcgagagatacctgttcctgaacatggcctaccagcaggtgcacgccaacatcgagaacagctggaacgaggaggaggtgtggagaatcgagatgtacatcagcttcggcatcatgagcctgggcctgctgagcctgctggccgtgaccagcatccccagcgtgagcaacgccctgaactggagagagttcagcttcatccagagcaccctgggctacgtggccctgctgatcagcaccttccacgtgctgatctacggctggaagagagccttcgaggaggagtactacagattctacaccccccccaacttcgtgctggccctggtgctgcccagcatcgtgatcctggacctgctgcagctgtgcagataccccgactag

SEQ ID NO: 87609 - DNA, 1365 bp, Artificial Sequence
  derived and/or modified sequence
atggaatcaatatccatgatgggtagtccaaagtctctgtccgagactttcctcccaaatgggatcaacgggataaaagatgctaggaaagtgaccgtgggcgtcatcggctcaggggatttcgccaagagcttgactatccgattaatccgctgtgggtatcacgttgtaatcggatcgagaaaccccaagtttgcttcagagttctttccacatgtggtcgatgttacgcaccacgaggatgcactgactaaaacgaacattatctttgtggccatccatcgggaacactacacctccctgtgggatcttcgccatttactggttgggaagattctgatcgacgtctctaataatatgcggattaaccaatatccagaaagtaacgccgaatacctcgcgagtctgtttcctgacagtctcatagtgaaagggttcaacgtcgtgtccgcctgggcccttcagctcggccctaaggacgctagtaggcaagtgtacatctgcagtaacaacatccaggctcgacagcaggtgattgaattggcacgacagttgaattttatacccattgaccttggaagtctatccagtgcccgggagatcgagaatttaccattacgactcttcactttatggaggggacccgtggtcgttgccatttcccttgccacatttttcttcttgtacagctttgttagggacgttatccatccatacgcccgtaatcagcagtccgatttttacaaaattcccatcgagattgtcaataaaacactgcccatcgttgcaatcacattgctttcattggtatatttggcaggtctccttgcggctgcataccaactctactatggcacaaagtaccgccgattcccaccttggctggaaacctggcttcaatgtagaaaacagcttgggctcttgtccttcttcttcgcaatggtgcacgtggcctactccctatgcctcccaatgaggcgcagcgaaagatacctatttttaaacatggcataccaacaggtgcacgccaacatcgagaatagctggaacgaagaagaagtgtggcgcatcgagatgtacattagttttggcataatgtcgttgggactcctctccctgctggcagttaccagcataccatctgtgtctaacgcgttgaactggagagaatttagctttatccaatccaccctgggctatgttgctctactgatatccacctttcacgtgttaatatacggctggaagcgcgcctttgaggaggaatactatcgattctatacccccccaaattttgtcctggcactggtgctgccttctatcgtgatactggatctacttcagttgtgtagataccccgactag

SEQ ID NO: 87610 - DNA, 1365 bp, Artificial Sequence
  derived and/or modified sequence
atggagtccattagcatgatgggctcaccaaaatccctcagtgagaccttcttgcctaatgggatcaacgggatcaaggatgctagaaaggtgactgtaggcgtgatcggctccggcgatttcgccaagtctctgacgatcaggcttattcgttgcggataccatgttgtgataggtagccggaaccctaagtttgcatccgagttttttccccacgtcgtagatgtgacccatcatgaggatgctctaaccaaaacaaacatcatttttgtggccatccatcgagaacactatacatccctgtgggatctccggcacttgctcgtaggcaagatcctgattgatgtttcaaacaatatgcgcattaaccaataccctgagagcaacgcagagtatctggcatccctatttccagactccctgattgtcaagggtttcaacgtggtgtccgcctgggccctgcagttggggcccaaggacgcttcgagacaggtgtatatctgcagcaacaacattcaggcacgtcagcaggtaatcgagctggcccggcaactgaacttcatcccgattgatttgggcagtctgagtagcgcgcgagagatagagaatctgccactgaggttatttactctttggcgggggcctgtcgtggtcgctatcagcttggccacatttttctttttgtattcatttgtgagagatgttatccatccctacgctaggaatcaacagtcagacttctataaaataccaattgagatagttaataagacattacctatcgtggctattacgctgctgagtttggtgtacctggcaggcctgctggccgctgcttaccagttatactacgggacaaagtaccggcgctttcctccttggctggaaacttggctgcagtgtcgcaagcagcttggactgcttagctttttctttgcaatggtgcacgttgcatacagcttgtgcttgcccatgcgtcgatcagaaaggtacctgtttctgaatatggcctaccagcaggtgcacgcgaacattgaaaattcgtggaacgaagaagaggtttggcggatagaaatgtacatttccttcggtatcatgtcactcggtctgttatctttgctggcggtcacgagtatcccttccgtttcaaacgccctgaattggagggagtttagcttcatacagagtaccctcgggtacgtggccctgctgattagcactttccacgtgttgatttatgggtggaagcgcgctttcgaagaggagtactacagattttacactcctccaaattttgtgttagctttagtgttgccctcaatcgttattttagaccttttacaactgtgtcgctatcctgactag

SEQ ID NO: 87611 - DNA, 1365 bp, Artificial Sequence
  derived and/or modified sequence
atggaatcgattagtatgatgggttccccgaagtctctgagcgaaacattcctccccaacggcatcaatggcattaaagacgctcgcaaagtgaccgtaggcgtgatcgggtcaggagatttcgcaaagtcactgactatccgtctcatcagatgcgggtaccacgtggtgattggcagccgaaaccccaaatttgcctctgaatttttccctcatgtggtagatgtgactcaccacgaagacgctctcactaaaaccaatataatttttgttgccatccatagggaacattatacttccctatgggacctgcgccatcttctcgtcggcaagatcctcatcgacgtgagcaataatatgagaattaatcagtaccctgagtccaatgccgagtatctggctagcctcttccccgattctcttattgtgaagggattcaatgttgtctccgcctgggcactacaattggggcctaaggacgctagtaggcaggtgtacatatgttccaacaacatccaggcccgacaacaggtgatcgagctggctcgccagcttaatttcattcctatcgacctcggcagtctgtcaagcgcgcgagagatcgaaaacctgcccctgcggctgttcactctgtggagaggccccgtggtggttgcaatcagtctggccaccttctttttcctttactccttcgtgcgggatgtgattcacccctacgctagaaatcaacaaagcgatttttacaaaattccgatagaaatcgtgaacaagacgttaccgatagttgctatcacactcctttcactggtctaccttgccggcctactggccgccgcctatcagctgtattacggcacaaaataccgcaggtttcctccctggctagagacctggttgcagtgtcggaagcagttaggcctgttgagcttttttttcgcgatggtccacgttgcttattcattgtgcctgccgatgcgtaggagtgaacgctacctgtttttgaacatggcataccagcaggtccatgccaatatcgagaattcttggaatgaggaagaagtatggcggattgaaatgtacataagctttggtatcatgtccctcggcctgctaagcctgttggccgttacttccatcccttccgtaagtaatgcactgaactggagagagttcagctttattcaatccactcttgggtacgtggctctgctgatctcaacttttcacgtcctcatttatggatggaaaagagcatttgaggaggagtattatagattttacacgcccccaaattttgttttggctctggtcctgccttcaattgtgatcttggacttgctgcaactatgtaggtaccccgattag

SEQ ID NO: 87612 - DNA, 1365 bp, Artificial Sequence
  derived and/or modified sequence
atggagagcatctccatgatgggcagccccaagagcctgtctgagaccttcctgcccaacggcatcaatggcatcaaggatgccaggaaggtgacagtgggcgtcatcggcagcggggactttgccaagagcctgaccatccgcctcatccgctgtggctaccacgtggtgattggcagcaggaaccccaagtttgccagcgagttcttcccccacgtggtggatgtgacccaccatgaagatgccctgaccaagaccaacatcatctttgtggccatccaccgggagcactacaccagcctgtgggacctgcggcacctgctggtgggcaagatcctgattgatgtgagcaacaacatgaggatcaaccagtacccagagagcaatgctgagtacctggccagcctcttcccagacagcctcatcgtgaagggcttcaacgtggtgtctgcctgggccctgcagctgggccccaaggatgccagccggcaggtgtacatctgcagcaacaacatccaggcccggcagcaggtgattgagctggcccggcagctgaacttcatccccatcgacctgggcagcctgagcagcgcccgggagattgagaacctgcccctgcggctcttcaccctgtggaggggccctgtggtggtggccatcagcctggccaccttcttcttcctgtacagctttgtgagagatgtgatccacccctatgccaggaaccagcagagcgacttctacaagatccccatcgagatcgtgaacaagaccctgcccatcgtggccatcaccctgctgagcctggtgtacctggccggcctgctggccgccgcctaccagctgtactacggcaccaagtaccgccgcttccccccctggctggagacctggctgcagtgcaggaagcagctgggcctgctgtccttcttctttgccatggtgcacgtggcctacagcctgtgcctgcccatgagaagaagtgagcgctacctgttcctgaacatggcctaccagcaggtgcacgccaacatcgagaacagctggaatgaggaggaggtgtggagaattgagatgtacatcagctttggcatcatgagcctgggcctgctgagcctgctggccgtgaccagcatccccagcgtgtccaatgccctgaactggagggagttctccttcatccagagcaccctgggctacgtggccctgctgatcagcaccttccacgtgctgatctacggctggaagagggcctttgaggaggagtactaccgcttctacaccccacccaactttgtgctggccctggtgctgcccagcatcgtcatcctggacctgctgcagctgtgccgctacccagactag

SEQ ID NO: 87613 - DNA, 1365 bp, Artificial Sequence
  derived and/or modified sequence
atggagagcatcagcatgatgggcagccccaagagcctgagcgagacattccttccgaacgggataaacggaatcaaggatgccagaaaagtgacggtgggtgtgataggatcaggcgattttgccaaatcactcactatccgactgatcagatgcggataccatgtggtcatcgggagtcgtaatcctaaatttgcctctgaatttttccctcatgtggtagatgtgactcatcatgaggatgcccttactaaaactaacataatcttcgtcgccatacatagagagcattacacatccctttgggacttgcgccacctgctcgttggtaaaatcctgatcgacgtatccaacaacatgcgcatcaatcagtaccccgaatccaatgccgaatatctggcatccctgttccctgactccctaatcgtgaagggtttcaatgtggtatcggcctgggctctccagttgggccccaaggatgcaagccgacaggtgtatatttgcagcaataacattcaggctaggcagcaggttattgaactggctcggcagcttaactttattcctatagatctgggctctctctcttccgctagagagatagaaaatttgcctctgagactattcactttgtggcggggcccggtggtggtggcgatatctctcgccacatttttcttcctgtattcctttgtcagagatgtgattcacccctatgctagaaatcaacagtctgatttttataagatccccattgaaatcgtcaacaaaaccctgcccatcgtggccattaccttattgagtctcgtttatctcgccggactcctcgccgccgcctatcaactgtattatggcacgaaatataggcgctttccaccttggctggagacctggctgcaatgccgcaagcagctcgggctgctctctttctttttcgcgatggtccacgtggcatacagcttgtgtctaccaatgagacgctctgaacgatatctttttctgaacatggcataccagcaggttcacgctaacatcgaaaatagttggaatgaggaggaagtctggcgcattgaaatgtacatcagcttcggtataatgagcctgggccttttatctctactggccgtgaccagcattccaagtgtgtcaaatgcactaaactggagagagttttcctttatccagtcaacgcttgggtatgtcgccctgctgatctcaacttttcacgttctgatctacggctggaagagggcctttgaggaggaatattacagattttacacaccaccaaacttcgtgttagctctcgtgctgccaagcatcgtgatattagatctcttacagttatgtagatatcctgactag

SEQ ID NO: 87614 - DNA, 1365 bp, Artificial Sequence
  derived and/or modified sequence
atggagagcatcagcatgatgggcagccccaagagcctgagcgagactttcctcccaaacggaattaatggtataaaggacgctcggaaggttactgtgggggtcatcggatctggcgactttgctaagtcgttaacaatccgcctcattcgatgtggctaccatgtcgtgattggttctaggaatcctaagttcgctagtgagtttttcccgcatgtggtcgatgttactcaccatgaggacgctcttaccaagactaacataatctttgtcgcaatacatagagagcactacactagcctgtgggatctgcgccacctcctggttgggaagattcttattgatgtgtcaaacaatatgaggattaaccagtacccagaatctaacgctgaatatctcgcatcactctttcccgattctctcatagtcaaaggattcaatgtcgtcagcgcttgggcactacagctgggcccaaaggatgcaagccgccaggtgtacatctgttccaacaatatacaagcccggcagcaggttatcgaactcgctaggcaattaaactttattcccatagacctcgggtccttgtcaagcgctagagagatagagaacctgcccctaaggcttttcacactctggagaggccctgtggtggtggccatttcgttagctactttcttcttcctatattcctttgtgcgcgacgtgattcacccgtacgcaagaaatcagcagtcagacttttataagatccctattgagattgtcaataagactttgccgattgtggccatcacactattgtccctcgtatacctggcagggttgctagctgcggcgtatcagctgtactacggcaccaagtataggagatttccaccttggctcgagacctggttgcagtgcagaaaacagctgggtctcctctcctttttcttcgcaatggtccacgttgcatattctctgtgtttaccaatgcggcgatccgagaggtacctctttcttaacatggcctaccaacaggtgcacgcaaacatcgagaatagctggaacgaagaggaggtttggcggattgagatgtacataagttttggcatcatgagtctgggactgctgagtctccttgccgtgaccagcatcccctctgtgtcgaatgccctgaactggagagaattttcatttatccagtcaaccctaggctatgtggccctgcttattagcacctttcacgtgcttatttatgggtggaagagagccttcgaggaggagtactacaggttttatacacctccaaactttgtgctggctcttgtattgccatctatagtgatactggatcttcttcagctctgtcgttatccggattag

SEQ ID NO: 87615 - DNA, 1365 bp, Artificial Sequence
  derived and/or modified sequence
atggagagcatcagcatgatgggcagccccaagagcctgagcgagacctttctgcccaatggcatcaacggtatcaaggacgcaagaaaagtgaccgttggagttattggatctggggacttcgccaaatcgctaaccatacgtctaatacgttgcggttaccatgtagtgataggttctcgcaacccaaaattcgcgtccgagttcttccctcatgttgtggacgtcacccaccacgaagacgctctgactaagactaatatcatatttgttgcaattcaccgggagcattacacgtccctctgggacttaagacatctcttggtggggaaaatcttaatcgacgtatccaataacatgcgaattaatcaatatccagagagcaacgccgagtacctcgcgagccttttccccgattccctgattgtgaagggctttaacgtggtgagcgcttgggcactccagctgggtcccaaagacgcgtctcgccaagtatatatctgttccaataacattcaggccaggcagcaagtgatagagttagcacgacaattaaatttcatccccatcgatctcggaagtctgtcctcggcaagggaaattgagaaccttcccctgagactctttacactttggcggggtccagtcgttgtggctattagtctggcaacgtttttcttcctgtacagtttcgtccgcgacgttatacacccttatgcgagaaaccaacagtccgacttttataagatccctattgagattgtcaataagaccctgcccattgttgctatcactcttctcagcctagtatacttagctgggctacttgccgcggcttaccaactgtattacggcacaaaatacaggcgattcccgccctggctcgaaacatggcttcagtgccgtaaacaactaggcttactgagctttttcttcgcaatggtgcatgtcgcttattccttatgcctccccatgcggaggagtgagcgctatctgtttttgaatatggcgtaccagcaagtgcacgcaaatattgagaattcctggaacgaggaggaagtgtggaggatagaaatgtacatcagctttgggatcatgagtctcgggctgctgtctctactagccgtgactagcattccctccgttagcaacgccctgaattggcgcgagttcagcttcatccagtctacactggggtatgtggctctgctcatttccacctttcacgtcttaatttacggttggaaacgcgcttttgaggaagaatattaccggttctatacacctccgaacttcgtgctcgccctggtcctaccttctatcgttatcctggacctgctgcagctctgccgatatcctgactag

SEQ ID NO: 87616 - DNA, 1365 bp, Artificial Sequence
  derived and/or modified sequence
atggagtctatttctatgatggggtccccaaagtcactgtccgagacgttccttcccaacgggatcaatggaattaaagacgcccgtaaggttaccgtcggtgtgattggaagtggagatttcgctaagagcttgacgatccgcctgatccggtgcgggtaccatgtggtcatcggtagtcggaacccaaagttcgcatccgagtttttcccccacgtggttgatgttacgcaccatgaggatgctctgaccaagaccaatatcatcttcgtagctatccaccgggaacactatacatccttatgggacctgagacacctgctggtcggcaaaattttgatcgacgttagcaacaatatgcgaatcaaccaatatccagaaagtaatgctgaatacctggcctccttgtttcctgacagcctgatcgtgaaaggcttcaatgtcgtaagtgcctgggcgttgcaactcggacccaaggacgcctctcgtcaggtgtatatttgtagcaataacattcaggccagacagcaggtgatcgaactggcacgccagttgaacttcatccctattgacttgggatctctgagctcagccagggagatcgaaaacctgcccctcagactttttacactgtggaggggccctgttgttgtggcgatttctcttgccaccttcttttttctgtactccttcgtccgcgatgtgatccacccgtatgccaggaaccagcagtccgatttctataaaatcccaatcgagatcgtcaacaagacactccctattgtggccattacattgctttccctcgtgtacctggccggtctgctagccgctgcatatcagctgtattatggaacaaaatatcgtcgctttcccccatggctggagacctggttgcagtgcagaaaacagctgggactcctctccttctttttcgccatggttcacgtcgcttactcactgtgtctccccatgagaaggtccgagcgctacctgtttctgaatatggcctatcaacaagtccacgctaatatcgagaactcctggaatgaagaagaagtttggcgtatcgaaatgtacatctcgtttggtatcatgagcctgggtctgttatctctgctagctgtaacttcaattccttctgttagcaacgcccttaactggagagaatttagtttcatccagtccactctcggatatgtcgcactgctgatctcaacatttcatgtattgatatacggatggaagcgcgcatttgaagaggaatattataggttctatacaccccctaactttgtgctagccttggtgctgccatccattgtgatactggacctcctgcagttgtgcaggtacccagattag

SEQ ID NO: 87617 - DNA, 1365 bp, Artificial Sequence
  derived and/or modified sequence
atggagtctatttctatgatgggcagtcccaagagcctctccgagacatttctcccaaatggtatcaatggtataaaggacgctagaaaggtgaccgttggggttattggaagtggggactttgccaagtctttaacaatacggcttatccgctgcggatatcatgtggtgattggcagtaggaacccaaaatttgcatcggaattctttccacatgtggtggacgtcactcatcatgaagatgctctgaccaaaaccaatataattttcgttgcaattcacagagaacactatacgtccctctgggaccttcgacaccttttagtcggaaaaattctgatcgatgtgagcaacaacatgagaatcaatcagtaccccgagagcaacgcagaataccttgcatccctgttccccgacagcctgatcgtcaagggtttcaatgttgtttccgcctgggcgctccagctgggacctaaagacgcatcccggcaggtgtacatctgcagtaataacatccaagccaggcagcaggtgattgaactggcgaggcaactgaattttatccctattgacttagggagcctctccagtgctagagaaatcgaaaatctccccctgcgcctgttcacactgtggaggggacctgtcgttgttgcgatctcactggccactttcttcttcctgtactcatttgtgagggacgtaatccatccttatgcgagaaaccagcagagcgacttctataagatccccattgaaatagtgaacaaaaccctgcccatcgtggctatcacattgctgtcgctggtgtatctggcgggattgttggcagccgcttaccaactatactacgggactaaatacaggcggtttccaccatggctggagacttggctccagtgccgaaagcagttaggtcttctcagcttcttctttgcaatggtgcacgttgcctatagcctgtgtttgccaatgagacgtagcgagagatacctgttcctcaacatggcctatcagcaggtgcacgcaaatattgagaattcttggaatgaggaggaggtttggcgcatcgaaatgtacatttctttcgggatcatgagcctgggtctgctgtccctactggccgtgacctcaatcccctctgtgagcaacgcactaaactggcgcgagttctcatttattcagagcaccctgggttacgttgcacttctcatatcaacctttcacgtgctcatatatgggtggaaaagagcatttgaagaggagtactatagattctacactccccctaattttgtactggcccttgtgctcccaagtatcgtcatccttgatctcttgcagttgtgcaggtatcctgactag

SEQ ID NO: 87618 - DNA, 1365 bp, Artificial Sequence
  derived and/or modified sequence
atggagtccataagcatgatgggatcccccaagtccttgtcagagaccttcctgccaaacggcataaacgggataaaggatgcaagaaaggtgactgtcggtgtgataggaagtggggacttcgcaaagagcttgactattcgacttattagatgcggataccacgttgttattggctcgagaaaccctaaattcgcctctgaattttttccccatgtggtcgacgtaactcaccacgaggatgccttgacaaagaccaatataatattcgtcgccatccaccgggagcattacacgtccctctgggacctgcgccatctgctcgttggcaaaatcctgatcgacgtttctaataacatgcggatcaatcagtatcccgaatccaacgctgagtatttggcctcactatttcctgactctctgatcgtgaagggtttcaatgtcgtatcggcatgggcactgcagctaggaccaaaagatgcctcacgccaggtctacatctgcagcaataacattcaggcacgacagcaagtgatcgagctggcaaggcaactgaacttcattccaatcgacctgggatctttgagtagcgctcgggagattgaaaacctgccactgcgcctgttcaccttgtggcgaggtccagtcgtagtagcgatctcactcgccaccttcttcttcctatactcatttgtgagagacgtaattcatccatacgccaggaatcagcagtccgatttttacaagatcccgatcgagatcgtcaacaaaacactccctatagtggcgattaccttgttgagcctggtgtatctcgctgggctgctagcagccgcttaccagctgtactacgggacaaagtaccggagattccctccttggctcgagacttggctccaatgcaggaaacagctcggcctgctttccttcttctttgcaatggtacacgtagcgtactcattgtgcctgcccatgagaaggagcgagaggtacctcttccttaatatggcatatcagcaggtccacgccaacatcgagaattcatggaacgaagaagaagtttggaggatcgaaatgtatatctcttttggcatcatgagtctcggcctcctcagtctgctggcagtcactagcattccttccgtgagcaacgcacttaactggagagagttcagtttcatccaatcaaccctgggctatgtcgccttacttatcagtacattccatgtcctcatctacggatggaaaagagcgttcgaggaagaatactatcgattttatacgccgcctaacttcgtgcttgccttggtgttgccatctatcgttatcctggacctgctgcagctgtgtcggtaccccgattag

SEQ ID NO: 87619 - DNA, 2235 bp, Artificial Sequence
  derived and/or modified sequence
gatccagcttgggtaggcggggaagcagctggagtgcgaccgccgcggcagccaccctgcaaccgccagtcggagagctaagggcaagtcctgaggttgggcccaggagaaagaaggcaaggagacattgtcccaggtaggatgtgtcccagatattcttggtgatcttggaagtgtccgtatcatggaatcaatctctatgatgggaagccctaagagccttagtgaaacttttttacctaatggcataaatggtatcaaagatgcaaggaaggtcactgtaggtgtgattggaagtggagattttgccaaatccttgaccattcgacttattagatgcggctatcatgtggtcataggaagtagaaatcctaagtttgcttctgaattttttcctcatgtggtagatgtcactcatcatgaagatgctctcacaaaaacaaatataatatttgttgctatacacagagaacattatacctccctgtgggacctgagacatctgcttgtgggtaaaatcctgattgatgtgagcaataacatgaggataaaccagtacccagaatccaatgctgaatatttggcttcattattcccagattctttgattgtcaaaggatttaatgttgtctcagcttgggcacttcagttaggacctaaggatgccagccggcaggtttatatatgcagcaacaatattcaagcgcgacaacaggttattgaacttgcccgccagttgaatttcattcccattgacttgggatccttatcatcagccagagagattgaaaatttacccctacgactctttactctctggagagggccagtggtggtagctataagcttggccacattttttttcctttattcctttgtcagagatgtgattcatccatatgctagaaaccaacagagtgacttttacaaaattcctatagagattgtgaataaaaccttacctatagttgccattactttgctctccctagtatacctcgcaggtcttctggcagctgcttatcaactttattacggcaccaagtataggagatttccaccttggttggaaacctggttacagtgtagaaaacagcttggattactaagttttttcttcgctatggtccatgttgcctacagcctctgcttaccgatgagaaggtcagagagatatttgtttctcaacatggcttatcagcaggttcatgcaaatattgaaaactcttggaatgaggaagaagtttggagaattgaaatgtatatctcctttggcataatgagccttggcttactttccctcctggcagtcacttctatcccttcagtgagcaatgctttaaactggagagaattcagttttattcagtctacacttggatatgtcgctctgctcataagtactttccatgttttaatttatggatggaaacgagcttttgaggaagagtactacagattttatacaccaccaaactttgttcttgctcttgttttgccctcaattgtaattctggatcttttgcagctttgcagatacccagactgagctggaactggaatttgtcttcctattgactctacttctttaaaagcggctgcccattacattcctcagctgtccttgcagttaggtgtacatgtgactgagtgttggccagtgagatgaagtctcctcaaaggaaggcagcatgtgtcctttttcatcccttcatcttgctgctgggattgtggatataacaggagccctggcagctgtctccagaggatcaaagccacacccaaagagtaaggcagattagagaccagaaagaccttgactacttccctacttccactgctttttcctgcatttaagccattgtaaatctgggtgtgttacatgaagtgaaaattaattctttctgcccttcagttctttatcctgataccatttaacactgtctgaattaactagactgcaataattctttcttttgaaagcttttaaaggataatgtgcaattcacattaaaattgattttccattgtcaattagttatactcattttcctgccttgatctttcattagatattttgtatctgcttggaatatattatcttctttttaactgtgtaattggtaattactaaaactctgtaatctccaaaatattgctatcaaattacacaccatgttttctatcattctcatagatctgccttataaacatttaaataaaaagtactattta

SEQ ID NO: 87620 - DNA, 2456 bp, Artificial Sequence
  derived and/or modified sequence
agcgttcctcgggccctcggcgccacgagctgtccgggcacgcagcccctagcggcgcgtcgctgccaagccggcctccgcgcgcctccctccttccttctcccctggctgttcgcgatccagcttgggtaggcggggaagcagctggagtgcgaccgccgcggcagccaccctgcaaccgccagtcggaggtgcagtccgtaggccctggcccccgggtgggcccttggggagtcggcgccgctcccggggagctgcaaggctcgcccctgcccggcgtggagggcgcggggggcgcggaggatattcttggtgatcttggaagtgtccgtatcatggaatcaatctctatgatgggaagccctaagagccttagtgaaacttttttacctaatggcataaatggtatcaaagatgcaaggaaggtcactgtaggtgtgattggaagtggagattttgccaaatccttgaccattcgacttattagatgcggctatcatgtggtcataggaagtagaaatcctaagtttgcttctgaattttttcctcatgtggtagatgtcactcatcatgaagatgctctcacaaaaacaaatataatatttgttgctatacacagagaacattatacctccctgtgggacctgagacatctgcttgtgggtaaaatcctgattgatgtgagcaataacatgaggataaaccagtacccagaatccaatgctgaatatttggcttcattattcccagattctttgattgtcaaaggatttaatgttgtctcagcttgggcacttcagttaggacctaaggatgccagccggcaggtttatatatgcagcaacaatattcaagcgcgacaacaggttattgaacttgcccgccagttgaatttcattcccattgacttgggatccttatcatcagccagagagattgaaaatttacccctacgactctttactctctggagagggccagtggtggtagctataagcttggccacattttttttcctttattcctttgtcagagatgtgattcatccatatgctagaaaccaacagagtgacttttacaaaattcctatagagattgtgaataaaaccttacctatagttgccattactttgctctccctagtatacctcgcaggtcttctggcagctgcttatcaactttattacggcaccaagtataggagatttccaccttggttggaaacctggttacagtgtagaaaacagcttggattactaagttttttcttcgctatggtccatgttgcctacagcctctgcttaccgatgagaaggtcagagagatatttgtttctcaacatggcttatcagcaggttcatgcaaatattgaaaactcttggaatgaggaagaagtttggagaattgaaatgtatatctcctttggcataatgagccttggcttactttccctcctggcagtcacttctatcccttcagtgagcaatgctttaaactggagagaattcagttttattcagtctacacttggatatgtcgctctgctcataagtactttccatgttttaatttatggatggaaacgagcttttgaggaagagtactacagattttatacaccaccaaactttgttcttgctcttgttttgccctcaattgtaattctggatcttttgcagctttgcagatacccagactgagctggaactggaatttgtcttcctattgactctacttctttaaaagcggctgcccattacattcctcagctgtccttgcagttaggtgtacatgtgactgagtgttggccagtgagatgaagtctcctcaaaggaaggcagcatgtgtcctttttcatcccttcatcttgctgctgggattgtggatataacaggagccctggcagctgtctccagaggatcaaagccacacccaaagagtaaggcagattagagaccagaaagaccttgactacttccctacttccactgctttttcctgcatttaagccattgtaaatctgggtgtgttacatgaagtgaaaattaattctttctgcccttcagttctttatcctgataccatttaacactgtctgaattaactagactgcaataattctttcttttgaaagcttttaaaggataatgtgcaattcacattaaaattgattttccattgtcaattagttatactcattttcctgccttgatctttcattagatattttgtatctgcttggaatatattatcttctttttaactgtgtaattggtaattactaaaactctgtaatctccaaaatattgctatcaaattacacaccatgttttctatcattctcatagatctgccttataaacatttaaataaaaagtactatttaatgatttaacttctgttttgaaatgttgtatacacgtggatttttttctcattaaataataattctagta

SEQ ID NO: 87621 - DNA, 2261 bp, Artificial Sequence
  derived and/or modified sequence
ttctgctatagagatggaacagtatatggaaagctcccaagaaagtgaagagaggaaattggaaaattgtgagtggaccttctgatactgctcctccttgcgtggaaaaggggaaagaactgcatgcatattattcagcgtcctatattcaaaggatattcttggtgatcttggaagtgtccgtatcatggaatcaatctctatgatgggaagccctaagagccttagtgaaacttttttacctaatggcataaatggtatcaaagatgcaaggaaggtcactgtaggtgtgattggaagtggagattttgccaaatccttgaccattcgacttattagatgcggctatcatgtggtcataggaagtagaaatcctaagtttgcttctgaattttttcctcatgtggtagatgtcactcatcatgaagatgctctcacaaaaacaaatataatatttgttgctatacacagagaacattatacctccctgtgggacctgagacatctgcttgtgggtaaaatcctgattgatgtgagcaataacatgaggataaaccagtacccagaatccaatgctgaatatttggcttcattattcccagattctttgattgtcaaaggatttaatgttgtctcagcttgggcacttcagttaggacctaaggatgccagccggcaggtttatatatgcagcaacaatattcaagcgcgacaacaggttattgaacttgcccgccagttgaatttcattcccattgacttgggatccttatcatcagccagagagattgaaaatttacccctacgactctttactctctggagagggccagtggtggtagctataagcttggccacattttttttcctttattcctttgtcagagatgtgattcatccatatgctagaaaccaacagagtgacttttacaaaattcctatagagattgtgaataaaaccttacctatagttgccattactttgctctccctagtatacctcgcaggtcttctggcagctgcttatcaactttattacggcaccaagtataggagatttccaccttggttggaaacctggttacagtgtagaaaacagcttggattactaagttttttcttcgctatggtccatgttgcctacagcctctgcttaccgatgagaaggtcagagagatatttgtttctcaacatggcttatcagcaggttcatgcaaatattgaaaactcttggaatgaggaagaagtttggagaattgaaatgtatatctcctttggcataatgagccttggcttactttccctcctggcagtcacttctatcccttcagtgagcaatgctttaaactggagagaattcagttttattcagtctacacttggatatgtcgctctgctcataagtactttccatgttttaatttatggatggaaacgagcttttgaggaagagtactacagattttatacaccaccaaactttgttcttgctcttgttttgccctcaattgtaattctggatcttttgcagctttgcagatacccagactgagctggaactggaatttgtcttcctattgactctacttctttaaaagcggctgcccattacattcctcagctgtccttgcagttaggtgtacatgtgactgagtgttggccagtgagatgaagtctcctcaaaggaaggcagcatgtgtcctttttcatcccttcatcttgctgctgggattgtggatataacaggagccctggcagctgtctccagaggatcaaagccacacccaaagagtaaggcagattagagaccagaaagaccttgactacttccctacttccactgctttttcctgcatttaagccattgtaaatctgggtgtgttacatgaagtgaaaattaattctttctgcccttcagttctttatcctgataccatttaacactgtctgaattaactagactgcaataattctttcttttgaaagcttttaaaggataatgtgcaattcacattaaaattgattttccattgtcaattagttatactcattttcctgccttgatctttcattagatattttgtatctgcttggaatatattatcttctttttaactgtgtaattggtaattactaaaactctgtaatctccaaaatattgctatcaaattacacaccatgttttctatcattctcatagatctgccttataaacatttaaataaaaagtactatttaatgatttaacttctgttttgaaa

SEQ ID NO: 87622 - protein, 419 aa, Artificial Sequence
  derived and/or modified sequence
MESISMMGSPKSLSETFLPNGINGIKDARKVTVGVIGSGDFAKSLTIRLIRCGYHVVIGSRNPKFASEFFPHVVDVTHHEDALTKTNIIFVAIHREHYTSLWDLRHLLVGKILIDVSNNMRINQYPESNAEYLASLFPDSLIVKGFNVVSAWALQLGPKDASRQVYICSNNIQARQQVIELARQLNFIPIDLGSLSSAREIENLPLRLFTLWRGPVVVAISLATFFFLYSFVRDVIHPYARNQQSDFYKIPIEIVNKTLPIVAITLLSLVYLAGLLAAAYQLYYGTKYRRFPPWLETWLQCRKQLGLLSFFFAMVHVAYSLCLPMRRSERYLFLNMAYQQVHANIENSWNEEEVWRIEMYISFGIMSLGLLSLLAVTSIPSVSNALNWREFSFIQIFCSFADTQTELELEFVFLLTLLL

SEQ ID NO: 87623 - protein, 88 aa, Artificial Sequence
  derived and/or modified sequence
MESISMMGSPKSLSETFLPNGINGIKDARKVTVGVIGSGDFAKSLTIRLIRCGYHVVIGSRNPKFASEFFPHVVDVTHHEDALTKTNI

SEQ ID NO: 87624 - protein, 182 aa, Artificial Sequence
  derived and/or modified sequence
MESISMMGSPKSLSETFLPNGINGIKDARKVTVGVIGSGDFAKSLTIRLIRCGYHVVIGSRNPKFASEFFPHVVDVTHHEDALTKTNIIFVAIHREHYTSLWDLRHLLVGKILIDVSNNMRINQYPESNAEYLASLFPDSLIVKGFNVVSAWALQLGPKDASRQVYICSNNIQARQQVIELA

SEQ ID NO: 87625 - DNA, 1260 bp, Artificial Sequence
  derived and/or modified sequence
atggagagcatcagcatgatgggcagccccaagagcctgagcgagaccttcctgcccaacggcatcaacggcatcaaggacgccagaaaggtgaccgtgggcgtgatcggcagcggcgacttcgccaagagcctgaccatcagactgatcagatgcggctaccacgtggtgatcggcagcagaaaccccaagttcgccagcgagttcttcccccacgtggtggacgtgacccaccacgaggacgccctgaccaagaccaacatcatcttcgtggccatccacagagagcactacaccagcctgtgggacctgagacacctgctggtgggcaagatcctgatcgacgtgagcaacaacatgagaatcaaccagtaccccgagagcaacgccgagtacctggccagcctgttccccgacagcctgatcgtgaagggcttcaacgtggtgagcgcctgggccctgcagctgggccccaaggacgccagcagacaggtgtacatctgcagcaacaacatccaggccagacagcaggtgatcgagctggccagacagctgaacttcatccccatcgacctgggcagcctgagcagcgccagagagatcgagaacctgcccctgagactgttcaccctgtggagaggccccgtggtggtggccatcagcctggccaccttcttcttcctgtacagcttcgtgagagacgtgatccacccctacgccagaaaccagcagagcgacttctacaagatccccatcgagatcgtgaacaagaccctgcccatcgtggccatcaccctgctgagcctggtgtacctggccggcctgctggccgccgcctaccagctgtactacggcaccaagtacagaagattccccccctggctggagacctggctgcagtgcagaaagcagctgggcctgctgagcttcttcttcgccatggtgcacgtggcctacagcctgtgcctgcccatgagaagaagcgagagatacctgttcctgaacatggcctaccagcaggtgcacgccaacatcgagaacagctggaacgaggaggaggtgtggagaatcgagatgtacatcagcttcggcatcatgagcctgggcctgctgagcctgctggccgtgaccagcatccccagcgtgagcaacgccctgaactggagagagttcagcttcatccagatcttctgcagcttcgccgacacccagaccgagctggagctggagttcgtgttcctgctgaccctgctgctgtag

SEQ ID NO: 87626 - DNA, 267 bp, Artificial Sequence
  derived and/or modified sequence
atggagagcatcagcatgatgggcagccccaagagcctgagcgagaccttcctgcccaacggcatcaacggcatcaaggacgccagaaaggtgaccgtgggcgtgatcggcagcggcgacttcgccaagagcctgaccatcagactgatcagatgcggctaccacgtggtgatcggcagcagaaaccccaagttcgccagcgagttcttcccccacgtggtggacgtgacccaccacgaggacgccctgaccaagaccaacatctag

SEQ ID NO: 87627 - DNA, 549 bp, Artificial Sequence
  derived and/or modified sequence
atggagagcatcagcatgatgggcagccccaagagcctgagcgagaccttcctgcccaacggcatcaacggcatcaaggacgccagaaaggtgaccgtgggcgtgatcggcagcggcgacttcgccaagagcctgaccatcagactgatcagatgcggctaccacgtggtgatcggcagcagaaaccccaagttcgccagcgagttcttcccccacgtggtggacgtgacccaccacgaggacgccctgaccaagaccaacatcatcttcgtggccatccacagagagcactacaccagcctgtgggacctgagacacctgctggtgggcaagatcctgatcgacgtgagcaacaacatgagaatcaaccagtaccccgagagcaacgccgagtacctggccagcctgttccccgacagcctgatcgtgaagggcttcaacgtggtgagcgcctgggccctgcagctgggccccaaggacgccagcagacaggtgtacatctgcagcaacaacatccaggccagacagcaggtgatcgagctggcctag

SEQ ID NO: 87628 - DNA, 1260 bp, Artificial Sequence
  derived and/or modified sequence
atggagagcatctcaatgatgggaagccccaagagtctgtccgaaacatttctccctaacggtatcaatgggattaaggatgcccggaaagttaccgtaggtgtgatcgggtccggcgattttgcaaagtcattaactattcggctgattaggtgtggataccacgtggtgatcggcagccggaaccctaagttcgcgtccgaattctttccacacgtggttgatgtgacccaccacgaagatgccctgacaaagactaacatcatctttgtggcaatacacagggaacattacaccagcttgtgggacctcagacatctgctcgttgggaaaatcctgatagacgtgtcaaataacatgagaataaatcagtatccagaaagtaacgccgaatacctggcctcactatttcccgattctttaatagtcaagggcttcaatgtagtaagcgcgtgggcactgcagctgggccctaaggacgcgtccaggcaggtttacatttgctctaacaatatacaggcacgacagcaggtgatcgagttggcacggcagttgaattttatacctatagacctcggcagtctgagctccgcaagagaaatcgaaaatctgcctctcaggttgtttacgttgtggcgcggccccgtggtggtcgccatttccttggcaaccttcttttttctgtactctttcgttcgggatgtgattcatccatatgcccgtaatcagcagagcgatttttataagatccctattgaaattgtaaataaaacacttcctatcgtggctatcaccttgctgtccctcgtctacctggccgggctgctagcagcagcataccagctctactacgggaccaagtatagacgttttcccccctggctggaaacatggttacagtgcagaaagcagctagggttgctctctttcttttttgccatggttcatgtggcttactccttatgtctcccaatgcggcggtctgaaaggtatctgtttctcaacatggcttaccaacaggtacacgctaatatcgaaaatagttggaatgaagaggaagtgtggagaatcgagatgtacatctcttttggaataatgtcactgggactccttagtctgctggctgtgaccagcattccgtccgtctccaatgcattgaattggagagaattcagtttcattcagatcttctgttcattcgccgatactcagacagagttagaactggaatttgtgttcctgctgacactcctgctgtag

SEQ ID NO: 87629 - DNA, 267 bp, Artificial Sequence
  derived and/or modified sequence
atggagtccatttcaatgatggggtctcccaagtccctctccgagaccttcttgcccaacggcatcaacggcatcaaggacgcacgcaaagtgactgtcggtgtgataggaagtggggactttgcgaagtccctgacaatcaggttgatccgttgcggctatcacgttgtgatagggagtaggaatccaaagttcgcaagcgaattttttccacatgtcgtggatgtgactcatcacgaagacgccctcacaaaaaccaatatatag

SEQ ID NO: 87630 - DNA, 549 bp, Artificial Sequence
  derived and/or modified sequence
atggagtcgatctctatgatggggagcccgaaatccctctctgagactttcctccccaacgggatcaatggcatcaaagatgcccgtaaagtgaccgtgggtgtcatcgggtccggtgattttgctaaatccctgacaatcaggcttatacgatgcggttatcatgtggtaattgggagcagaaacccaaagtttgcttctgagttttttccccacgtcgtggatgtcacacatcacgaagacgccctgactaaaactaatatcatatttgtagccattcatagagagcactacactagcctttgggatctgcgtcacctcttggtgggcaagattctgattgacgtatccaataacatgcggattaatcagtaccctgagtccaacgccgaatacttggctagccttttccctgatagcctaatcgtgaagggatttaatgttgtctcagcgtgggctctacagctggggcctaaggatgcctctcggcaggtgtatatctgttctaataatatacaggcgcgccaacaggttatcgagctggcctag

SEQ ID NO: 87631 - DNA, 1260 bp, Artificial Sequence
  derived and/or modified sequence
atggagagcatctccatgatgggcagccccaagagcctgtctgagaccttcctgcccaacggcatcaatggcatcaaggatgccaggaaggtgacagtgggcgtcatcggcagcggggactttgccaagagcctgaccatccgcctcatccgctgtggctaccacgtggtgattggcagcaggaaccccaagtttgccagcgagttcttcccccacgtggtggatgtgacccaccatgaagatgccctgaccaagaccaacatcatctttgtggccatccaccgggagcactacaccagcctgtgggacctgcggcacctgctggtgggcaagatcctgattgatgtgagcaacaacatgaggatcaaccagtacccagagagcaatgctgagtacctggccagcctcttcccagacagcctcatcgtgaagggcttcaacgtggtgtctgcctgggccctgcagctgggccccaaggatgccagccggcaggtgtacatctgcagcaacaacatccaggcccggcagcaggtgattgagctggcccggcagctgaacttcatccccatcgacctgggcagcctgagcagcgcccgggagattgagaacctgcccctgcggctcttcaccctgtggaggggccctgtggtggtggccatcagcctggccaccttcttcttcctgtacagctttgtgagagatgtgatccacccctatgccaggaaccagcagagcgacttctacaagatccccatcgagatcgtgaacaagaccctgcccatcgtggccatcaccctgctgagcctggtgtacctggccggcctgctggccgccgcctaccagctgtactacggcaccaagtaccgccgcttccccccctggctggagacctggctgcagtgcaggaagcagctgggcctgctgtccttcttctttgccatggtgcacgtggcctacagcctgtgcctgcccatgagaagaagtgagcgctacctgttcctgaacatggcctaccagcaggtgcacgccaacatcgagaacagctggaatgaggaggaggtgtggagaattgagatgtacatcagctttggcatcatgagcctgggcctgctgagcctgctggccgtgaccagcatccccagcgtgtccaatgccctgaactggagggagttctccttcatccagatcttctgcagctttgctgacacccagacagagctggagctggagtttgtgttcctgctgaccctgctgctgtag

SEQ ID NO: 87632 - DNA, 267 bp, Artificial Sequence
  derived and/or modified sequence
atggagagcatctccatgatgggcagccccaagagcctgtctgagaccttcctgcccaacggcatcaatggcatcaaggatgccaggaaggtgacagtgggcgtcatcggcagcggggactttgccaagagcctgaccatccgcctcatccgctgtggctaccacgtggtgattggcagcaggaaccccaagtttgccagcgagttcttcccccacgtggtggatgtgacccaccatgaagatgccctgaccaagaccaacatctag

SEQ ID NO: 87633 - DNA, 549 bp, Artificial Sequence
  derived and/or modified sequence
atggagagcatctccatgatgggcagccccaagagcctgtctgagaccttcctgcccaacggcatcaatggcatcaaggatgccaggaaggtgacagtgggcgtcatcggcagcggggactttgccaagagcctgaccatccgcctcatccgctgtggctaccacgtggtgattggcagcaggaaccccaagtttgccagcgagttcttcccccacgtggtggatgtgacccaccatgaagatgccctgaccaagaccaacatcatctttgtggccatccaccgggagcactacaccagcctgtgggacctgcggcacctgctggtgggcaagatcctgattgatgtgagcaacaacatgaggatcaaccagtacccagagagcaatgctgagtacctggccagcctcttcccagacagcctcatcgtgaagggcttcaacgtggtgtctgcctgggccctgcagctgggccccaaggatgccagccggcaggtgtacatctgcagcaacaacatccaggcccggcagcaggtgattgagctggcctag

SEQ ID NO: 87634 - DNA, 1260 bp, Artificial Sequence
  derived and/or modified sequence
atggagagcatcagcatgatgggcagccccaagagcctgagcgagacatttctcccaaacggaattaatgggatcaaagacgcgaggaaggtgacagtgggggtgattgggtccggcgactttgccaaatctctgacaatcaggctgataaggtgtggttatcacgtagtgatcggctcccggaacccaaaattcgcgtcggagtttttcccccatgtggtcgatgtgacacatcacgaggatgctctgacaaaaacaaacatcatcttcgttgccatacaccgcgagcactatactagtctgtgggatctacggcatctcctggtcggaaaaatccttatcgatgtttccaacaacatgaggatcaaccagtacccggagagtaacgcagaatacctggcctctcttttccccgattctctgattgtaaagggatttaacgtcgtcagcgcctgggctttacagctagggcccaaagatgcctcacggcaggtatacatctgttctaataacatacaggctcgtcaacaggtgatcgagctagcgcgccagctgaatttcattcccatagacctgggcagtctttccagcgcgagagagatcgaaaacctacccctgcgtctgttcacgctgtggaggggccccgtggtggtggctatctccctggccaccttctttttcctatactctttcgtcagagacgtgattcatccctacgccaggaatcaacagagtgacttctacaagatacccattgagattgtgaataaaacgctccccattgtggctattaccctgctctctctagtctacctcgctgggttgttggcggccgcataccaattgtactacgggaccaagtataggcgttttcccccgtggttagagacatggctacagtgtagaaagcagctgggccttctcagttttttcttcgccatggtccacgtcgcctattctctctgcctgcctatgcgacgctcagaacgttatttattcctcaacatggcttatcagcaagtacacgctaacatagagaatagttggaatgaagaggaagtatggaggatcgaaatgtacattagtttcggtattatgtctctaggcctgctcagtctcctcgctgttaccagcattccttctgtgagcaatgcactcaattggagagagttttcattcatccagatattttgtagtttcgcagacacccaaacggaactcgaactcgaattcgttttcctgctgaccctgcttttatag

SEQ ID NO: 87635 - DNA, 267 bp, Artificial Sequence
  derived and/or modified sequence
atggagagcatcagcatgatgggcagccccaagagcctgagcgagacgtttttgcctaatggtatcaacggcatcaaggacgcccgcaaggtgaccgtcggcgtaatcgggtcaggcgatttcgccaagagcttgaccattagacttatcaggtgcggctaccacgtggtgatcggatcacgtaacccaaagtttgcaagcgagttctttccacatgtcgttgacgtgacgcatcacgaagacgcactcacaaagaccaacatctag

SEQ ID NO: 87636 - DNA, 549 bp, Artificial Sequence
  derived and/or modified sequence
atggagagcatcagcatgatgggcagccccaagagcctgagcgagaccttcctacccaatggtatcaacggcataaaagatgctcgaaaagtcacggtcggcgttatagggtccggcgactttgctaaatctctcaccattcgtctgatccgttgcggttaccacgtggtgataggtagcagaaacccgaagtttgcatctgagttttttccgcacgtggtagatgtgactcaccacgaggacgctctaaccaaaacaaacataatttttgtggccattcatcgggagcactacacctccctgtgggatttacggcaccttctggtgggaaagatcctgatcgacgttagtaacaacatgcggattaatcagtatcctgaaagtaacgctgaatacctggccagtctctttcccgactcccttatagtcaaaggttttaatgtggtctctgcatgggcgctgcagctcggccccaaagacgcctctaggcaggtctacatttgttctaataatattcaggcaaggcaacaggtcatagagctcgcgtag

SEQ ID NO: 87637 - DNA, 1260 bp, Artificial Sequence
  derived and/or modified sequence
atggaatcgatatctatgatggggtccccgaaaagtctgagtgaaacatttttgcccaatggtattaacggaatcaaggacgctcgcaaagtcactgtcggagtgatcggctccggagacttcgccaagtctctcacaatacggctgattaggtgcgggtaccatgtcgtgatcggaagccgcaatcccaagttcgcgtccgagttctttccacacgtagttgacgttacccaccatgaggatgcacttacaaagactaacatcatctttgtggccatacacagggaacactatacctcactgtgggatctccgccatctacttgtgggcaagattctaatcgatgtgtcgaataatatgcggattaaccagtatcctgagagcaacgcagaatacctggcctccctgtttcccgacagtcttatagtgaaaggcttcaacgtggtgagcgcatgggcactccagctcggacctaaggacgcctctcgacaggtgtatatctgttcgaataacatccaggccaggcagcaggtaattgaactggcacgccagcttaattttattccaatagatttgggctccctgagtagtgccagagaaatcgaaaatctgccactgagattattcaccctttggaggggccctgtggtggtcgcgatcagtctggccactttctttttcttatacagtttcgtgagggatgtcatacacccatacgctaggaaccagcagtccgacttctacaagatccctatagagattgtcaacaaaacccttcctattgtggccattacccttctctctcttgtatatctggctggccttttggccgcagcttaccagttatactacggaaccaaatacagaaggttccctccctggcttgaaacctggttgcaatgtcggaagcagctcggtctactgtcatttttctttgccatggtccatgtggcctactctctgtgcctgccgatgcgtcggtctgagaggtaccttttcttgaacatggcctaccagcaggtgcacgccaatattgagaactcctggaacgaggaagaagtatggagaatcgaaatgtatatttccttcggcattatgagtcttggcctgctgagtctgctcgctgtgaccagtatccccagcgtttctaacgcgctaaactggcgcgagttttcatttatccaaattttttgttcatttgctgatacccagacagagctggagctggagtttgtctttcttttaacactgctcctctag

SEQ ID NO: 87638 - DNA, 267 bp, Artificial Sequence
  derived and/or modified sequence
atggaatctatttctatgatgggctcccccaaaagtttatctgaaaccttcctcccaaacgggatcaatgggatcaaagacgctaggaaggtgaccgtgggcgttatcgggtccggggacttcgccaaatctcttaccatacgtctgataaggtgtggttaccacgtcgtgataggctccaggaaccccaagttcgcctcagaatttttccctcatgtcgtggacgtcacgcaccacgaggatgcactcaccaaaacgaacatctag

SEQ ID NO: 87639 - DNA, 549 bp, Artificial Sequence
  derived and/or modified sequence
atggagtccatttctatgatgggaagccctaaatccctttctgagacgttcttacctaacggaatcaacggcataaaggacgcccgaaaggttaccgtgggagtgatcgggagcggagacttcgccaagtccctgacgatcagattaatacgctgtggttatcacgtcgtgatcggctcacggaatcccaaattcgcatctgaattcttcccacatgtggtagacgtgacccatcacgaagatgccctgacgaaaaccaacattatttttgtggcaatccatagagagcactatacctctctctgggatctgcggcatctcctggtggggaaaatactcatcgatgtaagcaacaatatgcgaatcaaccagtaccccgaaagcaacgccgagtacctggcctcactgttcccagattcgctgatcgtgaagggctttaacgtggtgagtgcctgggccctgcaactgggtccaaaggacgcgtccagacaggtgtacatctgcagtaataacatccaggcaagacaacaggtgatagaactggcctag

SEQ ID NO: 87640 - DNA, 2072 bp, Artificial Sequence
  derived and/or modified sequence
gatccagcttgggtaggcggggaagcagctggagtgcgaccgccgcggcagccaccctgcaaccgccagtcggagagctaagggcaagtcctgaggttgggcccaggagaaagaaggcaaggagacattgtcccaggatattcttggtgatcttggaagtgtccgtatcatggaatcaatctctatgatgggaagccctaagagccttagtgaaacttttttacctaatggcataaatggtatcaaagatgcaaggaaggtcactgtaggtgtgattggaagtggagattttgccaaatccttgaccattcgacttattagatgcggctatcatgtggtcataggaagtagaaatcctaagtttgcttctgaattttttcctcatgtggtagatgtcactcatcatgaagatgctctcacaaaaacaaatataatatttgttgctatacacagagaacattatacctccctgtgggacctgagacatctgcttgtgggtaaaatcctgattgatgtgagcaataacatgaggataaaccagtacccagaatccaatgctgaatatttggcttcattattcccagattctttgattgtcaaaggatttaatgttgtctcagcttgggcacttcagttaggacctaaggatgccagccggcaggtttatatatgcagcaacaatattcaagcgcgacaacaggttattgaacttgcccgccagttgaatttcattcccattgacttgggatccttatcatcagccagagagattgaaaatttacccctacgactctttactctctggagagggccagtggtggtagctataagcttggccacattttttttcctttattcctttgtcagagatgtgattcatccatatgctagaaaccaacagagtgacttttacaaaattcctatagagattgtgaataaaaccttacctatagttgccattactttgctctccctagtatacctcgcaggtcttctggcagctgcttatcaactttattacggcaccaagtataggagatttccaccttggttggaaacctggttacagtgtagaaaacagcttggattactaagttttttcttcgctatggtccatgttgcctacagcctctgcttaccgatgagaaggtcagagagatatttgtttctcaacatggcttatcagcaggttcatgcaaatattgaaaactcttggaatgaggaagaagtttggagaattgaaatgtatatctcctttggcataatgagccttggcttactttccctcctggcagtcacttctatcccttcagtgagcaatgctttaaactggagagaattcagttttattcagatcttttgcagctttgcagatacccagactgagctggaactggaatttgtcttcctattgactctacttctttaaaagcggctgcccattacattcctcagctgtccttgcagttaggtgtacatgtgactgagtgttggccagtgagatgaagtctcctcaaaggaaggcagcatgtgtcctttttcatcccttcatcttgctgctgggattgtggatataacaggagccctggcagctgtctccagaggatcaaagccacacccaaagagtaaggcagattagagaccagaaagaccttgactacttccctacttccactgctttttcctgcatttaagccattgtaaatctgggtgtgttacatgaagtgaaaattaattctttctgcccttcagttctttatcctgataccatttaacactgtctgaattaactagactgcaataattctttcttttgaaagcttttaaaggataatgtgcaattcacattaaaattgattttccattgtcaattagttatactcattttcctgccttgatctttcattagatattttgtatctgcttggaatatattatcttctttttaactgtgtaattggtaattactaaaactctgtaatctccaaaatattgctatcaaattacacaccatgttttctatcattctcatagatctgccttataaacatttaaataaaaagtactattta

SEQ ID NO: 87641 - DNA, 579 bp, Artificial Sequence
  derived and/or modified sequence
taggcggggaagcagctggagtgcgaccgccgcggcagccaccctgcaaccgccagtcggaggtgcagtccgtaggccctggcccccgggtgggcccttggggagtcggcgccgctcccggggagctgcaaggctcgcccctgcccggcgtggagggcgcggggggcgcggagtgaagagaggaaattggaaaattgtgagtggaccttctgatactgctcctccttgcgtggaaaaggggaaagaactgcatgcatattattcagcgtcctatattcaaaggatattcttggtgatcttggaagtgtccgtatcatggaatcaatctctatgatgggaagccctaagagccttagtgaaacttttttacctaatggcataaatggtatcaaagatgcaaggaaggtcactgtaggtgtgattggaagtggagattttgccaaatccttgaccattcgacttattagatgcggctatcatgtggtcataggaagtagaaatcctaagtttgcttctgaattttttcctcatgtggtagatgtcactcatcatgaagatgctctcacaaaaacaaatata

SEQ ID NO: 87642 - DNA, 902 bp, Artificial Sequence
  derived and/or modified sequence
caagcagagctctccttcctgaacaaaatgagtccacctggggtttattttctttaaagatttgctcaatagagattttattatctttggtttaaaataaaagttaaaatgatatatttactattttaatgagttacatttaatgttttatggcaacaaaaaagaaatatctgattctgatgtgatttttcagatcatagactacatgtctaaagaagcctataagaaattatggcctatgaagtgtggaatctgagactgctggcaagatggccgactaggaacagctctggtgcacagctcccagcaagatccacgcaggaggatattcttggtgatcttggaagtgtccgtatcatggaatcaatctctatgatgggaagccctaagagccttagtgaaacttttttacctaatggcataaatggtatcaaagatgcaaggaaggtcactgtaggtgtgattggaagtggagattttgccaaatccttgaccattcgacttattagatgcggctatcatgtggtcataggaagtagaaatcctaagtttgcttctgaattttttcctcatgtggtagatgtcactcatcatgaagatgctctcacaaaaacaaatataatatttgttgctatacacagagaacattatacctccctgtgggacctgagacatctgcttgtgggtaaaatcctgattgatgtgagcaataacatgaggataaaccagtacccagaatccaatgctgaatatttggcttcattattcccagattctttgattgtcaaaggatttaatgttgtctcagcttgggcacttcagttaggacctaaggatgccagccggcaggtttatatatgcagcaacaatattcaagcgcgacaacaggttattgaacttgc

SEQ ID NO: 87643 - protein, 267 aa, Artificial Sequence
  derived and/or modified sequence
MCFRVKFYPHEPLKIKEELTRYLLYLQIKRDIFHGRLLCSFSDAAYLGACIVQAELGDYDPDEHPENYISEFEIFPKQSQKLERKIVEIHKNELRGQSPPVAEFNLLLKAHTLETYGVDPHPCKDSTGTTTFLGFTAAGFVVFQGNKRIHLIKWPDVCKLKFEGKTFYVIGTQKEKKAMLAFHTSTPAACKHLWKCGVENQAFYKYAKSSQIKTVSSSKIFFKGSRFRYSGKVAKEVVEASSKIQREPPEVHRCVQKKICSCFGVTW

SEQ ID NO: 87644 - protein, 556 aa, Artificial Sequence
  derived and/or modified sequence
MFASCHCVPRGRRTMKMIHFRSSSVKSLSQEMRCTIRLLDDSEISCHIQRETKGQFLIDHICNYYSLLEKDYFGIRYVDPEKQRHWLEPNKSIFKQMKTHPPYTMCFRVKFYPHEPLKIKEELTRYLLYLQIKRDIFHGRLLCSFSDAAYLGACIVQAELGDYDPDEHPENYISEFEIFPKQSQKLERKIVEIHKNELRGQSPPVAEFNLLLKAHTLETYGVDPHPCKDSTGTTTFLGFTAAGFVVFQGNKRIHLIKWPDVCKLKFEGKTFYVIGTQKEKKAMLAFHTSTPAACKHLWKCGVENQAFYKYAKSSQIKTVSSSKIFFKGSRFRYSGKVAKEVVEASSKIQREPPEVHRANITQSRSSHSLNKQLIINMEPLQPLLPSPSEQEEELPLGEGVPLPKEENISAPLISSSPVKAAREYEDPPSEEEDKIKEEPLTISELVYNPSASLLPTPVDDDEIDMLFDCPSRLELEREDTDSFEDLEADENAFLIAEEEELKEARRALSWSYDILTGHIRVNPLVKSFSRLLVVGLGLLLFVFPLLLLLLESVSMQ

SEQ ID NO: 87645 - DNA, 2198 bp, Artificial Sequence
  derived and/or modified sequence
cgcgagcccgccgggggtctcaggctctgggcgtcctcggcgagcgagcccgggcagagggaggcgcacgagcgcgcgcgacagaaggaggcggggaaaggagggggcgaggcggaggcgagcgaacagagggagggacccgcccgccgcgccccggccgctgggcatgtgtgtccgcaggcgcccgacgctgccgatgtcccggggctgagccgcgcccaggtgtcccggacagtgcgtgcgagcgtgtgtgtccgcgcaggcgagcaccgcgccggccctgagcctcccgctcgctccccacggccgcggtgcatgttcgcctcctgccactgtgtgccgagaggcaggaggaccatgaaaatgatccactttcggagctccagcgtcaaatcgctcagccaggagatgagatgcaccatccggctgctggacgactcggagatctcctgccacatccagagggaaaccaaagggcagtttctcattgaccacatctgcaactactacagcctgctggagaaggactactttggcattcgctatgtggacccagagaagcaaaggcactggcttgaacctaacaagtccatcttcaagcaaatgaaaactcatccaccatacaccatgtgctttagagtgaaattctacccacatgaacccttgaagattaaagaagagctcacaagataccttttataccttcagattaaaagggacatttttcatggccgcctgctgtgctccttttctgatgctgcctacctgggtgcctgtattgttcaagctgagcttggtgattacgatcctgatgagcatcctgagaattacatcagtgagtttgagattttccccaagcagtcacagaagctggaaagaaaaatagtggaaattcataaaaatgaactcagggggcagagcccaccagttgctgaatttaacttgctcctgaaagctcacactttggaaacctacggggtggatcctcacccatgcaaggattcaacaggcacaacaacatttttaggattcacagctgcaggctttgtggtctttcagggaaataagagaatccatttgataaaatggccagatgtctgcaaattgaagtttgaagggaagacattttatgtgattggcacccagaaggagaaaaaagccatgttggcattccatacttcaacaccagctgcctgcaaacatctttggaagtgtggagtggaaaaccaggccttttataagtatgcaaaatccagtcagatcaagactgtatcaagcagcaagatattttttaaaggaagtagatttcgatatagtgggaaagttgccaaagaggtggtggaggccagttccaagatccagagggagcctcctgaggtgcacagagccaacattactcagagccgcagttcccactccttgaacaaacagctcatcattaacatggaacccctgcagcccctgcttccttcccccagcgagcaagaagaagaacttcctctgggtgagggtgttccattgcctaaagaggagaacatttctgctcccttgatctccagctccccagtgaaggcagcccgggagtatgaagatccccctagtgaagaggaagataaaataaaagaagaacctttaaccatctctgaactagtgtacaacccaagtgccagcctgctccccacccctgtggatgacgatgagattgacatgctctttgactgtccttctaggcttgagttggaaagagaagacacagattcatttgaggatctggaagcagatgaaaacgcctttttgattgctgaagaagaggagctgaaggaggctcgccgtgctttgtcgtggagctatgacattctgactggccatattcgggtgaacccactggtcaagagtttttccaggctccttgtggtgggcctgggactgctgctctttgtatttcccctgctcctcctccttttggagtcagtctccatgcagtaaacagacccagcagaacctgcccgtggtgagctcagccaagacttggctctccatgttccagcctccgtctgtgactgggtgggtaagttcggtgggccccacccagtgggctcggcagccgtcacttcacagaagaagaaaggaaccttgcttaggcctcagatcccagctgtgctctccaatccattaataaagctgcttttaaccctctc

SEQ ID NO: 87646 - DNA, 1671 bp, Artificial Sequence
  derived and/or modified sequence
atgttcgcaagctgtcactgtgtacctcgaggccggaggacgatgaagatgatccatttccggagctctagtgtaaagtcccttagccaagaaatgcggtgtacaatcagattgctggacgatagtgaaatttcatgtcacattcagagagagactaaaggccagttcctcatcgatcacatttgtaactactatagtcttcttgagaaggattactttggtatcaggtacgtggatcccgagaagcaacgacactggttagagcccaataagtcaatcttcaagcaaatgaaaactcaccctccatatacaatgtgcttcagagtgaaattctaccctcacgagccactgaaaatcaaagaggagttgaccagatacctcctgtacctacagatcaaaagggacatcttccacgggagactgctttgcagctttagcgacgcagcttatctgggagcctgcattgttcaggccgagctcggcgattatgaccccgacgagcacccggaaaattacattagcgaatttgaaatctttccaaaacagtcacagaaactcgagagaaaaatagtggagattcacaagaacgaactgagaggccagagcccccctgttgcagaattcaatctattacttaaggcccacacacttgagacatacggcgtggacccccacccctgtaaagattcaactggcaccacaaccttccttggctttaccgcagccggatttgtcgtttttcaggggaacaaaagaattcatctcattaaatggccggatgtgtgcaagctaaagttcgagggcaaaaccttttacgttattgggactcagaaagagaagaaggccatgctcgctttccacacctccacaccagccgcttgcaaacacctgtggaaatgtggcgtggagaaccaggccttctacaagtacgctaagagcagccagataaagaccgttagctctagtaaaattttttttaagggatcccgcttccggtactcaggcaaagtcgcaaaggaggtcgtcgaggcctccagcaagatccagagggagccacctgaggtccatcgtgctaacataacacagtcgcggagctcgcactctctcaacaagcagctcataatcaatatggagcccctccagccattgctgccaagcccgtcagagcaggaagaggagttaccccttggcgaaggcgtgccattacccaaggaagaaaatatcagtgcaccccttatctcgtcgtcacccgtgaaagccgcccgcgaatacgaagaccccccatccgaggaggaggacaagatcaaggaagagcctctgaccatctccgaactcgtgtataatcctagcgcctccttgctgccaacccccgttgacgatgacgaaattgacatgctttttgactgtccaagtagacttgaactggaaagagaagataccgatagcttcgaagatctggaagcggacgagaatgcctttctaatcgctgaagaggaggagttaaaagaagctcgccgggctctcagttggtcctacgatattctgaccggtcacatacgggtgaatcccttggtgaagtcattttcccgattactagtggtgggcctcgggctgctgttattcgtctttcccctcctgctacttctgctggagtctgtgtccatgcaatag

SEQ ID NO: 87647 - DNA, 1671 bp, Artificial Sequence
  derived and/or modified sequence
atgtttgccagctgccactgtgtgccccggggccgccgcaccatgaagatgatccacttccgcagcagctctgtgaagagcctgagccaggagatgcgctgcaccatccggctgctggatgacagcgagatcagctgccacatccagcgggagaccaagggccagttcctgattgaccacatctgcaactactacagcctgctggagaaggactacttcggcatccgctacgtggaccctgagaagcagaggcactggctggagcccaacaagagcatcttcaagcagatgaagacccaccccccctacaccatgtgcttccgggtgaagttctacccccatgagcccctgaagatcaaggaggagctgacccgctacctgctgtacctgcagatcaagagggacatcttccacggccgcctgctgtgcagcttcagtgatgctgcctacctgggcgcctgcatcgtgcaggccgagctgggggactatgaccctgatgagcaccctgagaactacatcagcgagtttgagatcttccccaagcagagccagaagctggagaggaagatcgtggagatccacaagaatgagctgcggggccagagcccccctgtggccgagttcaacctgctgctgaaggcccacaccctggagacctacggcgtggacccccacccctgcaaggacagcacaggcaccaccaccttcctgggcttcaccgctgctggctttgtggtgttccagggcaacaagaggatccacctgatcaagtggccagatgtgtgcaagctgaagtttgagggcaagaccttctacgtgattggcacccagaaggagaagaaggccatgctggccttccacaccagcaccccagctgcctgcaagcacctgtggaagtgtggggtggagaaccaggccttctacaagtatgccaagagcagccagatcaagacagtgagcagcagcaagatcttcttcaagggcagccgcttccgctacagcggcaaggtggccaaggaggtggtggaggccagcagcaagatccagcgggagcccccagaggtgcaccgggccaacatcacccagagccgcagcagccacagcctgaacaagcagctgatcatcaacatggagcccctgcagcccctgctgcccagccccagcgagcaggaggaggagctgcccctgggggagggcgtgcccctgcccaaggaggagaacatcagcgcccccctcatcagcagcagccctgtgaaggccgcccgggagtatgaagatcctccttctgaggaggaggacaagatcaaggaggagcccctgaccatcagcgagctggtgtacaaccccagcgccagcctgctgcccacccctgtggatgatgatgaaattgacatgctgtttgactgccccagccggctggagctggagcgggaggacacagacagctttgaggacctggaggctgatgaaaatgccttcctgattgctgaggaggaggagctgaaggaggcccggcgggccctgtcctggagctatgacatcctgaccggccacatccgggtgaaccccctggtgaagagcttcagccggctgctggtggtgggcctgggcctgctgctgtttgtgttccccctgctgctgctgctgctggagagcgtgtccatgcagtag

SEQ ID NO: 87648 - DNA, 1671 bp, Artificial Sequence
  derived and/or modified sequence
atgttcgccagctgccactgcgtgccccggggccggcggaccatgaaaatgatacactttaggtcctcctcagttaaaagccttagccaagagatgaggtgtactattcgcctgctggatgatagtgaaatatcttgccatattcaaagagaaacaaagggccagtttctcattgatcacatttgcaattactatagtttattagaaaaagattattttggaattcggtacgtagatcctgagaaacaaagacactggctcgagcccaataagtctatcttcaagcaaatgaaaacacaccccccctacacaatgtgctttagggtgaagttttatccccatgagcccctcaaaatcaaggaggaactgactcgctatcttttgtacctgcagatcaagcgcgacattttccacggaaggctgctatgtagcttcagcgacgcagcctatctcggtgcttgtattgtgcaggcagagctgggggattacgatcctgatgaacaccccgaaaactacatcagcgagtttgaaatctttcctaagcagtcccaaaagctggagcgcaagatagttgagatccacaagaacgagcttcgagggcagagtcctcccgtagctgaattcaatcttctccttaaggcacatacacttgaaacctatggggtcgacccacacccttgcaaagattcaaccggaaccacgacctttctgggattcaccgccgccggattcgtggtcttccaaggcaacaagaggatccacctgatcaagtggccagatgtgtgtaaactgaaatttgagggcaaaaccttttacgtcatcggaacacagaaagagaaaaaggccatgctggcattccacacctctacacccgctgcctgtaagcacctgtggaaatgcggcgtggagaatcaagcattttacaaatacgctaaaagttcccagataaagactgtgtctagctccaagatctttttcaaagggtcacgattccgctactccggaaaggtggcgaaggaagttgtagaagcttctagcaaaatccagcgcgaacctcccgaggtacaccgcgcaaacattactcagagccgaagcagccattcattaaataagcagctgataatcaacatggaacctctgcaacctttattaccttctcctagtgagcaagaagaagaattgccccttggagaaggggttccactgccgaaggaggagaatatctccgctccgctgatctcaagttcccccgttaaagccgcccgagagtacgaggaccctccatccgaggaggaggacaaaatcaaggaggagcctctaacaatttcagaacttgtgtataatccatccgcctcgctgctgcccacacctgtggatgacgatgagatcgacatgctcttcgactgtccgtcccgtctggagctagaaagggaagacacggacagttttgaggatctggaggccgacgagaatgctttcctgatcgctgaggaggaggagctgaaagaggcgagaagggccctctcctggtcatatgacattcttacagggcacatcagagtaaaccccctagtaaagtcattctccaggttgctggtggtgggcctgggcctgctgctttttgtgttcccactcctgctcttactgctagagtcggtgtctatgcagtag

SEQ ID NO: 87649 - DNA, 1671 bp, Artificial Sequence
  derived and/or modified sequence
atgttcgcttcctgtcactgcgtcccacgtgggcgtcggaccatgaagatgatccacttcagatctagctccgtcaagagcctttcccaggagatgcggtgcactatcagactgcttgatgactcggagatctcttgccatatccagcgtgagacaaaaggtcagttcctgatcgatcatatctgcaactattattctctactggagaaggattacttcggcattaggtatgtggatcccgaaaaacagaggcactggttagaacccaataaatctatcttcaaacagatgaaaacacatcccccttatacgatgtgcttcagggtgaagttctaccctcatgagccattgaagatcaaggaagagctgacccgttacttactgtacctccagataaagagagatattttccacggacggctgctgtgtagctttagtgatgcggcttatctcggggcttgtatcgtgcaggccgaattgggcgactatgacccagacgagcaccctgaaaattacatctcagagttcgaaatcttcccaaagcaaagccaaaagctagagcgaaagattgtagaaattcataagaacgagctgcggggtcagtccccaccagtggcagagttcaaccttcttctgaaagcacacacactagaaacatacggggtggacccacacccctgtaaagacagcactggcacgactacatttctcggattcaccgcagcagggtttgtcgtcttccaggggaataaacggatccatctgattaaatggcccgatgtgtgcaagctgaagtttgagggtaaaaccttttatgtgattggcacacagaaagagaagaaggcgatgctagcttttcacacgagcactccagctgcctgcaaacacctctggaaatgtggggttgagaatcaagctttttataaatatgctaaaagtagtcaaatcaagaccgtgtctagctcaaagatcttcttcaagggatcgagattccggtattcagggaaagttgccaaagaggttgtggaggccagcagtaagattcagcgtgagccccctgaagtccaccgagcaaatataacccagtcaaggtcctcacattcgctgaataagcaattgatcatcaacatggagcctctgcagccattgctgccgtccccctcagagcaggaggaggaactacccttaggagaaggtgtgcctctgcctaaggaagaaaacatcagcgcaccattgatctctagctcaccagtgaaggctgcacgagagtatgaagaccctccctcagaagaggaggacaagattaaagaagaacctcttacaatcagcgaactcgtgtataacccttcagcctccttgttacccacccccgtagatgacgacgagattgacatgctgttcgactgcccaagcagactcgaattggagagggaggacaccgactccttcgaggacctggaggcggatgaaaacgccttcctgattgccgaggaagaggaactgaaggaggccaggcgtgctctttcgtggtcgtatgacattttgacaggacatatcagagttaacccactagtgaaatccttcagcaggcttctggttgtcgggctcgggctgctcctgtttgtctttcccttacttctgttattactggagagcgtgtcaatgcagtag

SEQ ID NO: 87650 - DNA, 1671 bp, Artificial Sequence
  derived and/or modified sequence
atgttcgccagctgccactgcgtgcccagaggcagaagaaccatgaagatgatccacttcagaagcagcagcgtgaagagcctgagccaggagatgagatgcaccatcagactgctggacgacagcgagatcagctgccacatccagagagagaccaagggccagttcctgatcgaccacatctgcaactactacagcctgctggagaaggactacttcggcatcagatacgtggaccccgagaagcagagacactggctggagcccaacaagagcatcttcaagcagatgaagacccaccccccctacaccatgtgcttcagagtgaagttctacccccacgagcccctgaagatcaaggaggagctgaccagatacctgctgtacctgcagatcaagagagacatcttccacggcagactgctgtgcagcttcagcgacgccgcctacctgggcgcctgcatcgtgcaggccgagctgggcgactacgaccccgacgagcaccccgagaactacatcagcgagttcgagatcttccccaagcagagccagaagctggagagaaagatcgtggagatccacaagaacgagctgagaggccagagcccccccgtggccgagttcaacctgctgctgaaggcccacaccctggagacctacggcgtggacccccacccctgcaaggacagcaccggcaccaccaccttcctgggcttcaccgccgccggcttcgtggtgttccagggcaacaagagaatccacctgatcaagtggcccgacgtgtgcaagctgaagttcgagggcaagaccttctacgtgatcggcacccagaaggagaagaaggccatgctggccttccacaccagcacccccgccgcctgcaagcacctgtggaagtgcggcgtggagaaccaggccttctacaagtacgccaagagcagccagatcaagaccgtgagcagcagcaagatcttcttcaagggcagcagattcagatacagcggcaaggtggccaaggaggtggtggaggccagcagcaagatccagagagagccccccgaggtgcacagagccaacatcacccagagcagaagcagccacagcctgaacaagcagctgatcatcaacatggagcccctgcagcccctgctgcccagccccagcgagcaggaggaggagctgcccctgggcgagggcgtgcccctgcccaaggaggagaacatcagcgcccccctgatcagcagcagccccgtgaaggccgccagagagtacgaggacccccccagcgaggaggaggacaagatcaaggaggagcccctgaccatcagcgagctggtgtacaaccccagcgccagcctgctgcccacccccgtggacgacgacgagatcgacatgctgttcgactgccccagcagactggagctggagagagaggacaccgacagcttcgaggacctggaggccgacgagaacgccttcctgatcgccgaggaggaggagctgaaggaggccagaagagccctgagctggagctacgacatcctgaccggccacatcagagtgaaccccctggtgaagagcttcagcagactgctggtggtgggcctgggcctgctgctgttcgtgttccccctgctgctgctgctgctggagagcgtgagcatgcagtag

SEQ ID NO: 87651 - protein, 362 aa, Artificial Sequence
  derived and/or modified sequence
MVFRRGQSPPVAEFNLLLKAHTLETYGVDPHPCKDSTGTTTFLGFTAAGFVVFQGNKRIHLIKWPDVCKLKFEGKTFYVIGTQKEKKAMLAFHTSTPAACKHLWKCGVENQAFYKYAKSSQIKTVSSSKIFFKGSRFRYSGKVAKEVVEASSKIQREPPEVHRANITQSRSSHSLNKQLIINMEPLQPLLPSPSEQEEELPLGEGVPLPKEENISAPLISSSPVKAAREYEDPPSEEEDKIKEEPLTISELVYNPSASLLPTPVDDDEIDMLFDCPSRLELEREDTDSFEDLEADENAFLIAEEEELKEARRALSWSYDILTGHIRVNPLVKSFSRLLVVGLGLLLFVFPLLLLLLESVSMQ

SEQ ID NO: 87652 - DNA, 1397 bp, Artificial Sequence
  derived and/or modified sequence
gcttcatttcggaagtgattcatagcacttctgcttacaactctctgatcaggactcatcccaagatcttacccaggatcaaggaaatgcaattctatggtgttcagaagggggcagagcccaccagttgctgaatttaacttgctcctgaaagctcacactttggaaacctacggggtggatcctcacccatgcaaggattcaacaggcacaacaacatttttaggattcacagctgcaggctttgtggtctttcagggaaataagagaatccatttgataaaatggccagatgtctgcaaattgaagtttgaagggaagacattttatgtgattggcacccagaaggagaaaaaagccatgttggcattccatacttcaacaccagctgcctgcaaacatctttggaagtgtggagtggaaaaccaggccttttataagtatgcaaaatccagtcagatcaagactgtatcaagcagcaagatattttttaaaggaagtagatttcgatatagtgggaaagttgccaaagaggtggtggaggccagttccaagatccagagggagcctcctgaggtgcacagagccaacattactcagagccgcagttcccactccttgaacaaacagctcatcattaacatggaacccctgcagcccctgcttccttcccccagcgagcaagaagaagaacttcctctgggtgagggtgttccattgcctaaagaggagaacatttctgctcccttgatctccagctccccagtgaaggcagcccgggagtatgaagatccccctagtgaagaggaagataaaataaaagaagaacctttaaccatctctgaactagtgtacaacccaagtgccagcctgctccccacccctgtggatgacgatgagattgacatgctctttgactgtccttctaggcttgagttggaaagagaagacacagattcatttgaggatctggaagcagatgaaaacgcctttttgattgctgaagaagaggagctgaaggaggctcgccgtgctttgtcgtggagctatgacattctgactggccatattcgggtgaacccactggtcaagagtttttccaggctccttgtggtgggcctgggactgctgctctttgtatttcccctgctcctcctccttttggagtcagtctccatgcagtaaacagacccagcagaacctgcccgtggtgagctcagccaagacttggctctccatgttccagcctccgtctgtgactgggtgggtaagttcggtgggccccacccagtgggctcggcagccgtcacttcacagaagaagaaaggaaccttgcttaggcctcagatcccagctgtgctctccaatccattaataaagctgcttttaaccctctc

SEQ ID NO: 87653 - DNA, 662 bp, Artificial Sequence
  derived and/or modified sequence
ggcacaacaacatttttaggattcacagctgcaggctttgtggtctttcagggaaataagagaatccatttgataaaatggccagatgtctgcaaattgaagtttgaagggaagacattttatgtgattggcacccagaaggagaaaaaagccatgttggcattccatacttcaacaccagctgcctgcaaacatctttggaagtgtggagtggaaaaccaggccttttataagtatgcaaaatccagtcagatcaagactgtatcaagcagcaagatattttttaaaggaagtagatttcgatatagtgggaaagttgccaaagaggtggtggaggccagttccaagatccagagggagcctcctgaggtgcacagatgtgtacagaagaaaatttgttcctgctttggggtgacttggtgaggagctgtaatgtgaaagtctgcaaaaccaggctatcacactgtaagaagcagaagactacaggatgagagaagctggagaatcttggctccaggcatgttggtgcagatcctgaaagtgcagcctgcccaccaatgagaaaagtctttatggttccctcctcttccccaaattgtacttattcaatgcagcagaaatgaagaggaaatgataaaacatatcattcatctgtttcagaa

SEQ ID NO: 87654 - DNA, 1089 bp, Artificial Sequence
  derived and/or modified sequence
atggtgttccgcagaggacaatctccaccagtggccgaattcaatcttctgctaaaggcccatacactggaaacctatggggtggatcctcacccttgcaaagattccacagggaccacgacgtttcttggcttcacagctgccggattcgtggtgtttcaggggaacaagagaatccatctgattaagtggccagacgtgtgcaaattaaaattcgaaggtaagactttttacgtgatcggaacacagaaagagaaaaaggccatgctggcatttcacacgagcacccccgctgcctgcaaacatctctggaagtgtggggtggagaatcaggccttctacaaatacgcaaaaagctcacaaatcaagacagtttccagttcaaaaattttcttcaagggatccagattcagatactccggaaaagtcgcgaaggaagtagtcgaagctagctccaaaatacagagggaacctccggaggtccaccgcgccaacatcacacagagccggagctcacacagcctgaacaagcagcttatcatcaacatggagccccttcaacctttacttccttccccctccgagcaggaggaggaactgccactcggtgagggggtaccattgccaaaagaggaaaatatctcggcacccttgatcagctcgtccccagtgaaggcggcaagggagtatgaagaccctcccagcgaggaggaagacaagatcaaggaagagcccctgactatctcagagctcgtgtataacccaagcgccagcctgctgcccaccccagtcgatgatgatgagatcgatatgctctttgactgtccttcccgcctcgaattagagcgtgaggacacagattcatttgaggatttggaggctgacgagaacgcctttctcattgctgaggaggaggagctaaaagaagcacggagagccctctcttggtcgtacgatatcctcacagggcacattcgagttaatccactagtgaagagcttctcgaggctgctcgtagtgggcctagggctgctgcttttcgtgttcccattgctcctcctgctgttagagtcagtcagcatgcagtag

SEQ ID NO: 87655 - DNA, 423 bp, Artificial Sequence
  derived and/or modified sequence
ggaaccacaactttcctgggtttcaccgccgccgggtttgtggtcttccagggaaataagcggatccatctcatcaaatggccagatgtctgcaagctcaaatttgaggggaagaccttttacgtgatcggtacccagaaggagaagaaggcaatgctggcctttcacacctctaccccagccgcctgcaaacatctatggaaatgtggcgtggagaatcaggccttctataaatatgccaagtcttcccaaatcaagactgtttcctcaagtaaaatcttttttaaaggcagccgcttcaggtattccggcaaggtggcaaaagaagtcgtggaagccagctccaaaatccagcgcgaaccccccgaagtccataggtgcgtccagaaaaagatatgcagttgtttcggtgtgacctggtag

SEQ ID NO: 87656 - DNA, 1089 bp, Artificial Sequence
  derived and/or modified sequence
atggtgttccggcggggccagagcccccctgtggccgagttcaacctgctgctgaaggcccacaccctggagacctacggcgtggacccccacccctgcaaggacagcacaggcaccaccaccttcctgggcttcaccgctgctggctttgtggtgttccagggcaacaagaggatccacctgatcaagtggccagatgtgtgcaagctgaagtttgagggcaagaccttctacgtgattggcacccagaaggagaagaaggccatgctggccttccacaccagcaccccagctgcctgcaagcacctgtggaagtgtggggtggagaaccaggccttctacaagtatgccaagagcagccagatcaagacagtgagcagcagcaagatcttcttcaagggcagccgcttccgctacagcggcaaggtggccaaggaggtggtggaggccagcagcaagatccagcgggagcccccagaggtgcaccgggccaacatcacccagagccgcagcagccacagcctgaacaagcagctgatcatcaacatggagcccctgcagcccctgctgcccagccccagcgagcaggaggaggagctgcccctgggggagggcgtgcccctgcccaaggaggagaacatcagcgcccccctcatcagcagcagccctgtgaaggccgcccgggagtatgaagatcctccttctgaggaggaggacaagatcaaggaggagcccctgaccatcagcgagctggtgtacaaccccagcgccagcctgctgcccacccctgtggatgatgatgaaattgacatgctgtttgactgccccagccggctggagctggagcgggaggacacagacagctttgaggacctggaggctgatgaaaatgccttcctgattgctgaggaggaggagctgaaggaggcccggcgggccctgtcctggagctatgacatcctgaccggccacatccgggtgaaccccctggtgaagagcttcagccggctgctggtggtgggcctgggcctgctgctgtttgtgttccccctgctgctgctgctgctggagagcgtgtccatgcagtag

SEQ ID NO: 87657 - DNA, 423 bp, Artificial Sequence
  derived and/or modified sequence
ggcaccaccaccttcctgggcttcaccgctgctggctttgtggtgttccagggcaacaagaggatccacctgatcaagtggccagatgtgtgcaagctgaagtttgagggcaagaccttctacgtgattggcacccagaaggagaagaaggccatgctggccttccacaccagcaccccagctgcctgcaagcacctgtggaagtgtggggtggagaaccaggccttctacaagtatgccaagagcagccagatcaagacagtgagcagcagcaagatcttcttcaagggcagccgcttccgctacagcggcaaggtggccaaggaggtggtggaggccagcagcaagatccagcgggagcccccagaggtgcaccgctgtgtgcagaagaagatctgcagctgcttcggcgtgacctggtag

SEQ ID NO: 87658 - DNA, 1089 bp, Artificial Sequence
  derived and/or modified sequence
atggtgttccggcggggccagagcccccccgtggccgagttcaacctgttgctaaaagcccacacgctggagacgtacggtgtggatccccatccctgtaaggattctaccgggactacaaccttcctggggttcacagccgcaggcttcgttgtctttcaggggaacaaacggatccatctgatcaagtggccagatgtctgcaagctcaagtttgagggcaagactttttacgtgatcggtacgcaaaaggagaaaaaggccatgttggcattccacacaagcaccccagccgcctgtaaacatttatggaaatgcggggtggagaatcaggcattctataagtatgccaagtccagtcagataaagacggtgagttctagcaaaatcttctttaagggcagcaggtttaggtacagcggcaaagtcgccaaagaggtggtagaggccagcagtaagatccagcgggagccacctgaagtccatagagccaatattactcagagtcgttcaagccactccctcaataagcagctcatcattaatatggagccactgcagccattgcttccatcgccttccgaacaggaagaagaacttcccctgggtgaaggggtcccattaccgaaggaggagaacatctccgccccactcatcagcagcagccctgtgaaagctgcccgcgagtacgaagaccctccatcggaggaggaggacaagatcaaggaagaaccactgactatttccgagcttgtttataacccttccgctagccttctgccgacaccagtggacgacgacgagatcgatatgctgtttgattgcccttctcgacttgagctagaacgcgaggataccgattctttcgaagatctagaggccgacgagaacgcctttctgatcgccgaggaggaggaattgaaggaagcaagacgggccctcagttggtcttatgatatacttaccggccacatcagagttaatcctttggtcaagagcttttccaggctgctggttgtcgggctgggcctgttattgttcgtgtttcccctgctgttgttgctgctggagtccgtgtcaatgcagtag

SEQ ID NO: 87659 - DNA, 423 bp, Artificial Sequence
  derived and/or modified sequence
ggcaccaccaccttcctgggcttcaccgccgccggcttcgtggtgtttcaaggcaataaaagaatccacctgatcaaatggcctgacgtatgtaaactgaaatttgagggaaagactttttacgtaatcgggacgcagaaggagaagaaagccatgctggccttccacacttctactcctgctgcctgcaagcatctctggaaatgtggggtcgaaaatcaggccttttacaagtacgcaaaatccagccagattaaaacagtgagctcctcaaagattttcttcaagggctctagatttcggtactccggtaaggttgccaaggaggtggtggaagccagtagcaagattcagagagaaccgcctgaggttcaccgctgtgttcagaaaaagatttgctcttgttttggggtaacttggtag

SEQ ID NO: 87660 - DNA, 1089 bp, Artificial Sequence
  derived and/or modified sequence
atggtttttaggcgaggacagtccccacctgttgctgagttcaatctgcttctcaaggcccacacccttgagacttacggcgtcgacccccacccctgcaaggatagcaccggaacgacaactttcctcggctttaccgccgcaggattcgtggtctttcagggcaataaacgcatccacctgatcaagtggccagacgtctgcaaactgaagttcgaaggaaagaccttctacgtcatcggcacccaaaaagagaagaaagccatgcttgcttttcacactagcactcctgcagcatgtaagcatctgtggaagtgcggcgttgaaaaccaggctttctacaaatacgctaaatcttcccaaatcaagactgtgagctcatctaaaatttttttcaaagggtcccgatttcgatatagtggcaaagtggccaaagaggtggtcgaagcaagctcaaagatccagagagaaccccctgaggtgcatcgcgctaacattacccagagtcgttcctcacacagtttaaacaaacaactgatcatcaacatggagccgctgcagcccttactcccgtcccctagcgagcaggaagaggagctgcctctgggcgaaggtgtgccactgcccaaagaagaaaatatctctgctcccctcatttcctcttcccccgtgaaagcagctagagagtatgaagaccccccaagtgaagaggaggataaaatcaaggaggagccgcttactatctccgagctggtgtacaacccgtcagcttcccttttacccactcctgtggacgatgacgaaattgacatgctatttgactgtcctagtcggctggaactggagcgcgaagatactgattcattcgaggaccttgaagctgacgagaacgcattcttaattgctgaggaagaagaacttaaggaggccagaagggccctttcctggtcatatgacatcctgaccgggcatattcgggtgaatcccctcgtcaaaagctttagtagactccttgtagtagggctggggttgctgctgtttgtgttccctcttctcctgttgctgttggaatcagtctcgatgcaatag

SEQ ID NO: 87661 - DNA, 423 bp, Artificial Sequence
  derived and/or modified sequence
ggcactactacatttttaggcttcaccgccgcaggttttgtggtctttcaggggaataaaagaatacatctgattaagtggccggatgtctgcaaactgaagttcgaagggaaaacattttacgtcatcggtactcaaaaagagaaaaaggcgatgctggcctttcacaccagcacccctgcagcatgtaagcacttatggaagtgcggagttgagaatcaagcattctataaatatgcaaaatcttctcaaataaaaaccgtgtcctctagtaagatatttttcaaaggctctcgatttaggtacagcggtaaagtcgccaaagaagtggtcgaggcatcatcaaaaatacaaagggaacccccagaggtccaccgatgcgtacaaaagaagatctgctcatgtttcggggtgacatggtag

SEQ ID NO: 87662 - DNA, 1089 bp, Artificial Sequence
  derived and/or modified sequence
atggtgttcagaagaggccagagcccccccgtggccgagttcaacctgctgctgaaggcccacaccctggagacctacggcgtggacccccacccctgcaaggacagcaccggcaccaccaccttcctgggcttcaccgccgccggcttcgtggtgttccagggcaacaagagaatccacctgatcaagtggcccgacgtgtgcaagctgaagttcgagggcaagaccttctacgtgatcggcacccagaaggagaagaaggccatgctggccttccacaccagcacccccgccgcctgcaagcacctgtggaagtgcggcgtggagaaccaggccttctacaagtacgccaagagcagccagatcaagaccgtgagcagcagcaagatcttcttcaagggcagcagattcagatacagcggcaaggtggccaaggaggtggtggaggccagcagcaagatccagagagagccccccgaggtgcacagagccaacatcacccagagcagaagcagccacagcctgaacaagcagctgatcatcaacatggagcccctgcagcccctgctgcccagccccagcgagcaggaggaggagctgcccctgggcgagggcgtgcccctgcccaaggaggagaacatcagcgcccccctgatcagcagcagccccgtgaaggccgccagagagtacgaggacccccccagcgaggaggaggacaagatcaaggaggagcccctgaccatcagcgagctggtgtacaaccccagcgccagcctgctgcccacccccgtggacgacgacgagatcgacatgctgttcgactgccccagcagactggagctggagagagaggacaccgacagcttcgaggacctggaggccgacgagaacgccttcctgatcgccgaggaggaggagctgaaggaggccagaagagccctgagctggagctacgacatcctgaccggccacatcagagtgaaccccctggtgaagagcttcagcagactgctggtggtgggcctgggcctgctgctgttcgtgttccccctgctgctgctgctgctggagagcgtgagcatgcagtag

SEQ ID NO: 87663 - DNA, 423 bp, Artificial Sequence
  derived and/or modified sequence
ggcaccaccaccttcctgggcttcaccgccgccggcttcgtggtgttccagggcaacaagagaatccacctgatcaagtggcccgacgtgtgcaagctgaagttcgagggcaagaccttctacgtgatcggcacccagaaggagaagaaggccatgctggccttccacaccagcacccccgccgcctgcaagcacctgtggaagtgcggcgtggagaaccaggccttctacaagtacgccaagagcagccagatcaagaccgtgagcagcagcaagatcttcttcaagggcagcagattcagatacagcggcaaggtggccaaggaggtggtggaggccagcagcaagatccagagagagccccccgaggtgcacagatgcgtgcagaagaagatctgcagctgcttcggcgtgacctggtag

SEQ ID NO: 87664 - protein, 213 aa, Artificial Sequence
  derived and/or modified sequence
MQAEETKGIGITSMAKCLVKIQTRRSLQLHMVNHCNSNVFVRLLRLGSKVTARNTGVPLPKEENISAPLISSSPVKAAREYEDPPSEEEDKIKEEPLTISELVYNPSASLLPTPVDDDEIDMLFDCPSRLELEREDTDSFEDLEADENAFLIAEEEELKEARRALSWSYDILTGHIRVNPLVKSFSRLLVVGLGLLLFVFPLLLLLLESVSMQ

SEQ ID NO: 87665 - DNA, 964 bp, Artificial Sequence
  derived and/or modified sequence
tgagttatttctgttggccgcattaggaacctgacatttgattcattcagtgggtcctgcctaggtcctttaaaacagaatggactgttagggaaaggctgccctgggccatgcaggccgaggagaccaaggggattggaataaccagtatggcaaaatgcttggtcaagatccagactcgacgaagcctccaattgcacatggtgaaccactgcaacagtaatgtgtttgttcgtctgctgagactcggctccaaggtcacagctcgtaacactggtgttccattgcctaaagaggagaacatttctgctcccttgatctccagctccccagtgaaggcagcccgggagtatgaagatccccctagtgaagaggaagataaaataaaagaagaacctttaaccatctctgaactagtgtacaacccaagtgccagcctgctccccacccctgtggatgacgatgagattgacatgctctttgactgtccttctaggcttgagttggaaagagaagacacagattcatttgaggatctggaagcagatgaaaacgcctttttgattgctgaagaagaggagctgaaggaggctcgccgtgctttgtcgtggagctatgacattctgactggccatattcgggtgaacccactggtcaagagtttttccaggctccttgtggtgggcctgggactgctgctctttgtatttcccctgctcctcctccttttggagtcagtctccatgcagtaaacagacccagcagaacctgcccgtggtgagctcagccaagacttggctctccatgttccagcctccgtctgtgactgggtgggtaagttcggtgggccccacccagtgggctcggcagccgtcacttcacagaagaagaaaggaaccttgcttaggcctcagatcccagctgtgctctccaatccattaataaagctgcttttaaccctctc

SEQ ID NO: 87666 - DNA, 642 bp, Artificial Sequence
  derived and/or modified sequence
atgcaggccgaggagaccaaaggcattggaatcacatctatggctaaatgcctggttaaaatacaaacaagacgctcattgcaactgcatatggtgaaccattgtaattcaaacgtattcgtcagactgctgcggctgggctccaaggttacagcacgaaataccggggtcccactgcccaaggaagaaaacatctctgcccccctgatctccagtagccctgtcaaagccgcgagagaatacgaagaccccccctctgaggaggaagacaagatcaaagaggagccactgacaatctcagaattggtatacaatccctcggcttcactcttgcctacgcccgtcgacgacgacgagatcgatatgctgtttgactgtccaagtagattagaacttgagagagaagataccgactctttcgaggatctcgaggctgatgaaaacgcctttctaattgcagaggaagaagaactcaaagaggcacgcagagccttaagttggagttatgatatactgactgggcatatacgagttaatcccctggttaaatctttctctcggctcctggtcgttgggctgggactgctgctgtttgttttcccactgctccttctactcctcgaaagcgtgtctatgcagtag

SEQ ID NO: 87667 - DNA, 642 bp, Artificial Sequence
  derived and/or modified sequence
atgcaggccgaggagaccaagggcatcggcatcacctccatggccaagtgcctggtgaagatccagacccggcgcagcctgcagctgcacatggtgaaccactgcaacagcaatgtgtttgtgcggctgctgcggctgggcagcaaggtgacagccagaaatactggagtgcccctgcccaaggaggagaacatcagcgcccccctcatcagcagcagccctgtgaaggccgcccgggagtatgaggacccccccagcgaggaggaggacaagatcaaggaggagcccctgaccatcagcgagctggtgtacaaccccagcgccagcctgctgcccacccctgtggatgatgatgaaattgacatgctgtttgactgccccagccggctggagctggagcgggaggacacagacagctttgaggacctggaggctgatgaaaatgccttcctgattgctgaggaggaggagctgaaggaggcccggcgggccctgtcctggagctatgacatcctgaccggccacatccgggtgaaccccctggtgaagagcttcagccggctgctggtggtgggcctgggcctgctgctgtttgtgttccccctgctgctgctgctgctggagagcgtgtccatgcagtag

SEQ ID NO: 87668 - DNA, 642 bp, Artificial Sequence
  derived and/or modified sequence
atgcaggccgaggagaccaagggcatcggcatcaccagcatggccaagtgcctggttaagatccaaactagacgatctctccaattgcatatggtcaaccactgtaacagtaatgtcttcgtccgtctgctgcggttgggcagtaaagtgaccgcccggaatactggcgtacccctgcccaaggaggaaaacatttcagccccgttgattagttcttctccagtgaaagcagcccgagaatacgaggatcccccaagcgaagaagaggataagataaaagaagaacccctgactatttccgagttagtatataacccttctgcaagcctgcttcccacacccgttgacgatgatgaaatcgatatgctttttgattgcccctctagactcgaattggaacgtgaagacactgactcttttgaggatctggaagctgatgagaacgccttcctaattgccgaagaagaggaactgaaggaggcccgtagagctctgtcgtggtcctacgatattctaacgggacacataagggtaaatccgttggtgaagtccttttccaggctgctagtggtcgggttggggcttcttctttttgtgtttcccctgctcttgctgctgttggaatccgtgtccatgcaatag

SEQ ID NO: 87669 - DNA, 642 bp, Artificial Sequence
  derived and/or modified sequence
atgcaggccgaggagacaaaaggaattggaattacatcaatggccaagtgtttggttaagattcagactcgacgatctctccaattacacatggtaaatcattgtaatagcaacgttttcgtgcgcctcctgaggctggggagcaaggtgactgccagaaacactggcgttccgctccctaaggaagaaaacatttctgcaccattaatctcgtcgagtccagtcaaggcggctcgcgagtatgaagacccaccgagtgaagaagaagataaaataaaggaagagcccctaaccatatctgagctggtgtacaacccttcggccagtctccttcccactccagtggacgacgatgaaattgacatgctgttcgattgccctagccggttggagcttgagcgtgaggacactgattctttcgaagacctggaagcggacgaaaatgctttccttattgcggaggaggaagagctgaaagaagccaggagggctctgagctggagttatgacatactgacgggacatatccgtgtaaacccgttggtgaagtcattcagccgactcctcgttgtaggtctcgggcttctactgttcgtgtttccgctgctgctactcctcctcgaatcggtttctatgcagtag

SEQ ID NO: 87670 - DNA, 642 bp, Artificial Sequence
  derived and/or modified sequence
atgcaggccgaggagaccaagggcatcggcatcaccagcatggccaagtgcctggtgaagatccagaccagaagaagcctgcagctgcacatggtgaaccactgcaacagcaacgtgttcgtgagactgctgagactgggcagcaaggtgaccgccagaaacaccggcgtgcccctgcccaaggaggagaacatcagcgcccccctgatcagcagcagccccgtgaaggccgccagagagtacgaggacccccccagcgaggaggaggacaagatcaaggaggagcccctgaccatcagcgagctggtgtacaaccccagcgccagcctgctgcccacccccgtggacgacgacgagatcgacatgctgttcgactgccccagcagactggagctggagagagaggacaccgacagcttcgaggacctggaggccgacgagaacgccttcctgatcgccgaggaggaggagctgaaggaggccagaagagccctgagctggagctacgacatcctgaccggccacatcagagtgaaccccctggtgaagagcttcagcagactgctggtggtgggcctgggcctgctgctgttcgtgttccccctgctgctgctgctgctggagagcgtgagcatgcagtag

SEQ ID NO: 87671 - protein, 2488 aa, Artificial Sequence
  derived and/or modified sequence
MPAILVASKMKSGLPKPVHSAAPILHVPPARAGPQPCYLKLGSKVEVSKTTYPSQIPLKSQVLQGLQEPAGEGLPLRKSGSVENGFDTQIYTDWANHYLAKSGHKRLIRDLQQDVTDGVLLAQIIQVVANEKIEDINGCPKNRSQMIENIDACLNFLAAKGINIQGLSAEEIRNGNLKAILGLFFSLSRYKQQQQQPQKQHLSSPLPPAVSQVAGAPSQCQAGTPQQQVPVTPQAPCQPHQPAPHQQSKAQAEMQSSASSKDSSQSKIIRFTLGQKKISRLPGPTARVSAAGSEAKTRGGSTTANNRRSQSFNNYDKSKPVTSPPPPPSSHEKEPLASSASSHPGMSDNAPASLESGSSSTPTNCSTSSAIPQPGAATKPWRSKSLSVKHSATVSMLSVKPPGPEAPRPTPEAMKPAPNNQKSMLEKLKLFNSKGGSKAGEGPGSRDTSCERLETLPSFEESEELEAASRMLTTVGPASSSPKIALKGIAQRTFSRALTNKKSSLKGNEKEKEKQQREKDKEKSKDLAKRASVTERLDLKEEPKEDPSGAAVPEMPKKSSKIASFIPKGGKLNSAKKEPMAPSHSGIPKPGMKSMPGKSPSAPAPSKEGERSRSGKLSSGLPQQKPQLDGRHSSSSSSLASSEGKGPGGTTLNHSISSQTVSGSVGTTQTTGSNTVSVQLPQPQQQYNHPNTATVAPFLYRSQTDTEGNVTAESSSTGVSVEPSHFTKTGQPALEELTGEDPEARRLRTVKNIADLRQNLEETMSSLRGTQVTHSTLETTFDTNVTTEMSGRSILSLTGRPTPLSWRLGQSSPRLQAGDAPSMGNGYPPRANASRFINTESGRYVYSAPLRRQLASRGSSVCHVDVSDKAGDEMDLEGISMDAPGYMSDGDVLSKNIRTDDITSGYMTDGGLGLYTRRLNRLPDGMAVVRETLQRNTSLGLGDADSWDDSSSVSSGISDTIDNLSTDDINTSSSISSYANTPASSRKNLDVQTDAEKHSQVERNSLWSGDDVKKSDGGSDSGIKMEPGSKWRRNPSDVSDESDKSTSGKKNPVISQTGSWRRGMTAQVGITMPRTKPSAPAGALKTPGTGKTDDAKVSEKGRLSPKASQVKRSPSDAGRSSGDESKKPLPSSSRTPTANANSFGFKKQSGSAAGLAMITASGVTVTSRSATLGKIPKSSALVSRSAGRKSSMDGAQNQDDGYLALSSRTNLQYRSLPRPSKSNSRNGAGNRSSTSSIDSNISSKSAGLPVPKLREPSKTALGSSLPGLVNQTDKEKGISSDNESVASCNSVKVNPAAQPVSSPAQTSLQPGAKYPDVASPTLRRLFGGKPTKQVPIATAENMKNSVVISNPHATMTQQGNLDSPSGSGVLSSGSSSPLYSKNVDLNQSPLASSPSSAHSAPSNSLTWGTNASSSSAVSKDGLGFQSVSSLHTSCESIDISLSSGGVPSHNSSTGLIASSKDDSLTPFVRTNSVKTTLSESPLSSPAASPKFCRSTLPRKQDSDPHLDRNTLPKKGLRYTPTSQLRTQEDAKEWLRSHSAGGLQDTAANSPFSSGSSVTSPSGTRFNFSQLASPTTVTQMSLSNPTMLRTHSLSNADGQYDPYTDSRFRNSSMSLDEKSRTMSRSGSFRDGFEEESWEKSSVDNFVSRLHSSLHFSLPLFHHARYELVHGSSLSLVSSTSSVYSTPEEKCQSEIRKLRRELDASQEKVSALTTQLTANAHLVAAFEQSLGNMTIRLQSLTMTAEQKDSELNELRKTIELLKKQNAAAQAAINGVINTPELNCKGNGTAQSADLRIRRQHSSDSVSSINSATSHSSVGSNIESDSKKKKRKNWVNELRSSFKQAFGKKKSPKSASSHSDIEEMTDSSLPSSPKLPHNGSTGSTPLLRNSHSNSLISECMDSEAETVMQLRNELRDKEMKLTDIRLEALSSAHQLDQLREAMNRMQSEIEKLKAENDRLKSESQGSGCSRAPSQVSISASPRQSMGLSQHSLNLTESTSLDMLLDDTGECSARKEGGRHVKIVVSFQEEMKWKEDSRPHLFLIGCIGVSGKTKWDVLDGVVRRLFKEYIIHVDPVSQLGLNSDSVLGYSIGEIKRSNTSETPELLPCGYLVGENTTISVTVKGLAENSLDSLVFESLIPKPILQRYVSLLIEHRRIILSGPSGTGKTYLANRLSEYIVLREGRELTDGVIATFNVDHKSSKELRQYLSNLADQCNSENNAVDMPLVIILDNLHHVSSLGEIFNGLLNCKYHKCPYIIGTMNQATSSTPNLQLHHNFRWVLCANHTEPVKGFLGRFLRRKLMETEISGRVRNMELVKIIDWIPKVWHHLNRFLEAHSSSDVTIGPRLFLSCPIDVDGSRVWFTDLWNYSIIPYLLEAVREGLQLYGRRAPWEDPAKWVMDTYPWAASPQQHEWPPLLQLRPEDVGFDGYSMPREGSTSKQMPPSDAEGDPLMNMLMRLQEAANYSSPQSYDSDSNSNSHHDDILDSSLESTL

SEQ ID NO: 87672 - DNA, 7467 bp, Artificial Sequence
  derived and/or modified sequence
atgccagccattctcgtggcgagcaaaatgaagtctggactacccaagcctgtgcatagcgccgcccccatactccatgtgcctccagcacgagccggacctcaaccctgttacctcaagctcggatccaaggtggaagtgagcaagaccacatatcctagccaaatcccgctgaagagtcaggtgctccaggggctccaggagccggctggtgaaggcttacctctgaggaaaagcgggtccgtggaaaatggttttgacacacagatctatacagattgggcgaaccactacttggcaaaaagcgggcacaagaggctgatccgcgacctccagcaggacgttactgatggtgtccttttggctcagattattcaggtggtggctaatgaaaagatcgaagatataaacggctgtcccaagaatagaagccagatgatagaaaacattgacgcatgtcttaacttcctggctgccaaaggtattaacattcaaggactgtcagcagaagaaatccgcaacggcaacctgaaggcgattttgggcctgttcttcagcctgtcacggtataaacagcagcagcaacagccccagaagcagcatctctcatccccactgccacccgccgttagtcaggtggccggggcaccttcacagtgtcaggccggaactccacaacagcaagtgcccgtgacccctcaggcaccttgccagccacatcagccagcaccacaccagcagagcaaggcacaggccgagatgcagagcagcgccagctccaaggatagcagtcagagcaaaattatccgattcactctgggtcagaaaaagatttctagactgcctggccctacagcgagagtgtctgcagcagggtccgaggccaaaacgagagggggtagtactacggctaacaatcggagatcccagagctttaacaattacgataaatcaaagcctgtgacctctcccccgcctcccccctcgtcacatgagaaggaacctctcgctagctcagcctcatcccaccctggcatgagtgataacgcgccagcctcactggaatccggaagttcctcaacccctacgaactgctcaacctcaagcgctattcctcaacccggggcagccaccaaaccatggcggagcaagagtctgagcgtgaaacacagtgccaccgtttcaatgctgtctgttaaacccccgggacccgaggcccctcggcctaccccagaggccatgaaaccagctcccaataatcaaaagagcatgctggaaaaacttaaactgttcaactcaaagggtggctcaaaggctggtgaaggacccgggagccgtgacacaagctgcgaaagattggaaaccctcccctccttcgaggaaagcgaagagcttgaggcagctagtcgcatgctgacaacggtgggccccgcctcgtcctctccgaaaatagctctgaaggggattgctcagcgtacatttagccgtgcactgacgaacaaaaagagtagcctcaaaggtaacgaaaaggaaaaagagaagcaacaacgggagaaggataaagagaaatcaaaggacttggccaagcgcgctagtgtcacagagcggctggatcttaaggaggaaccaaaggaagatccatccggcgccgcagtgcccgagatgcccaaaaaatcaagtaagatcgccagcttcataccgaagggcggcaagcttaactccgcaaagaaagagcctatggccccaagccattccgggatccccaagcccggcatgaagagcatgcctggaaagtccccatctgcccccgctcccagcaaggaaggcgagcggtccagatctggtaaattatcctcagggctaccacaacagaaacctcagctggacggccgccactccagctcaagctcttcccttgcctcttcagaagggaaagggccaggggggacaactcttaaccattcaatatcttcccaaacggtttccggctctgttggcacgacccaaacaacaggttccaacacagtttccgtgcagctgccacagccacagcagcagtataatcatcccaacacagccacagtggccccatttctgtaccggtctcagacagacacggagggaaacgtcacggcggagagctctagcacaggagtttcggttgaaccatcccatttcaccaaaaccggccaacctgctttggaagagctgactggcgaagaccctgaagcacgccgcctcagaacggtcaagaacatagctgacctgaggcaaaacttggaggagacaatgtcctctttaagaggcacacaggtcacccactcaaccctagaaacaaccttcgacactaacgtcaccacggagatgagtggccgctctatactgtcgctcactggcaggcccacccccttgtcttggaggctgggccagagttctccgaggctgcaggcaggagacgccccgagcatgggcaatggttatcccccacgcgcaaacgccagtcgattcatcaataccgaatccggccgatatgtctacagcgctccccttcgaagacagctggctagccgtggatcaagtgtctgtcacgtcgatgtgagtgacaaagctggcgacgaaatggatttggagggaatctccatggatgcccccgggtacatgtcagatggagacgttctcagcaaaaatattaggactgacgatataacatcagggtatatgaccgacggcggcctggggctgtacactagacgtctgaatcgactgcctgacggcatggctgtggttcgggagactctgcaacgcaacacatcgctaggcctaggcgacgccgactcttgggatgactccagttcagtttcttctggtatatcagatacgattgataatctgagtacagatgatatcaatacaagctcttcgatcagcagttatgccaacacacccgcatcatctcggaagaatctcgatgtgcagaccgatgcagaaaaacactcccaagtagagcgtaattctttgtggtcaggagatgacgtaaagaaatccgatggcggcagtgattccgggataaagatggaaccaggcagcaaatggcgacggaatccaagtgatgtcagcgacgagtccgacaagtccacctccggcaagaagaatcccgtcatcagtcagacagggtcatggagacgtgggatgacagctcaggttggcattacaatgccacgaaccaaaccttccgcacctgccggagccctgaaaactccaggaactggaaaaactgacgatgcaaaagtatctgaaaaaggtcgcctgagccctaaagcctcccaagtgaagcgttctcctagcgacgccggtcggtcctccggtgatgaatccaagaagcctttgccgtcatcatccagaacccctacggccaacgcaaattcctttgggtttaaaaagcaaagtggctcagcagcgggcctcgctatgataacagcgtccggcgtgaccgtgacctctaggtcagccactctcggcaagattcccaagtcatcggccctagtatcgcgatctgccgggagaaaatccagcatggatggcgcacaaaatcaagatgatgggtacctggccctgagctcaagaactaacctgcagtacagatcactgcctcgcccctccaagtcaaattcacggaacggtgccggtaacaggtcttctaccagttctatagattccaacattagtagcaagtctgctggtctgcctgttcccaagttacgagagccatcaaagaccgctctcggcagctccctgcctggtctcgtgaaccaaactgacaaggagaagggaatcagctctgacaatgaatccgttgctagctgtaacagtgttaaggtgaacccggccgcccagcctgtatcctccccagcgcagactagccttcagcctggagcaaagtaccccgatgtcgcaagtcctacattacggaggctgtttggcggaaagcctacgaagcaggtgcccatcgccacagctgagaacatgaagaacagcgtggtgatttctaatcctcacgctactatgacccaacagggtaacctggattccccttcaggttcaggtgtcttgtcatcaggttcgagctctccactgtactcaaagaacgtcgacttgaaccagtcccctctagcatcaagtccaagcagtgcgcattccgcaccatctaacagcctgacctggggaaccaacgcatcgagcagctcagcagttagcaaagacggcctgggatttcagtcggtgagcagtctccacacctcttgtgagagcattgacatctcactcagctctggaggggttccaagtcacaattccagtaccgggctgattgcttccagtaaagacgacagcttaacaccgtttgtgcgtacaaactccgtcaagacaacactgtctgagagccccttaagctctcccgccgcatcccctaagttctgtcgttcaacactgcctaggaaacaggacagtgacccacatctggatcggaatactctacctaagaagggtcttcgatacacgcctacctcccagctccgcacacaggaggatgcaaaggaatggctaaggagtcacagcgctggagggctgcaggacacagctgctaatagcccattctcctcgggctcatccgtgacttcacctagcggcactaggtttaacttcagccagctggcctctcccaccacagtgacacaaatgtcactgagtaatcccaccatgctgcgcacccactcgctttctaatgccgatggacagtacgatccctacactgacagtcgctttcgcaatagctccatgtccttggacgagaaatcccgcacaatgtcccgatcaggctctttccgggacggctttgaagaggaatcttgggaaaagtcgagcgttgacaactttgtctccagactacactcctccctgcatttctccttaccgctgtttcatcacgctcggtacgagctggtacatggtagcagccttagtcttgtaagcagtacttcgtctgtgtattcaacccctgaggagaaatgccaatcagaaatccggaaactgcgcagagagctggacgcctcccaggaaaaagtgtccgctctgaccacccagcttaccgccaacgctcacctcgtcgctgctttcgagcagtcgttagggaatatgaccatcaggctgcagtcactgacgatgacagccgaacagaaagactctgaacttaatgagctgcggaaaaccattgagctgctgaaaaagcagaatgctgcagcgcaggccgccataaacggcgtcattaacactcctgagcttaactgcaaaggtaacgggaccgcccagagcgctgatctgcgaattagacggcagcacagctctgattcagtttcctcaattaatagcgcaacatctcattcttccgtgggatcaaatatagagtctgattctaaaaagaagaaacgtaaaaattgggtgaacgagttgcggagcagcttcaagcaggccttcggtaagaaaaagtctccaaagtctgcctcctcacactccgacattgaggagatgacagatagctcactgcctagctcgcccaaactgccacataatgggagcactggaagtactcctctcctgcgaaactcccatagtaattccctcataagcgaatgtatggattccgaggctgagacagtcatgcagttgcgtaacgaactacgggataaagaaatgaaattgacagatatcaggctggaggcgctttctagcgcacaccagttggaccagcttagagaggccatgaaccgaatgcaatctgagatcgaaaagttaaaagctgagaacgaccgcctcaagagtgagtcacaaggaagtggatgcagtcgagccccctctcaagtaagcatttctgcttctccacggcagtccatgggcctgagccagcattctttaaacctgactgaatctactagcctggatatgttgctggatgatacgggcgagtgttccgcacggaaggagggaggtagacacgttaagatcgtggtgtctttccaggaagagatgaaatggaaagaggactctcgtccccacctgttccttataggctgcattggcgtcagcggcaaaaccaagtgggatgtgctcgacggggtcgttcgcagactattcaaagaatatataatacatgttgacccagtgtcccagctgggacttaattcagacagtgtcttaggatactccatcggcgaaatcaaaagatcgaacacttccgagacccccgagttgcttccatgcggctatctggtgggcgaaaataccacaatctccgtgaccgtcaaaggtctggccgagaatagcctggacagccttgtcttcgagagcttaatccctaagccaattctccagaggtacgtgtctctgcttatcgagcatcgtaggatcattttgtctggcccctctggcaccggaaaaacctacttggcgaatcgccttagtgagtatattgttcttagggaggggagggaactgactgacggcgtgatcgcaacgttcaacgtcgaccacaaaagctccaaagaactgcggcaatatcttagtaatctggcagatcagtgcaatagcgagaataacgcggtggatatgccgctggtgatcattctggataacctccatcacgtatcctctctgggtgaaatttttaacgggctgcttaactgcaagtatcataagtgcccttatattatcggaaccatgaaccaggcgacgtcttcaacgcccaatctgcagcttcaccataactttcgctgggtcctgtgcgctaaccacacagagcctgtaaagggctttctggggcgctttctacggcgcaaattgatggaaacagagatttcagggagagtgcgtaacatggagcttgtgaagatcatcgattggattcccaaagtatggcaccatctcaatcgctttttggaggcacatagctccagcgatgtcacaattggcccgaggttatttctgagctgtccaattgatgttgatggaagtcgagtgtggtttaccgacctctggaactattctattattccatacttgctggaagcagtgagggaaggcttacaactctacggtcgccgcgccccatgggaggatccggctaagtgggttatggatacatatccatgggcggccagtcctcagcagcacgagtggccacccttactgcagcttcggccagaagatgtgggctttgacggatactccatgcctcgagaaggcagcaccagcaagcagatgccaccgagtgacgcagaaggtgaccctctcatgaatatgcttatgcggctgcaagaagcagccaattattcctctccccagtcttacgactctgacagtaatagtaactcccatcacgacgatatcctcgacagttcccttgaatcgaccctttag

SEQ ID NO: 87673 - DNA, 7467 bp, Artificial Sequence
  derived and/or modified sequence
atgcctgccatcctggtggccagcaagatgaagagcggcctgcccaagcctgtgcacagcgctgcccccatcctgcacgtgcccccagcccgggccggcccccagccctgctacctgaagctgggcagcaaggtggaggtgtccaagaccacctaccccagccagatccccctgaagagccaggtgctgcagggcctgcaggagcctgctggggagggcctgcccctgaggaagagcggctctgtggagaatggatttgacacccagatctacacagactgggccaaccactacctggccaagagcggccacaagaggctcatccgggacctgcagcaggatgtgacagatggagtgctgctggcccagatcatccaggtggtggccaatgagaagattgaggacatcaatggctgccccaagaacagaagccagatgattgagaacattgatgcctgcctgaacttcctggccgccaagggcatcaacatccagggcctgtctgctgaggagatcagaaatggaaacctgaaggccatcctgggcctcttcttcagcctgagccgctacaagcagcagcagcagcagccccagaagcagcacctgagcagccccctgcccccagctgtgtcccaggtggccggggcccccagccagtgccaggccggcaccccccagcagcaggtgcctgtgaccccccaggccccctgccagccccaccagcctgccccccaccagcagagcaaggcccaggccgagatgcagagcagcgccagcagcaaggacagcagccagagcaagatcatccgcttcaccctgggccagaagaagatcagccggctgcccggccccacagcccgggtgtctgctgctggcagcgaggccaagacccggggcggcagcaccacagccaacaacagaagaagccagagcttcaacaactatgacaagagcaagcctgtgaccagccccccacctccacccagcagccatgagaaggagcccctggccagcagcgccagcagccaccctggcatgtctgacaatgccccagccagcctggagagcggcagcagcagcacccccaccaactgcagcaccagcagcgccatcccccagcccggggccgccaccaagccctggaggagcaagagcctgtctgtgaagcacagcgccaccgtgtccatgctgtctgtgaagcccccaggccctgaggccccccggcccaccccagaggccatgaagccagcccccaacaaccagaagtccatgctggagaagctgaagctgttcaacagcaagggcggcagcaaggccggggagggccctggcagccgggacaccagctgtgagcggctggagaccctgcccagctttgaggagagcgaggagctggaggccgccagcaggatgctgaccaccgtgggccctgccagcagcagccccaagatcgccctgaagggcatcgcccagaggaccttcagccgggccctgaccaacaagaagagcagcctgaagggaaatgagaaggagaaggagaagcagcagcgggagaaggacaaggagaagagcaaggacctggccaagagggcctctgtgacagagcggctggacctgaaggaggagcccaaggaggaccccagcggggctgctgtgcctgagatgcccaagaagagcagcaagatcgccagcttcatccccaagggcggcaagctgaacagcgccaagaaggagcccatggcccccagccacagcggcatccccaagccaggcatgaagtccatgcctgggaagagccccagcgccccagcccccagcaaggagggggagaggagccgcagcggcaagctgagcagcggcctgccccagcagaagccccagctggatggccgccacagcagcagcagcagcagcctggccagcagcgagggcaaaggacctgggggcaccaccctgaaccacagcatcagcagccagacagtgtctggctctgtgggcaccacccagaccaccggcagcaacacagtgtctgtgcagctgccccagccccagcagcagtacaaccaccccaacacagccaccgtggcccccttcctgtaccgcagccagacagacacagagggcaatgtgacagctgagagcagcagcactggagtgtctgtggagcccagccacttcaccaagacaggccagcctgccctggaggagctgaccggggaggaccctgaggcccggcggctgaggacagtgaagaacattgctgacctgcggcagaacctggaggagaccatgagcagcctgcggggcacccaggtgacccacagcaccctggagaccacctttgacaccaacgtgaccacagagatgagcggccgcagcatcctgagcctgaccggccggcccacccccctgtcctggaggctgggccagagcagcccccggctgcaggccggagatgcccccagcatgggaaatggctacccaccccgggccaatgccagccgcttcatcaacacagaaagtggccgctacgtgtacagcgcccccctgcggcggcagctggccagccggggcagctctgtgtgccacgtggatgtgtctgacaaggctggagatgagatggacctggagggcatctccatggatgcccctggctacatgtctgatggagatgtgctgagcaagaacatcagaacagatgacatcaccagcggctacatgacagatggcggcctgggcctgtacacccggcggctgaaccggctgcctgatggcatggctgtggtgcgggagaccctgcagaggaacaccagcctgggcctgggagatgctgacagctgggatgacagcagctctgtgagcagcggcatcagtgacaccatcgacaacctgagcacagatgacatcaacaccagcagcagcatcagcagctatgccaacaccccagccagcagcaggaagaacctggatgtgcagacagatgctgagaagcacagccaggtggagaggaacagcctgtggagcggagatgatgtgaagaagagtgatggcggcagtgacagcggcatcaagatggagcccggcagcaagtggaggaggaaccccagtgatgtgtctgatgaaagtgacaagagcaccagcggcaagaagaaccctgtgatcagccagacaggctcctggaggcggggcatgacagcccaggtgggcatcaccatgcccaggaccaagcccagcgccccagctggggccctgaagaccccaggcaccgggaagacagatgatgccaaggtgtctgagaagggccgcctgagccccaaggccagccaggtgaagaggagccccagtgatgctggccgcagcagtggagatgagagcaagaagcccctgcccagcagcagcaggacccccacagccaatgccaacagctttggcttcaagaagcagagcggcagcgctgctggcctggccatgatcacagccagcggcgtgacagtgaccagccgcagcgccaccctgggcaagatccccaagagcagcgccctggtgagccgctctgctggcaggaagagctccatggatggagcccagaaccaggatgatggctacctggccctgagcagcaggaccaacctgcagtaccgcagcctgccccggcccagcaagagcaacagcagaaatggagctggcaacagaagcagcaccagcagcattgacagcaacatcagcagcaagtctgctggcctgcctgtgcccaagctgcgggagcccagcaagacagccctgggcagcagcctgcccggcctggtgaaccagacagacaaggagaagggcatcagcagtgacaatgaatctgtggccagctgcaacagcgtgaaggtgaacccagctgcccagcctgtgagcagccctgcccagaccagcctgcagcccggggccaagtacccagatgtggccagccccaccctgcggcggctgtttggaggcaagcccaccaagcaggtgcccatcgccacagctgagaacatgaagaacagcgtggtgatcagcaacccccacgccaccatgacccagcagggcaacctggacagccccagcggcagcggcgtgctgagcagcggcagcagcagccccctgtacagcaagaatgtggacctgaaccagagccccctggccagcagccccagcagcgcccacagcgcccccagcaacagcctgacctggggcaccaatgccagcagcagcagcgctgtgtccaaggatggcctgggcttccagagcgtgagcagcctgcacaccagctgtgagagcattgacatcagcctgagcagtggaggagtgcccagccacaacagcagcacaggcctcatcgccagcagcaaggatgacagcctgaccccatttgtgaggaccaacagcgtgaagaccaccctgtctgagagccccctgagcagccctgctgccagccccaagttctgccgcagcaccctgcccaggaagcaggacagcgacccccacctggacaggaacaccctgcccaagaagggcctgcgctacacccccaccagccagctgcggacccaggaggatgccaaggagtggctgcggagccacagcgctgggggcctgcaggacacagctgccaacagccccttcagcagcggcagctctgtgaccagccccagcggcacccgcttcaacttcagccagctggccagccccaccaccgtgacccagatgagcctgagcaaccccaccatgctgcggacccacagcctgagcaatgctgatggccagtatgacccctacacagacagccgcttcaggaacagctccatgagcctggatgagaagagcaggaccatgagccgcagcggcagcttcagagatggctttgaggaggagagctgggagaagagctctgtggacaactttgtgtcccggctgcacagcagcctgcacttcagcctgcccctcttccaccacgcccgctatgagctggtgcacggcagcagcctgagcctggtgagcagcaccagctctgtgtacagcaccccagaggagaagtgccagagcgagatcaggaagctgcggcgggagctggatgccagccaggagaaggtgtctgccctgaccacccagctgacagccaatgcccacctggtggccgcctttgagcagagcctgggcaacatgaccatccggctgcagagcctgaccatgacagctgagcagaaggacagcgagctgaatgagctgaggaagaccatcgagctgctgaagaagcagaatgctgctgcccaggccgccatcaatggagtcatcaacaccccagagctgaactgcaagggaaatggaacagcccagagcgctgacctgcgcatccggcggcagcacagcagtgacagcgtgagcagcatcaacagcgccaccagccacagctctgtgggcagcaacattgaaagtgacagcaagaagaagaagaggaagaactgggtgaatgagctgcggagcagcttcaagcaggccttcggcaagaagaagagccccaagagcgccagcagccacagcgacatcgaggagatgacagacagcagcctgcccagcagccccaagctgccccacaacggcagcacaggcagcacccccctgctgaggaacagccacagcaacagcctcatcagcgagtgcatggattctgaggccgagaccgtgatgcagctgagaaatgagctgcgggacaaggagatgaagctgacagacatccggctggaggccctgagcagcgcccaccagctggaccagctgcgggaggccatgaacaggatgcagagcgagattgagaagctgaaggccgagaatgaccggctgaagtctgagagccagggcagcggctgcagccgggcccccagccaggtgtccatcagcgccagcccccggcagagcatgggcctgagccagcacagcctgaacctgacagagagcaccagcctggacatgctgctggatgacaccggggagtgcagcgccaggaaggagggcggccgccacgtgaagatcgtggtgtccttccaggaggagatgaagtggaaggaggacagccggccccacctgttcctgattggctgcattggagtgtctgggaagaccaagtgggatgtgctggatggagtggtgagaagactcttcaaggagtacatcatccacgtggaccctgtgtcccagctgggcctgaacagcgacagcgtgctgggctacagcattggagagatcaagaggagcaacaccagcgagaccccagagctgctgccctgtggctacctggtgggggagaacaccaccatctctgtgacagtgaagggcctggccgagaacagcctggacagcctggtgtttgagagcctcatccccaagcccatcctgcagagatatgtgtccctgctgattgagcaccggcgcatcatcctgagcggccccagcggcaccgggaagacctacctggccaaccggctgtctgagtacatcgtgctgcgggagggccgggagctgacagatggagtgattgccaccttcaacgtggaccacaagagcagcaaggagctgcggcagtacctgagcaacctggccgaccagtgcaacagcgagaacaatgctgtggacatgcccctggtgatcatcctggacaacctgcaccacgtgagcagcctgggggagatcttcaacggcctgctgaactgcaagtaccacaagtgcccctacatcatcggcaccatgaaccaggccaccagcagcacccccaacctgcagctgcaccacaacttccgctgggtgctgtgtgccaaccacacagagcctgtgaagggcttcctgggccgcttcctgcggaggaagctgatggagacagagatcagcggccgggtgaggaacatggagctggtgaagatcatcgactggatccccaaggtgtggcaccacctgaaccgcttcctggaggcccacagcagcagtgatgtgaccatcggccccaggctcttcctgagctgccccattgatgtggatggcagccgggtgtggttcacagacctgtggaactacagcatcatcccctacctgctggaggccgtgcgggagggcctgcagctgtatggaagaagagccccctgggaggaccctgccaagtgggtgatggacacctacccctgggccgccagcccccagcagcacgagtggccacccctgctgcagctgcggccagaagatgtgggctttgatggctacagcatgccccgggagggcagcaccagcaagcagatgccacccagtgatgctgagggggaccccctgatgaacatgctgatgaggctgcaggaggccgccaactacagcagcccccagagctatgacagcgacagcaacagcaacagccaccatgatgacatcctggacagcagcctggagagcaccctgtag

SEQ ID NO: 87674 - DNA, 7467 bp, Artificial Sequence
  derived and/or modified sequence
atgcccgccatcctggtggccagcaagatgaagagcggcctgcccaaacccgtgcacagtgctgccccgatccttcatgttccccccgctcgggccggtccacagccttgctatcttaagctcggctcgaaagtggaggtatctaaaaccacatacccgagccagatcccacttaaatcccaggtgttacagggcctacaggagcctgctggtgaagggctccccctccggaagtcagggtcagtagagaacggctttgacacccagatttacaccgattgggctaatcattacctcgccaagtcaggtcacaagcgcctcatcagagacttgcagcaagatgtaacggacggagtactgttggcacagatcatccaggtggtggcgaatgagaaaattgaggacataaatgggtgccccaagaacaggagccaaatgattgaaaacatcgacgcttgcctgaacttcctggcagccaaaggcataaatatacagggcttgagcgccgaagagataaggaatggcaatctcaaagccatactgggcctgttcttctcgcttagcaggtataaacagcagcagcagcagccccagaaacaacacttgagttctcctctcccacccgcagtttcacaagtggccggcgctccttcccaatgccaagcaggcaccccgcagcagcaagtgcccgttacaccacaagctccatgccagccacaccagcccgccccccaccagcagagcaaagcacaggccgaaatgcagtcaagcgccagctccaaagactcctctcagagcaaaattattaggtttacgctgggtcaaaagaagattagcagactgccagggcctactgcccgggtctctgccgctggctctgaggctaaaacaagaggcggtagcacaacagctaacaacagacggtctcagtcctttaacaactatgacaagagcaaacccgtcacctcaccgcctccaccaccttcaagtcatgagaaggagcctctggcatcttccgccagctcacatcccggcatgtctgataacgcaccagcttcactggagagcgggagtagcagcacaccaaccaattgcagcacctcatccgccataccccagccaggcgccgcaacaaaaccttggcggagtaagagtctcagcgtgaagcactccgccaccgtttcaatgctttccgtgaaacccccaggaccagaggctcctcgccctactcctgaggctatgaaaccagccccgaacaaccaaaaaagcatgctggaaaagctaaaactgtttaattctaaaggtggcagcaaagctggggaaggtccaggttctagggacaccagctgcgagaggttagagacattgccaagttttgaggagagcgaggaactggaggccgctagtcgtatgctgactacagtgggcccagccagctcatccccaaagattgcactgaaggggatcgcacaaaggactttctcacgggcactcacaaacaaaaagtcgagcctgaagggtaatgagaaggagaaagagaaacaacagcgagaaaaggataaggagaagagcaaggaccttgccaagcgtgccagcgtgactgaacgcctggacctgaaagaagaacccaaggaagacccttctggcgcagccgtgcctgagatgcctaaaaaaagcagtaaaatagctagttttatccctaagggtggtaagttaaactctgcaaagaaggaacccatggcaccctctcacagtgggattcctaaacccgggatgaagagtatgcctgggaagtctccgtcagcccccgccccatccaaagaaggagaacgctcacggtcaggcaaactgtcctccggtctcccacagcagaagcctcagttagacggccggcattccagttcttccagctccttagcgagctctgaaggaaaaggtcccggggggacaacactcaatcattccatttcttcccaaacagtgtccgggtctgtgggaacgacccagacaaccgggtctaatacggtgtctgtgcaactgcctcaaccccagcagcagtacaaccaccctaacaccgctacagttgctccattcctctaccgatcgcagaccgataccgaggggaacgtgaccgctgagagttcaagtacaggcgtgagtgtagaaccgtcccatttcaccaagacagggcagcctgccctggaggagctgactggagaagaccctgaggccaggaggttgaggaccgtgaagaatatcgcagatctgcgacagaacctggaggagaccatgagctcactgagggggacacaggtcacgcactccactctggagaccacctttgacactaacgtcactactgaaatgtctggccgcagcatcctctccctgaccggccggcctacacccctgtcttggcgtctgggccagtctagtccgcgactgcaggctggcgacgctccatccatgggcaatggatacccaccccgcgccaatgctagcagatttattaatacagaatcaggacgctatgtctattctgcaccactgagacgccaactcgcatcacgcggatcaagtgtgtgccatgtcgacgtgagtgataaggcgggagatgaaatggaccttgagggaatttccatggatgccccaggatacatgtcagatggggatgtactcagtaagaatatcagaactgatgatatcaccagcggctatatgactgacggcgggctgggcctatatactagaaggttgaaccggctgcctgacggcatggccgtggtaagagagaccttgcaacgaaacacttcactgggacttggtgatgcagattcctgggatgattcgtcctccgtttcctctggaatctctgacactatagataatttgtccactgacgacattaatacgtcatctagtatctcctcttacgcaaacacgcccgcaagctcccgcaagaatctcgatgtgcagacagacgctgagaaacattcacaggtggagcggaactcgttatggagcggagatgatgtgaagaaatcagacggtggcagcgatagtgggatcaagatggagcccggcagcaaatggcggcgaaatccgtccgacgtctccgatgagagcgacaaaagcacaagtggaaagaagaatccggtgataagccaaacaggatcttggagacggggcatgacggctcaggtggggataactatgcctagaacgaagccatcagcaccggccggcgctctgaagacgccagggaccggtaagacagacgacgctaaggtgtctgagaagggacggctgtcacctaaggcctcccaggtgaaacggagccccagcgatgctggtcggagcagtggggacgaatctaaaaagcccctccccagttcctctaggacccccactgccaatgcaaactcctttggttttaaaaaacagtccggatcagcagctggccttgctatgatcactgcttccggcgttacagttacctcccgctcagcgactcttggcaagatccccaagagttcggctctagtgagcagatctgctggccggaaatcttcaatggatggtgcccagaaccaagacgacggctacttggcgctatcttcacgaaccaatttgcaatacagatctcttccgagacctagcaagtcaaacagccgaaatggggctggtaaccgcagctccacttcgtctattgacagcaacatctcatctaaaagtgcagggcttcccgtccccaagctgcgggagccaagtaagactgcgttgggttcaagcttgcccggcctggtgaatcagaccgacaaggagaaagggatctcaagcgataatgagtcagtggcctcatgcaactctgtgaaagtcaaccccgcagcacagccagtctcatctcctgctcagaccagcctgcagcccggggcaaaatacccggacgtggcttcgccgaccctgcgaagactgttcggcgggaaacccacgaaacaggtccctattgctaccgcagaaaacatgaagaattccgtggttataagcaatccccatgctacaatgacacagcagggaaatttagactctccatctggttctggggtgctgtcatccggatcatcctcacctttgtacagcaagaatgtcgacctgaaccaaagtccacttgcttcttccccctcctcagcccacagtgcaccgagcaactcactgacctggggtacaaatgcaagctccagctccgccgtttcaaaggacggcctcggattccagtcggtgtcgtcgctccacacatcctgcgaatccatcgacatatctctgtccagcggcggcgtgccaagccacaattcgtctacgggcttgatcgccagctctaaggacgacagcctcactccgttcgtgagaaccaacagcgtgaagacaactctgagtgagtcccctctgagcagtcccgctgcctcacccaaattttgcaggtccacgctcccacggaagcaggactctgatccccacctagacagaaataccctccccaaaaaaggtctgcgctataccccaacatcccaactgcgaactcaggaggatgcgaaagaatggctcagaagccattcggcggggggtctgcaggatacagccgccaactctcccttctccagtggttccagcgtgacttcccctagcggcacccggttcaatttttcccagcttgcaagtcctaccaccgtcacccagatgtctttgagcaaccctaccatgttacggactcacagcctgtccaatgccgacggacaatatgacccttacaccgatagccgtttcagaaacagctccatgtccctggatgagaagtcgcgcacgatgtccagaagcggaagcttccgggatgggtttgaagaggaatcatgggaaaaaagcagcgtggataatttcgtcagcagacttcattcatccctgcacttttctctccccttattccaccacgctaggtatgaactggtccatggaagtagtctttcactggttagcagcacctcgagcgtttattcaacccccgaggagaagtgccagtctgagatcaggaagttacggcgcgagttagacgcttctcaggaaaaggtcagtgccctgacgacccagctgaccgccaatgcgcacctggtggcagcttttgaacagagtttgggaaacatgactatccgactgcagagcctgactatgactgccgaacagaaagactctgagctcaatgagttgagaaagacgatagaactcctgaaaaaacaaaacgcagccgctcaggccgcaataaacggtgtgatcaacactcccgaactgaactgtaaaggaaatgggactgcacaatctgccgacctccgtatcagaagacagcactctagtgactctgtatctagtataaactccgcgacttctcatagcagtgttggttcaaatatcgagagtgactccaagaaaaaaaagcgtaaaaactgggttaatgaattgcgcagttcctttaaacaggctttcggcaaaaagaaatctcccaaatctgcctcaagtcacagtgatattgaagagatgacagatagctctctgccctcttcccccaagctcccccacaacggcagtaccggttcaactcctctactgcgaaattcgcatagcaactccctcatctccgaatgtatggactcggaggcagagaccgtcatgcagctgcgcaatgaacttagagataaagagatgaaacttacggacatacgactggaggctctttcctctgcccaccaactggaccagctgcgggaagccatgaaccgaatgcagagtgagattgagaaactcaaggccgaaaacgatagattaaaaagcgaatcccagggctctggctgctcacgtgctccatcacaggtcagcatttcagcttcaccccggcagagtatggggctgtcccagcattctctgaacctgacggagtctaccagcttagacatgctccttgacgataccggggagtgtagtgcgcgcaaggagggtgggcgccatgtgaagattgtcgtaagctttcaggaagaaatgaagtggaaagaggattcccggccgcacctattcctgatagggtgtatcggggtgtctggaaagaccaagtgggatgtcctggatggagtggttcgcaggctgttcaaagagtatattattcatgtcgatcccgtctcccagctgggtctaaattctgatagcgtcttaggctactccattggcgagatcaagcgctctaacacgagcgagacacccgaactgctcccctgcggctatctggtgggcgagaataccaccatctcagtgaccgtgaagggtttagctgagaattccttggatagcctggtgttcgagagcctgattcctaaacccattctgcaacgttatgtaagcctgctcatagaacacagacgcattatcttgtctggcccaagtgggacagggaagacctaccttgctaaccggcttagcgaatacattgtgctgagggaaggacgggaactgacagatggtgttatcgctacctttaatgtagaccacaaatcttcaaaagagcttcgccaatacttgtccaacctggctgatcagtgtaactcggaaaacaacgctgtggacatgcctctcgtgattattcttgacaatcttcatcacgtgtctagtctaggcgagatctttaacgggctcctcaattgtaagtatcacaaatgtccatatatcattgggactatgaaccaggccacatccagcacccccaatctgcagcttcaccataatttcagatgggttctatgcgctaatcacactgaaccggtcaaagggttcctgggaagattcctacggcgtaaactcatggaaaccgagataagcgggcgcgtcagaaacatggagctggtcaaaatcatcgattggattcccaaggtgtggcaccatttaaacaggtttctggaggcccactcctccagcgacgtcacaattggtcctcgcctcttcctgtcctgccctattgatgttgatggatcaagagtctggttcacagatctttggaactattccatcatcccctacctgctggaggcagtaagagagggactccagctctacggtcggcgcgccccgtgggaggaccctgctaagtgggtcatggacacttacccctgggccgctagcccccagcaacacgaatggccccctttattacagctgagaccggaagatgttggattcgatggatactctatgccgagggagggatccacctccaaacagatgcctccctctgatgctgagggtgatcctcttatgaacatgctcatgcgactgcaggaggcagccaattatagtagtccacagagctatgattcagatagtaactctaattctcaccatgatgacatccttgatagcagcctcgagtctacgttatag

SEQ ID NO: 87675 - DNA, 7882 bp, Artificial Sequence
  derived and/or modified sequence
taaggcccggcgcctgctctgctacccgcgctgcctttagcggtcgcccccgccgccgctgccagggacgtgctgggaaagcccaagccccgggagaagatgccggccatcctggtcgcctccaaaatgaagtcgggactgcccaaacccgtgcacagcgccgcgcccatcctgcacgtgcccccggcccgggcgggcccccagccctgctacctgaagttgggaagcaaggtggaggtgagcaagaccacctatcctagccagatccccctgaaatcgcaggtgctgcaggggctgcaggagccagcgggggaggggctcccgctgcggaagagcggctcggtggaaaacgggttcgatacccagatctacacagactgggccaatcattacctagccaaatccggccacaagcgtctcatcagggatctccagcaagatgtgacagatggcgtcctcctggcccagattatccaggttgtggcaaatgaaaagattgaagacatcaatggctgtccgaagaacagatcccaaatgattgaaaacatagatgcctgcttgaatttcctggcagctaagggaataaacatccaggggctgtctgcagaagagatcaggaatggaaacctcaaggccattctaggcctcttcttcagcctctcccgatacaagcagcagcagcagcagccccagaagcagcacctctcctcacctctgccgcccgccgtatcccaggtggccggggccccctcccagtgccaggctggcacccctcagcagcaggtgccagtcactccccaagccccgtgccagcctcaccagccagcgccacatcagcagtcaaaagcacaagctgaaatgcagtccagtgcatcatccaaggactcatctcaaagcaaaatcatccgcttcactctgggtcagaaaaagatctctagacttccaggtcctaccgcgagggtatccgctgcaggcagcgaggccaaaacacgcggagggtcaactactgctaacaaccgacgcagccagagctttaacaactatgataaatccaaaccagtcacctccccacccccaccgccaagcagccacgagaaagagcctttggcaagttcagcctcctcccaccccggaatgagtgacaatgcacctgcttccttggagagcggcagcagctccacccctactaattgcagtacctcctcggccatcccgcagcccggtgcagccaccaagccttggcgcagcaaatccctcagcgtgaagcacagtgccacggtatccatgctctcggtcaagcctcctgggcctgaggcccccaggcccacacctgaagccatgaagccggcccccaacaatcagaagtccatgctggaaaagctgaaacttttcaacagtaaagggggctcaaaggcaggtgaggggccggggtcccgggacacaagctgtgagcggctggagactctgcccagcttcgaagagagcgaggagctggaggccgccagtcgcatgctcaccaccgtgggccctgcttccagcagccccaagattgcactcaagggcattgcccagaggacttttagccgggcactgaccaacaagaagagttctctgaaaggcaatgagaaagagaaggagaaacaacagcgggagaaggataaggagaaaagcaaggaccttgccaagagagcctctgtgacggagaggctggacctcaaggaggagccaaaagaagaccccagtggagcagctgtgcccgagatgccaaaaaagtcctccaagattgccagcttcatccccaaaggggggaagctcaacagtgccaagaaggagcccatggccccttcccacagtggaataccaaaaccaggaatgaaaagcatgcccgggaaatccccaagtgccccagcgccttccaaggaaggggagcggagccggagtgggaagctgagctcaggactcccccagcagaagccccagctggacggcagacactccagttcctcttccagcctggcgtcctcagaaggaaaaggcccaggagggaccaccctgaaccacagcatcagcagccagactgtcagtgggtctgtcgggaccacccagaccacaggaagcaataccgtcagtgttcagctacctcagccccagcagcaatacaaccatcccaacactgccacggttgcacctttcctgtacaggtctcagacggacactgaagggaatgttactgccgagtcaagctcaacaggtgtgagcgtggagcccagccacttcaccaagactggacagcctgctctggaagaactcactggggaagatcctgaggctcggcggctgcggacagtgaagaacatcgctgatctgcggcagaatttggaggaaaccatgtccagtttaaggggaactcaggttacacacagcacattggaaaccacgtttgacaccaatgtcaccacggagatgagtggccgtagcatactcagcttgacagggaggcccacacctctgtcctggagactgggccagtccagccctcggctccaagcaggagacgccccctcaatgggcaatgggtatccccctcgagccaacgccagcaggttcatcaacactgagtcaggtcgctatgtgtactccgcccctctgagaaggcagctggcctcccggggcagtagtgtctgccatgtggacgtctcagacaaggcaggagatgagatggacctggaaggcatcagcatggatgcccccggctacatgagcgacggggatgttctgagcaagaacatccggaccgatgacattacaagcggatacatgactgatggtggacttggcctctatacccgtcgcctgaaccggctccctgatgggatggctgtggtacgggagaccctgcaacgaaatacctccctgggcctcggagacgctgacagctgggacgacagcagctccgtcagcagcggcatcagcgacaccatagacaacctcagcactgatgacatcaacaccagctcctccatcagctcttatgccaacacacctgcctcctctcgaaaaaacctggatgtgcagactgatgctgagaagcactcacaggtggagaggaattccctgtggtctggtgatgatgtcaagaaatcagacggaggctcagacagcggcataaaaatggagccaggttccaagtggaggcggaatccttctgatgtgtctgacgagtccgacaaaagcacgtcgggcaagaagaatcctgtcatctcccagacaggctcatggcggcgaggcatgacagctcaggtgggcatcaccatgccaaggacgaagccttcagccccggcaggcgcactgaagaccccaggaactggaaaaacagacgacgcaaaggtgtctgagaaaggaaggctttctcctaaagcctcccaggtgaagcgctccccatcagatgcaggccggagcagtggtgacgaatccaaaaagcccctccccagcagctctaggacacctactgccaatgccaacagctttgggttcaagaagcagagtggttccgccgccggcctggccatgatcacagccagcggggtgactgtcaccagcaggtcagccacactgggcaaaatcccaaagtcatctgcactcgtcagtcggtctgctggtcggaagtcaagtatggatggggctcagaatcaggatgacgggtatctagccctaagctcccggacaaaccttcagtaccggagtttgccgaggcccagtaagtccaacagccggaacggggctgggaacaggtctagcaccagcagcatagattccaacattagcagcaagtccgcaggcctgccagtgcccaaactgagggagccttccaaaacagccctaggcagctctctaccaggtctggtcaaccaaacagacaaggagaaaggcatctcatcagacaacgagagtgtggcttcctgtaactcggtgaaagtgaatccggcagcccagcctgtgtccagtccggctcagaccagtctccagcctggagccaagtacccagatgtggcctctcccacactccgcagactctttggtgggaagcctaccaagcaagtgcccatcgccacagctgaaaacatgaaaaattcggtggtcatctccaatcctcatgccaccatgactcagcaaggtaacctagactccccgtcaggcagtggcgtcctgagcagtgggagcagcagtcctctctacagcaagaatgtggacctcaaccagtctccgctagcctccagccccagctcagcccactcggccccttccaacagcctcacctggggcaccaacgccagcagctcctccgcagttagcaaggatggcctgggctttcagtctgtcagcagcctccacaccagctgtgagtccatcgacatctccctcagcagtggaggggtccccagccacaattcttccactggcctcatcgcctcctccaaggacgactccttgactccctttgtcagaactaacagtgtgaagaccacactgtcagaaagccctctctcttcccctgctgctagccctaagttctgcagaagtactctgcccaggaaacaggacagtgacccgcaccttgataggaacactttgcctaagaaaggactcaggtatactcccacctcccagcttcgcacgcaagaagatgcaaaagaatggttacggtcccattctgcaggaggccttcaggacaccgctgccaattcccccttttcctctggctccagcgtgacttctccctccggaacaagattcaacttttcccagcttgcgagtcccaccactgtcacccagatgagcttgtccaacccgaccatgctgaggactcacagcctctccaatgctgatgggcagtatgatccatacactgacagccgcttccggaatagctccatgtccctggatgagaagagcagaaccatgagccgttcaggctcattccgggatgggtttgaagaagaatcatgggagaaaagttctgtggacaactttgtcagccgtcttcacagctcacttcatttctctcttcctttgttccatcacgcaaggtatgagttagttcatggatcctcactctccttggtttccagcacatcgtcagtttattctacaccagaagaaaaatgccagtcagagattcgcaagctgcggcgggaactggatgcctcccaggagaaagtttcagctttgaccacccagctgacagcaaatgctcaccttgtggcagcctttgaacagagtcttggtaacatgacaatcaggctccagagtctgaccatgacagctgagcagaaggactcagaactgaatgagttaagaaaaaccattgagctgctaaagaaacagaacgcagctgcccaggctgccattaatggagtaattaacacacctgagctcaactgcaaaggaaacggcactgcccagtctgcagacctccgcatccgcaggcagcactcctcagacagcgtctccagcatcaacagtgccaccagccactccagcgtgggcagcaacatagagagtgactcaaagaagaagaagcggaagaactgggtcaatgagttacgcagctccttcaagcaagctttcgggaagaagaagtccccaaaatctgcgtcctctcattcagatattgaggagatgacggattcttctttgccttcctcaccaaagttaccgcacaatgggtccacaggttccaccccactgctgaggaattctcactccaactctctaatttcagaatgcatggatagtgaagctgagaccgtcatgcagctccgaaatgagttaagagacaaggagatgaagctgacggatatccgcttagaagctctcagttctgcccaccagctggaccagctccgggaggccatgaacaggatgcagagtgaaatagagaagctgaaagctgagaatgatcggctgaagtcagagtctcaaggcagtggctgcagccgggctccttcccaagtgtccatctctgcctccccgaggcagtccatgggcctctcccagcacagcttgaacctcactgagtcaaccagcctggacatgttgctggatgacactggtgaatgctcggctcggaaggaaggaggcaggcatgttaagatagttgtcagctttcaggaggaaatgaagtggaaggaggattccagaccacatctctttcttattggctgcattggagttagtggcaagacgaagtgggatgtgctcgatggggtggttagacggctgttcaaagaatacatcattcatgtcgacccagtgagtcagctagggctgaattcagacagcgttcttggctacagcattggagaaatcaagcgcagcaacacttccgaaacaccggagctgcttccttgtggctatctggttggagagaacacgaccatctcagtgactgtgaaagggctcgcagaaaacagcctggactcactggtgtttgagtccttgattcccaagcccatcctgcagcgctacgtctccctcctgatagagcaccgtcggatcattctctctggccccagcggcactgggaaaacctacctggccaaccggctgtctgagtatatagtgcttcgagagggacgggagttgacagacggggttatcgccacctttaacgtggaccataagtccagcaaggaattgcgccagtacctgtccaaccttgctgaccagtgcaacagtgagaacaatgctgtggacatgcccctcgtcatcatcctggacaacctacaccacgtgagctctctgggagagatcttcaatgggctgctcaactgcaagtaccacaaatgcccttacataattggcacaatgaaccaggctacctcttcgactcccaacctgcagcttcaccataacttcagatgggtgctttgtgccaaccacacggagcctgtgaagggtttccttggccgattcctgaggaggaagctcatggaaacagagatcagtgggcgggtgcgcaatatggagctggtaaaaatcattgactggattcccaaggtctggcatcacctcaaccgcttcctggaggctcacagttcctcggacgtcaccatcggcccccggctcttcctgtcatgccccatcgatgtggacggctcgagagtgtggttcaccgacttgtggaactattccattatcccctatctcctggaagccgtcagagaaggactccagctctatggaaggcgcgccccctgggaggatcctgccaagtgggtgatggacacatatccatgggcagccagcccacaacagcacgagtggcctcccctgctgcagttacggcctgaggatgtcggcttcgacggctactccatgcctcgggagggatcgacaagcaagcagatgccccccagtgatgctgaaggtgacccgctgatgaacatgctgatgaggctgcaggaggcagccaactactccagcccccagagctatgacagcgactccaacagcaacagccatcacgatgacatcttggactcctctttggagtccactctgtgacaggggcccggagcccagcgccctcctcttctcctcaccgcattccacctgcatcccccacatcaccctgaagatgacttcctgagccagcccccagccacagccttagagctgcgggaacaccgagaccccccgtccttcagcctcgacctgggtgcaggcatcccgggccagctgcctgcggaccgcttccttccacagcgagaactgcactaccttctgttgtactttaattattgttttgccttgttgctgtgacctccctaagacactgaagatacttctcgggaaaggatcatcgccgttgaaatgaaaa

SEQ ID NO: 87676 - DNA, 7466 bp, Artificial Sequence
  derived and/or modified sequence
atgccagctatccttgtggcgagcaagatgaagtccggcctgccaaaacccgtccacagtgccgcacctatcctgcacgtgccgccagcaagagccggaccccagccctgctatttgaagctgggctcaaaggtggaagtttccaagacgacttatccatctcagatcccattgaagtcacaagtattacaggggcttcaggaacccgctggcgaagggttgcctctgagaaagtctggtagtgttgagaatggatttgatacccagatctatactgactgggctaatcactatctagctaagtctggacacaagcgactaatcagagacttgcagcaagatgtgaccgacggcgtgttgctcgctcagatcattcaagttgtcgccaacgagaagattgaagacataaacgggtgtccaaaaaacaggtcccagatgattgaaaatatcgacgcctgcctgaattttctggcagccaaaggaataaatattcaagggctttccgctgaggagatcagaaatggtaatctcaaagcaatcttgggactatttttttctctttcacgctataaacagcagcagcaacagcctcagaaacagcatctgtcttcacctctcccccctgccgtgagccaggtcgctggggctcccagtcagtgtcaggcaggcactccccagcaacaggtcccagttacccctcaggctccttgccaaccccatcagccagcccctcaccagcagtctaaagcacaagccgagatgcagtccagtgcaagcagcaaagattcgagccagagcaagatcatcaggtttacgctcggtcagaagaaaatttccagattaccgggaccgaccgccagggtgtctgccgcagggagcgaagcgaagactcgcggaggctctacaacggccaataatcgaaggtcacagtccttcaacaactatgataaaagcaagccagttacatcccctccgcctcctccctccagtcacgagaaagagcccttggcctcctctgctagttcacaccctggcatgtcagacaacgctcccgcaagtttggagtcgggcagtagtagtactcccacaaattgttcaaccagcagtgcgattccccagccaggtgccgctacaaaaccgtggaggtccaagagtctcagtgtgaagcattccgccactgtgtccatgctgtccgtaaaacctccaggcccagaagcccctagaccaacccccgaggccatgaagccagcaccgaacaatcagaagtccatgttggagaagctgaaactctttaatagtaagggcggtagcaaagcaggggagggcccaggctcaagggacacatcctgtgaacggcttgagactttgccatctttcgaggagtctgaggagctggaagccgcaagccgcatgttgactactgtgggacctgcatcttcatctccgaagatcgcacttaagggaatcgcccagcgcaccttttcccgggctctgacaaataagaagagctctcttaaaggtaatgagaaagaaaaggagaaacaacagcgcgaaaaggataaggaaaagtccaaggacctagctaagagggcaagtgtgactgaacgactggatctgaaagaggagcctaaagaagacccgtccggggctgccgtacctgagatgccaaaaaagtccagtaagattgcttctttcatccccaagggaggcaagctgaatagcgctaaaaaggaaccaatggccccttcacattctggaattcccaagcccggaatgaagtccatgccaggcaagtctccttcggcacccgcacctagcaaagaaggggagaggtccagaagtggcaagctgagctctggactgccccaacaaaaaccgcagctggatggtaggcattcatcctcgtcttcttccttagcctctagcgaaggtaagggaccaggtggtactactctcaaccattccataagctcacaaaccgtgagcggctccgtgggaacaacccagactaccggttcgaatactgtaagcgtgcagctgccccaaccgcagcagcagtacaatcatcccaacacagcaaccgtagcaccttttctgtaccgcagccagaccgatacagagggaaacgttaccgccgaatccagctccacaggcgtgagcgtcgaaccaagccacttcactaagaccggccagcctgccttagaggaactcacaggcgaggatcccgaagccagacgtctgcgtacagtgaagaatatagctgatctgcggcagaacctggaagagactatgagctctttgaggggcacacaggtaactcacagtactctggaaacaacattcgatacgaacgtaaccacagaaatgtccggacgatccatcttatcactcaccggacgccctaccccattatcatggcggctgggacagtcgagtccacgactgcaggctggcgacgcaccaagcatgggaaacggataccccccacgcgctaacgcttcacgtttcatcaacactgaatcgggcaggtatgtttatagcgccccattgaggcggcagctcgctagccgcggaagtagtgtgtgccatgttgatgtttccgacaaggctggtgacgaaatggacctcgaaggcatcagcatggacgctcctggatatatgtctgatggcgatgttttgagcaaaaacatcagaacagatgacataactagtggctatatgaccgatgggggtcttggattatacactaggcggctgaacagactgccagatgggatggccgtcgtgagggagacattgcaaaggaatacgtccttgggtctgggcgatgccgatagttgggacgactcatcttcagtgagttctggcatttctgatactatcgataatctctccaccgacgacatcaacactagtagcagcatttccagttacgctaatactccagcttcttctaggaaaaacctggatgttcaaaccgatgccgagaagcactctcaggtcgaaagaaattccttgtggtcaggcgacgacgttaaaaagtcagacgggggatcggactcaggcataaaaatggagcccggatctaaatggcggagaaatccgagcgacgtctctgatgagagtgacaaaagcactagcggtaagaagaatccagtcattagtcagaccggatcctggcgtcgcggtatgacggctcaggttgggatcaccatgcctcgtaccaagccctcagcaccagcaggcgctctgaaaacacctggaacgggaaagacagatgatgctaaggtttctgaaaaaggacgcctgtctccaaaggcatcccaggtgaagagatctccctccgatgcaggaaggagtagtggcgacgaatctaagaagccgcttcccagttcatcccggacccctacagctaatgctaattcctttggtttcaagaaacaatccggatctgccgctggccttgcgatgatcacagctagcggggtgactgttacatcaagatcagccaccctaggaaaaattcctaagtcttcagcactggtgtcaagatctgcgggtcgaaaatcttctatggatggcgcacagaatcaggacgacggatatctggccctgtcttccaggaccaacttacagtaccgctctctcccccgtccgtctaaaagtaattcccgcaacggtgccggaaatcgctcctccacgtcaagcatcgattccaatatcagctcgaaatcagccggactgcccgttccaaagttaagagaaccatccaagacagcgctggggagttctctgcccggacttgtgaaccaaaccgataaggagaagggcatcagctctgataatgagagtgtggcgagctgtaacagtgtcaaagttaaccctgcggctcagcctgtcagctcacctgctcaaacctcgctgcagccaggggcaaaatatccagacgtagcctcccccaccctgcggaggctattcggcggaaagcccaccaaacaggtgcccatcgcaaccgcagagaacatgaaaaactccgttgtcatcagtaacccgcacgctacgatgacccagcaggggaacctcgattccccttcaggctctggtgtgctgtccagcggaagctcctcccccctgtacagcaagaacgttgacctgaatcagagccctctggcctcttccccctcaagtgcccattctgcgcctagtaactcgctgacctgggggacaaacgcatcctcctcatccgccgtttctaaggacggactgggatttcagagcgtctcatcccttcacacctcatgcgagtccatcgacatctccctctcgtccgggggagtccctagccataactcctccacaggcctgatagccagctcaaaggatgactccctcacaccatttgtgcggaccaatagtgtgaagactacactgtcagaatcaccgctttctagccccgctgcaagcccgaaattctgtagaagtactctgccgcgtaagcaggactccgacccccacctggaccgtaatactttgcccaagaagggactgcggtatacccctacgtcacaacttagaacccaggaggacgcgaaggagtggctgagatcgcactccgctggcggactgcaagacactgctgccaatagtccgttctcatcgggctcttctgtcacttccccctccggaacccgcttcaacttcagtcagttggcctcacctacgacagtcacccagatgagcctgagcaaccccactatgctacggacacactctctctctaacgcagacggacagtacgatccatataccgattcaagattccgtaatagcagtatgagccttgacgagaagtcaaggactatgtccagatccggctcgtttcgggacgggtttgaagaggaaagctgggagaagtcatctgtggacaatttcgtttcaagattacattcgagcctgcatttctccctgcccctgtttcaccacgctagatatgagctggtccacggttcctcactttcactggtcagctccacatctagtgtgtactctactcctgaggagaagtgccagtccgaaatacggaagttaagaagagaactcgatgcgtcccaggaaaaagtgtctgcccttaccacccagctcacagcaaatgctcacctcgtggccgctttcgaacagtcacttggaaatatgacaatacgcttgcaatcccttaccatgactgctgagcagaaagactctgagttgaacgagctgcgtaagacaatcgaattgctgaaaaagcagaacgctgcagcccaggccgctatcaacggcgttattaatacccctgagttaaattgtaagggcaacggcacagcacaatcagctgacttaaggattcgtagacagcactcttccgatagcgtgtctagcatcaatagtgccacatctcatagcagcgtaggaagtaacatcgaaagcgactctaagaaaaagaagagaaaaaactgggttaacgagctgagatcatccttcaaacaggcattcgggaagaagaagtctcccaaaagtgctagcagtcactccgacatcgaagaaatgaccgactcttctttgccatcgagcccaaaattgcctcataacggcagtactgggagcacacccttgcttcggaactcccactcaaactcactgatcagcgagtgcatggactccgaagcagaaacagtgatgcagcttcgaaacgagcttcgagacaaagaaatgaagctaactgatataaggttggaggctctctccagcgcacatcagctggatcagttacgagaagcaatgaacaggatgcagtccgagattgagaagctgaaagccgaaaatgatcgcctgaagagcgagtctcaaggatcaggatgtagcagagcaccgtcccaggtcagcatcagcgccagtccacgccaaagcatgggtctgagtcagcattcgctgaacctgacggaaagcacttccttagacatgctgcttgacgatactggcgaatgcagtgcgagaaaagagggaggcaggcatgttaaaattgtagtgtccttccaagaagagatgaagtggaaagaggattcccggccacacctgttcctcatcgggtgcattggagtcagtggcaaaacaaaatgggatgtgctggatggcgtggtgagacggctgtttaaggaatacatcatacacgtcgaccctgtgagccagctgggcctgaattcagattccgtcctgggatactcgatcggcgagattaagagatccaacacatccgaaacaccagagttgctcccctgcggctatctggtcggcgagaataccactataagcgtgacagtcaagggccttgccgaaaacagcctagactccctagtcttcgaaagcctcattcccaagcctattttgcagaggtacgtcagcttactaatcgagcaccgccgtatcatcctgagcgggccaagcgggactggcaaaacatacctagctaacaggctgagtgagtatatcgtgcttcgcgaggggagagagcttaccgacggcgttattgccacattcaatgttgatcataaaagcagtaaggaattacgccagtacctctccaacctggccgaccagtgcaatagcgaaaacaacgcagtggacatgcctctggtgattatcctcgacaatctgcatcacgtcagttctctcggtgagattttcaatgggctgctcaactgcaagtatcacaaatgtccttatatcatcggaacaatgaatcaagcaaccagctctacgcccaatctgcagctgcatcacaatttccgctgggtgctgtgcgccaatcacaccgagcccgttaagggctttctggggcgtttcctgcgacgaaagctgatggaaacagagatcagtgggagagttcgcaatatggaactcgtgaaaattattgactggatcccgaaggtttggcatcacttgaatcggtttctggaggctcacagcagcagcgatgtcaccattgggccaaggctgttcctgagttgtcccatcgatgtagacggaagtcgtgtgtggttcactgatctatggaactactctattatcccatacctgctggaggccgtcagggaaggtctccagctatacgggaggcgcgctccatgggaggacccagctaaatgggtcatggacacgtatccttgggctgccagtccacaacaacacgaatggccccctctgctgcagcttaggccagaggatgttggtttcgatggttactcaatgccccgtgaaggaagtacatctaagcagatgcctccgagcgacgcagagggcgatcccctgatgaacatgttgatgcgcctgcaggaagccgcaaactactcctccccccaaagttacgactccgatagtaactcaaactctcatcatgatgatatcttggacagtagcttggaatcgaccttata

SEQ ID NO: 87677 - DNA, 7467 bp, Artificial Sequence
  derived and/or modified sequence
atgcccgccatcctggtggccagcaagatgaagagcggcctgcccaagcccgtgcacagcgccgcccccatcctgcacgtgccccccgccagagccggcccccagccctgctacctgaagctgggcagcaaggtggaggtgagcaagaccacctaccccagccagatccccctgaagagccaggtgctgcagggcctgcaggagcccgccggcgagggcctgcccctgagaaagagcggcagcgtggagaacggcttcgacacccagatctacaccgactgggccaaccactacctggccaagagcggccacaagagactgatcagagacctgcagcaggacgtgaccgacggcgtgctgctggcccagatcatccaggtggtggccaacgagaagatcgaggacatcaacggctgccccaagaacagaagccagatgatcgagaacatcgacgcctgcctgaacttcctggccgccaagggcatcaacatccagggcctgagcgccgaggagatcagaaacggcaacctgaaggccatcctgggcctgttcttcagcctgagcagatacaagcagcagcagcagcagccccagaagcagcacctgagcagccccctgccccccgccgtgagccaggtggccggcgcccccagccagtgccaggccggcaccccccagcagcaggtgcccgtgaccccccaggccccctgccagccccaccagcccgccccccaccagcagagcaaggcccaggccgagatgcagagcagcgccagcagcaaggacagcagccagagcaagatcatcagattcaccctgggccagaagaagatcagcagactgcccggccccaccgccagagtgagcgccgccggcagcgaggccaagaccagaggcggcagcaccaccgccaacaacagaagaagccagagcttcaacaactacgacaagagcaagcccgtgaccagccccccccccccccccagcagccacgagaaggagcccctggccagcagcgccagcagccaccccggcatgagcgacaacgcccccgccagcctggagagcggcagcagcagcacccccaccaactgcagcaccagcagcgccatcccccagcccggcgccgccaccaagccctggagaagcaagagcctgagcgtgaagcacagcgccaccgtgagcatgctgagcgtgaagccccccggccccgaggcccccagacccacccccgaggccatgaagcccgcccccaacaaccagaagagcatgctggagaagctgaagctgttcaacagcaagggcggcagcaaggccggcgagggccccggcagcagagacaccagctgcgagagactggagaccctgcccagcttcgaggagagcgaggagctggaggccgccagcagaatgctgaccaccgtgggccccgccagcagcagccccaagatcgccctgaagggcatcgcccagagaaccttcagcagagccctgaccaacaagaagagcagcctgaagggcaacgagaaggagaaggagaagcagcagagagagaaggacaaggagaagagcaaggacctggccaagagagccagcgtgaccgagagactggacctgaaggaggagcccaaggaggaccccagcggcgccgccgtgcccgagatgcccaagaagagcagcaagatcgccagcttcatccccaagggcggcaagctgaacagcgccaagaaggagcccatggcccccagccacagcggcatccccaagcccggcatgaagagcatgcccggcaagagccccagcgcccccgcccccagcaaggagggcgagagaagcagaagcggcaagctgagcagcggcctgccccagcagaagccccagctggacggcagacacagcagcagcagcagcagcctggccagcagcgagggcaagggccccggcggcaccaccctgaaccacagcatcagcagccagaccgtgagcggcagcgtgggcaccacccagaccaccggcagcaacaccgtgagcgtgcagctgccccagccccagcagcagtacaaccaccccaacaccgccaccgtggcccccttcctgtacagaagccagaccgacaccgagggcaacgtgaccgccgagagcagcagcaccggcgtgagcgtggagcccagccacttcaccaagaccggccagcccgccctggaggagctgaccggcgaggaccccgaggccagaagactgagaaccgtgaagaacatcgccgacctgagacagaacctggaggagaccatgagcagcctgagaggcacccaggtgacccacagcaccctggagaccaccttcgacaccaacgtgaccaccgagatgagcggcagaagcatcctgagcctgaccggcagacccacccccctgagctggagactgggccagagcagccccagactgcaggccggcgacgcccccagcatgggcaacggctacccccccagagccaacgccagcagattcatcaacaccgagagcggcagatacgtgtacagcgcccccctgagaagacagctggccagcagaggcagcagcgtgtgccacgtggacgtgagcgacaaggccggcgacgagatggacctggagggcatcagcatggacgcccccggctacatgagcgacggcgacgtgctgagcaagaacatcagaaccgacgacatcaccagcggctacatgaccgacggcggcctgggcctgtacaccagaagactgaacagactgcccgacggcatggccgtggtgagagagaccctgcagagaaacaccagcctgggcctgggcgacgccgacagctgggacgacagcagcagcgtgagcagcggcatcagcgacaccatcgacaacctgagcaccgacgacatcaacaccagcagcagcatcagcagctacgccaacacccccgccagcagcagaaagaacctggacgtgcagaccgacgccgagaagcacagccaggtggagagaaacagcctgtggagcggcgacgacgtgaagaagagcgacggcggcagcgacagcggcatcaagatggagcccggcagcaagtggagaagaaaccccagcgacgtgagcgacgagagcgacaagagcaccagcggcaagaagaaccccgtgatcagccagaccggcagctggagaagaggcatgaccgcccaggtgggcatcaccatgcccagaaccaagcccagcgcccccgccggcgccctgaagacccccggcaccggcaagaccgacgacgccaaggtgagcgagaagggcagactgagccccaaggccagccaggtgaagagaagccccagcgacgccggcagaagcagcggcgacgagagcaagaagcccctgcccagcagcagcagaacccccaccgccaacgccaacagcttcggcttcaagaagcagagcggcagcgccgccggcctggccatgatcaccgccagcggcgtgaccgtgaccagcagaagcgccaccctgggcaagatccccaagagcagcgccctggtgagcagaagcgccggcagaaagagcagcatggacggcgcccagaaccaggacgacggctacctggccctgagcagcagaaccaacctgcagtacagaagcctgcccagacccagcaagagcaacagcagaaacggcgccggcaacagaagcagcaccagcagcatcgacagcaacatcagcagcaagagcgccggcctgcccgtgcccaagctgagagagcccagcaagaccgccctgggcagcagcctgcccggcctggtgaaccagaccgacaaggagaagggcatcagcagcgacaacgagagcgtggccagctgcaacagcgtgaaggtgaaccccgccgcccagcccgtgagcagccccgcccagaccagcctgcagcccggcgccaagtaccccgacgtggccagccccaccctgagaagactgttcggcggcaagcccaccaagcaggtgcccatcgccaccgccgagaacatgaagaacagcgtggtgatcagcaacccccacgccaccatgacccagcagggcaacctggacagccccagcggcagcggcgtgctgagcagcggcagcagcagccccctgtacagcaagaacgtggacctgaaccagagccccctggccagcagccccagcagcgcccacagcgcccccagcaacagcctgacctggggcaccaacgccagcagcagcagcgccgtgagcaaggacggcctgggcttccagagcgtgagcagcctgcacaccagctgcgagagcatcgacatcagcctgagcagcggcggcgtgcccagccacaacagcagcaccggcctgatcgccagcagcaaggacgacagcctgacccccttcgtgagaaccaacagcgtgaagaccaccctgagcgagagccccctgagcagccccgccgccagccccaagttctgcagaagcaccctgcccagaaagcaggacagcgacccccacctggacagaaacaccctgcccaagaagggcctgagatacacccccaccagccagctgagaacccaggaggacgccaaggagtggctgagaagccacagcgccggcggcctgcaggacaccgccgccaacagccccttcagcagcggcagcagcgtgaccagccccagcggcaccagattcaacttcagccagctggccagccccaccaccgtgacccagatgagcctgagcaaccccaccatgctgagaacccacagcctgagcaacgccgacggccagtacgacccctacaccgacagcagattcagaaacagcagcatgagcctggacgagaagagcagaaccatgagcagaagcggcagcttcagagacggcttcgaggaggagagctgggagaagagcagcgtggacaacttcgtgagcagactgcacagcagcctgcacttcagcctgcccctgttccaccacgccagatacgagctggtgcacggcagcagcctgagcctggtgagcagcaccagcagcgtgtacagcacccccgaggagaagtgccagagcgagatcagaaagctgagaagagagctggacgccagccaggagaaggtgagcgccctgaccacccagctgaccgccaacgcccacctggtggccgccttcgagcagagcctgggcaacatgaccatcagactgcagagcctgaccatgaccgccgagcagaaggacagcgagctgaacgagctgagaaagaccatcgagctgctgaagaagcagaacgccgccgcccaggccgccatcaacggcgtgatcaacacccccgagctgaactgcaagggcaacggcaccgcccagagcgccgacctgagaatcagaagacagcacagcagcgacagcgtgagcagcatcaacagcgccaccagccacagcagcgtgggcagcaacatcgagagcgacagcaagaagaagaagagaaagaactgggtgaacgagctgagaagcagcttcaagcaggccttcggcaagaagaagagccccaagagcgccagcagccacagcgacatcgaggagatgaccgacagcagcctgcccagcagccccaagctgccccacaacggcagcaccggcagcacccccctgctgagaaacagccacagcaacagcctgatcagcgagtgcatggacagcgaggccgagaccgtgatgcagctgagaaacgagctgagagacaaggagatgaagctgaccgacatcagactggaggccctgagcagcgcccaccagctggaccagctgagagaggccatgaacagaatgcagagcgagatcgagaagctgaaggccgagaacgacagactgaagagcgagagccagggcagcggctgcagcagagcccccagccaggtgagcatcagcgccagccccagacagagcatgggcctgagccagcacagcctgaacctgaccgagagcaccagcctggacatgctgctggacgacaccggcgagtgcagcgccagaaaggagggcggcagacacgtgaagatcgtggtgagcttccaggaggagatgaagtggaaggaggacagcagaccccacctgttcctgatcggctgcatcggcgtgagcggcaagaccaagtgggacgtgctggacggcgtggtgagaagactgttcaaggagtacatcatccacgtggaccccgtgagccagctgggcctgaacagcgacagcgtgctgggctacagcatcggcgagatcaagagaagcaacaccagcgagacccccgagctgctgccctgcggctacctggtgggcgagaacaccaccatcagcgtgaccgtgaagggcctggccgagaacagcctggacagcctggtgttcgagagcctgatccccaagcccatcctgcagagatacgtgagcctgctgatcgagcacagaagaatcatcctgagcggccccagcggcaccggcaagacctacctggccaacagactgagcgagtacatcgtgctgagagagggcagagagctgaccgacggcgtgatcgccaccttcaacgtggaccacaagagcagcaaggagctgagacagtacctgagcaacctggccgaccagtgcaacagcgagaacaacgccgtggacatgcccctggtgatcatcctggacaacctgcaccacgtgagcagcctgggcgagatcttcaacggcctgctgaactgcaagtaccacaagtgcccctacatcatcggcaccatgaaccaggccaccagcagcacccccaacctgcagctgcaccacaacttcagatgggtgctgtgcgccaaccacaccgagcccgtgaagggcttcctgggcagattcctgagaagaaagctgatggagaccgagatcagcggcagagtgagaaacatggagctggtgaagatcatcgactggatccccaaggtgtggcaccacctgaacagattcctggaggcccacagcagcagcgacgtgaccatcggccccagactgttcctgagctgccccatcgacgtggacggcagcagagtgtggttcaccgacctgtggaactacagcatcatcccctacctgctggaggccgtgagagagggcctgcagctgtacggcagaagagccccctgggaggaccccgccaagtgggtgatggacacctacccctgggccgccagcccccagcagcacgagtggccccccctgctgcagctgagacccgaggacgtgggcttcgacggctacagcatgcccagagagggcagcaccagcaagcagatgccccccagcgacgccgagggcgaccccctgatgaacatgctgatgagactgcaggaggccgccaactacagcagcccccagagctacgacagcgacagcaacagcaacagccaccacgacgacatcctggacagcagcctggagagcaccctgtag

SEQ ID NO: 87678 - protein, 188 aa, Artificial Sequence
  derived and/or modified sequence
MSEIILEFESFDLEPDSNPPGGMFCRYDRLEIWDGFPDVGPHIGRYCGQKTPGRIRSSSGILSMVFYTDSAIAKEGFSANYSVLQSSVSEDFKCMEALGMESGEIHSDQITASSQYSTNWSAERSRLNYPENGWTPGEDSYREWIQDAKYRLRVSVVRSKSSSSSTSLEPRPLSSLKLSFFSYKIKIT

SEQ ID NO: 87679 - protein, 735 aa, Artificial Sequence
  derived and/or modified sequence
MSEIILEFESFDLEPDSNPPGGMFCRYDRLEIWDGFPDVGPHIGRYCGQKTPGRIRSSSGILSMVFYTDSAIAKEGFSANYSVLQSSVSEDFKCMEALGMESGEIHSDQITASSQYSTNWSAERSRLNYPENGWTPGEDSYREWIQVDLGLLRFVTAVGTQGAISKETKKKYYVKTYKIDVSSNGEDWITIKEGNKPVLFQGNTNPTDVVVAVFPKPLITRFVRIKPATWETGISMRFEVYGCKITDYPCSGMLGMVSGLISDSQITSSNQGDRNWMPENIRLVTSRSGWALPPAPHSYINEWLQIDLGEEKIVRGIIIQGGKHRENKVFMRKFKIGYSNNGSDWKMIMDDSKRKAKSFEGNNNYDTPELRTFPALSTRFIRIYPERATHGGLGLRMELLGCEVEAPTAGPTTPNGNLVDECDDDQANCHSGTGGTTVLATEKPTVIDSTIQSEFPTYGFNCEFGWGSHKTFCHWEHDNHVQLKWSVLTSKTGPIQDHTGDGNFIYSQADENQKGKVARLVSPVVYSQNSAHCMTFWYHMSGSHVGTLRVKLRYQKPEEYDQLVWMAIGHQGDHWKEGRVLLHKSLKLYQVIFEGEIGKGNLGGIAVDDISINNHISQEDCAKPADLDKKNPEIKIDETGSTPGYEGEGEGDKNISRKPGNVLKTLDPILITIIAMSALGVLLGAVCGVVLYCACWHNGMSERNLSALENYNFELVDGVKLKKDKLNTQSTYSEA

SEQ ID NO: 87680 - protein, 170 aa, Artificial Sequence
  derived and/or modified sequence
  misc_feature (1)..(1): Xaa can be any naturally occurring amino acid
XPGGMFCRYDRLEIWDGFPDVGPHIGRYCGQKTPGRIRSSSGILSMVFYTDSAIAKEGFSANYSVLQSSVSEDFKCMEALGMESGEIHSDQITASSQYSTNWSAERSRLNYPENGWTPGEDSYREWIQDAKYRLRVSVVRSKSSSSSTSLEPRPLSSLKLSFFSYKIKIT

SEQ ID NO: 87681 - DNA, 2208 bp, Artificial Sequence
  derived and/or modified sequence
atgagcgagatcatcctggagttcgagagcttcgacctggagcccgacagcaacccccccggcggcatgttctgcagatacgacagactggagatctgggacggcttccccgacgtgggcccccacatcggcagatactgcggccagaagacccccggcagaatcagaagcagcagcggcatcctgagcatggtgttctacaccgacagcgccatcgccaaggagggcttcagcgccaactacagcgtgctgcagagcagcgtgagcgaggacttcaagtgcatggaggccctgggcatggagagcggcgagatccacagcgaccagatcaccgccagcagccagtacagcaccaactggagcgccgagagaagcagactgaactaccccgagaacggctggacccccggcgaggacagctacagagagtggatccaggtggacctgggcctgctgagattcgtgaccgccgtgggcacccagggcgccatcagcaaggagaccaagaagaagtactacgtgaagacctacaagatcgacgtgagcagcaacggcgaggactggatcaccatcaaggagggcaacaagcccgtgctgttccagggcaacaccaaccccaccgacgtggtggtggccgtgttccccaagcccctgatcaccagattcgtgagaatcaagcccgccacctgggagaccggcatcagcatgagattcgaggtgtacggctgcaagatcaccgactacccctgcagcggcatgctgggcatggtgagcggcctgatcagcgacagccagatcaccagcagcaaccagggcgacagaaactggatgcccgagaacatcagactggtgaccagcagaagcggctgggccctgccccccgccccccacagctacatcaacgagtggctgcagatcgacctgggcgaggagaagatcgtgagaggcatcatcatccagggcggcaagcacagagagaacaaggtgttcatgagaaagttcaagatcggctacagcaacaacggcagcgactggaagatgatcatggacgacagcaagagaaaggccaagagcttcgagggcaacaacaactacgacacccccgagctgagaaccttccccgccctgagcaccagattcatcagaatctaccccgagagagccacccacggcggcctgggcctgagaatggagctgctgggctgcgaggtggaggcccccaccgccggccccaccacccccaacggcaacctggtggacgagtgcgacgacgaccaggccaactgccacagcggcaccggcggcaccaccgtgctggccaccgagaagcccaccgtgatcgacagcaccatccagagcgagttccccacctacggcttcaactgcgagttcggctggggcagccacaagaccttctgccactgggagcacgacaaccacgtgcagctgaagtggagcgtgctgaccagcaagaccggccccatccaggaccacaccggcgacggcaacttcatctacagccaggccgacgagaaccagaagggcaaggtggccagactggtgagccccgtggtgtacagccagaacagcgcccactgcatgaccttctggtaccacatgagcggcagccacgtgggcaccctgagagtgaagctgagataccagaagcccgaggagtacgaccagctggtgtggatggccatcggccaccagggcgaccactggaaggagggcagagtgctgctgcacaagagcctgaagctgtaccaggtgatcttcgagggcgagatcggcaagggcaacctgggcggcatcgccgtggacgacatcagcatcaacaaccacatcagccaggaggactgcgccaagcccgccgacctggacaagaagaaccccgagatcaagatcgacgagaccggcagcacccccggctacgagggcgagggcgagggcgacaagaacatcagcagaaagcccggcaacgtgctgaagaccctggaccccatcctgatcaccatcatcgccatgagcgccctgggcgtgctgctgggcgccgtgtgcggcgtggtgctgtactgcgcctgctggcacaacggcatgagcgagagaaacctgagcgccctggagaactacaacttcgagctggtggacggcgtgaagctgaagaaggacaagctgaacacccagagcacctacagcgaggcctag

SEQ ID NO: 87682 - DNA, 2208 bp, Artificial Sequence
  derived and/or modified sequence
atgtctgagattatcctagaattcgaatcctttgacctcgagcctgatagtaatcctcccggtggcatgttttgtcgatacgacagacttgagatatgggatggctttccagacgtaggcccccatatcggtagatactgcggtcagaaaactccaggaagaatcagaagtagttcaggtatcctttctatggttttctacaccgattccgcgatcgcgaaagagggtttttcagctaattactcagtcctccagtcctccgtgtctgaggatttcaaatgtatggaggctcttggaatggagagcggggagatccatagcgatcagattacggcaagcagtcagtactccactaattggagcgcggaacggagccgcctaaactaccccgagaatggatggactcctggcgaagattcttatcgagagtggatccaggtcgatctggggctcctgcggtttgttacagccgttggcacccaaggagcaattagcaaagaaactaaaaaaaaatactacgtgaagacttataaaatcgatgtgtcctcaaatggagaagactggattacaattaaggaaggaaataagcctgtcctgtttcaaggcaacacaaaccctacagacgttgtggtggccgtgttccctaagccgcttattacacggttcgtccggattaagcccgcaacttgggaaacaggcatctcaatgagattcgaggtctacggatgcaagattactgattacccatgctctggcatgctgggcatggtgtctgggctgatctctgacagtcagatcactagcagtaaccagggagatagaaattggatgcctgagaacattcgactcgtgacaagtagaagtggttgggcactgccaccggccccgcatagttatatcaacgaatggctgcagattgatctcggcgaggagaagatcgtgagggggatcatcatacaggggggtaaacatagagagaataaagtgttcatgaggaagttcaaaattggatactccaataacggaagtgattggaagatgataatggacgatagcaagcgcaaggctaagagcttcgaaggcaataacaattatgacacccctgagctgcgtacattccccgcacttagcacgagattcatccgcatttaccccgagcgcgctacccatggcggactgggtctgcggatggaactgctcggttgcgaggtagaagcaccaaccgcaggcccaactacacccaatggcaacttagtggacgaatgcgacgacgatcaggccaattgtcattcgggaactggcggaaccacagtgctcgctaccgaaaagcctacagtgatcgatagcactatacagtcagaatttccaacctatggctttaactgtgagtttggctggggcagccacaagacattttgccactgggagcacgacaaccatgtacagctgaagtggtctgtactgacttcaaaaacagggcctatccaggatcacaccggagacggcaatttcatatactcccaggccgacgagaatcaaaaggggaaggtcgctagactcgttagtcccgtggtgtactcccagaactctgctcactgtatgaccttctggtaccatatgtccggcagtcacgttggaacgctccgggtgaaactgaggtatcagaaaccagaggagtacgaccagctcgtatggatggccatcggacatcagggggatcactggaaggaaggccgggtgttactccataagtctctgaagctgtaccaggtaatctttgagggagaaatcggaaaaggcaacttagggggtatcgcggttgacgacattagcatcaataatcatatctcacaagaggactgtgccaaacctgcggacctggacaaaaagaatcctgagatcaaaattgacgaaacgggttctacccctggctacgagggcgagggagaaggcgacaagaacatatccaggaaaccaggcaacgtgttaaaaacgctggacccaatcctgatcaccattattgccatgtccgctctgggggtcctgctgggcgctgtgtgtggcgtggtgctttactgcgcctgttggcataacggtatgagtgaaagaaacttatcagctctagagaattataacttcgaactggtggatggggtgaagttgaaaaaggacaaactgaatacacaatctacgtactcagaagcatag

SEQ ID NO: 87683 - DNA, 2208 bp, Artificial Sequence
  derived and/or modified sequence
atgtctgagatcatcctggagtttgagagctttgacctggagccagacagcaaccccccaggcggcatgttctgccgctatgaccggctggagatctgggatggcttcccagatgtgggcccccacatcggccgctactgcggccagaagaccccaggccgcatccgcagcagcagcggcatcctgtccatggtgttctacacagacagcgccatcgccaaggagggcttcagcgccaactacagcgtgctgcagagctctgtgtctgaggacttcaagtgcatggaggccctgggcatggagagcggggagatccacagcgaccagatcacagccagcagccagtacagcaccaactggagcgctgagaggagccggctgaactacccagaaaatggctggaccccaggagaggacagctaccgggagtggatccaggtggacctgggcctgctgcgctttgtgacagctgtgggcacccagggcgccatcagcaaggagaccaagaagaagtactacgtgaagacctacaagattgatgtgagcagcaatggagaggactggatcaccatcaaggagggcaacaagcctgtgctcttccagggcaacaccaaccccacagatgtggtggtggccgtgttccccaagcccctcatcaccaggtttgtgcgcatcaagccagccacctgggagaccggcatctccatgagatttgaggtgtatggctgcaagatcacagactacccctgcagcggcatgctgggcatggtgtctggcctcatcagtgacagccagatcaccagcagcaaccagggcgacaggaactggatgcctgagaacatccggctggtgaccagccgcagcggctgggccctgcccccagccccccacagctacatcaatgagtggctgcagattgacctgggggaggagaagatcgtgcggggcatcatcatccagggcggcaagcaccgggagaacaaggtgttcatgaggaagttcaagattggctacagcaacaatggaagtgactggaagatgatcatggatgacagcaagaggaaggccaagagctttgagggcaacaacaactatgacaccccagagctgcggaccttccctgccctgagcacccgcttcatccgcatctacccagagcgggccacccacggcggcctgggcctgaggatggagctgctgggctgtgaggtggaggcccccacagctggccccaccaccccaaatggaaacctggtggatgaatgtgatgatgaccaggccaactgccacagcggcactggaggcaccaccgtgctggccacagagaagcccaccgtgattgacagcaccatccagagcgagttccccacctacggcttcaactgtgaatttggctggggcagccacaagaccttctgccactgggagcatgacaaccacgtgcagctgaagtggagcgtgctgaccagcaagacaggccccatccaggaccacactggagatggcaacttcatctacagccaggctgatgagaaccagaagggcaaggtggcccggctggtgtcccctgtggtgtacagccagaacagcgcccactgcatgaccttctggtaccacatgagcggcagccacgtgggcaccctgcgggtgaagctgcgctaccagaagccagaggagtatgaccagctggtgtggatggccatcggccaccagggcgaccactggaaggagggccgggtgctgctgcacaagagcctgaagctgtaccaggtgatctttgaaggagaaattggaaaaggaaacctgggcggcattgctgtggatgacatcagcatcaacaaccacatcagccaggaggactgtgccaagccagctgacctggacaagaagaaccctgagatcaagattgatgaaacaggcagcaccccaggctatgaaggagagggggagggggacaagaacatcagcaggaagccaggaaatgtgctgaagaccctggaccccatcctgatcaccatcatcgccatgtctgccctgggcgtgctgctgggcgctgtgtgtggggtggtgctgtactgtgcctgctggcacaacggcatgtctgaaagaaacctgagcgccctggagaactacaactttgagctggtggatggagtgaagctgaagaaggacaagctgaacacccagagcacctacagcgaggcctag

SEQ ID NO: 87684 - DNA, 2208 bp, Artificial Sequence
  derived and/or modified sequence
atgagcgagatcatcctggagttcgagagcttcgacctggagcccgattcaaatccaccaggaggtatgttttgccggtacgaccggctggagatttgggacgggtttcctgatgtcggaccccatattggaagatactgcggccagaaaacaccaggaaggattcgatctagttcaggcatcttatccatggtcttttacaccgacagcgccatagccaaggagggttttagcgcgaattatagtgtactgcagagctcagtgtccgaggactttaaatgcatggaagctctgggcatggaatccggcgaaatccactccgatcaaatcacagcctctagtcagtactccaccaattggagtgccgagagaagccgactgaattatcccgaaaacggctggacccctggggaggactcctaccgagagtggatccaggtcgatctgggacttcttcgttttgtcactgccgttgggacacagggggctatctcaaaagaaactaaaaagaaatactacgtaaaaacatataaaattgacgtgtccagtaacggcgaggactggatcacaattaaggaggggaacaaacctgtgctcttccagggaaataccaaccccactgatgttgtagtggctgtgttccctaagcccctgataacaaggttcgtgcgaatcaagcccgctacttgggaaaccggcatcagcatgcggtttgaagtctacggatgcaaaattacagattacccctgtagtggtatgctgggtatggttagcggcctcattagcgactctcagataacaagcagcaatcagggagaccggaactggatgcccgaaaacattagactcgtgacctcccggtcaggttgggcccttcccccagctcctcactcatatattaatgagtggcttcagatagacctaggggaggaaaaaattgtgagaggcattatcatccagggaggaaaacacagggaaaacaaagttttcatgcgaaagtttaaaattggttattccaacaacggctccgactggaaaatgattatggatgactcaaaacggaaggctaagagttttgaaggtaacaacaattatgacactcccgaactgaggacattccccgccctgtccacccgattcatccgcatctatcctgaaagggccacccacggagggctgggactgagaatggagctgctgggatgtgaggtggaagctcctaccgccggacccactaccccaaacggcaatttagtcgacgagtgcgacgatgaccaagccaactgccatagcggcacagggggaaccaccgtcctggccactgagaaacccaccgtaattgattccaccatccaatctgagtttcccacttatgggttcaattgcgagtttggatggggatcgcacaaaactttctgtcattgggagcacgataatcacgtacagctaaaatggagcgtcctgacaagtaaaaccggaccgatccaagaccacactggagatggcaactttatatactctcaagcagatgaaaatcaaaaggggaaagtggccagattggtctcacccgtggtctactcacaaaattctgcacactgcatgactttttggtatcatatgagtggttcccacgtggggactctccgcgtgaaactgagatatcagaagcctgaggaatatgatcagctcgtgtggatggcgatcggacaccagggggatcattggaaggagggccgggtgctactccacaagtcactgaaactatatcaagtcatctttgagggagaaataggcaagggcaacctgggaggtattgctgtggatgacatctccattaataatcacatatctcaggaggactgcgctaagcctgccgatcttgataaaaagaaccccgagattaaaatagatgagaccggcagcacacccggatacgaaggagaaggtgaaggcgacaagaatatctcccggaagccagggaatgtgctcaaaacgctggatcccatactaatcaccattatcgcaatgtcagcgctgggagtcttgctgggagccgtttgcggcgttgtgttgtactgcgcttgttggcataatggcatgagcgagcgcaatctgagcgcactcgaaaactacaactttgaactggttgatggagtcaagctgaaaaaggataagcttaatacccaaagtacttattctgaggcatag

SEQ ID NO: 87685 - DNA, 5407 bp, Artificial Sequence
  derived and/or modified sequence
ggaacaagtgtgggaaaagggagaggaagccggagctaaatgacaggatgcaggcgacttgagacacaaaaagagaagcgttcctctcggatccaggcattgcctcgctgctttcttttctccaagacgggctgaggattgtacagctctaggcggagttggggctcttcggatcgcttagattctcctctttgctgcatttccccccacgtcctcgttctcccgcgtctgcctgcggacccggagaagggagaatggagagggggctgccgctcctctgcgccgtgctcgccctcgtcctcgccccggccggcgcttttcgcaacgataaatgtggcgatactataaaaattgaaagccccgggtaccttacatctcctggttatcctcattcttatcacccaagtgaaaaatgcgaatggctgattcaggctccggacccataccagagaattatgatcaacttcaaccctcacttcgatttggaggacagagactgcaagtcctgaatgttcccagaactacacaacacctagtggagtgataaagtcccccggattccctgaaaaatatcccaacagccttgaatgcacttatattgtctttgtgccaaagatgtcagagattatcctggaatttgaaagctttgacctggagcctgactcaaatcctccaggggggatgttctgtcgctacgaccggctagaaatctgggatggattccctgatgttggccctcacattgggcgttactgtggacagaaaacaccaggtcgaatccgatcctcatcgggcattctctccatggttttttacaccgacagcgcgatagcaaaagaaggtttctcagcaaactacagtgtcttgcagagcagtgtctcagaagatttcaaatgtatggaagctctgggcatggaatcaggagaaattcattctgaccagatcacagcttcttcccagtatagcaccaactggtctgcagagcgctcccgcctgaactaccctgagaatgggtggactcccggagaggattcctaccgagagtggatacaggtagacttgggccttctgcgctttgtcacggctgtcgggacacagggcgccatttcaaaagaaaccaagaagaaatattatgtcaagacttacaagatcgacgttagctccaacggggaagactggatcaccataaaagaaggaaacaaacctgttctctttcagggaaacaccaaccccacagatgttgtggttgcagtattccccaaaccactgataactcgatttgtccgaatcaagcctgcaacttgggaaactggcatatctatgagatttgaagtatacggttgcaagataacagattatccttgctctggaatgttgggtatggtgtctggacttatttctgactcccagatcacatcatccaaccaaggggacagaaactggatgcctgaaaacatccgcctggtaaccagtcgctctggctgggcacttccacccgcacctcattcctacatcaatgagtggctccaaatagacctgggggaggagaagatcgtgaggggcatcatcattcagggtgggaagcaccgagagaacaaggtgttcatgaggaagttcaagatcgggtacagcaacaacggctcggactggaagatgatcatggatgacagcaaacgcaaggcgaagtcttttgagggcaacaacaactatgatacacctgagctgcggacttttccagctctctccacgcgattcatcaggatctaccccgagagagccactcatggcggactggggctcagaatggagctgctgggctgtgaagtggaagcccctacagctggaccgaccactcccaacgggaacttggtggatgaatgtgatgacgaccaggccaactgccacagtggaacaggtggcaccactgtgctggccacagaaaagcccacggtcatagacagcaccatacaatcagagtttccaacatatggttttaactgtgaatttggctggggctctcacaagaccttctgccactgggaacatgacaatcacgtgcagctcaagtggagtgtgttgaccagcaagacgggacccattcaggatcacacaggagatggcaacttcatctattcccaagctgacgaaaatcagaagggcaaagtggctcgcctggtgagccctgtggtttattcccagaactctgcccactgcatgaccttctggtatcacatgtctgggtcccacgtcggcacactcagggtcaaactgcgctaccagaagccagaggagtacgatcagctggtctggatggccattggacaccaaggtgaccactggaaggaagggcgtgtcttgctccacaagtctctgaaactttatcaggtgattttcgagggcgaaatcggaaaaggaaaccttggtgggattgctgtggatgacattagtattaataaccacatttcacaagaagattgtgcaaaaccagcagacctggataaaaagaacccagaaattaaaattgatgaaacagggagcacgccaggatacgaaggtgaaggagaaggtgacaagaacatctccaggaagccaggcaatgtgttgaagaccttagaccccatcctcatcaccatcatagccatgagtgccctgggggtcctcctgggggctgtctgtggggtcgtgctgtactgtgcctgttggcataatgggatgtcagaaagaaacttgtctgccctggagaactataactttgaacttgtggatggtgtgaagttgaaaaaagacaaactgaatacacagagtacttattcggaggcatgaaggcagacagagatgaaaagacagtcaaaggacggaagtggaaggacgggagtgagctggggagctgttgatctttcactatacaggctgggaagtgtgttgatgaccactgagccaggcttttctcaggagcttcaatgagtatggccgacagacatggacaaggagctgtgttcaccatcggactcatgtgcagtcagcttttttcctgttggtttcatttgaataatcagatgctggtgttgagaccaagtatgattgacataatcattcatttcgacccctcctgcccctctctctctctctcctctcccctttgtggattctttttggaaactgagcgaaatccaagatgctggcaccaagcgtattccgtgtggccctttggatggacatgctacctgaaacccagtgcccagaatatactagaatcaccgcatttcagtggactcctgaagttgtacttgtgtataattgcccgcgtcgtgcataggcaaagaaggattaggctgttttctttttaaagtactgtagcctcagtactggtgtagtgtgtcagctctgtttacgaagcaatactgtccagttttcttgctgtttttccggtgttgtactaaacctcgtgcttgtgaactccatacagaaaacggtgccatccctgaacacggctggccactgggtatactgctgacaaccgcaacaacaaaaacacaaatccttggcactggctagtctatgtcctctcaagtgcctttttgtttgtactggttcattgtgttacattaacgacccactctgcttcttgctggtgaaagccctgctctttaatcaaactctggtggcccactgactaagaagaaagtttattttcgtgtgagatgccagcccctccgggcaggcaagggctctgaagatttggcaacgtggcttaattgttctgctttttctgtagttcaatttcatgtttcttgacccttttgtataaagctacaatattctctcttattgttctttcatatggaatgtattttcaaatgtaaactctcttctctttctctctcctatctctctgtcttttttctctcttagaattggaggatttgccattgtccaggaaagaaacttgcagctttaacctgctgggaatggcaaacgattttactagactttatgtttaaaaataaataaataagggaaattcctaactttgccctccaaagtctaactttggttttcttgttaactggttaaagtgacagtatcttttttccttatctattctattcaaaatgacctttgatagaaatgttggcatttagtagaaatagtgataagttgaggaaagaaataatacaaattggctttcaagtgagacccaaaggaagaactggataaaatcttccaaatccaaaagcatgagatttttctatccaaatatgcaaaaatgacccaagagaactttcttattttgctactgagtcacacaagggaagtggaaggaagaacagttaatttaagaatgaaactataaatcctgatgcctgggggtcaagtattttaagataagagggggaaaaacacataaagtcaaacaaatgttttaaaaattcataacagcaaccttgaaaaaatagacttaaatgaatgcttctagaaacttccagcggctcacaaagaataagcctgccttagggctggcaacatctaagcctctaacagcacagggaagcaaatatcttaccaggcagcctatgaattaacccaaagaagctttggttggttttggtggatttttatcatgccatgttggacatgagattttttagatcttccttcccacattgctagacgtctcactcaaagacatttgttgggagtcacatttgcatcatagacgagacagtccattcatcttagttaaattggattgagaatgccttttgtttccaggaaaatattgatcaccatgaaagaagaatagttttttgtccccagagacattcatttagttgatataatcctaccagaaggaaagcactaagaaacactcgtttgttgtttttaaaggcaacagacttaaagttgtcctcagccaaggaaaaatgatactgcaactttaaaatttaaagtatcttgcactgataaatatatttaaaaattatatgtttataaagttattaatttgtaaaggcagtgttacaaaatgttcagtttatattgttttagattgttttgtaatttttaaaggtgtaaaataacatattttttctttatggaaatctataaaactttctgtagtaaaatgttttcattttactggtatattattgcttcatgttttgtaccatcataagattttgtgcagattttttttacagaaattattattttctatgacaatatgacacttgtaaattgttgtttcaaaatgaacagcgaagccttaactttaaatgacatttgtattctcagacactgagtagcataaaaaccacatagaactgaactgtaacttaaattccaaactatgactactacattccaaagaaacagttgaattaaacattttcataaaatatcccac

SEQ ID NO: 87686 - DNA, 2208 bp, Artificial Sequence
  derived and/or modified sequence
atgtccgaaatcattctggaattcgaatcatttgatctggagcctgactctaaccccccaggcggaatgttctgtcgatacgatagattagaaatctgggatggatttcccgacgtcgggcctcacattggcagatactgtggtcaaaagacccctgggagaataagatcaagtagtggcattctgagcatggttttctacactgattccgccatagctaaggagggcttctcagcgaactatagcgtgcttcagtcgagcgttagcgaagactttaagtgcatggaggccctcggcatggaatcgggcgagatccatagtgaccaaatcactgccagttctcagtacagcaccaactggtccgccgagcgttctaggctgaactacccggagaacggctggactccgggagaggactcttatagagagtggatacaagttgacttgggactcctgcgctttgttactgctgtgggaacacagggcgctataagcaaagaaactaagaaaaaatattatgtgaagacgtacaagatcgacgtatcatccaacggggaggactggatcacaatcaaggagggcaacaagcccgtcctctttcagggaaatacaaatcctaccgacgtagtggttgcagttttccccaagccgcttattaccagatttgtgagaattaaacctgcaacttgggagactggtatcagcatgcgctttgaagtttatggatgcaagatcacagactatccttgcagcggcatgcttggaatggtctccggactgatctccgatagccagatcacctcctcaaatcagggcgaccggaattggatgcccgaaaatatacggctggtgacaagcagatctggatgggcattgcccccagctcctcattcatatattaacgagtggctgcagatcgatctcggggaggaaaagatcgtgagagggattatcattcagggcggaaaacatagagagaacaaggtgtttatgaggaagttcaagattgggtacagtaacaatggtagtgactggaagatgataatggatgattccaagagaaaagccaagtcattcgagggcaacaataattatgatacacccgaactgcgaacttttcccgctttatcaacccgcttcatccggatctatccggagagggccacgcacggtggtttagggctccgcatggagctgctcggctgtgaagtcgaagcacctacagccggacccacaactccgaacggtaacctagtggacgaatgcgacgatgatcaagccaactgccacagcgggaccggcggtacaactgtgctcgcaactgagaagccaactgtaatcgacagcactattcaatccgagttcccaacctacggtttcaattgtgagttcggatggggcagccacaaaaccttctgtcattgggaacacgacaaccacgtacagctgaaatggagcgtgctcacttcaaaaacagggcctattcaggatcacacaggtgacggaaatttcatttacagtcaggccgacgagaaccagaaggggaaggttgctaggctggtgagtccagtggtctattctcagaattctgctcactgcatgacgttctggtatcacatgagcggcagccacgtcggtaccctgagagtgaaacttaggtaccagaagccagaggagtatgatcagttggtgtggatggctataggtcatcagggcgatcattggaaggaaggtcgagttttgcttcataaaagtttaaagctctaccaggtgatctttgagggagaaattgggaagggaaatctcgggggtatcgctgtggatgatatctccattaacaaccatatatcccaggaggactgcgccaaaccagcggatcttgacaagaaaaaccccgagatcaagattgacgaaactgggagtacaccgggatatgagggagaaggcgaaggagataaaaatattagccgcaaacccggaaatgtgttaaaaaccttagaccccatcttaatcaccattatcgccatgtccgcattaggcgtgcttctgggtgccgtttgcggagtagttctatattgcgcatgttggcataacggcatgtccgaacgtaatctgtctgccttagagaattataactttgagctggtggacggagtgaagctgaagaaagataagctcaatactcagagtacgtacagcgaggcctag

SEQ ID NO: 87687 - protein, 337 aa, Artificial Sequence
  derived and/or modified sequence
MADLDKLNIDSIIQRLLEVRGSKPGKNVQLQENEIRGLCLKSREIFLSQPILLELEAPLKICGDIHGQYYDLLRLFEYGGFPPESNYLFLGDYVDRGKQSLETICLLLAYKIKYPENFFLLRGNHECASINRIYGFYDECKRRYNIKLWKTFTDCFNCLPIAAIVDEKIFCCHGGLSPDLQSMEQIRRIMRPTDVPDQGLLCDLLWSDPDKDVLGWGENDRGVSFTFGAEVVAKFLHKHDLDLICRAHQVVEDGYEFFAKRQLVTLFSAPNYCGEFDNAGAMMSVDETLMCSFQILKPAEKKKPNATRPVTPPRVASGLNPSIQKASNYRNNTVLYE

SEQ ID NO: 87688 - DNA, 1014 bp, Artificial Sequence
  derived and/or modified sequence
atggcagatctcgacaaattaaatattgacagtatcattcagaggctcctagaagtaaggggatctaaacccggaaagaacgtgcagctccaggagaatgaaatcaggggtctgtgtctgaagtctcgcgagatctttttatctcagcctattctgctggaattggaagcccccttgaaaatttgtggtgatatccacggtcaatactatgatctcctaaggctgtttgagtacggggggttcccaccagaatcaaattatctgtttctgggtgactacgtggacagaggcaaacagagtctggagacaatctgcctgctgcttgcctacaaaataaagtaccctgagaactttttcctacttagaggcaatcatgagtgtgcatccatcaaccgcatatacggcttctacgatgagtgcaagaggcggtacaatataaagctgtggaagacttttacagactgtttcaattgcctgcctattgcagccatagtggatgagaagattttttgctgtcatggcggactatcccctgacctgcagtcaatggaacagatacgcagaatcatgcgcccaacggatgtgccggaccagggacttctgtgtgatctgctttggtcggatccggacaaggatgtcctggggtggggggaaaacgatcgaggggtgtctttcaccttcggggccgaggtggttgcaaaatttttgcacaaacacgatctggacttaatctgccgtgcccatcaggtagtggaagatggttatgagttcttcgcaaagcggcaactcgtaacgctcttttccgccccaaactattgcggagaattcgacaacgctggcgctatgatgtcggtagatgagacactgatgtgtagtttccagatcctcaagccagcggaaaagaaaaagcccaacgccaccaggcccgtcactcctcccagagtggcttcgggcttaaatccctcaatccagaaggcctcgaactatcggaataatacagtactctatgagtag

SEQ ID NO: 87689 - DNA, 1014 bp, Artificial Sequence
  derived and/or modified sequence
atggctgacctggacaagctgaacatcgacagcatcatccagaggctgctggaggtgcggggcagcaagccaggcaagaatgtgcagctgcaggagaatgagatccggggcctgtgcctgaagagccgggagatcttcctgagccagcccatcctgctggagctggaggcccccctgaagatctgtggggacatccacggccagtactatgacctgctgcggctgtttgaatatggaggcttccccccagagagcaactacctgttcctgggggactatgtggaccggggcaagcagagcctggagaccatctgcctgctgctggcctacaagatcaagtacccagagaacttcttcctgctgcggggcaaccatgaatgtgccagcatcaaccgcatctacggcttctatgatgagtgcaagaggcgctacaacatcaagctgtggaagaccttcacagactgcttcaactgcctgcccatcgccgccatcgtggatgagaagatcttctgctgccacggcggcctgagcccagacctgcagagcatggagcagatccgccgcatcatgaggcccacagatgtgcctgaccagggcctgctgtgtgacctgctgtggagcgaccctgacaaggatgtgctgggctggggagaaaatgaccggggcgtgtccttcacctttggagctgaggtggtggccaagttcctgcacaagcatgacctggacctgatctgccgggcccaccaggtggtggaggatggctatgagttctttgccaagaggcagctggtgaccctcttcagcgcccccaactactgtggggagtttgacaatgctggggccatgatgtctgtggatgagaccctgatgtgcagcttccagatcctgaagccagctgagaagaagaagcccaatgccaccaggcctgtgaccccaccccgggtggccagcggcctgaaccccagcatccagaaggccagcaactacagaaacaacacagtgctgtatgaatag

SEQ ID NO: 87690 - DNA, 1014 bp, Artificial Sequence
  derived and/or modified sequence
atggccgacctggacaagctgaacatcgacagcatcatccagcggctgctggaggtcagaggcagcaagccagggaaaaacgtacaactacaagagaatgagattaggggactctgtttaaagagtagagagattttcctgagccagcccatcctgctggagcttgaagccccactgaaaatttgtggcgacatccacgggcagtactacgatctactcaggttgtttgaatatggtggcttcccccccgaatctaactatctctttctgggtgactatgttgacaggggcaaacagagcctcgagactatatgtctcctcctagcctataaaattaagtatcccgagaactttttccttcttagaggcaaccacgaatgtgccagtattaaccgcatatacggattttacgacgagtgtaagcgacggtacaatattaagctgtggaaaactttcaccgattgtttcaattgcttgcctatagcagccattgtggacgaaaaaattttctgctgtcatggagggctgagtcccgatctgcagtccatggaacagattagacgaattatgagaccaaccgatgttccagatcagggcctcctttgcgaccttctttggtctgacccagataaggacgtgctcgggtggggggaaaacgatcgtggcgttagcttcacctttggggccgaggttgtagcgaagttcctgcacaagcatgatttagacctgatctgtagagcacaccaagtggtcgaggatggctacgaattctttgccaaaagacagctggtgactctgttttccgcgccaaattactgtggtgaattcgacaatgctggcgcaatgatgtctgtcgatgagacgttaatgtgtagttttcagattctcaagccggccgaaaaaaaaaagccaaacgccactcggcctgtgacccccccccgcgttgctagtggcctgaatccctccatccagaaggcttcaaactatcggaacaatactgtgttatacgaatag

SEQ ID NO: 87691 - DNA, 1014 bp, Artificial Sequence
  derived and/or modified sequence
atggcagatctcgataagctgaacattgactctataatccaacgcctcctcgaagtgcgaggatctaagcccggtaagaatgtgcagctgcaagaaaacgaaattcgaggcctttgtcttaaaagtagagaaatatttctgtctcagccgatcttgttagaactagaagcgcctctgaagatatgcggcgacattcatggacagtactatgacctgctccgactgtttgaatatggtggctttccaccagagtctaactacctgttcctgggggattatgtcgacaggggaaaacagtccttggagacaatctgtctgttattggcttataaaattaagtaccctgaaaacttctttcttctcagggggaaccacgagtgcgcttccattaatcgcatttacggcttttacgatgaatgtaaacgcagatacaatatcaaactctggaaaacgtttacagattgctttaattgcctgccaatcgcagctattgtcgacgagaagatattttgctgtcacggcggactgtcgcccgaccttcagtcaatggaacagatccggagaattatgagaccgacagatgtaccagatcagggccttctgtgcgatctgctgtggtctgatcctgataaagacgtcctgggctggggtgaaaacgatcggggagtctcattcaccttcggagccgaggtggtagccaaattcctgcataaacatgacctggacctgatctgccgtgcccaccaggtggtggaggacgggtatgaattctttgctaaacggcagttggtcacactgttctccgcccctaattattgcggcgaatttgataacgctggggcaatgatgagtgtagatgagacgctgatgtgttcattccagatcttgaagcccgcagaaaaaaagaagcctaacgctacccgaccggtgacgccacccagggtagctagtggtctgaatccatctattcagaaagccagcaactaccggaacaacactgtcttgtatgagtag

SEQ ID NO: 87692 - DNA, 1472 bp, Artificial Sequence
  derived and/or modified sequence
atccgtgcgccgcccgaggctgtctaaggagtcggcggccattttgttcttctcgtggttccagtggggagagaaggaggaagtagggagcggggtggcaggggggggacccgccgcggctgctgccaccgccgccaccaccgcctctgctcgtggcgtgggaaaggaggtgtgagtcccgggcgcgagccggcggcggcgccgctgcgggagggtcggcggtgggaaggcgatggcggatttagataaactcaacatcgacagcattatccaacggctgctggaagtgagagggtccaagcctggtaagaatgtccagcttcaggagaatgaaatcagaggactgtgcttaaagtctcgtgaaatctttctcagtcagcctatcctactagaacttgaagcaccactcaaaatatgtggtgacatccatggacaatactatgatttgctgcgactttttgagtacggtggtttcccaccagaaagcaactacctgtttcttggggactatgtggacaggggaaagcagtcattggagacgatctgcctcttactggcctacaaaataaaatatcctgagaatttttttcttctcagagggaaccatgaatgtgccagcatcaacagaatttatggattttatgatgaatgtaaaagaagatacaacattaaactatggaaaactttcacagactgttttaactgtttaccgatagcagccatcgtggatgagaagatattctgctgtcatggaggtttatcaccagatcttcaatctatggagcagattcggcgaattatgcgaccaactgatgtaccagatcaaggtcttctttgtgatcttttgtggtctgaccccgataaagatgtcttaggctggggtgaaaatgacagaggagtgtccttcacatttggtgcagaagtggttgcaaaatttctccataagcatgatttggatcttatatgtagagcccatcaggtggttgaagatggatatgaattttttgcaaagaggcagttggtcactctgttttctgcgcccaattattgcggagagtttgacaatgcaggtgccatgatgagtgtggatgaaacactaatgtgttcttttcagattttaaagcctgcagagaaaaagaagccaaatgccacgagacctgtaacgcctccaagggttgcatcaggcctgaacccgtccattcagaaagcttcaaattatagaaacaatactgttctatacgagtgaccgattatgctttctttggcctacattctttattctgcggtgaagttgaggcttataagttaaaacaaaggaactaacttactgtccaccagtttatacagaactcacagtacctatgacttttttaaactaagatctgttaaaaaagaaatctgtttcaacagatgaccgtgtacaataccgtgtggtgaaaatgaattcagacttattaaatgatgaacttgtt

SEQ ID NO: 87693 - DNA, 1014 bp, Artificial Sequence
  derived and/or modified sequence
atggccgacctggacaagctgaacatcgacagcatcatccagagactgctggaggtgagaggcagcaagcccggcaagaacgtgcagctgcaggagaacgagatcagaggcctgtgcctgaagagcagagagatcttcctgagccagcccatcctgctggagctggaggcccccctgaagatctgcggcgacatccacggccagtactacgacctgctgagactgttcgagtacggcggcttcccccccgagagcaactacctgttcctgggcgactacgtggacagaggcaagcagagcctggagaccatctgcctgctgctggcctacaagatcaagtaccccgagaacttcttcctgctgagaggcaaccacgagtgcgccagcatcaacagaatctacggcttctacgacgagtgcaagagaagatacaacatcaagctgtggaagaccttcaccgactgcttcaactgcctgcccatcgccgccatcgtggacgagaagatcttctgctgccacggcggcctgagccccgacctgcagagcatggagcagatcagaagaatcatgagacccaccgacgtgcccgaccagggcctgctgtgcgacctgctgtggagcgaccccgacaaggacgtgctgggctggggcgagaacgacagaggcgtgagcttcaccttcggcgccgaggtggtggccaagttcctgcacaagcacgacctggacctgatctgcagagcccaccaggtggtggaggacggctacgagttcttcgccaagagacagctggtgaccctgttcagcgcccccaactactgcggcgagttcgacaacgccggcgccatgatgagcgtggacgagaccctgatgtgcagcttccagatcctgaagcccgccgagaagaagaagcccaacgccaccagacccgtgaccccccccagagtggccagcggcctgaaccccagcatccagaaggccagcaactacagaaacaacaccgtgctgtacgagtag

SEQ ID NO: 87694 - protein, 301 aa, Artificial Sequence
  derived and/or modified sequence
MRVRIGLTLLLCAVLLSLASASSDEEGSQDESLDSKTTLTSDESVKDHTTAGRVVAGQIFLDSEESELESSIQEEEDSLKSQEGESVTEDISFLESPNPENKDYEEPKKVRKPALTAIEGTAHGEPCHFPFLFLDKEYDECTSDGREDGRLWCATTYDYKADEKWGFCETEEEAAKRRQMQEAEMMYQTGMKILNGSNKKSQKREAYRYLQKAASMNHTKALERVSYALLFGDYLPQNIQAAREMFEKLTEEGSPKGQTALGFLYASGLGVNSSQAKALVYYTFGALGGNLIAHMVLVSRL

SEQ ID NO: 87695 - DNA, 906 bp, Artificial Sequence
  derived and/or modified sequence
atgagagtccgaattggcctcacgttgttgctgtgtgctgtgttactgagcctggccagcgcctcttccgacgaggagggaagtcaggatgaatccttggattcgaagaccaccctgacttccgatgagagtgtgaaggaccacacaaccgcgggacgggtggtcgctggacagatatttttggacagtgaggaatccgagttggaatcaagcatccaggaagaggaagatagcctcaagagtcaggagggcgaaagcgtcaccgaggacatctcctttctggaatccccaaatcctgaaaacaaagactacgaagagccgaagaaagtaaggaagccagccttaactgcgattgagggaaccgcacatggggagccatgccacttccccttcctatttctggacaaggagtacgacgaatgcacttcagacggtcgggaagacggacgtctgtggtgtgccacgacctacgactacaaggcagatgagaagtggggattctgcgagacagaagaagaggccgctaagcgaagacagatgcaggaggccgaaatgatgtatcagacaggaatgaagatcctcaacggatcaaataaaaaatctcagaagcgcgaggcctatagatacctgcaaaaagcagctagcatgaaccatactaaagccttggagagagtctcctatgccctgttatttggtgactacctcccccagaacattcaagctgcccgtgaaatgttcgaaaagcttacagaggaaggtagtccaaaaggccaaacggcattaggtttcttatacgccagtggccttggagtaaactcctctcaggcgaaagccttggtctattacacattcggcgccctgggcgggaatttgatcgcacatatggtcctcgtgtcaagactttag

SEQ ID NO: 87696 - DNA, 906 bp, Artificial Sequence
  derived and/or modified sequence
atgagggtgagaattggcctgaccctgctgctgtgtgctgtgctgctgagcctggccagcgccagcagtgatgaggagggcagccaggatgagagcctggacagcaagaccaccctgaccagtgatgagagcgtgaaggaccacaccacagctggccgggtggtggccggccagatcttcctggacagcgaggagagcgagctggagagcagcatccaggaggaggaggacagcctgaagagccaggagggggagagcgtgacagaggacatctccttcctggagagccccaaccctgagaacaaggactatgaggagcccaagaaggtgaggaagccagccctgacagccatcgagggcacagcccatggagagccctgccacttccccttcctgttcctggacaaggagtatgatgagtgcaccagtgatggaagagaagatggccgcctgtggtgtgccaccacctatgactacaaggcagatgagaagtggggcttctgtgaaacagaggaggaggccgccaagaggcggcagatgcaggaggccgagatgatgtaccagacaggcatgaagatcctgaatggcagcaacaagaagagccagaagcgggaggcctaccgctacctgcagaaggccgcctccatgaaccacaccaaggccctggagcgggtgtcctatgccctgctgtttggagactacctgccccagaacatccaggccgcccgggagatgtttgagaagctgacagaggagggcagccccaagggccagacagccctgggcttcctgtatgccagcggcctgggcgtgaacagcagccaggccaaggccctggtgtactacaccttcggggccctgggcggcaacctgattgcccacatggtgctggtgtcccggctgtag

SEQ ID NO: 87697 - DNA, 906 bp, Artificial Sequence
  derived and/or modified sequence
atgcgggtgcggatcggcctgaccctgctgctgtgcgccgtgctgctgtcactggcgtccgccagtagcgatgaggaaggaagtcaggacgaatcccttgacagcaagaccacactcactagcgacgaatctgttaaggatcacaccacagcgggaagggtggtggcaggacaaatttttctggattccgaagaaagtgaattggagagcagtatccaagaagaggaggacagtttgaaatctcaagaaggcgagtcagttactgaagatattagcttccttgaaagtccaaacccggagaacaaggattacgaggagcccaagaaggtccggaagcctgccctcactgctatcgagggcactgcccacggtgaaccgtgtcattttccatttctgtttctggacaaagagtatgacgagtgtaccagcgacggcagagaggatggccgtctgtggtgcgcaaccacctatgattataaagccgatgagaagtggggcttctgcgagactgaggaggaagccgcaaaacggcgacagatgcaggaagcagagatgatgtaccagacgggtatgaaaatcctcaacgggtccaataagaagagccagaaaagggaagcttacaggtatctccaaaaagctgcttcaatgaatcacaccaaagctctggagcgagtatcttacgctctgctcttcggggactatttgccacagaatattcaagccgctcgcgagatgtttgagaagctaaccgaggaggggtcacctaagggtcagacagcactcggtttcttgtacgcgtctgggttgggcgttaactcttcacaagccaaggctctggtctattacacattcggtgctctgggtggtaacctgattgcccacatggttctggtgtcccgcctttag

SEQ ID NO: 87698 - DNA, 906 bp, Artificial Sequence
  derived and/or modified sequence
atgcgcgtcagaatcggacttacactcctgctctgcgccgtactcctgagtttggcgtccgcaagcagtgatgaagaaggatcccaggatgagtcacttgactccaaaactacactcacaagcgatgaatccgttaaggaccataccacagccggaagggtggtggcagggcaaatcttcttggactcagaggaatctgaactggagagttccattcaagaagaggaagacagtttaaagtcccaggaaggggaatcagtgacagaggatatcagcttcctggaatcccctaaccccgaaaataaagactacgaagagcctaaaaaagtgaggaagcccgcactgacagcaattgagggtaccgctcatggggaaccatgtcacttcccttttctgttcctggataaagaatacgatgaatgcacaagtgacggtcgggaggacggacggttatggtgtgcgacgacctatgattataaggcggatgagaaatggggcttttgcgaaaccgaggaggaggctgctaaacggcgtcaaatgcaagaggctgaaatgatgtatcagacgggtatgaagatcctaaacggctccaataagaagtcccagaaacgtgaggcttatcggtacctgcagaaggccgctagcatgaatcacaccaaagctctggagcgcgtttcgtacgctctcctctttggggattaccttccacaaaatattcaggccgctcgtgagatgttcgagaagttaaccgaagagggctcccccaaaggtcaaactgccctcggatttctgtacgcctcaggcctgggcgtcaactccagtcaggcaaaggcgctcgtgtactatacctttggggcactggggggtaatttgatagcgcacatggtgctcgtgtccaggctgtag

SEQ ID NO: 87699 - DNA, 1631 bp, Artificial Sequence
  derived and/or modified sequence
gcagcggcgaggcggcggtggtggctgagtccgtggtggcagaggcgaaggcgacagctctaggggttggcaccggccccgagaggaggatgcgggtccggatagggctgacgctgctgctgtgtgcggtgctgctgagcttggcctcggcgtcctcggatgaagaaggcagccaggatgaatccttagattccaagactactttgacatcagatgagtcagtaaaggaccatactactgcaggcagagtagttgctggtcaaatatttcttgattcagaagaatctgaattagaatcctctattcaagaagaggaagacagcctcaagagccaagagggggaaagtgtcacagaagatatcagctttctagagtctccaaatccagaaaacaaggactatgaagagccaaagaaagtacggaaaccagctttgaccgccattgaaggcacagcacatggggagccctgccacttcccttttcttttcctagataaggagtatgatgaatgtacatcagatgggagggaagatggcagactgtggtgtgctacaacctatgactacaaagcagatgaaaagtggggcttttgtgaaactgaagaagaggctgctaagagacggcagatgcaggaagcagaaatgatgtatcaaactggaatgaaaatccttaatggaagcaataagaaaagccaaaaaagagaagcatatcggtatctccaaaaggcagcaagcatgaaccataccaaagccctggagagagtgtcatatgctcttttatttggtgattacttgccacagaatatccaggcagcgagagagatgtttgagaagctgactgaggaaggctctcccaagggacagactgctcttggctttctgtatgcctctggacttggtgttaattcaagtcaggcaaaggctcttgtatattatacatttggagctcttgggggcaatctaatagcccacatggttttggtaagtagactttagtggaaggctaataatattaacatcagaagaatttgtggtttatagcggccacaactttttcagctttcatgatccagatttgcttgtattaagaccaaatattcagttgaacttccttcaaattcttgttaatggatataacacatggaatctacatgtaaatgaaagttggtggagtccacaatttttctttaaaatgattagtttggctgattgcccctaaaaagagagatctgataaatggctctttttaaattttctctgagttggaattgtcagaatcattttttacattagattatcataattttaaaaatttttctttagtttttcaaaattttgtaaatggtggctatagaaaaacaacatgaaatattatacaatattttgcaacaatgccctaagaattgttaaaattcatggagttatttgtgcagaatgactccagagagctctactttctgttttttacttttcatgattggctgtcttcccatttattctggtcatttattgctagtgacactgtgcctgcttccagtagtctcattttccctattttgctaatttgttactttttctttgctaatttggaagattaactcatttttaataaaattatgtctaagattaaaa

SEQ ID NO: 87700 - DNA, 906 bp, Artificial Sequence
  derived and/or modified sequence
atgagagtgagaatcggcctgaccctgctgctgtgcgccgtgctgctgagcctggccagcgccagcagcgacgaggagggcagccaggacgagagcctggacagcaagaccaccctgaccagcgacgagagcgtgaaggaccacaccaccgccggcagagtggtggccggccagatcttcctggacagcgaggagagcgagctggagagcagcatccaggaggaggaggacagcctgaagagccaggagggcgagagcgtgaccgaggacatcagcttcctggagagccccaaccccgagaacaaggactacgaggagcccaagaaggtgagaaagcccgccctgaccgccatcgagggcaccgcccacggcgagccctgccacttccccttcctgttcctggacaaggagtacgacgagtgcaccagcgacggcagagaggacggcagactgtggtgcgccaccacctacgactacaaggccgacgagaagtggggcttctgcgagaccgaggaggaggccgccaagagaagacagatgcaggaggccgagatgatgtaccagaccggcatgaagatcctgaacggcagcaacaagaagagccagaagagagaggcctacagatacctgcagaaggccgccagcatgaaccacaccaaggccctggagagagtgagctacgccctgctgttcggcgactacctgccccagaacatccaggccgccagagagatgttcgagaagctgaccgaggagggcagccccaagggccagaccgccctgggcttcctgtacgccagcggcctgggcgtgaacagcagccaggccaaggccctggtgtactacaccttcggcgccctgggcggcaacctgatcgcccacatggtgctggtgagcagactgtag

SEQ ID NO: 87701 - protein, 995 aa, Artificial Sequence
  derived and/or modified sequence
MKMADAKQKRNEQLKRWIGSETDLEPPVVKRQKTKVKFDDGAVFLAACSSGDTDEVLKLLHRGADINYANVDGLTALHQACIDDNVDMVKFLVENGANINQPDNEGWIPLHAAASCGYLDIAEFLIGQGAHVGAVNSEGDTPLDIAEEEAMEELLQNEVNRQGVDIEAARKEEERIMLRDARQWLNSGHINDVRHAKSGGTALHVAAAKGYTEVLKLLIQAGYDVNIKDYDGWTPLHAAAHWGKEEACRILVDNLCDMEMVNKVGQTAFDVADEDILGYLEELQKKQNLLHSEKRDKKSPLIESTANMDNNQSQKTFKNKETLIIEPEKNASRIESLEQEKVDEEEEGKKDESSCSSEEDEEDDSESEAETDKTKPLASVTNANTSSTQAAPVAVTTPTVSSGQATPTSPIKKFPTTATKISPKEEERKDESPATWRLGLRKTGSYGALAEITASKEGQKEKDTAGVTRSASSPRLSSSLDNKEKEKDSKGTRLAYVAPTIPRRLASTSDIEEKENRDSSSLRTSSSYTRRKWEDDLKKNSSVNEGSTYHKSCSFGRRQDDLISSSVPSTTSTPTVTSAAGLQKSLLSSTSTTTKITTGSSSAGTQSSTSNRLWAEDSTEKEKDSVPTAVTIPVAPTVVNAAASTTTLTTTTAGTVSSTTEVRERRRSYLTPVRDEESESQRKARSRQARQSRRSTQGVTLTDLQEAEKTIGRSRSTRTREQENEEKEKEEKEKQDKEKQEEKKESETSREDEYKQKYSRTYDETYQRYRPVSTSSSTTPSSSLSTMSSSLYASSQLNRPNSLVGITSAYSRGITKENEREGEKREEEKEGEDKSQPKSIRERRRPREKRRSTGVSFWTQDSDENEQEQQSDTEEGSNKKETQVNTITLYETSSTSAGDRYDSLLGRSGSYSYLEERKPYSSRLEKDDSTDFKKRQERFADRSLLEMEKRERRALERRISEMEEELKMLPDLKADNQRLKDENGALIRVISKLSK

SEQ ID NO: 87702 - protein, 995 aa, Artificial Sequence
  derived and/or modified sequence
MKMADAKQKRNEQLKRWIGSETDLEPPVVKRQKTKVKFDDGAVFLAACSSGDTDEVLKLLHRGADINYANVDGLTALHQACIDDNVDMVKFLVENGANINQPDNEGWIPLHAAASCGYLDIAEFLIGQGAHVGAVNSEGDTPLDIAEEEAMEELLQNEVNRQGVDIEAARKEEERIMLRDARQWLNSGHINDVRHAKSGGTALHVAAAKGYTEVLKLLIQAGYDVNIKDYDGWTPLHAAAHWGKEEACRILVDNLCDMEMVNKVGQTAFDVADEDILGYLEELQKKQNLLHSEKRDKKSPLIESTANMDNNQSQKTFKNKETLIIEPEKNASRIESLEQEKVDEEEEGKKDESSCSSEEDEEDDSESEAETDKTKPLASVTNANTSSTQAAPVAVTTPTVSSGQATPTSPIKKFPTTATKISPKEEERKDESPATWRLGLRKTGSYGALAEITASKEGQKEKDTAGVTRSASSPRLSSSLDNKEKEKDSKGTRLAYVAPTIPRRLASTSDIEEKENRDSSSLRTSSSYTRRKWEDDLKKNSSVNEGSTYHKSCSFGRRQDDLISSSVPSTTSTPTVTSAAGLQKSLLSSTSTTTKITTGSSSAGTQSSTSNRLWAEDSTEKEKDSVPTAVTIPVAPTVVNAAASTTTLTTTTAGTVSSTTEVRERRRSYLTPVRDEESESQRKARSRQARQSRRSTQGVTLTDLQEAEKTIGRSRSTRTREQENEEKEKEEKEKQDKEKQEEKKESETSREDEYKQKYSRTYDETYQRYRPVSTSSSTTPSSSLSTMSSSLYASSQLNRPNSLVGITSAYSRGITKENEREGEKREEEKEGEDKSQPKSIRERRRPREKRRSTGVSFWTQDSDENEQEQQSDTEEGSNKKETQTDSISRYETSSTSAGDRYDSLLGRSGSYSYLEERKPYSSRLEKDDSTDFKKRQERFADRSLLEMEKRERRALERRISEMEEELKMLPDLKADNQRLKDENGALIRVISKLSK

SEQ ID NO: 87703 - DNA, 2988 bp, Artificial Sequence
  derived and/or modified sequence
atgaaaatggccgacgcaaaacagaaaaggaacgagcagctgaaaagatggattgggtctgaaacggaccttgaacctcctgtggtgaaacggcaaaagacaaaggtcaagtttgatgacggcgcagttttcctggctgcctgttccagtggagacactgatgaggtactaaagctgctgcacagaggagccgacattaactatgccaacgtggatggtctgactgcccttcatcaggcttgcatcgatgacaatgtcgacatggtcaaatttttggtggagaacggcgccaatatcaatcagccagacaatgagggttggatccctttacacgcagccgcctcctgcggttatttagacatcgctgaattcctgatcggacaaggagcccatgtcggagcagtgaattcggaaggagacaccccactggacattgcggaagaagaagccatggaggaattacttcagaatgaggtgaataggcaaggcgtggacattgaggctgctcgcaaagaagaggaacgtattatgcttcgtgatgcccgccagtggctgaatagcggacacataaacgacgttaggcacgccaagtccggggggacagctctccacgtggccgccgccaaaggctacactgaggtgctgaaactgctgatacaggccggatacgatgttaatatcaaggactacgatggatggacccccctccacgccgccgcccactggggaaaggaggaagcatgccggatacttgtggacaacctgtgcgacatggagatggtgaacaaggtcggacaaacagcattcgatgttgcggatgaggatatcctgggctacctagaggagctgcagaagaaacagaacctgctgcacagcgagaagcgggataagaagtcccctctgatcgaaagcacagccaatatggacaacaaccagtcacagaagacatttaagaacaaagagactctgattattgagccagagaagaacgctagcagaattgaaagtctggagcaggagaaggtcgatgaagaagaggaagggaaaaaggatgaatcttcctgtagctctgaagaggatgaggaggacgattcagagagcgaagcagaaacggataaaacaaaaccgctggcttccgttaccaatgcaaacacctccagcacccaggccgccccagtggccgtgactactcccaccgtaagctctggacaagcaacacccacaagccccataaaaaaattcccgacaaccgccaccaagataagtcctaaggaagaggaaaggaaagacgagtctcccgcaacgtggagactcggcctacgaaaaaccggatcatatggcgccctcgccgagatcaccgcaagcaaggaaggtcaaaaagagaaagatactgccggcgttacacggagtgccagctcgccacgcctttcctcgtcactggacaataaagagaaagaaaaggacagtaaagggacccgcctggcctatgtcgcgccgactattccaaggaggcttgctagcacatcggatatagaggagaaagagaatcgtgattcctccagtctgcggacctctagctcatacacgcgtcggaagtgggaggacgacctgaaaaaaaactcaagcgttaacgaaggcagcacctaccacaaatcttgcagtttcggccgcagacaggatgatcttatctcgtcttcggtgccatccaccacttctacccccactgtaacctctgcggccggtctacaaaagtcactgctgtcatccactagtacaacaacgaaaattaccactggtagcagttccgcggggacgcagtcctcgaccagcaaccgcctctgggccgaggatagcactgagaaagagaaggacagtgtgccaaccgcggtgacaattcctgtggcccctacagtcgtgaatgcggcggctagtactaccacacttacaactactactgccgggacggtgtccagcacaacggaggttagagaacgtagaagatcatacctgacacccgtgagggatgaggagagtgagagccaacgcaaggcccgctcacggcaggctcgccagtcaagacggagcacgcaaggcgttaccctgaccgacctgcaagaggccgagaaaacaatcggaagatcacggagcaccaggaccagggagcaggagaatgaggagaaagaaaaggaagaaaaggagaaacaggacaaagagaagcaggaggaaaaaaaggagtctgaaacatcacgtgaggacgaatacaagcagaaatatagtcgcacgtacgacgaaacttatcagcgctatcgaccggtcagcacgtcttcttccactacaccgtcctccagcctttctactatgtcatcatccttatacgcttcatcccagctcaatagacccaactctttggtggggatcacttccgcttatagccggggaatcaccaaagagaacgaaagggaaggggagaagcgagaagaggagaaagagggcgaagacaaatcacagcccaagtctattcgagaacgacgtaggccgcgcgaaaagagacggtctacaggtgtctcattctggacccaagactctgacgaaaacgaacaggagcaacagtccgatacggaggaggggagcaataaaaaggagacgcaggtgaacactatcactctctacgaaacaagtagcaccagtgctggcgatcggtacgactccctcttggggagatccggctcatactcctatttagaagagcgtaagccttattcttcaaggttggaaaaagatgatagcacagacttcaaaaagcgacaggagcgattcgcagaccgctctctgctcgaaatggaaaagcgcgaaagacgggcgctggagagacggatctccgaaatggaggaagagctgaagatgctcccagatttgaaggcagacaaccaacgcctcaaagacgagaacggcgctttgatcagagtgatctcaaagctcagcaagtag

SEQ ID NO: 87704 - DNA, 2988 bp, Artificial Sequence
  derived and/or modified sequence
atgaaaatggcggatgccaagcagaaacgtaacgaacagctaaaacgttggataggcagcgaaacagatctggagcctccagtcgtcaagaggcaaaagactaaggttaagtttgacgatggcgccgtgttcctagccgcgtgctcatctggtgacacagatgaggtgttgaaactgttgcatagaggagccgatataaactacgctaatgtggatgggctcacagctctccaccaagcctgcatcgacgataacgtggatatggtcaagttcctcgtggaaaacggggccaacattaatcagccagacaacgagggatggatcccacttcacgcagctgcctcatgtggttacttagatatagcagagttcctgattgggcaaggtgctcacgtgggcgcagtcaactctgagggagatactcccctggatattgctgaagaagaggctatggaagaactgctccagaacgaggttaacaggcagggtgtggatattgaggcagcacgcaaggaggaggagcggatcatgcttagggacgcccgccagtggttaaattctggtcatatcaacgacgttcggcatgcgaaaagcggaggcacagcactccatgtggctgctgccaaggggtacaccgaggtactcaaacttctcattcaagctggctacgatgtgaatatcaaggactacgatgggtggaccccattgcacgcggcagctcactggggaaaggaagaggcctgccgtatcctggtcgacaacttgtgtgatatggagatggtcaataaagtaggacagaccgccttcgacgtggctgatgaggatatcttgggatatttggaggaactgcagaaaaaacagaacttactccactcagaaaagagggataagaagtccccactcatagagagcaccgcgaacatggataacaaccagtctcaaaagacttttaaaaacaaggagacactgattattgaaccagaaaagaacgctagccgtattgagtctctcgaacaggagaaggtcgacgaggaagaggaaggtaagaaagacgaatcctcttgctcctccgaagaagacgaagaggacgactcggaatcagaagccgaaaccgacaagaccaagcctctagcatccgtgacaaatgctaacacctccagtacacaagccgctccagttgctgtgaccacccccaccgtctcctcgggacaggctacacccacttcccctattaagaagtttccgactacagcaacgaaaatttcgcctaaggaggaggagcgcaaggacgagagtcctgcgacctggcgcctcggtttgagaaagacagggtcttatggagccctagcggagatcacagccagcaaagagggtcagaaggaaaaggacacagcgggggtcacaaggtccgccagctctccccggctgagctccagcttggataacaaagagaaagagaaggacagcaaggggacccgtctcgcatacgttgccccaaccattccgagacgcctggccagcacaagcgacattgaagagaaagagaatcgcgatagcagctccctgcggactagctctagctataccagaagaaaatgggaagatgatctaaaaaagaatagcagcgtgaatgaggggagcacataccacaaaagttgcagcttcgggaggcgccaagacgacctaattagctcgagcgtgcctagcacaacgagcacacctaccgtcacaagcgcagctggactgcaaaagtccctgttgagctctacatccaccaccacaaaaatcacaactggatcaagctctgccgggacccagtccagcacctccaaccgactctgggcagaagattctaccgagaaagagaaggatagtgtcccaactgcagtcactattcccgtcgcccccaccgtcgttaacgccgctgcctccaccacaactctgacaacaaccacagctggaacagttagcagtacgacggaagtgagagagagacgaagatcctatctcacacctgtccgcgatgaggagagcgagagccagaggaaggcacggtcccggcaggccaggcagtcaagaagaagcacccagggcgttacgctcacagacctgcaggaggccgagaaaactatcggccgctcccggtcaacaaggaccagggaacaggagaacgaggagaaggagaaagaggaaaaggagaaacaggataaagagaaacaagaggaaaagaaggaatctgaaacaagccgggaggatgagtataaacaaaagtactcccgaacctacgatgagacctatcagagataccggcccgtgtcaacttcatcatctaccactccttccagttccctgagcaccatgtcatctagcctgtatgcctcgtctcagttaaaccgcccgaattccctggtcggaatcacctcggcatacagtcgcggaattactaaggagaatgagagggaaggagaaaaaagagaagaggaaaaagagggagaggataagtcccagcctaaatctatcagggagcgtcgacggccccgggaaaaaaggcgctccactggggtgtcattttggacccaggattcagatgagaatgagcaagaacagcaaagcgacaccgaggaaggatcaaataagaaggaaacccagactgattctattagtcgttatgaaactagctccacgagcgcaggggacaggtatgacagtctcttgggcaggtcagggtcctatagctatctggaagagagaaagccctattcctcaagactggagaaggatgactcaactgactttaaaaaacgccaggagcgattcgcagaccgctccctgctggagatggagaagagggaaagacgggctctggagcgccgtatcagtgaaatggaggaggagctgaaaatgcttccggacctaaaagctgataaccagaggctgaaagatgaaaatggtgccttgattcgcgtcatttccaagctcagcaagtag

SEQ ID NO: 87705 - DNA, 2988 bp, Artificial Sequence
  derived and/or modified sequence
atgaagatggctgatgccaagcagaagagaaatgagcagctgaagcgctggattggcagcgagacagacctggagccccctgtggtgaagaggcagaagaccaaggtgaagtttgatgatggagctgtgttcctggccgcctgcagcagcggggacacagatgaggtgctgaagctgctgcacagaggagctgacatcaactatgccaacgtggatggcctgacagccctgcaccaggcctgcattgatgacaacgtggacatggtgaagttcctggtggagaatggagccaacatcaaccagcctgacaatgaaggctggatccccctgcacgccgccgccagctgtggctacctggacattgctgagttcctgattggccagggcgcccacgtgggcgctgtgaacagcgagggggacacccccctggacattgctgaggaggaggccatggaggagctgctgcagaatgaggtgaaccggcagggcgtggacatcgaggccgccaggaaggaggaggagcgcatcatgctgagagatgcccggcagtggctgaacagcggccacatcaatgatgtgagacatgccaagagcggcggcacagccctgcacgtggccgccgccaagggctacacagaggtgctgaagctgctgatccaggccggctatgatgtgaacatcaaggactatgatggctggacccccctgcacgccgccgcccactggggcaaggaggaggcctgccgcatcctggtggacaacctgtgtgacatggagatggtgaacaaggtgggccagacagcctttgatgtggctgatgaggacatcctgggctacctggaggagctgcagaagaagcagaacctgctgcacagcgagaagagggacaagaagagccccctcatcgagagcacagccaacatggacaacaaccagagccagaagaccttcaagaacaaggagaccctcatcatcgagcctgagaagaatgccagccgcatcgagagcctggagcaggagaaggtggatgaggaggaggagggcaagaaggatgagagcagctgcagcagtgaagaagatgaggaggatgattctgagagcgaggccgagacagacaagaccaagcccctggcctctgtgaccaatgccaacaccagcagcacccaggccgcccctgtggccgtgaccacccccaccgtgagcagcggccaggccacccccaccagccccatcaagaagttccccaccacagccaccaagatcagccccaaggaggaggagaggaaggatgagagccctgccacctggaggctgggcctgaggaagacaggcagctatggagccctggccgagatcacagccagcaaggagggccagaaggagaaggacacagctggggtgaccaggtctgccagcagcccccggctgagcagcagcctggacaacaaggagaaggagaaggacagcaagggcacccggctggcctacgtggcccccaccatcccccggcggctggccagcaccagtgacatcgaggagaaggaaaatagagacagcagcagcctgcggaccagcagcagctacaccaggaggaagtgggaggatgacctgaagaagaacagctctgtgaatgaaggcagcacctaccacaagagctgcagctttggaagacggcaggatgacctgatcagcagctctgtgcccagcaccaccagcacccccaccgtgaccagcgctgctggcctgcagaagagcctgctgagcagcaccagcaccaccaccaagatcaccaccggcagcagcagcgctggcacccagagcagcaccagcaaccggctgtgggccgaggacagcacagagaaggagaaggacagcgtgcccacagctgtgaccatccctgtggcccccaccgtggtgaatgctgctgccagcaccaccaccctgaccaccaccacagctggcaccgtgagcagcaccacagaggtgcgggagcggcggcgcagctacctgacccctgtgagagatgaggagagcgagagccagaggaaggcccggagccggcaggcccggcagagcagaagaagcacccagggcgtgaccctgacagacctgcaggaggccgagaagaccatcggccgcagccgcagcaccaggacccgggagcaggagaatgaggagaaggagaaggaggagaaggagaagcaggacaaggagaagcaggaggagaagaaggagagcgagaccagcagagaagatgagtacaagcagaagtacagcaggacctatgatgagacctaccagcgctacagacctgtgtccaccagcagcagcaccacccccagcagcagcctgagcaccatgagcagcagcctgtatgccagcagccagctgaaccggcccaacagcctggtgggcatcaccagcgcctacagccggggcatcaccaaggaaaatgaaagagaaggagagaagcgggaggaggagaaggagggggaggacaagagccagcccaagagcatccgggagcggcggcggccccgggagaagaggaggagcactggagtgtccttctggacccaggacagtgatgaaaatgagcaggagcagcagagcgacacagaggagggcagcaacaagaaggagacccaggtgaacaccatcaccctgtatgagaccagcagcaccagcgctggggacagatatgacagcctgctgggccgcagcggcagctacagctacctggaggagaggaagccctacagcagccggctggagaaggatgacagcacagacttcaagaagaggcaggagagatttgctgacaggagcctgctggagatggagaagcgggagcggcgggccctggagcggcgcatcagcgagatggaggaggagctgaagatgctgcctgacctgaaggctgacaaccagaggctgaaggatgaaaatggagccctgatccgggtcatcagcaagctgagcaagtag

SEQ ID NO: 87706 - DNA, 2988 bp, Artificial Sequence
  derived and/or modified sequence
atgaagatggctgatgccaagcagaagagaaatgagcagctgaagcgctggattggcagcgagacagacctggagccccctgtggtgaagaggcagaagaccaaggtgaagtttgatgatggagctgtgttcctggccgcctgcagcagcggggacacagatgaggtgctgaagctgctgcacagaggagctgacatcaactatgccaacgtggatggcctgacagccctgcaccaggcctgcattgatgacaacgtggacatggtgaagttcctggtggagaatggagccaacatcaaccagcctgacaatgaaggctggatccccctgcacgccgccgccagctgtggctacctggacattgctgagttcctgattggccagggcgcccacgtgggcgctgtgaacagcgagggggacacccccctggacattgctgaggaggaggccatggaggagctgctgcagaatgaggtgaaccggcagggcgtggacatcgaggccgccaggaaggaggaggagcgcatcatgctgagagatgcccggcagtggctgaacagcggccacatcaatgatgtgagacatgccaagagcggcggcacagccctgcacgtggccgccgccaagggctacacagaggtgctgaagctgctgatccaggccggctatgatgtgaacatcaaggactatgatggctggacccccctgcacgccgccgcccactggggcaaggaggaggcctgccgcatcctggtggacaacctgtgtgacatggagatggtgaacaaggtgggccagacagcctttgatgtggctgatgaggacatcctgggctacctggaggagctgcagaagaagcagaacctgctgcacagcgagaagagggacaagaagagccccctcatcgagagcacagccaacatggacaacaaccagagccagaagaccttcaagaacaaggagaccctcatcatcgagcctgagaagaatgccagccgcatcgagagcctggagcaggagaaggtggatgaggaggaggagggcaagaaggatgagagcagctgcagcagtgaagaagatgaggaggatgattctgagagcgaggccgagacagacaagaccaagcccctggcctctgtgaccaatgccaacaccagcagcacccaggccgcccctgtggccgtgaccacccccaccgtgagcagcggccaggccacccccaccagccccatcaagaagttccccaccacagccaccaagatcagccccaaggaggaggagaggaaggatgagagccctgccacctggaggctgggcctgaggaagacaggcagctatggagccctggccgagatcacagccagcaaggagggccagaaggagaaggacacagctggggtgaccaggtctgccagcagcccccggctgagcagcagcctggacaacaaggagaaggagaaggacagcaagggcacccggctggcctacgtggcccccaccatcccccggcggctggccagcaccagtgacatcgaggagaaggaaaatagagacagcagcagcctgcggaccagcagcagctacaccaggaggaagtgggaggatgacctgaagaagaacagctctgtgaatgaaggcagcacctaccacaagagctgcagctttggaagacggcaggatgacctgatcagcagctctgtgcccagcaccaccagcacccccaccgtgaccagcgctgctggcctgcagaagagcctgctgagcagcaccagcaccaccaccaagatcaccaccggcagcagcagcgctggcacccagagcagcaccagcaaccggctgtgggccgaggacagcacagagaaggagaaggacagcgtgcccacagctgtgaccatccctgtggcccccaccgtggtgaatgctgctgccagcaccaccaccctgaccaccaccacagctggcaccgtgagcagcaccacagaggtgcgggagcggcggcgcagctacctgacccctgtgagagatgaggagagcgagagccagaggaaggcccggagccggcaggcccggcagagcagaagaagcacccagggcgtgaccctgacagacctgcaggaggccgagaagaccatcggccgcagccgcagcaccaggacccgggagcaggagaatgaggagaaggagaaggaggagaaggagaagcaggacaaggagaagcaggaggagaagaaggagagcgagaccagcagagaagatgagtacaagcagaagtacagcaggacctatgatgagacctaccagcgctacagacctgtgtccaccagcagcagcaccacccccagcagcagcctgagcaccatgagcagcagcctgtatgccagcagccagctgaaccggcccaacagcctggtgggcatcaccagcgcctacagccggggcatcaccaaggaaaatgaaagagaaggagagaagcgggaggaggagaaggagggggaggacaagagccagcccaagagcatccgggagcggcggcggccccgggagaagaggaggagcactggagtgtccttctggacccaggacagtgatgaaaatgagcaggagcagcagagcgacacagaggagggcagcaacaagaaggagacccagacagacagcatcagccgctatgagaccagcagcaccagcgctggggacagatatgacagcctgctgggccgcagcggcagctacagctacctggaggagaggaagccctacagcagccggctggagaaggatgacagcacagacttcaagaagaggcaggagagatttgctgacaggagcctgctggagatggagaagcgggagcggcgggccctggagcggcgcatcagcgagatggaggaggagctgaagatgctgcctgacctgaaggctgacaaccagaggctgaaggatgaaaatggagccctgatccgggtcatcagcaagctgagcaagtag

SEQ ID NO: 87707 - DNA, 2988 bp, Artificial Sequence
  derived and/or modified sequence
atgaagatggccgacgccaagcagaagcggaacgagcagctgaagagatggatcggaagcgaaacggacctggaacctcccgtagttaagcgacagaagactaaggtgaagtttgatgacggcgcggtgttcctcgccgcctgcagctccggcgacacggatgaggtgctgaaactgctgcaccgcggcgcagatattaactacgctaatgtggatggactgacagccctgcaccaagcttgtattgatgataatgtggacatggtcaagtttctggtcgagaacggcgccaatataaaccagcctgataacgaaggctggattcccctgcacgcagcagctagctgcggctatcttgatatcgctgaattcctcattggccagggcgcgcacgtgggagcggttaatagtgagggcgatactccccttgatatagcagaagaagaagccatggaggagctgctccagaacgaggtgaatcgccaaggcgttgacatcgaagctgcgaggaaagaggaagagaggattatgcttagggatgcccgacagtggctaaactcggggcatataaacgacgtcagacatgctaagtctggcggaacagctctgcacgtcgctgccgccaagggatacacagaagtcctgaaactgctgatacaagctggctatgacgtgaacatcaaagactatgacggttggacaccactccacgcagctgcacactgggggaaagaagaggcttgccgcattctggttgataatttgtgcgacatggagatggtcaacaaagttggtcagaccgctttcgacgtggcagacgaggatattctcggttatctagaagagctgcaaaagaagcaaaatttgttgcattccgaaaaaagagacaagaagagtccactgattgaatcaaccgctaatatggataacaaccagtcccagaaaacctttaagaacaaagaaactctcattatcgagcccgaaaaaaatgctagcaggattgaatcactcgagcaggagaaagtcgacgaggaggaggagggaaaaaaagacgagagtagctgtagcagcgaagaggacgaagaggatgacagcgaatccgaagcagagaccgacaaaacaaagccccttgccagcgttacgaatgctaacacatcatctactcaggctgctcccgtcgccgtgacgacacccaccgtgtccagcgggcaggccactcctacatcacccataaagaaatttcctactactgccaccaagatttctcctaaggaagaggaaagaaaggacgagtctcccgccacgtggcggctcggactgagaaagacagggtcctatggcgctctggctgaaattactgctagcaaggagggacagaaagagaaggacaccgcaggcgttacccggtctgcttccagccctcgactgtcttcctcgctggacaataaagaaaaggagaaggactccaagggcaccaggctggcgtacgtggctcccaccatccctaggcgactcgcctccacatccgacatagaagagaaagaaaaccgcgattctagcagcctgcgaacaagcagtagctacacacgccggaagtgggaagatgatcttaaaaaaaattcttccgtgaatgagggaagtacctaccacaaaagttgctcattcggcaggcgtcaagacgatctcatctcctcttctgtgcccagtactacaagcacacctacagtgacgagtgcagccggattacagaaatctctgctgagttcaactagcaccactactaagataacgactggatcctcttccgccggcacccagtcatctacttctaaccgcttgtgggccgaggattcaactgagaaagagaaggattcggttcctaccgcggtgaccatcccggtggcgcctaccgtggttaacgcggcggcttctactaccacgttaaccacgactacagccggcacagtatcaagtactaccgaggtgagggaacgcaggcgcagttatctgactcccgttcgggatgaggagtcagaatcacagagaaaagccagatcgcgccaggcgcggcaatccagacggagtacccagggcgttaccctgacagacttacaggaagctgaaaagactattgggagatcccgctcgactaggaccagggaacaagagaacgaggaaaaagagaaagaagagaaggaaaagcaggataaagaaaagcaggaggagaagaaagaatctgagacatccagggaagacgaatacaagcagaaatattcccgcacatacgacgagacttatcagcggtaccggcctgtgtcgactagctcctccaccacccccagctcatctctgtccacgatgtcctcttcattgtacgcaagttcccagctcaacagaccaaacagcttggtcggcataacatccgcctacagtagaggcattacgaaggagaacgaacgcgagggggagaaaagggaggaggagaaggaaggggaggacaagagccagccaaagtcgatccgcgagcgccggcgacccagagaaaagaggcgctccacaggcgtgagcttttggactcaggattccgacgagaacgagcaggagcagcaaagcgatactgaggaggggtcaaacaagaaggaaacccaagtgaacaccatcacactgtacgaaacaagctcaaccagcgccggcgaccgctacgacagccttctcgggaggtctgggtcatattcttacctggaggaacgaaaaccatattcctcccggctggagaaagatgacagtacggactttaagaagcggcaagagcggttcgctgatcgcagcctactggagatggagaaacgtgagcgtagagcacttgagcgtagaatcagcgagatggaggaggagctaaaaatgctgcccgatctgaaagccgacaatcagaggctcaaagatgaaaacggcgctctgatccgtgtgataagcaaactctctaaatag

SEQ ID NO: 87708 - DNA, 2988 bp, Artificial Sequence
  derived and/or modified sequence
atgaagatggccgacgccaagcagaagcggaacgagcagctgaagcggtggattggctcagagactgacctagaaccacccgtcgtaaagcgtcaaaagactaaggttaaatttgatgacggcgctgtctttctcgcagcttgcagtagtggggatacagatgaggtgctgaagctcctgcaccggggggccgacattaattacgctaacgtcgacggattgacagctctccaccaagcctgcatcgacgacaacgtggacatggtgaagttcttggtggagaatggggcaaatattaaccagcccgataacgagggctggattcccctgcatgccgcggcgtcttgtgggtaccttgatatagccgagtttctcataggacaaggggcccacgttggagccgttaatagcgaaggcgacactccactggatattgctgaagaagaagccatggaagagctgcttcagaacgaggtaaataggcagggcgtggacattgaagctgcccgcaaggaagaggaacggatcatgttgagagacgccaggcagtggcttaattccggccacatcaacgatgttcgacacgcaaagagtgggggaaccgccctccatgttgctgcagctaaagggtatactgaagtccttaagttgctgattcaagccggttatgatgtgaatattaaagactacgacggctggacaccactgcacgctgcagctcactggggcaaagaagaagcttgccggattctagtggacaacctgtgcgatatggaaatggtcaataaagttggccaaactgcttttgatgtcgccgatgaggacatcttgggttacctagaggaactccaaaagaagcaaaacctcttacattccgagaaaagggacaagaagagtcctctcattgaatccaccgctaacatggataacaaccagtcccagaaaacttttaagaacaaggaaactctgatcatcgaacctgagaaaaacgctagtaggattgagagcctcgaacaggagaaggtggatgaggaagaagagggcaaaaaagatgagagctcctgctcaagcgaagaggacgaggaggatgacagtgagtccgaggccgagactgataagacaaaacccttagcttcagtcaccaatgctaacacgtccagcacgcaagctgcccccgtggcggtcaccacccctactgtgagttccgggcaggctacacccacaagccccatcaaaaaattccctacaaccgcaactaagatctctccaaaggaggaagagaggaaagacgagagtcccgcaacatggcgtctcggcctgcgaaaaaccggatcctatggagccctagcagagattaccgcatctaaagaaggacagaaagagaaagacaccgccggcgtgacaaggagcgccagcagcccgcgcctgagctcctcactcgataacaaagaaaaagagaaggatagcaagggtaccaggctagcatacgtggctccaacaataccgagaaggcttgcatccacctccgatatcgaagagaaggagaatagggactcaagtagtctgcgtacatcctcatcctacacccggcggaagtgggaagatgatcttaaaaagaacagctccgtgaacgagggtagcacctaccataaatcctgtagctttggacgaagacaggatgatctgatctcctcgtctgtaccgagcaccacttcaaccccaacggtaacaagcgcggccggtctgcagaaaagcctgctgagctctacatccactacaactaagatcacaacaggctcatcttctgcagggacccagtcctctacatccaaccggctctgggctgaagatagtaccgagaaggaaaaggatagtgtgcccacagctgttaccattcctgttgcgccaacagtagttaatgctgcggcatcaactaccacgctgactacaacaacagccggcacagtatcttccaccaccgaagttcgcgaaaggcggcggtcctacctgacccctgtccgggacgaagagagcgaatctcagcgcaaggcacgcagtaggcaggccaggcaatcacgtcgttccactcaaggagtgacgttaacagacctacaagaggctgagaaaactattgggcgaagccggtccacaagaactagagaacaagagaacgaggaaaaggaaaaggaagagaaagagaaacaggacaaagagaagcaggaggagaagaaagaaagcgagacctcccgcgaggatgaatacaaacaaaagtattctcgcacctacgatgaaacctaccagagatatagacccgtgtcaaccagctcttccactactccgtcatctagtctaagcactatgagcagctctctctatgcctcctcccaactcaatcgtcccaatagcctggtgggcatcacctccgcttatagccgggggatcactaaagaaaacgaacgtgaaggagagaagagggaggaggaaaaggaaggagaggacaagtcccaacccaaaagcatcagagagcggcggagacctagggagaagaggcggtccaccggcgttagcttctggactcaggattctgacgaaaacgaacaagagcaacaaagcgacacagaggaaggttcaaacaagaaggaaacgcaaaccgatagcatttcacgatacgagacctcctcaacttctgcaggagacagatacgatagtttactcggaaggtcgggatcttattcatatctcgaagagaggaagccctactcatctaggctggagaaggatgattctacagattttaaaaagaggcaagagcgtttcgcggatcggtcacttttagaaatggagaagagagagaggcgggccctcgagcgtcgtatatctgaaatggaggaagaacttaaaatgcttccagacctcaaggccgataaccagcgccttaaggatgagaacggcgccctgatccgcgtcatttctaagttgtcgaagtag

SEQ ID NO: 87709 - DNA, 2988 bp, Artificial Sequence
  derived and/or modified sequence
atgaagatggccgatgctaaacagaagcggaacgaacaattgaaaaggtggatcggttcagagactgacctcgagcctcccgtggtgaagcggcagaaaaccaaggtcaagtttgatgatggcgctgtattcctcgcagcctgctccagcggagataccgacgaggtactcaaactgctgcatagaggcgcagacataaattacgccaacgtcgacgggctcacggccctgcatcaagcttgcattgacgacaatgtcgacatggttaaatttctcgtcgaaaatggtgccaacatcaatcagcctgataacgagggatggattccactgcatgccgctgctagttgcggatacctggatatcgccgaattcttaatcggtcagggcgcacacgtcggagccgttaattcagaaggtgatacaccccttgatattgccgaggaggaggccatggaagaactcctgcagaacgaagtaaatcgtcagggcgtggatatcgaagccgcacggaaagaggaggagcgaataatgctccgagacgccaggcagtggctcaatagtggtcacatcaacgacgtgcgtcatgcaaaaagcggtggcacggccctgcacgtggccgcagctaagggttacaccgaggtactcaaactgcttatacaggctggatacgacgtcaatattaaagactacgacggatggactccgctccatgctgccgcacactgggggaaggaggaggcctgccgaattcttgtggataacctttgcgacatggaaatggttaacaaggtcggccagactgcgttcgatgtcgcagacgaagatatcctcggctacctagaagaactgcaaaaaaagcaaaatctgcttcactccgagaagagggataagaaaagtcccctgatcgaaagtacggctaacatggacaataatcagtctcaaaagacctttaagaataaggaaaccctgatcattgagccagagaagaatgcttcacgtattgagagcctggagcaagaaaaggttgatgaagaggaggagggcaagaaagatgagtcaagttgctctagcgaagaagacgaggaggacgactcagaatctgaagccgaaaccgataagacaaaaccgctagctagtgttacaaatgcgaacacttccagcacccaggccgcacctgttgccgtgaccactcctactgtgtcctctggccaggccacgcccacgtcccccataaagaagttccctaccactgcgaccaaaatcagccccaaagaggaggagcggaaagacgaaagccctgcgacttggcggcttgggctgcgaaaaacaggatcctacggggctttagcggagattacggctagtaaagaaggccagaaggaaaaggacacggcaggagtcacccgttctgctagcagccctaggctctctagcagtctggataataaagaaaaggagaaggattcaaagggcacgcggctggcttatgtggcaccaaccattccaagacgtcttgcaagtaccagtgatattgaagaaaaggagaatagggactctagctcacttcggactagctcttcctacaccaggcgcaaatgggaggatgacctcaaaaagaactcatccgtgaacgagggatccacttaccataaatcctgctctttcggaaggagacaggacgacttgattagcagcagcgtcccaagcactacttctacacccactgtaacctccgcggctggattgcagaaatcactcctatcgtctacatccaccacaactaagattacaacaggatcctcctcggcaggcacacaatctagcactagcaatcgcctgtgggcggaagatagtacagaaaaagagaaagatagtgtgccaacagcagtgacaattcctgtcgccccaaccgtggtgaacgcagcagcctccactacaacactgaccacgactacagccggtactgtgtccagtaccaccgaggtgagggagcggagacggtcatatttgacgcctgtgcgagatgaagagtcagaatcacagcgcaaagctcgctctcgccaggcccgtcagagtcgaagatcaacgcaaggagtcaccctcactgacctgcaggaggctgagaaaaccatcggccgttcccggtcaacaagaacccgggagcaggagaacgaggagaaggaaaaggaggaaaaggaaaaacaggataaggaaaaacaggaagagaaaaaggagagcgagaccagtagagaggatgaatacaaacaaaaatactctagaacctacgatgagacgtaccagagataccggcctgtaagcacatcatcaagcactactcccagtagttcactttctactatgagtagcagtctgtatgcaagcagccagctcaatcgccctaactcattagtgggtatcacatccgcctacagccgtgggattacaaaagagaatgagcgtgagggcgaaaagagagaggaagagaaagaaggagaggacaaatctcaacctaagtctattagagagcgcagacgacctagagagaaaaggagatccaccggagtgtccttctggactcaggatagcgacgaaaatgagcaggaacagcaatccgacaccgaagagggcagcaataaaaaagagacccaagtgaacaccattacactgtacgaaacgtccagtactagtgcaggcgacaggtatgacagtctgcttggccgatctggcagctacagttatctggaagaaagaaagccttactcttctcgcctcgagaaagacgatagcacagacttcaagaagcgacaggaacgctttgccgatcgctcacttctcgagatggagaagagagagcgacgtgctctggagcgtcggatttccgagatggaagaggagctcaaaatgcttcccgatcttaaagcggataatcagaggctaaaagacgagaacggagctctgattcgtgtaatctccaagttgtccaagtag

SEQ ID NO: 87710 - DNA, 2988 bp, Artificial Sequence
  derived and/or modified sequence
atgaaaatggccgacgccaaacagaagagaaatgagcagcttaagagatggatcgggtccgaaactgatctagagcctccggtggtcaagcgccagaagaccaaagtcaagttcgacgatggtgctgtcttccttgctgcctgctcatccggcgacacagatgaagtccttaagttgcttcaccggggagctgatatcaactatgctaacgtcgacggcctaaccgcgctccaccaagcatgtattgacgataatgtggacatggtgaaatttctagtcgagaacggggcaaatatcaaccagccagacaacgagggctggattccgctgcatgccgctgcctcctgtggctacctagatatcgccgaattcttgatcggccagggggctcatgtgggagcagttaactcagaaggagacaccccactggatatcgccgaggaggaggccatggaggaactccttcagaacgaagttaatagacagggagtggacatcgaggctgctagaaaggaggaagaaagaatcatgcttagggacgccaggcaatggctcaactccggccacatcaatgacgtgcgacatgctaaatcagggggtacggcactgcatgtagccgcagctaaggggtatactgaagtcctgaaacttctaattcaggctggttacgatgttaacatcaaagactatgatgggtggacaccgctccatgccgcagcccattggggcaaagaggaagcttgcagaatcctggtggataacttatgtgatatggaaatggtcaacaaggtcggacagacggctttcgatgtggcagacgaggatatcttggggtacctggaagaattacagaaaaaacagaacctgttgcattcagaaaagcgtgataaaaagagtcctctgatcgagtctacagccaacatggacaacaaccagagccagaagaccttcaagaataaggaaaccctgattattgaacctgaaaaaaatgcctctaggatcgagtcactggaacaggagaaggtagatgaggaggaggaaggcaaaaaggacgagagttcatgctccagtgaggaagacgaggaggatgatagcgagtccgaggcggagactgacaagaccaaacctcttgcctccgtcactaatgctaatacaagcagtacccaggcggctccagtggcggtaaccaccccaaccgtgtcatcaggccaggctaccccaactagcccaattaagaaatttcccaccacagctaccaagattagcccaaaagaggaagagcgcaaggacgaaagccctgccacctggcgcctgggactgcgcaaaacgggttcctacggtgctctggccgagatcaccgctagcaaggaagggcagaaagagaaggacaccgccggagtgacccgctccgccagctctcctagattgtcgagttctctcgacaacaaggagaaggagaaggactccaagggcacaaggctcgcctatgtggctccaaccatccctcggagactcgcctctacatccgacatagaagagaaagaaaaccgcgacagctcttcactacggacctcctcttcctacacaagaaggaagtgggaagatgatcttaagaagaacagttccgttaacgagggctcaacttaccataaaagctgcagcttcggacgcaggcaggatgacttgatctcttcgtccgtgccgtcgaccaccagcactcctactgttaccagtgcggctgggctgcagaagtccctgctttcatccaccagcacaacaaccaaaatcaccacgggcagcagtagcgctggcacacaaagttctacatcgaaccgcttgtgggctgaggattcaactgagaaagaaaaagacagcgtgccaacggccgttaccataccagtggcgccaacagtggtgaatgccgctgcctccaccacaacacttacaaccacaacggccggtacagtgtcttcaactaccgaagtgagagagcgacgcaggtcatacctgaccccagttcgagatgaagagtccgaatcgcagcgcaaagcacgcagtaggcaagctagacaaagccgtcggagtactcaaggagtcacactcaccgatctgcaggaagctgagaaaaccattgggagatcacgttcaactcgcaccagggagcaggagaacgaagagaaggagaaggaagagaaagagaaacaggataaagagaagcaggaagagaagaaggagtcagaaaccagcagggaagatgagtataaacagaaatatagtcggacctacgatgagacctaccaaaggtatcggcctgtgtccacaagctcatctacaacgccaagttcgtccctgtcaacaatgagcagtagcctttacgcgagtagtcagttgaatcgcccaaacagccttgtgggcattaccagtgcatacagccgtggaatcaccaaagaaaatgaaagggaaggcgagaaacgcgaagaggagaaggagggggaggacaagtcgcagccgaagagcataagagagagacgtaggcccagggagaaaaggaggtccacgggggtcagtttttggacacaggacagcgacgaaaatgaacaggaacagcagagcgataccgaagaagggagcaataagaaggagacccagacagacagcatttccaggtacgaaacgtccagcactagcgctggagaccggtatgacagcctcctcggcagaagtggttcatatagctaccttgaagagcgaaaaccttatagcagtagactggaaaaagatgattcgacagacttcaagaagagacaggagcgatttgctgacagaagcttactggaaatggaaaaacgagaaaggcgagcgttggagcgccgaatttccgagatggaagaagaactgaaaatgcttcctgatctcaaggcagacaatcaacgcctgaaagatgaaaatggggcattgattcgagtcatatctaagctgtctaaatag

SEQ ID NO: 87711 - DNA, 5477 bp, Artificial Sequence
  derived and/or modified sequence
agatctgccctgtagagccttgcggttccactgctggcctccggattcccgggagcccccagcccgacaggacaaccttccttccccgcttcctcctttccagacccggcggcaggagaggggatgaagatggcggacgcgaagcagaagcggaacgagcagctgaaacgctggatcggctccgagacggacctcgagcctccggtggtgaagcgccagaagaccaaggtgaagttcgacgatggcgccgtcttcctggctgcttgctccagcggcgacacggacgaggtcctcaagctgctgcaccgcggcgccgacatcaattacgccaatgtggacggactcactgccctgcaccaggcttgcattgatgacaatgttgatatggtgaagtttctggtagaaaatggagcaaatattaatcaacctgataatgaaggctggataccactacatgcagcagcttcctgtggatatcttgatattgcagagtttttgattggtcaaggagcacatgtaggggctgtcaacagtgaaggagatacacctttagatattgcggaggaggaggcaatggaagagctacttcaaaatgaagttaatcggcaaggggttgatatagaagcagctcgaaaggaagaagaacggatcatgcttagagatgccaggcagtggctaaatagtggtcatataaatgatgtccggcatgcaaaatctggaggtacagcacttcacgttgcagctgctaaaggctatacggaagttttaaaacttttaatacaggcaggctatgatgttaatattaaagactatgatggctggacacctcttcatgctgcagctcattggggtaaagaagaagcatgtcgaattttagtggacaatctgtgtgatatggagatggtcaacaaagtgggccaaacagcctttgatgtagcagatgaagacattttaggatatttagaagagttgcaaaagaaacaaaatctgctccatagtgaaaaacgggacaagaaatctccactaattgaatcaacagcaaatatggacaataatcagtcacagaagacctttaaaaacaaagagacgttgattattgaaccagagaaaaatgcatcccgtattgaatctctggaacaagaaaaggttgatgaagaagaagaaggaaagaaggatgagtctagctgctctagtgaagaagatgaggaagatgactcggaatcagaagctgaaacagataagacaaaacccctggcttctgtaactaatgccaacacttctagtacacaagcagctcctgtagctgttacaacacctactgtgtcatcaggtcaagcaacacctacatcacctattaaaaagtttccaaccacagctacaaaaatttctcccaaagaagaagagagaaaagatgagtctcctgcaacttggaggttaggacttagaaagacgggcagctatggtgcacttgctgaaatcacagcatctaaagagggtcagaaagaaaaagatactgcaggtgttacacgttcagcttcaagtcccagactttcctcctctttggataataaagaaaaggagaaagatagtaaaggaactaggcttgcatatgttgcacctacaataccaagacgactagccagtacatctgacattgaagagaaagaaaacagagattcttcaagtttgcgaacaagtagttcatatacaaggagaaaatgggaagatgatcttaaaaaaaatagctcagttaatgaaggatcaacgtatcataaaagttgctcctttggtagaagacaagatgatttgattagttctagtgttccaagcaccacatcaacaccaacagttacctctgcagctgggcttcagaaaagcctgctttccagcacaagcactactacaaagattacaacgggttcttcctcagcaggcacacaaagcagtacctcaaatcgtttgtgggctgaggatagtactgagaaagaaaaggacagtgttcctacggcagtgaccattcctgttgctccaactgttgtaaatgctgcagcttctaccacaaccctgactacaactactgctggcactgtctcctccacaacagaggtcagggagagacgcagatcatacctcactcctgttagggatgaagagtctgaatcccaaagaaaagcaagatctagacaagcaagacaatctagaagatcaacacagggagtgacattaactgatcttcaagaagctgagaaaacaataggaagaagtcgttctacccgaaccagagaacaagaaaatgaagaaaaagaaaaagaggaaaaagagaaacaagataaagagaaacaagaagaaaagaaggagtcagaaacatctagagaagatgaatataaacaaaagtactccagaacgtatgatgagacttaccagcgttataggccagtatcaacttcaagttcaaccactccatcctcttcactttctactatgagcagttcactgtatgcttcaagtcaactaaacaggccaaatagtcttgtaggcataacttctgcttactccagaggaataacaaaagaaaatgaaagagagggagaaaaaagagaagaggagaaagaaggagaagataaatcacaacctaaatcaatcagagaacgacgacgaccaagagagaaaagaagatctacaggagtttcattttggacacaagatagtgatgaaaatgaacaagaacaacaatcagacacagaagagggatccaataagaaagaaactcaggtaaataccattactttatatgaaaccagttctacatcagctggtgatcgatatgattccttgctgggtcgctctggatcatacagttacttagaagaaagaaaaccttacagcagcaggctagaaaaggatgactcaactgactttaaaaagagacaagaaagatttgctgatagatcactgttggaaatggaaaaaagggaacgaagagctctagaaagaagaatatctgaaatggaagaagagctcaaaatgttaccagacctaaaagcagacaaccagaggctaaaggatgaaaatggggccttgatcagagttataagcaaactttccaaataaaaaaaaaaaaagcagcaagtaatggaattgcacatattagtaacccagtggaccataattggcagtcactggaagtctgggaagaatccttggagactgtcattttcggatatcctgccaaatgccctcttatctagaatttttgtttcattttgtttaattttctggggtgtttttgttgttgttggtttgttttttgttttttttttttaatcaagaccattgtttcatgttaatgcagctgctgagaagatttttttttaatgactgagaaaacttgtttacagctccagcatataaggaaagtgttcaaggccagatatgcctcagatatttaaccagtaagccttagttgtacataaatacttttgtgtcaacaaaaactttcagctctcacagaagacagttactcaacattttttgatgtgccacagtttcgagtttttcgatatttaaattttttggcttttcatctaagtttgggtttgtattttttccttctaaactcttcatgtggcagagtcttctatgttttcacagctttttcattacagaaaagaacacttgctcttctgtgattattgtcatgtattaggctaatgctgtgttgtctcccacctggaactgaattgcttggtggaacatatgctttcactgtttgtgcaatatgcatttatttcttatatgaatgctttaaagtcatttgaggttagatcttttaattcctattttctgcttcattggtcactttttttttattgtagtataagatgttagattctgtaatcttcacattcattttagcaggtactgagtgatgctgtatatacaaataagtgtattgttttgatttttagaccaccacatggcatgcttgactatttcttatttcaaatgtctgctaatgcagagtaggctactccatgatagtgttaaaaaacaaaatttgctaacaatgtgatataaagactttaaaagttacacattatgtggagccctatctttacaaaagtttcctactgtaaagtgcttttattttcagttttcacttgatagtactcaaccataattaaagttgcataagataattgctttacatttcacatacctatatttatctgagtgctgtctaaaactgttgtgctagccaaagtaatgctatgaaatcatttgcagaattaacccgtgagttaatgttaaatgcactgttattgccatgtgaagaggcatcgactttgataccaccatcatgttcagaccattttatacatttcagtggcctttttttttttttaaggaaaaaaaagcgcaaaaccaagtacatagtgacgatggcttttatttggacaaatagcttttatattttcattaaaccatgcaaaaaatactacatctttctggcacataactgtctccttaaccactgaacagttcagccatttgaataaattgtacattgtaaagcttatagtagctgattgtattattgattgtattgtatactatattaaatgtgaatttgtaccccttcattttaaaaggtcattgtgttctactgcctattttagattactttggggttggggaagggtgttttggtaagcaggattttaagtcctctctctctcgattggttttatgaagatataaggttatgctcttactaccaagctcaggattcttgattttaaaggtacaaggatagttgtgggagttttatttttggttatatttgaactgtatgaatggtaggtctgaatattgagaatttccatggtcttatgtggaggtaaaatatacagataactgatcagtttgagtgactgcaacatgttctggttgcacaacagttaggcatgctatggtttatatttgtgaagtttggatgcctgtgaagaatgattaaatacatgtttctaatattttagtgttttgtatttaggttatttattctttgtatctaaaactgaacagctactgtgctatattgattttattggtagtattgagcagaccttgtttctgcatgaaactagttgcaaaacccactattttggaaataaaaatgtattttgacatatacaaataaaatgaataaaactattttaaatgtgtgaacttttaatgaagacattttaaattttgttctgagatatttaaattctgcatgggtattttttcactaattgctttacttggataccaatttgaataatttctgaaattgtaatattgtgataatttgcacagcattgtacatgcacatctgtaaatgcaatcttaattgccatatttatgcaatctgtgtaccaatttggacaaatgtttatatattttacataaagctgtctgtatgcagaatctga

SEQ ID NO: 87712 - DNA, 4639 bp, Artificial Sequence
  derived and/or modified sequence
gaggcagatctgccctgtagagccttgcggttccactgctggcctccggattcccgggagcccccagcccgacaggacaaccttccttccccgcttcctcctttccagacccggcggcaggagaggggatgaagatggcggacgcgaagcagaagcggaacgagcagctgaaacgctggatcggctccgagacggacctcgagcctccggtggtgaagcgccagaagaccaaggtgaagttcgacgatggcgccgtcttcctggctgcttgctccagcggcgacacggacgaggtcctcaagctgctgcaccgcggcgccgacatcaattacgccaatgtggacggactcactgccctgcaccaggcttgcattgatgacaatgttgatatggtgaagtttctggtagaaaatggagcaaatattaatcaacctgataatgaaggctggataccactacatgcagcagcttcctgtggatatcttgatattgcagagtttttgattggtcaaggagcacatgtaggggctgtcaacagtgaaggagatacacctttagatattgcggaggaggaggcaatggaagagctacttcaaaatgaagttaatcggcaaggggttgatatagaagcagctcgaaaggaagaagaacggatcatgcttagagatgccaggcagtggctaaatagtggtcatataaatgatgtccggcatgcaaaatctggaggtacagcacttcacgttgcagctgctaaaggctatacggaagttttaaaacttttaatacaggcaggctatgatgttaatattaaagactatgatggctggacacctcttcatgctgcagctcattggggtaaagaagaagcatgtcgaattttagtggacaatctgtgtgatatggagatggtcaacaaagtgggccaaacagcctttgatgtagcagatgaagacattttaggatatttagaagagttgcaaaagaaacaaaatctgctccatagtgaaaaacgggacaagaaatctccactaattgaatcaacagcaaatatggacaataatcagtcacagaagacctttaaaaacaaagagacgttgattattgaaccagagaaaaatgcatcccgtattgaatctctggaacaagaaaaggttgatgaagaagaagaaggaaagaaggatgagtctagctgctctagtgaagaagatgaggaagatgactcggaatcagaagctgaaacagataagacaaaacccctggcttctgtaactaatgccaacacttctagtacacaagcagctcctgtagctgttacaacacctactgtgtcatcaggtcaagcaacacctacatcacctattaaaaagtttccaaccacagctacaaaaatttctcccaaagaagaagagagaaaagatgagtctcctgcaacttggaggttaggacttagaaagacgggcagctatggtgcacttgctgaaatcacagcatctaaagagggtcagaaagaaaaagatactgcaggtgttacacgttcagcttcaagtcccagactttcctcctctttggataataaagaaaaggagaaagatagtaaaggaactaggcttgcatatgttgcacctacaataccaagacgactagccagtacatctgacattgaagagaaagaaaacagagattcttcaagtttgcgaacaagtagttcatatacaaggagaaaatgggaagatgatcttaaaaaaaatagctcagttaatgaaggatcaacgtatcataaaagttgctcctttggtagaagacaagatgatttgattagttctagtgttccaagcaccacatcaacaccaacagttacctctgcagctgggcttcagaaaagcctgctttccagcacaagcactactacaaagattacaacgggttcttcctcagcaggcacacaaagcagtacctcaaatcgtttgtgggctgaggatagtactgagaaagaaaaggacagtgttcctacggcagtgaccattcctgttgctccaactgttgtaaatgctgcagcttctaccacaaccctgactacaactactgctggcactgtctcctccacaacagaggtcagggagagacgcagatcatacctcactcctgttagggatgaagagtctgaatcccaaagaaaagcaagatctagacaagcaagacaatctagaagatcaacacagggagtgacattaactgatcttcaagaagctgagaaaacaataggaagaagtcgttctacccgaaccagagaacaagaaaatgaagaaaaagaaaaagaggaaaaagagaaacaagataaagagaaacaagaagaaaagaaggagtcagaaacatctagagaagatgaatataaacaaaagtactccagaacgtatgatgagacttaccagcgttataggccagtatcaacttcaagttcaaccactccatcctcttcactttctactatgagcagttcactgtatgcttcaagtcaactaaacaggccaaatagtcttgtaggcataacttctgcttactccagaggaataacaaaagaaaatgaaagagagggagaaaaaagagaagaggagaaagaaggagaagataaatcacaacctaaatcaatcagagaacgacgacgaccaagagagaaaagaagatctacaggagtttcattttggacacaagatagtgatgaaaatgaacaagaacaacaatcagacacagaagagggatccaataagaaagaaactcagacggattccatttctagatatgaaaccagttctacatcagctggtgatcgatatgattccttgctgggtcgctctggatcatacagttacttagaagaaagaaaaccttacagcagcaggctagaaaaggatgactcaactgactttaaaaagagacaagaaagatttgctgatagatcactgttggaaatggaaaaaagggaacgaagagctctagaaagaagaatatctgaaatggaagaagagctcaaaatgttaccagacctaaaagcagacaaccagaggctaaaggatgaaaatggggccttgatcagagttataagcaaactttccaaataaaaaaaaaaaaagcagcaagtaatggaattgcacatattagtaacccagtggaccataattggcagtcactggaagtctgggaagaatccttggagactgtcattttcggatatcctgccaaatgccctcttatctagaatttttgtttcattttgtttaattttctggggtgtttttgttgttgttggtttgttttttgttttttttttttaatcaagaccattgtttcatgttaatgcagctgctgagaagatttttttttaatgactgagaaaacttgtttacagctccagcatataaggaaagtgttcaaggccagatatgcctcagatatttaaccagtaagccttagttgtacataaatacttttgtgtcaacaaaaactttcagctctcacagaagacagttactcaacattttttgatgtgccacagtttcgagtttttcgatatttaaattttttggcttttcatctaagtttgggtttgtattttttccttctaaactcttcatgtggcagagtcttctatgttttcacagctttttcattacagaaaagaacacttgctcttctgtgattattgtcatgtattaggctaatgctgtgttgtctcccacctggaactgaattgcttggtggaacatatgctttcactgtttgtgcaatatgcatttatttcttatatgaatgctttaaagtcatttgaggttagatcttttaattcctattttctgcttcattggtcactttttttttattgtagtataagatgttagattctgtaatcttcacattcattttagcaggtactgagtgatgctgtatatacaaataagtgtattgttttgatttttagaccaccacatggcatgcttgactatttcttatttcaaatgtctgctaatgcagagtaggctactccatgatagtgttaaaaaacaaaatttgctaacaatgtgatataaagactttaaaagttacacattatgtggagccctatctttacaaaagtttcctactgtaaagtgcttttattttcagttttcacttgatagtactcaaccataattaaagttgcataagataattgctttacatttcacatacctatatttatctgagtgctgtctaaaactgttgtgctagccaaagtaatgctatgaaatcatttgcagaattaacccgtgagttaatgttaaatgcactgttattgccatgtgaagaggcatcgactttgataccaccatcatgttcagaccattttatacatttcagtggcctttttttttttttaaggaaaaaaaagcgcaaaaccaagtacatagtgacgatggcttttatttggacaaatagcttttatattttcattaaaccatgcaaaaaatactacatctttctggcacataactgtctccttaaccactgaacagttcagccatttgaataaattgtacattgtaaagcttatagtagctgattgtattattgattgtattgtatactatattaaatgtgaatttgt

SEQ ID NO: 87713 - DNA, 2988 bp, Artificial Sequence
  derived and/or modified sequence
atgaagatggccgacgccaagcagaagagaaacgagcagctgaagagatggatcggcagcgagaccgacctggagccccccgtggtgaagagacagaagaccaaggtgaagttcgacgacggcgccgtgttcctggccgcctgcagcagcggcgacaccgacgaggtgctgaagctgctgcacagaggcgccgacatcaactacgccaacgtggacggcctgaccgccctgcaccaggcctgcatcgacgacaacgtggacatggtgaagttcctggtggagaacggcgccaacatcaaccagcccgacaacgagggctggatccccctgcacgccgccgccagctgcggctacctggacatcgccgagttcctgatcggccagggcgcccacgtgggcgccgtgaacagcgagggcgacacccccctggacatcgccgaggaggaggccatggaggagctgctgcagaacgaggtgaacagacagggcgtggacatcgaggccgccagaaaggaggaggagagaatcatgctgagagacgccagacagtggctgaacagcggccacatcaacgacgtgagacacgccaagagcggcggcaccgccctgcacgtggccgccgccaagggctacaccgaggtgctgaagctgctgatccaggccggctacgacgtgaacatcaaggactacgacggctggacccccctgcacgccgccgcccactggggcaaggaggaggcctgcagaatcctggtggacaacctgtgcgacatggagatggtgaacaaggtgggccagaccgccttcgacgtggccgacgaggacatcctgggctacctggaggagctgcagaagaagcagaacctgctgcacagcgagaagagagacaagaagagccccctgatcgagagcaccgccaacatggacaacaaccagagccagaagaccttcaagaacaaggagaccctgatcatcgagcccgagaagaacgccagcagaatcgagagcctggagcaggagaaggtggacgaggaggaggagggcaagaaggacgagagcagctgcagcagcgaggaggacgaggaggacgacagcgagagcgaggccgagaccgacaagaccaagcccctggccagcgtgaccaacgccaacaccagcagcacccaggccgcccccgtggccgtgaccacccccaccgtgagcagcggccaggccacccccaccagccccatcaagaagttccccaccaccgccaccaagatcagccccaaggaggaggagagaaaggacgagagccccgccacctggagactgggcctgagaaagaccggcagctacggcgccctggccgagatcaccgccagcaaggagggccagaaggagaaggacaccgccggcgtgaccagaagcgccagcagccccagactgagcagcagcctggacaacaaggagaaggagaaggacagcaagggcaccagactggcctacgtggcccccaccatccccagaagactggccagcaccagcgacatcgaggagaaggagaacagagacagcagcagcctgagaaccagcagcagctacaccagaagaaagtgggaggacgacctgaagaagaacagcagcgtgaacgagggcagcacctaccacaagagctgcagcttcggcagaagacaggacgacctgatcagcagcagcgtgcccagcaccaccagcacccccaccgtgaccagcgccgccggcctgcagaagagcctgctgagcagcaccagcaccaccaccaagatcaccaccggcagcagcagcgccggcacccagagcagcaccagcaacagactgtgggccgaggacagcaccgagaaggagaaggacagcgtgcccaccgccgtgaccatccccgtggcccccaccgtggtgaacgccgccgccagcaccaccaccctgaccaccaccaccgccggcaccgtgagcagcaccaccgaggtgagagagagaagaagaagctacctgacccccgtgagagacgaggagagcgagagccagagaaaggccagaagcagacaggccagacagagcagaagaagcacccagggcgtgaccctgaccgacctgcaggaggccgagaagaccatcggcagaagcagaagcaccagaaccagagagcaggagaacgaggagaaggagaaggaggagaaggagaagcaggacaaggagaagcaggaggagaagaaggagagcgagaccagcagagaggacgagtacaagcagaagtacagcagaacctacgacgagacctaccagagatacagacccgtgagcaccagcagcagcaccacccccagcagcagcctgagcaccatgagcagcagcctgtacgccagcagccagctgaacagacccaacagcctggtgggcatcaccagcgcctacagcagaggcatcaccaaggagaacgagagagagggcgagaagagagaggaggagaaggagggcgaggacaagagccagcccaagagcatcagagagagaagaagacccagagagaagagaagaagcaccggcgtgagcttctggacccaggacagcgacgagaacgagcaggagcagcagagcgacaccgaggagggcagcaacaagaaggagacccaggtgaacaccatcaccctgtacgagaccagcagcaccagcgccggcgacagatacgacagcctgctgggcagaagcggcagctacagctacctggaggagagaaagccctacagcagcagactggagaaggacgacagcaccgacttcaagaagagacaggagagattcgccgacagaagcctgctggagatggagaagagagagagaagagccctggagagaagaatcagcgagatggaggaggagctgaagatgctgcccgacctgaaggccgacaaccagagactgaaggacgagaacggcgccctgatcagagtgatcagcaagctgagcaagtag

SEQ ID NO: 87714 - DNA, 2988 bp, Artificial Sequence
  derived and/or modified sequence
atgaagatggccgacgccaagcagaagagaaacgagcagctgaagagatggatcggcagcgagaccgacctggagccccccgtggtgaagagacagaagaccaaggtgaagttcgacgacggcgccgtgttcctggccgcctgcagcagcggcgacaccgacgaggtgctgaagctgctgcacagaggcgccgacatcaactacgccaacgtggacggcctgaccgccctgcaccaggcctgcatcgacgacaacgtggacatggtgaagttcctggtggagaacggcgccaacatcaaccagcccgacaacgagggctggatccccctgcacgccgccgccagctgcggctacctggacatcgccgagttcctgatcggccagggcgcccacgtgggcgccgtgaacagcgagggcgacacccccctggacatcgccgaggaggaggccatggaggagctgctgcagaacgaggtgaacagacagggcgtggacatcgaggccgccagaaaggaggaggagagaatcatgctgagagacgccagacagtggctgaacagcggccacatcaacgacgtgagacacgccaagagcggcggcaccgccctgcacgtggccgccgccaagggctacaccgaggtgctgaagctgctgatccaggccggctacgacgtgaacatcaaggactacgacggctggacccccctgcacgccgccgcccactggggcaaggaggaggcctgcagaatcctggtggacaacctgtgcgacatggagatggtgaacaaggtgggccagaccgccttcgacgtggccgacgaggacatcctgggctacctggaggagctgcagaagaagcagaacctgctgcacagcgagaagagagacaagaagagccccctgatcgagagcaccgccaacatggacaacaaccagagccagaagaccttcaagaacaaggagaccctgatcatcgagcccgagaagaacgccagcagaatcgagagcctggagcaggagaaggtggacgaggaggaggagggcaagaaggacgagagcagctgcagcagcgaggaggacgaggaggacgacagcgagagcgaggccgagaccgacaagaccaagcccctggccagcgtgaccaacgccaacaccagcagcacccaggccgcccccgtggccgtgaccacccccaccgtgagcagcggccaggccacccccaccagccccatcaagaagttccccaccaccgccaccaagatcagccccaaggaggaggagagaaaggacgagagccccgccacctggagactgggcctgagaaagaccggcagctacggcgccctggccgagatcaccgccagcaaggagggccagaaggagaaggacaccgccggcgtgaccagaagcgccagcagccccagactgagcagcagcctggacaacaaggagaaggagaaggacagcaagggcaccagactggcctacgtggcccccaccatccccagaagactggccagcaccagcgacatcgaggagaaggagaacagagacagcagcagcctgagaaccagcagcagctacaccagaagaaagtgggaggacgacctgaagaagaacagcagcgtgaacgagggcagcacctaccacaagagctgcagcttcggcagaagacaggacgacctgatcagcagcagcgtgcccagcaccaccagcacccccaccgtgaccagcgccgccggcctgcagaagagcctgctgagcagcaccagcaccaccaccaagatcaccaccggcagcagcagcgccggcacccagagcagcaccagcaacagactgtgggccgaggacagcaccgagaaggagaaggacagcgtgcccaccgccgtgaccatccccgtggcccccaccgtggtgaacgccgccgccagcaccaccaccctgaccaccaccaccgccggcaccgtgagcagcaccaccgaggtgagagagagaagaagaagctacctgacccccgtgagagacgaggagagcgagagccagagaaaggccagaagcagacaggccagacagagcagaagaagcacccagggcgtgaccctgaccgacctgcaggaggccgagaagaccatcggcagaagcagaagcaccagaaccagagagcaggagaacgaggagaaggagaaggaggagaaggagaagcaggacaaggagaagcaggaggagaagaaggagagcgagaccagcagagaggacgagtacaagcagaagtacagcagaacctacgacgagacctaccagagatacagacccgtgagcaccagcagcagcaccacccccagcagcagcctgagcaccatgagcagcagcctgtacgccagcagccagctgaacagacccaacagcctggtgggcatcaccagcgcctacagcagaggcatcaccaaggagaacgagagagagggcgagaagagagaggaggagaaggagggcgaggacaagagccagcccaagagcatcagagagagaagaagacccagagagaagagaagaagcaccggcgtgagcttctggacccaggacagcgacgagaacgagcaggagcagcagagcgacaccgaggagggcagcaacaagaaggagacccagaccgacagcatcagcagatacgagaccagcagcaccagcgccggcgacagatacgacagcctgctgggcagaagcggcagctacagctacctggaggagagaaagccctacagcagcagactggagaaggacgacagcaccgacttcaagaagagacaggagagattcgccgacagaagcctgctggagatggagaagagagagagaagagccctggagagaagaatcagcgagatggaggaggagctgaagatgctgcccgacctgaaggccgacaaccagagactgaaggacgagaacggcgccctgatcagagtgatcagcaagctgagcaagtag

SEQ ID NO: 87715 - protein, 974 aa, Artificial Sequence
  derived and/or modified sequence
MKMADAKQKRNEQLKRWIGSETDLEPPVVKRQKTKVKFDDGAVFLAACSSGDTDEVLKLLHRGADINYANVDGLTALHQACIDDNVDMVKFLVENGANINQPDNEGWIPLHAAASCGYLDIAEFLIGQGAHVGAVNSEGDTPLDIAEEEAMEELLQNEVNRQGVDIEAARKEEERIMLRDARQWLNSGHINDVRHAKSGGTALHVAAAKGYTEVLKLLIQAGYDVNIKDYDGWTPLHAAAHWGKEEACRILVDNLCDMEMVNKVGQTAFDVADEDILGYLEELQKKQNLLHSEKRDKKSPLIESTANMDNNQSQKTFKNKETLIIEPEKNASRIESLEQEKVDEEEEGKKDESSCSSEEDEEDDSESEAETDKTKPLASVTNANTSSTQAAPVAVTTPTVSSGQATPTSPIKKFPTTATKISPKEEERKDESPATWRLGLRKTGSYGALAEITASKEGQKEKDTAGVTRSASSPRLSSSLDNKEKEKDSKGTRLAYVAPTIPRRLASTSDIEEKENRDSSSLRTSSSYTRRKWEDDLKKNSSVNEGSTYHKSTSNRLWAEDSTEKEKDSVPTAVTIPVAPTVVNAAASTTTLTTTTAGTVSSTTEVRERRRSYLTPVRDEESESQRKARSRQARQSRRSTQGVTLTDLQEAEKTIGRSRSTRTREQENEEKEKEEKEKQDKEKQEEKKESETSREDEYKQKYSRTYDETYQRYRPVSTSSSTTPSSSLSTMSSSLYASSQLNRPNSLVGITSAYSRGITKENEREGEKREEEKEGEDKSQPKSIRERRRPREKRRSTGVSFWTQDSDENEQEQQSDTEEGSNKKETQVNTITLYETSSTSAGDRYDSLLGRSGSYSYLEERKPYSSRLEKDDSTDFKKLYEQILAENEKLKAQLHDTNMELTDLKLQLEKATQRQERFADRSLLEMEKRERRALERRISEMEEELKMLPDLKADNQRLKDENGALIRVISKLSK

SEQ ID NO: 87716 - protein, 974 aa, Artificial Sequence
  derived and/or modified sequence
MKMADAKQKRNEQLKRWIGSETDLEPPVVKRQKTKVKFDDGAVFLAACSSGDTDEVLKLLHRGADINYANVDGLTALHQACIDDNVDMVKFLVENGANINQPDNEGWIPLHAAASCGYLDIAEFLIGQGAHVGAVNSEGDTPLDIAEEEAMEELLQNEVNRQGVDIEAARKEEERIMLRDARQWLNSGHINDVRHAKSGGTALHVAAAKGYTEVLKLLIQAGYDVNIKDYDGWTPLHAAAHWGKEEACRILVDNLCDMEMVNKVGQTAFDVADEDILGYLEELQKKQNLLHSEKRDKKSPLIESTANMDNNQSQKTFKNKETLIIEPEKNASRIESLEQEKVDEEEEGKKDESSCSSEEDEEDDSESEAETDKTKPLASVTNANTSSTQAAPVAVTTPTVSSGQATPTSPIKKFPTTATKISPKEEERKDESPATWRLGLRKTGSYGALAEITASKEGQKEKDTAGVTRSASSPRLSSSLDNKEKEKDSKGTRLAYVAPTIPRRLASTSDIEEKENRDSSSLRTSSSYTRRKWEDDLKKNSSVNEGSTYHKSTSNRLWAEDSTEKEKDSVPTAVTIPVAPTVVNAAASTTTLTTTTAGTVSSTTEVRERRRSYLTPVRDEESESQRKARSRQARQSRRSTQGVTLTDLQEAEKTIGRSRSTRTREQENEEKEKEEKEKQDKEKQEEKKESETSREDEYKQKYSRTYDETYQRYRPVSTSSSTTPSSSLSTMSSSLYASSQLNRPNSLVGITSAYSRGITKENEREGEKREEEKEGEDKSQPKSIRERRRPREKRRSTGVSFWTQDSDENEQEQQSDTEEGSNKKETQTDSISRYETSSTSAGDRYDSLLGRSGSYSYLEERKPYSSRLEKDDSTDFKKLYEQILAENEKLKAQLHDTNMELTDLKLQLEKATQRQERFADRSLLEMEKRERRALERRISEMEEELKMLPDLKADNQRLKDENGALIRVISKLSK

SEQ ID NO: 87717 - DNA, 2925 bp, Artificial Sequence
  derived and/or modified sequence
atgaagatggcggacgccaagcagaaacgcaatgagcagctgaagcgctggattggttcagaaactgacctggaaccgcctgtagtgaaacggcagaagactaaggtgaaatttgatgatggagcagtgttcctggctgcctgttcctctggtgacactgatgaagtcttgaagctcctgcatagaggcgccgacatcaactacgccaacgtggacgggctgactgcacttcatcaagcttgcatcgatgacaacgtggatatggtaaagtttctcgtggagaacggggcgaacatcaaccagcccgataacgaaggatggatccccctgcatgctgccgcttcttgtggctatctggacattgccgagtttctgatcggtcagggggcccatgtcggggccgtgaatagcgaaggagatacgcccttggacatcgccgaggaggaagctatggaggagcttttacaaaacgaagttaaccgtcagggcgttgatattgaggccgcacggaaagaggaggaacggataatgctgcgggatgcgagacaatggctgaacagtggtcacattaacgacgtaaggcacgctaaatcaggcggcacagccctgcacgtagcagcagctaaaggctataccgaagtgctgaaactccttattcaggctggatatgatgtgaatattaaagactacgatggttggacgcctttacacgcggctgctcattggggtaaagaagaagcgtgtcgcatcctggtggataacctatgcgatatggaaatggtcaacaaggttgggcagaccgcattcgacgtcgctgatgaagatatactaggctatttggaggagctgcagaagaagcaaaatttgcttcacagcgaaaagagagacaaaaaatcgccccttatcgagagcacagccaatatggacaataaccagtcccaaaagacatttaaaaataaagagaccctaatcattgagcccgaaaagaatgcaagccgtattgaaagtctggaacaggaaaaagtggacgaggaggaagaaggcaaaaaggatgagagttcgtgcagcagcgaggaggacgaagaagatgactccgagagcgaggccgagaccgacaaaaccaaacccctggcaagtgtgaccaatgccaacacaagctctactcaggctgccccagtggccgtaaccacccccacagtgtctagtggccaagcgacgccaacatcaccaattaaaaagttccccaccaccgctaccaagattagccctaaagaagaggaaagaaaggatgagtcccctgccacatggcggttaggtttaagaaaaaccgggtcttacggcgccctggcagagatcactgctagcaaagaaggccaaaaggaaaaagacactgctggcgtaacacgatcggctagctctccccgcctctcctcgagcctggacaacaaggaaaaggaaaaagatagtaagggcacgcgcctggcgtacgtcgcaccaaccataccaagacgcctagccagtacatctgatattgaggaaaaagaaaaccgcgattccagttctctgagaacgtcaagctcctatacccggcgcaagtgggaagacgatcttaaaaaaaattctagcgtgaacgagggttccacctaccacaagagtactagtaatcgcctttgggcagaggattcaacggagaaggagaaagacagtgtcccgactgcagtgacaatcccagtggcacccacggtagtcaacgccgctgcctccactacaacactcaccacaacgactgcaggtacagtgtcgagcactacggaagttagagagaggaggcggtcttaccttactccagtgagggacgaggagtctgagtctcaaagaaaagcacggagccggcaagctcgacagagtcgtcggtccacccagggagtcactttgaccgacttacaggaggctgagaaaacaattggccgtagtaggtcgacacgtacacgagaacaggagaatgaagagaaggaaaaagaggagaaagaaaagcaggacaaggaaaagcaggaggagaagaaagagtcggagactagccgagaggatgaatacaagcaaaaatacagccggacatacgacgagacctatcagaggtaccgaccagtgagtacaagttccagcaccaccccgagctcatctctgagtacgatgagttcttccctttatgcctccagtcaactgaaccgaccaaactccctcgtaggaattactagcgcttatagccgcggaatcacgaaggaaaacgagcgcgagggggaaaaacgagaggaagaaaaagagggagaggacaagtcacagcccaagagcattagagaaagaaggagacctcgggaaaagagacggtccacaggagtgagcttttggacccaggacagcgacgagaatgagcaggaacagcagtcagataccgaggaggggtcgaacaagaaggagacacaggttaacacaattacactgtatgaaacctctagcacctccgccggagatcgctatgatagcctgttggggcgtagcgggtcctattcatacctcgaagaaaggaagccttactcttccagactggaaaaagacgactcaaccgatttcaaaaagctttatgagcaaatactggctgagaacgaaaagctcaaagctcagctgcatgacactaatatggagctgaccgacctgaagctgcaactagagaaagcgactcaaaggcaggagaggttcgctgacagatccttgctcgagatggagaagcgagaacggcgcgctctcgagaggcggatcagtgaaatggaggaggagttaaaaatgctgcctgatctgaaagctgacaatcagcgactgaaggacgagaatggggcccttatcagggtaattagcaagctgtctaaatag

SEQ ID NO: 87718 - DNA, 2925 bp, Artificial Sequence
  derived and/or modified sequence
atgaagatggctgatgccaaacaaaaaaggaatgagcaactcaaacggtggataggatctgagaccgacctggagcccccggtcgtcaagcggcagaaaactaaggtaaagttcgatgatggggccgtgttcctcgctgcttgctcttctggggatactgatgaggtgttgaagttgctacaccggggcgccgatatcaactatgcaaatgtagatggcctgacagctctccaccaggcctgtatcgatgataacgtagatatggtgaaatttttggtggaaaatggagctaatattaatcaaccagataacgaagggtggatcccattgcacgccgcagcatcctgtggttacctagacattgctgaatttctgattggacagggagcacacgtcggagctgtcaacagcgaaggtgacacaccattggacatagcagaggaggaagccatggaggaattgttgcaaaacgaggtcaaccggcaaggtgtggatatcgaagctgcaagaaaggaggaggagcggatcatgctccgtgacgcccggcaatggcttaactccggccacatcaatgatgttagacacgccaagagtggagggacagccctgcacgtggctgcagctaaggggtacacagaggttctgaagcttctgatccaagccggttatgatgtgaacattaaggactatgatgggtggacaccactgcacgctgctgcacattggggcaaggaggaggcctgtaggattttggtggacaatctgtgcgacatggagatggtgaataaagtgggccaaactgcgtttgacgtggcagacgaggatattttgggctacctggaggaacttcagaaaaagcaaaacctcttacattcagaaaagagagacaagaagtcacctctaatcgaaagcaccgcaaatatggacaataatcagagtcaaaagacatttaagaataaagagactctcataatcgaacctgagaagaacgcatcaaggatcgagtctctcgagcaagagaaggtggatgaagaagaagaagggaagaaggatgagtccagctgttcctcagaggaggatgaggaagacgactccgaaagcgaggccgaaacggataagaccaaaccgttggcaagcgtgaccaatgccaatactagtagtacgcaagcagccccggttgctgtgaccacacccaccgtctcaagcggacaggccacaccaacatcccctatcaaaaagtttcccacaactgccaccaagatcagccccaaggaagaggagaggaaggatgagtcccctgccacatggaggctcggacttcgcaagacaggaagttatggagctctagcagagattaccgcgtcaaaggagggacagaaagagaaggataccgcgggggttacacgctcagcctcttctccccgcttatcgagctcgctggacaacaaagagaaagagaaggatagcaagggcacacgactggcctatgttgcccccacgattccgcgccgcctcgcctccacctcagatatcgaggagaaagaaaatagagacagtagctctttaaggacatcttcgagctacactcggaggaagtgggaggatgacctaaaaaaaaactccagcgtgaatgagggctccacctatcacaaaagtacctccaaccggctgtgggctgaagattccacagaaaaggagaaggattcagtacccaccgctgtgacaatacccgttgcacctactgtggtcaacgcagcagcgagtactaccactctgaccaccactaccgccgggaccgtgtcatccactacagaggttcgagaacggaggagatcttacctcacacccgttcgtgacgaggagagcgagagccaaaggaaggcaagatcaagacaggctaggcaaagtagaaggtcaacccagggagttaccctcacagacttgcaggaggccgagaaaacaatcggcagaagtaggtctactcgaactcgcgagcaggaaaatgaggagaaggagaaggaagaaaaggaaaaacaggataaggagaaacaggaggaaaagaaagagtctgaaacgtcacgagaagatgagtataagcagaagtatagcagaacttatgacgagacttaccagaggtatagaccagtatccacaagctcttctactaccccttcttcttctctttcgaccatgtcatcatcgctctatgcctcatcccagctgaatcggccgaatagtctggttggtattacaagcgcttacagtagggggattacgaaggagaacgagcgggaaggggagaaaagggaggaagaaaaagagggggaggataagtcccagcctaaaagcattagagaacggaggcgcccacgggaaaaaaggcggagtactggcgttagtttttggacacaagactcagatgaaaacgaacaggaacaacaatccgacacggaggaagggagcaataaaaaggagacccagaccgatagtatttctaggtatgagacttcctccacctctgctggggaccggtacgactcactgctcgggagatcagggagttattcgtacttagaggaacggaagccctattccagtaggttagaaaaagatgacagcaccgattttaagaagctgtatgagcagatcctagcagagaacgagaagctaaaagcacagctccacgatacaaacatggagcttacggatctgaagctacagctggagaaggccacgcagaggcaggaaaggttcgccgatcggagtcttctcgaaatggagaagcgcgagagacgggctcttgagaggagaatcagtgagatggaggaagagctgaaaatgcttcccgacctgaaggctgataatcagaggttaaaagacgaaaatggggctcttatcagggtgataagcaagcttagcaaatag

SEQ ID NO: 87719 - DNA, 2925 bp, Artificial Sequence
  derived and/or modified sequence
atgaagatggctgatgccaagcagaagagaaatgagcagctgaagcgctggattggcagcgagacagacctggagccccctgtggtgaagaggcagaagaccaaggtgaagtttgatgatggagctgtgttcctggccgcctgcagcagcggggacacagatgaggtgctgaagctgctgcacagaggagctgacatcaactatgccaacgtggatggcctgacagccctgcaccaggcctgcattgatgacaacgtggacatggtgaagttcctggtggagaatggagccaacatcaaccagcctgacaatgaaggctggatccccctgcacgccgccgccagctgtggctacctggacattgctgagttcctgattggccagggcgcccacgtgggcgctgtgaacagcgagggggacacccccctggacattgctgaggaggaggccatggaggagctgctgcagaatgaggtgaaccggcagggcgtggacatcgaggccgccaggaaggaggaggagcgcatcatgctgagagatgcccggcagtggctgaacagcggccacatcaatgatgtgagacatgccaagagcggcggcacagccctgcacgtggccgccgccaagggctacacagaggtgctgaagctgctgatccaggccggctatgatgtgaacatcaaggactatgatggctggacccccctgcacgccgccgcccactggggcaaggaggaggcctgccgcatcctggtggacaacctgtgtgacatggagatggtgaacaaggtgggccagacagcctttgatgtggctgatgaggacatcctgggctacctggaggagctgcagaagaagcagaacctgctgcacagcgagaagagggacaagaagagccccctcatcgagagcacagccaacatggacaacaaccagagccagaagaccttcaagaacaaggagaccctcatcatcgagcctgagaagaatgccagccgcatcgagagcctggagcaggagaaggtggatgaggaggaggagggcaagaaggatgagagcagctgcagcagtgaagaagatgaggaggatgattctgagagcgaggccgagacagacaagaccaagcccctggcctctgtgaccaatgccaacaccagcagcacccaggccgcccctgtggccgtgaccacccccaccgtgagcagcggccaggccacccccaccagccccatcaagaagttccccaccacagccaccaagatcagccccaaggaggaggagaggaaggatgagagccctgccacctggaggctgggcctgaggaagacaggcagctatggagccctggccgagatcacagccagcaaggagggccagaaggagaaggacacagctggggtgaccaggtctgccagcagcccccggctgagcagcagcctggacaacaaggagaaggagaaggacagcaagggcacccggctggcctacgtggcccccaccatcccccggcggctggccagcaccagtgacatcgaggagaaggaaaatagagacagcagcagcctgcggaccagcagcagctacaccaggaggaagtgggaggatgacctgaagaagaacagctctgtgaatgaaggcagcacctaccacaagagcaccagcaaccggctgtgggccgaggacagcacagagaaggagaaggacagcgtgcccacagctgtgaccatccctgtggcccccaccgtggtgaatgctgctgccagcaccaccaccctgaccaccaccacagctggcaccgtgagcagcaccacagaggtgcgggagcggcggcgcagctacctgacccctgtgagagatgaggagagcgagagccagaggaaggcccggagccggcaggcccggcagagcagaagaagcacccagggcgtgaccctgacagacctgcaggaggccgagaagaccatcggccgcagccgcagcaccaggacccgggagcaggagaatgaggagaaggagaaggaggagaaggagaagcaggacaaggagaagcaggaggagaagaaggagagcgagaccagcagagaagatgagtacaagcagaagtacagcaggacctatgatgagacctaccagcgctacagacctgtgtccaccagcagcagcaccacccccagcagcagcctgagcaccatgagcagcagcctgtatgccagcagccagctgaaccggcccaacagcctggtgggcatcaccagcgcctacagccggggcatcaccaaggaaaatgaaagagaaggagagaagcgggaggaggagaaggagggggaggacaagagccagcccaagagcatccgggagcggcggcggccccgggagaagaggaggagcactggagtgtccttctggacccaggacagtgatgaaaatgagcaggagcagcagagcgacacagaggagggcagcaacaagaaggagacccaggtgaacaccatcaccctgtatgagaccagcagcaccagcgctggggacagatatgacagcctgctgggccgcagcggcagctacagctacctggaggagaggaagccctacagcagccggctggagaaggatgacagcacagacttcaagaagctgtatgagcagatcctggccgagaatgagaagctgaaggcccagctgcatgacaccaacatggagctgacagacctgaagctgcagctggagaaggccacccagaggcaggagagatttgctgacaggagcctgctggagatggagaagcgggagcggcgggccctggagcggcgcatcagcgagatggaggaggagctgaagatgctgcctgacctgaaggctgacaaccagaggctgaaggatgaaaatggagccctgatccgggtcatcagcaagctgagcaagtag

SEQ ID NO: 87720 - DNA, 2925 bp, Artificial Sequence
  derived and/or modified sequence
atgaagatggctgatgccaagcagaagagaaatgagcagctgaagcgctggattggcagcgagacagacctggagccccctgtggtgaagaggcagaagaccaaggtgaagtttgatgatggagctgtgttcctggccgcctgcagcagcggggacacagatgaggtgctgaagctgctgcacagaggagctgacatcaactatgccaacgtggatggcctgacagccctgcaccaggcctgcattgatgacaacgtggacatggtgaagttcctggtggagaatggagccaacatcaaccagcctgacaatgaaggctggatccccctgcacgccgccgccagctgtggctacctggacattgctgagttcctgattggccagggcgcccacgtgggcgctgtgaacagcgagggggacacccccctggacattgctgaggaggaggccatggaggagctgctgcagaatgaggtgaaccggcagggcgtggacatcgaggccgccaggaaggaggaggagcgcatcatgctgagagatgcccggcagtggctgaacagcggccacatcaatgatgtgagacatgccaagagcggcggcacagccctgcacgtggccgccgccaagggctacacagaggtgctgaagctgctgatccaggccggctatgatgtgaacatcaaggactatgatggctggacccccctgcacgccgccgcccactggggcaaggaggaggcctgccgcatcctggtggacaacctgtgtgacatggagatggtgaacaaggtgggccagacagcctttgatgtggctgatgaggacatcctgggctacctggaggagctgcagaagaagcagaacctgctgcacagcgagaagagggacaagaagagccccctcatcgagagcacagccaacatggacaacaaccagagccagaagaccttcaagaacaaggagaccctcatcatcgagcctgagaagaatgccagccgcatcgagagcctggagcaggagaaggtggatgaggaggaggagggcaagaaggatgagagcagctgcagcagtgaagaagatgaggaggatgattctgagagcgaggccgagacagacaagaccaagcccctggcctctgtgaccaatgccaacaccagcagcacccaggccgcccctgtggccgtgaccacccccaccgtgagcagcggccaggccacccccaccagccccatcaagaagttccccaccacagccaccaagatcagccccaaggaggaggagaggaaggatgagagccctgccacctggaggctgggcctgaggaagacaggcagctatggagccctggccgagatcacagccagcaaggagggccagaaggagaaggacacagctggggtgaccaggtctgccagcagcccccggctgagcagcagcctggacaacaaggagaaggagaaggacagcaagggcacccggctggcctacgtggcccccaccatcccccggcggctggccagcaccagtgacatcgaggagaaggaaaatagagacagcagcagcctgcggaccagcagcagctacaccaggaggaagtgggaggatgacctgaagaagaacagctctgtgaatgaaggcagcacctaccacaagagcaccagcaaccggctgtgggccgaggacagcacagagaaggagaaggacagcgtgcccacagctgtgaccatccctgtggcccccaccgtggtgaatgctgctgccagcaccaccaccctgaccaccaccacagctggcaccgtgagcagcaccacagaggtgcgggagcggcggcgcagctacctgacccctgtgagagatgaggagagcgagagccagaggaaggcccggagccggcaggcccggcagagcagaagaagcacccagggcgtgaccctgacagacctgcaggaggccgagaagaccatcggccgcagccgcagcaccaggacccgggagcaggagaatgaggagaaggagaaggaggagaaggagaagcaggacaaggagaagcaggaggagaagaaggagagcgagaccagcagagaagatgagtacaagcagaagtacagcaggacctatgatgagacctaccagcgctacagacctgtgtccaccagcagcagcaccacccccagcagcagcctgagcaccatgagcagcagcctgtatgccagcagccagctgaaccggcccaacagcctggtgggcatcaccagcgcctacagccggggcatcaccaaggaaaatgaaagagaaggagagaagcgggaggaggagaaggagggggaggacaagagccagcccaagagcatccgggagcggcggcggccccgggagaagaggaggagcactggagtgtccttctggacccaggacagtgatgaaaatgagcaggagcagcagagcgacacagaggagggcagcaacaagaaggagacccagacagacagcatcagccgctatgagaccagcagcaccagcgctggggacagatatgacagcctgctgggccgcagcggcagctacagctacctggaggagaggaagccctacagcagccggctggagaaggatgacagcacagacttcaagaagctgtatgagcagatcctggccgagaatgagaagctgaaggcccagctgcatgacaccaacatggagctgacagacctgaagctgcagctggagaaggccacccagaggcaggagagatttgctgacaggagcctgctggagatggagaagcgggagcggcgggccctggagcggcgcatcagcgagatggaggaggagctgaagatgctgcctgacctgaaggctgacaaccagaggctgaaggatgaaaatggagccctgatccgggtcatcagcaagctgagcaagtag

SEQ ID NO: 87721 - DNA, 2925 bp, Artificial Sequence
  derived and/or modified sequence
atgaagatggccgacgccaagcagaagcggaacgagcagctgaagcgatggattggatcagagaccgatctcgagccacccgtcgtcaagaggcagaagaccaaggtgaagttcgacgatggggccgtatttctcgctgcttgttcctctggggacaccgacgaggtgttgaaactgttgcaccggggcgctgatattaattacgccaacgtggacggactgaccgccctgcatcaagcgtgcatcgatgataatgttgacatggtcaaatttttggttgagaacggcgcgaacataaaccagcctgataacgaaggctggatccctctgcatgctgccgcctcttgcggatatctggatatcgccgaatttctgatcggacagggggcccacgtgggcgccgtcaatagtgagggagacacacccctcgatatcgcagaagaagaggccatggaagagcttttacagaatgaagtgaatagacagggtgtggatatcgaggccgcacggaaagaagaagagcgcattatgttgcgggacgcccgacagtggctgaacagcgggcatatcaatgatgtccgccacgcaaaatccggcggtaccgcattgcatgtcgctgctgccaagggatacaccgaagtgctgaagctgttgatacaggcgggttatgacgtaaacatcaaggactacgatggctggacacctctgcacgccgcagcacactggggtaaggaggaagcctgtaggattttagtggataatttgtgcgacatggaaatggtgaataaggtcggacagacagctttcgatgttgctgacgaagacattctgggatacctggaggagttacagaaaaaacaaaatctactgcacagcgagaagagagacaagaaatcacccctcattgagtcaaccgctaacatggacaataaccagtctcagaagacattcaaaaacaaggagacgctgataatcgaacccgagaaaaacgcaagccggatcgagagcttggagcaagaaaaagtggatgaggaagaggagggaaagaaggacgagtccagctgctcctccgaagaggacgaggaggatgacagtgaatcagaggcggaaaccgataagactaaacctctggcgagtgtaactaacgctaatacaagttccacccaggccgctcccgtagccgtgaccaccccaactgtctccagcgggcaagctacacccacctcaccaatcaagaagttcccaacaacagccaccaaaatcagtcccaaggaggaggaaaggaaggacgaatcccccgccacctggcgtctaggcctacgaaagacgggcagttatggggcgttagctgagattacagcctctaaggagggccaaaaagagaaggatactgctggggtcaccaggtcggcaagtagccctcgactatcgtcctccctcgacaacaaagaaaaagagaaggactcaaagggcacaagactggcttacgtggcgccaaccatcccccgaagactggcctccacatccgatatagaagaaaaagagaacagggattcatccagcctacggactagctccagttatactagaagaaaatgggaggatgatctcaaaaaaaattcatccgtgaacgaaggtagtacctaccataagtctaccagcaatcgcttgtgggctgaagactcgaccgaaaaggaaaaggatagcgtccctaccgcagtgacgatacctgtggcccctactgttgtcaacgctgcggcctctactacaacattgacaactacgacggccgggactgtctcctcaactactgaagtaagagaacgcaggaggagctacttgacccctgtccgtgatgaggagtctgagtcccagcgcaaagctagatccagacaggcgaggcagagtcggcggtccacccagggcgtgacgctcactgacctccaagaagcggagaaaactatcgggcgaagccggtccactcgaactagagagcaggagaacgaggagaaggagaaggaagagaaggagaaacaagataaggagaaacaggaagaaaagaaagagagcgaaacctctagggaagatgagtataaacagaagtattctaggacatatgacgagacctaccagaggtaccgcccggtgagcacctcctcaagcaccactccaagttcctccctcagtactatgtcctcctcattatacgcttctagccagttgaacaggcctaattctttagtaggtatcaccagcgcttattctagagggattactaaggaaaacgagagagaaggggaaaagcgagaggaagagaaggagggagaggataagagccagcccaaaagtattagagagcgccgtaggcccagggaaaaaaggagatcaactggggtgtcattttggactcaggactcagacgagaatgagcaagagcagcagtcagacaccgaggaggggtcaaataaaaaagaaacccaagtcaacaccatcacactctatgagactagttctacctctgccggcgatcgttatgactcactgctgggaagatccggttcatactcttatctagaggaacggaaaccttactcgagcagactggagaaggacgatagcacagatttcaagaagctgtacgagcagattctggccgaaaacgaaaagctgaaggctcaactgcatgacacaaatatggaactgacagacctcaaacttcagctggagaaagctacgcaaaggcaggaacggttcgctgatcggtctttgctcgagatggaaaagagagaaaggagggcgcttgagcgcaggatctctgagatggaagaagagctgaagatgttgcctgacctcaaggccgacaatcagcggctgaaagacgaaaacggagcactcataagagtgatctccaagttgtcaaaatag

SEQ ID NO: 87722 - DNA, 2925 bp, Artificial Sequence
  derived and/or modified sequence
atgaagatggccgacgccaagcagaagcggaacgagcagctgaagaggtggatcggatctgagacagacctggagccaccggttgtcaagagacagaagaccaaggttaaatttgatgatggagctgtattcctggctgcctgttcctctggcgatacagacgaggtacttaagctcctgcataggggagcagacatcaactacgctaacgttgatggtctgaccgcactccaccaggcctgcatcgacgataatgtggatatggtgaagtttcttgtcgaaaacggagccaacatcaaccaaccagacaacgaaggctggatccccctccacgccgccgccagctgcggatacctagacatcgcggagttccttatcggtcagggagcccacgttggcgccgtcaactccgaaggtgacacccccttggatattgccgaagaggaggccatggaggaactactgcagaacgaggttaaccgccagggtgttgatatagaggctgcccgaaaagaagaagagaggatcatgctcagggatgctcgtcagtggctcaactctgggcacatcaatgacgtcaggcatgctaaaagtggcggcacggctctgcacgtggcagccgctaagggctacacagaggtactgaaacttctaatccaggcaggctacgatgtgaatattaaagattatgacggctggactccactgcacgccgccgcacactggggcaaggaagaagcatgtcgaattctggtcgataatttgtgcgatatggaaatggtgaacaaagtggggcagactgccttcgatgtagccgatgaagacatcctggggtaccttgaggagctgcagaagaagcagaatttactccatagcgagaaaagagataagaagagccccttaatagagtccactgcaaatatggacaataaccagtcacagaaaacatttaagaacaaggagaccctcatcattgaacccgaaaaaaatgcgtcgcggatcgagagcctggaacaggaaaaagtggacgaagaggaagaaggaaagaaagatgagagctcctgtagcagcgaagaggatgaagaggatgactcagagtcagaagccgagactgacaaaacaaaacccctcgcctcagtgacgaacgcaaatacctcatccacacaggccgcgccagttgctgtgacaacccccacagtctccagcggacaggccacacctacgtcgccaataaaaaaattcccgaccaccgcgaccaagatatcgcccaaggaagaggaacggaaggacgaaagtcctgccacatggcgcctcggacttagaaaaaccggatcatacggggccttagccgagataacagcatcaaaggaagggcagaaggagaaagacaccgctggcgtgacaaggtccgcaagttccccacgcctttcttcctccttggacaataaggagaaggagaaagactccaaggggacccgtctcgcctacgtcgcgcctacgattcctcggcggctggccagcaccagcgacattgaggagaaggagaatcgggacagttcttccctcagaactagctcctcttacacaaggaggaaatgggaggacgatctgaagaaaaacagttccgtgaacgagggctccacataccacaagtccacaagcaaccggctgtgggctgaagactcgaccgagaaagaaaaagatagtgtccccactgctgttaccattccagtggcccctacagtggtgaatgccgcagcttcaaccaccacactgacaaccacaactgccgggaccgtgagtagcaccacggaggtgagggagaggaggaggagctacctgactcctgtgagggacgaagagtctgaatcccaacgaaaggcgagatctcggcaggcccgacagtctcgtagatctacacaaggtgtgactctcactgatttgcaggaagctgagaagactataggacggtcaagatccacacgaacgcgggagcaggagaatgaggaaaaagaaaaagaggagaaagagaaacaagacaaagaaaaacaagaagagaagaaagagtctgaaacgtctcgtgaggatgagtacaaacagaagtattcacggacctatgatgagacataccagagataccgtccagtgtccacatcctcctccacaaccccctccagcagcctgtcaacgatgtctagttcactctacgcgagctcccagctcaaccgccccaactcactggtcgggatcacgtcagcatattcgagaggcattacaaaagaaaatgaacgcgagggtgagaagcgcgaggaagaaaaggagggggaagataagtctcagcccaaatccattagggagagaaggagaccgcgggagaagcgaaggtcaacaggggtcagcttctggactcaggatagcgatgagaatgagcaggaacagcagtccgacacggaagaaggaagtaacaaaaaggagactcaaaccgactccatttcacgatatgaaaccagctcaacctccgctggtgaccgctacgactcccttttgggccgctccggaagctatagctacctggaggaacgaaaaccttacagctcacgcttggaaaaagatgacagcaccgatttcaaaaagctatatgagcagatcctggccgaaaatgagaagctgaaggcccagttgcacgatacaaatatggagctgacggatttaaaactgcaattggagaaggccactcaaagacaagaacggtttgctgaccgatctctgctcgaaatggaaaagcgagaaaggagggccctggagcggaggatatcagaaatggaagaggagctgaagatgttgcccgatctgaaggctgataatcagcgcctgaaggacgagaacggcgcactgatcagggtaatttccaagctttcaaagtag

SEQ ID NO: 87723 - DNA, 2925 bp, Artificial Sequence
  derived and/or modified sequence
atgaaaatggctgatgctaaacaaaaaagaaatgagcaactgaaacggtggattggaagcgaaacagaccttgagccgccagtcgttaagcgacaaaagacgaaggtgaagtttgatgacggggcagtgttcctggcagcctgcagcagcggtgacactgatgaagtcctgaagctgttacatcgaggagcggacattaactatgccaacgtggacggcttgaccgctctccaccaggcctgtatcgacgataatgtggatatggtgaagtttctagtggaaaacggagccaatataaatcagcccgacaatgagggatggatccccctgcacgcagccgcttcatgcggatatttagacatagccgagtttctcattggccaaggcgctcacgtcggcgctgtgaattctgaaggggatacgcccctggacattgccgaagaggaagccatggaggagctgctgcaaaacgaagtgaacagacaaggggtggacatcgaagccgcacgaaaggaagaggagcggataatgctccgggacgctcggcagtggctaaactctggccacattaatgacgttcgccacgcgaaatctggcggaactgctctgcacgttgcggcagccaaagggtatactgaggtgttaaaattgctgatccaggccggttatgatgtaaatattaaggactatgatggatggacccccctgcatgctgcagcccattggggaaaggaagaagcctgccggattcttgtggacaacctttgtgatatggagatggtcaacaaggtgggccaaactgcgttcgacgtcgccgacgaagacatactgggttatctggaggagctgcagaagaagcaaaacctgctgcactcagagaaaagagataagaaaagccctctgatcgaatcaactgcgaatatggacaacaatcagagccagaagacattcaagaataaagagactctgatcattgagcctgaaaaaaatgcctcgcgcattgagagcctggaacaggaaaaggttgacgaagaagaggaaggtaaaaaggatgaaagctcttgctcatccgaggaggatgaagaagatgactcggagtcagaagcagaaactgataagaccaagccactcgcctcagtgaccaacgctaacacgtcatctacccaggctgctcccgttgcagttaccactccaacagtttcttcaggccaagcaacacctacctcaccaattaaaaagttcccaacaacagcgacgaagatctcccctaaggaggaggagaggaaagatgaaagtcctgctacttggcgcctgggcttaagaaaaacaggctcttacggagccttggcggagatcaccgcatctaaggaggggcagaaggagaaagacaccgcaggggtcacacgaagcgccagctccccaagactgagttcaagcctggataataaggaaaaagaaaaagacagcaaaggcacacgtcttgcatatgtggcacctaccatccctcggcgtttggcgtctacttctgatatcgaggagaaggagaatagagattccagctctctaaggacttcttcatcctacactcggaggaaatgggaggacgatctgaagaaaaacagtagcgtgaacgagggctccacctatcataagagcacctccaatcggctatgggcagaggactccacagagaaggagaaggatagcgttccgaccgccgttacaatccccgttgcccctactgtggtcaacgccgctgcttccaccacgacgttaaccaccaccacagctggtactgtgagtagtaccacagaagtgcgggagaggcgccgttcttacctgactccagtgagggacgaagagagcgaaagtcagaggaaggcccgttcacggcaggccaggcaatcccggagatcgacgcaaggtgtgacattgaccgatctgcaggaagctgaaaaaacaattggacggtccaggtcaacgcgcacacgcgaacaagagaatgaggaaaaggaaaaagaagaaaaggagaagcaggacaaggaaaaacaggaggagaaaaaagagtccgaaacttctcgggaagacgagtataagcagaagtactcccgcacttatgatgaaacataccagcgatacagacctgtttcaacaagtagctcgacgacacctagttccagtctttccacaatgagctcgtcattgtatgctagttcgcagctaaaccgacccaattctctagtggggatcacttccgcctacagccgcggaattacaaaggagaacgaaagagagggcgaaaaacgggaggaggagaaggaaggcgaggataaatcccagcctaagtcaattcgtgagaggcgcaggcctcgggaaaaaaggcggagtacaggagtgtcattttggacccaggactccgacgaaaatgagcaggaacagcagagcgatacggaagagggtagcaacaaaaaggagacccaggtcaataccattaccttgtatgaaactagttcaacctccgctggagacagatacgattctctcctggggaggagtggcagctacagttatttagaggaacgtaaaccatattcctctcgcctggagaaagatgattcaactgactttaaaaagctctacgaacagattttggcagaaaatgaaaaactgaaagcccaacttcacgataccaatatggaacttactgacctcaagctgcaacttgagaaggccacccaacgacaggaacgctttgccgataggagtctcctagagatggagaagcgcgaacgtcgcgcactggagcgcaggatatctgagatggaagaagagttaaaaatgctgcctgatcttaaagctgacaatcaaagactcaaggatgaaaatggggcattaattagagtgataagcaagctttctaaatag

SEQ ID NO: 87724 - DNA, 2925 bp, Artificial Sequence
  derived and/or modified sequence
atgaagatggcagatgccaaacaaaaacggaacgagcagttgaagagatggatcggcagcgagaccgacctggagccccctgtggtcaaaaggcagaaaacaaaggtgaagttcgacgatggtgcagtgttcctggccgcatgctcgtccggagacacagacgaggtgctcaaactgctccaccggggtgcagacatcaactatgccaacgttgatggccttaccgctctgcatcaggcctgtatcgatgataatgtggacatggttaagtttctggttgagaatggcgctaacatcaaccaacctgacaacgaggggtggatcccactccatgcggcagcctcctgtggatacctggatatagctgaattcttaattggccagggcgcacacgttggggcagtgaactctgagggagatacccctctggatattgccgaggaggaagctatggaagaactgttgcagaacgaagtaaataggcagggcgtggacatagaagctgctcgtaaggaggaggaacggatcatgcttcgggatgccaggcagtggctcaatagcggtcacattaacgacgtccgccatgccaagtctggaggaaccgcactccacgtggctgccgctaaaggatatacggaagtgcttaagctgctaatccaggcagggtacgacgtcaatataaaagactacgacgggtggaccccccttcatgccgctgcccattggggtaaggaagaggcctgtcggatcttagtagataacttgtgtgatatggaaatggtcaacaaggtaggccagactgcctttgacgtcgctgacgaagacattctgggctatctggaggagctgcagaaaaagcagaacctccttcacagcgagaagcgcgataaaaaaagtccactgattgagagcacggctaacatggataataatcagtcccaaaagacattcaaaaacaaagagacattaatcattgagcccgaaaaaaacgcaagccgtatcgagtctctggagcaggagaaagtagacgaagaagaggaaggcaagaaggacgaatccagttgctcttcagaagaggatgaagaagacgattcagagtctgaagcagaaactgataaaaccaaacctctggcttccgtaacaaacgccaacacaagttcaactcaggccgctccagttgccgtgactactccaacagtttctagtggccaagctacccccacatcccccatcaagaagtttcctacgaccgccacgaagattagtcctaaagaagaagagaggaaagatgagtcccccgctacatggagacttggtcttcgaaagacagggtcctacggcgcactcgctgaaatcactgctagcaaagaagggcagaaggagaaagacaccgcaggggttacccgcagcgccagcagccctcgactttcatcatctttggataataaagagaaagagaaggacagtaagggcacacggctagcctatgtggcccctacaatcccccgacgtctggcctcaacatctgacatcgaagagaaagaaaatcgggactcctccagccttcggacgtcttcatcctatacgcgcaggaagtgggaggacgatctgaagaaaaatagcagcgtgaatgaaggaagcacctaccacaagtcgacgtctaacaggttatgggctgaggacagcaccgaaaaagaaaaagattccgtccccaccgcggtaaccattcccgtggcaccgactgtcgtgaacgccgcagcatccacaactacattaactaccacaactgccggaaccgtgagcagcacaaccgaagtccgcgagcgccgacgctcctacctgacccctgttagggacgaagagagcgagtcccaacggaaggccagatctaggcaagcccgacaatccaggcgaagtacgcagggggtaaccctgactgatctgcaggaggcggagaaaacaattggacgctcccgatccaccagaactagagaacaggagaacgaagaaaaagagaaggaggaaaaggaaaagcaggacaaggaaaaacaggaggagaagaaagagagcgagaccagccgagaggatgaatataaacagaagtactcccggacttatgatgagacataccagcggtaccgcccagtgtctacaagtagttccacgacccccagttcctctcttagtaccatgagctcgagcctgtatgccagcagccagctcaataggccaaactccctcgtaggaatcacctccgcatacagtagaggcattactaaagagaatgaacgggaaggggaaaagagggaggaggaaaaggaaggggaggacaagagtcagcctaaatctattagggaacgacggaggccgcgagagaagaggaggtctactggtgtttcattctggacccaggatagcgacgagaatgagcaggagcaacagagcgatacagaggaaggttccaacaagaaggaaacccagaccgactccattagccggtacgagacttcaagtacttctgccggtgataggtatgacagtctgctcgggcgatctggcagttatagctacctcgaagagagaaagccttactcctcccgcttagagaaggatgactctacggatttcaagaaactgtatgagcagatccttgcggagaatgaaaagctgaaagctcaactacacgatactaatatggagcttactgatctaaaactccaactggagaaagcaactcagagacaggaacggttcgcagataggtcactgttggaaatggagaaaagggagcgcagagccttagagaggaggatctctgagatggaggaggaactgaagatgctcccagacttaaaggccgacaaccagcgactcaaggatgagaacggcgctttgatcagagtgattagcaaactgagtaagtag

SEQ ID NO: 87725 - DNA, 5414 bp, Artificial Sequence
  derived and/or modified sequence
agatctgccctgtagagccttgcggttccactgctggcctccggattcccgggagcccccagcccgacaggacaaccttccttccccgcttcctcctttccagacccggcggcaggagaggggatgaagatggcggacgcgaagcagaagcggaacgagcagctgaaacgctggatcggctccgagacggacctcgagcctccggtggtgaagcgccagaagaccaaggtgaagttcgacgatggcgccgtcttcctggctgcttgctccagcggcgacacggacgaggtcctcaagctgctgcaccgcggcgccgacatcaattacgccaatgtggacggactcactgccctgcaccaggcttgcattgatgacaatgttgatatggtgaagtttctggtagaaaatggagcaaatattaatcaacctgataatgaaggctggataccactacatgcagcagcttcctgtggatatcttgatattgcagagtttttgattggtcaaggagcacatgtaggggctgtcaacagtgaaggagatacacctttagatattgcggaggaggaggcaatggaagagctacttcaaaatgaagttaatcggcaaggggttgatatagaagcagctcgaaaggaagaagaacggatcatgcttagagatgccaggcagtggctaaatagtggtcatataaatgatgtccggcatgcaaaatctggaggtacagcacttcacgttgcagctgctaaaggctatacggaagttttaaaacttttaatacaggcaggctatgatgttaatattaaagactatgatggctggacacctcttcatgctgcagctcattggggtaaagaagaagcatgtcgaattttagtggacaatctgtgtgatatggagatggtcaacaaagtgggccaaacagcctttgatgtagcagatgaagacattttaggatatttagaagagttgcaaaagaaacaaaatctgctccatagtgaaaaacgggacaagaaatctccactaattgaatcaacagcaaatatggacaataatcagtcacagaagacctttaaaaacaaagagacgttgattattgaaccagagaaaaatgcatcccgtattgaatctctggaacaagaaaaggttgatgaagaagaagaaggaaagaaggatgagtctagctgctctagtgaagaagatgaggaagatgactcggaatcagaagctgaaacagataagacaaaacccctggcttctgtaactaatgccaacacttctagtacacaagcagctcctgtagctgttacaacacctactgtgtcatcaggtcaagcaacacctacatcacctattaaaaagtttccaaccacagctacaaaaatttctcccaaagaagaagagagaaaagatgagtctcctgcaacttggaggttaggacttagaaagacgggcagctatggtgcacttgctgaaatcacagcatctaaagagggtcagaaagaaaaagatactgcaggtgttacacgttcagcttcaagtcccagactttcctcctctttggataataaagaaaaggagaaagatagtaaaggaactaggcttgcatatgttgcacctacaataccaagacgactagccagtacatctgacattgaagagaaagaaaacagagattcttcaagtttgcgaacaagtagttcatatacaaggagaaaatgggaagatgatcttaaaaaaaatagctcagttaatgaaggatcaacgtatcataaaagtacctcaaatcgtttgtgggctgaggatagtactgagaaagaaaaggacagtgttcctacggcagtgaccattcctgttgctccaactgttgtaaatgctgcagcttctaccacaaccctgactacaactactgctggcactgtctcctccacaacagaggtcagggagagacgcagatcatacctcactcctgttagggatgaagagtctgaatcccaaagaaaagcaagatctagacaagcaagacaatctagaagatcaacacagggagtgacattaactgatcttcaagaagctgagaaaacaataggaagaagtcgttctacccgaaccagagaacaagaaaatgaagaaaaagaaaaagaggaaaaagagaaacaagataaagagaaacaagaagaaaagaaggagtcagaaacatctagagaagatgaatataaacaaaagtactccagaacgtatgatgagacttaccagcgttataggccagtatcaacttcaagttcaaccactccatcctcttcactttctactatgagcagttcactgtatgcttcaagtcaactaaacaggccaaatagtcttgtaggcataacttctgcttactccagaggaataacaaaagaaaatgaaagagagggagaaaaaagagaagaggagaaagaaggagaagataaatcacaacctaaatcaatcagagaacgacgacgaccaagagagaaaagaagatctacaggagtttcattttggacacaagatagtgatgaaaatgaacaagaacaacaatcagacacagaagagggatccaataagaaagaaactcaggtaaataccattactttatatgaaaccagttctacatcagctggtgatcgatatgattccttgctgggtcgctctggatcatacagttacttagaagaaagaaaaccttacagcagcaggctagaaaaggatgactcaactgactttaaaaagctttatgaacaaattctagctgaaaatgaaaagctgaaggcacagctacatgatacaaatatggaactaacagatcttaaattacagttggaaaaggccacccagagacaagaaagatttgctgatagatcactgttggaaatggaaaaaagggaacgaagagctctagaaagaagaatatctgaaatggaagaagagctcaaaatgttaccagacctaaaagcagacaaccagaggctaaaggatgaaaatggggccttgatcagagttataagcaaactttccaaataaaaaaaaaaaaagcagcaagtaatggaattgcacatattagtaacccagtggaccataattggcagtcactggaagtctgggaagaatccttggagactgtcattttcggatatcctgccaaatgccctcttatctagaatttttgtttcattttgtttaattttctggggtgtttttgttgttgttggtttgttttttgttttttttttttaatcaagaccattgtttcatgttaatgcagctgctgagaagatttttttttaatgactgagaaaacttgtttacagctccagcatataaggaaagtgttcaaggccagatatgcctcagatatttaaccagtaagccttagttgtacataaatacttttgtgtcaacaaaaactttcagctctcacagaagacagttactcaacattttttgatgtgccacagtttcgagtttttcgatatttaaattttttggcttttcatctaagtttgggtttgtattttttccttctaaactcttcatgtggcagagtcttctatgttttcacagctttttcattacagaaaagaacacttgctcttctgtgattattgtcatgtattaggctaatgctgtgttgtctcccacctggaactgaattgcttggtggaacatatgctttcactgtttgtgcaatatgcatttatttcttatatgaatgctttaaagtcatttgaggttagatcttttaattcctattttctgcttcattggtcactttttttttattgtagtataagatgttagattctgtaatcttcacattcattttagcaggtactgagtgatgctgtatatacaaataagtgtattgttttgatttttagaccaccacatggcatgcttgactatttcttatttcaaatgtctgctaatgcagagtaggctactccatgatagtgttaaaaaacaaaatttgctaacaatgtgatataaagactttaaaagttacacattatgtggagccctatctttacaaaagtttcctactgtaaagtgcttttattttcagttttcacttgatagtactcaaccataattaaagttgcataagataattgctttacatttcacatacctatatttatctgagtgctgtctaaaactgttgtgctagccaaagtaatgctatgaaatcatttgcagaattaacccgtgagttaatgttaaatgcactgttattgccatgtgaagaggcatcgactttgataccaccatcatgttcagaccattttatacatttcagtggcctttttttttttttaaggaaaaaaaagcgcaaaaccaagtacatagtgacgatggcttttatttggacaaatagcttttatattttcattaaaccatgcaaaaaatactacatctttctggcacataactgtctccttaaccactgaacagttcagccatttgaataaattgtacattgtaaagcttatagtagctgattgtattattgattgtattgtatactatattaaatgtgaatttgtaccccttcattttaaaaggtcattgtgttctactgcctattttagattactttggggttggggaagggtgttttggtaagcaggattttaagtcctctctctctcgattggttttatgaagatataaggttatgctcttactaccaagctcaggattcttgattttaaaggtacaaggatagttgtgggagttttatttttggttatatttgaactgtatgaatggtaggtctgaatattgagaatttccatggtcttatgtggaggtaaaatatacagataactgatcagtttgagtgactgcaacatgttctggttgcacaacagttaggcatgctatggtttatatttgtgaagtttggatgcctgtgaagaatgattaaatacatgtttctaatattttagtgttttgtatttaggttatttattctttgtatctaaaactgaacagctactgtgctatattgattttattggtagtattgagcagaccttgtttctgcatgaaactagttgcaaaacccactattttggaaataaaaatgtattttgacatatacaaataaaatgaataaaactattttaaatgtgtgaacttttaatgaagacattttaaattttgttctgagatatttaaattctgcatgggtattttttcactaattgctttacttggataccaatttgaataatttctgaaattgtaatattgtgataatttgcacagcattgtacatgcacatctgtaaatgcaatcttaattgccatatttatgcaatctgtgtaccaatttggacaaatgtttatatattttacataaagctgtctgtatgcagaatctga

SEQ ID NO: 87726 - DNA, 2925 bp, Artificial Sequence
  derived and/or modified sequence
atgaagatggcggacgcgaagcagaagcggaacgagcagctgaaacgctggatcggctccgagacggacctcgagcctccggtggtgaagcgccagaagaccaaggtgaagttcgacgatggcgccgtcttcctggctgcttgctccagcggcgacacggacgaggtcctcaagctgctgcaccgcggcgccgacatcaattacgccaatgtggacggactcactgccctgcaccaggcttgcattgatgacaatgttgatatggtgaagtttctggtagaaaatggagcaaatattaatcaacctgataatgaaggctggataccactacatgcagcagcttcctgtggatatcttgatattgcagagtttttgattggtcaaggagcacatgtaggggctgtcaacagtgaaggagatacacctttagatattgcggaggaggaggcaatggaagagctacttcaaaatgaagttaatcggcaaggggttgatatagaagcagctcgaaaggaagaagaacggatcatgcttagagatgccaggcagtggctaaatagtggtcatataaatgatgtccggcatgcaaaatctggaggtacagcacttcacgttgcagctgctaaaggctatacggaagttttaaaacttttaatacaggcaggctatgatgttaatattaaagactatgatggctggacacctcttcatgctgcagctcattggggtaaagaagaagcatgtcgaattttagtggacaatctgtgtgatatggagatggtcaacaaagtgggccaaacagcctttgatgtagcagatgaagacattttaggatatttagaagagttgcaaaagaaacaaaatctgctccatagtgaaaaacgggacaagaaatctccactaattgaatcaacagcaaatatggacaataatcagtcacagaagacctttaaaaacaaagagacgttgattattgaaccagagaaaaatgcatcccgtattgaatctctggaacaagaaaaggttgatgaagaagaagaaggaaagaaggatgagtctagctgctctagtgaagaagatgaggaagatgactcggaatcagaagctgaaacagataagacaaaacccctggcttctgtaactaatgccaacacttctagtacacaagcagctcctgtagctgttacaacacctactgtgtcatcaggtcaagcaacacctacatcacctattaaaaagtttccaaccacagctacaaaaatttctcccaaagaagaagagagaaaagatgagtctcctgcaacttggaggttaggacttagaaagacgggcagctatggtgcacttgctgaaatcacagcatctaaagagggtcagaaagaaaaagatactgcaggtgttacacgttcagcttcaagtcccagactttcctcctctttggataataaagaaaaggagaaagatagtaaaggaactaggcttgcatatgttgcacctacaataccaagacgactagccagtacatctgacattgaagagaaagaaaacagagattcttcaagtttgcgaacaagtagttcatatacaaggagaaaatgggaagatgatcttaaaaaaaatagctcagttaatgaaggatcaacgtatcataaaagtacctcaaatcgtttgtgggctgaggatagtactgagaaagaaaaggacagtgttcctacggcagtgaccattcctgttgctccaactgttgtaaatgctgcagcttctaccacaaccctgactacaactactgctggcactgtctcctccacaacagaggtcagggagagacgcagatcatacctcactcctgttagggatgaagagtctgaatcccaaagaaaagcaagatctagacaagcaagacaatctagaagatcaacacagggagtgacattaactgatcttcaagaagctgagaaaacaataggaagaagtcgttctacccgaaccagagaacaagaaaatgaagaaaaagaaaaagaggaaaaagagaaacaagataaagagaaacaagaagaaaagaaggagtcagaaacatctagagaagatgaatataaacaaaagtactccagaacgtatgatgagacttaccagcgttataggccagtatcaacttcaagttcaaccactccatcctcttcactttctactatgagcagttcactgtatgcttcaagtcaactaaacaggccaaatagtcttgtaggcataacttctgcttactccagaggaataacaaaagaaaatgaaagagagggagaaaaaagagaagaggagaaagaaggagaagataaatcacaacctaaatcaatcagagaacgacgacgaccaagagagaaaagaagatctacaggagtttcattttggacacaagatagtgatgaaaatgaacaagaacaacaatcagacacagaagagggatccaataagaaagaaactcagacggattccatttctagatatgaaaccagttctacatcagctggtgatcgatatgattccttgctgggtcgctctggatcatacagttacttagaagaaagaaaaccttacagcagcaggctagaaaaggatgactcaactgactttaaaaagctttatgaacaaattctagctgaaaatgaaaagctgaaggcacagctacatgatacaaatatggaactaacagatcttaaattacagttggaaaaggccacccagagacaagaaagatttgctgatagatcactgttggaaatggaaaaaagggaacgaagagctctagaaagaagaatatctgaaatggaagaagagctcaaaatgttaccagacctaaaagcagacaaccagaggctaaaggatgaaaatggggccttgatcagagttataagcaaactttccaaataa

SEQ ID NO: 87727 - DNA, 2925 bp, Artificial Sequence
  derived and/or modified sequence
atgaagatggccgacgccaagcagaagagaaacgagcagctgaagagatggatcggcagcgagaccgacctggagccccccgtggtgaagagacagaagaccaaggtgaagttcgacgacggcgccgtgttcctggccgcctgcagcagcggcgacaccgacgaggtgctgaagctgctgcacagaggcgccgacatcaactacgccaacgtggacggcctgaccgccctgcaccaggcctgcatcgacgacaacgtggacatggtgaagttcctggtggagaacggcgccaacatcaaccagcccgacaacgagggctggatccccctgcacgccgccgccagctgcggctacctggacatcgccgagttcctgatcggccagggcgcccacgtgggcgccgtgaacagcgagggcgacacccccctggacatcgccgaggaggaggccatggaggagctgctgcagaacgaggtgaacagacagggcgtggacatcgaggccgccagaaaggaggaggagagaatcatgctgagagacgccagacagtggctgaacagcggccacatcaacgacgtgagacacgccaagagcggcggcaccgccctgcacgtggccgccgccaagggctacaccgaggtgctgaagctgctgatccaggccggctacgacgtgaacatcaaggactacgacggctggacccccctgcacgccgccgcccactggggcaaggaggaggcctgcagaatcctggtggacaacctgtgcgacatggagatggtgaacaaggtgggccagaccgccttcgacgtggccgacgaggacatcctgggctacctggaggagctgcagaagaagcagaacctgctgcacagcgagaagagagacaagaagagccccctgatcgagagcaccgccaacatggacaacaaccagagccagaagaccttcaagaacaaggagaccctgatcatcgagcccgagaagaacgccagcagaatcgagagcctggagcaggagaaggtggacgaggaggaggagggcaagaaggacgagagcagctgcagcagcgaggaggacgaggaggacgacagcgagagcgaggccgagaccgacaagaccaagcccctggccagcgtgaccaacgccaacaccagcagcacccaggccgcccccgtggccgtgaccacccccaccgtgagcagcggccaggccacccccaccagccccatcaagaagttccccaccaccgccaccaagatcagccccaaggaggaggagagaaaggacgagagccccgccacctggagactgggcctgagaaagaccggcagctacggcgccctggccgagatcaccgccagcaaggagggccagaaggagaaggacaccgccggcgtgaccagaagcgccagcagccccagactgagcagcagcctggacaacaaggagaaggagaaggacagcaagggcaccagactggcctacgtggcccccaccatccccagaagactggccagcaccagcgacatcgaggagaaggagaacagagacagcagcagcctgagaaccagcagcagctacaccagaagaaagtgggaggacgacctgaagaagaacagcagcgtgaacgagggcagcacctaccacaagagcaccagcaacagactgtgggccgaggacagcaccgagaaggagaaggacagcgtgcccaccgccgtgaccatccccgtggcccccaccgtggtgaacgccgccgccagcaccaccaccctgaccaccaccaccgccggcaccgtgagcagcaccaccgaggtgagagagagaagaagaagctacctgacccccgtgagagacgaggagagcgagagccagagaaaggccagaagcagacaggccagacagagcagaagaagcacccagggcgtgaccctgaccgacctgcaggaggccgagaagaccatcggcagaagcagaagcaccagaaccagagagcaggagaacgaggagaaggagaaggaggagaaggagaagcaggacaaggagaagcaggaggagaagaaggagagcgagaccagcagagaggacgagtacaagcagaagtacagcagaacctacgacgagacctaccagagatacagacccgtgagcaccagcagcagcaccacccccagcagcagcctgagcaccatgagcagcagcctgtacgccagcagccagctgaacagacccaacagcctggtgggcatcaccagcgcctacagcagaggcatcaccaaggagaacgagagagagggcgagaagagagaggaggagaaggagggcgaggacaagagccagcccaagagcatcagagagagaagaagacccagagagaagagaagaagcaccggcgtgagcttctggacccaggacagcgacgagaacgagcaggagcagcagagcgacaccgaggagggcagcaacaagaaggagacccaggtgaacaccatcaccctgtacgagaccagcagcaccagcgccggcgacagatacgacagcctgctgggcagaagcggcagctacagctacctggaggagagaaagccctacagcagcagactggagaaggacgacagcaccgacttcaagaagctgtacgagcagatcctggccgagaacgagaagctgaaggcccagctgcacgacaccaacatggagctgaccgacctgaagctgcagctggagaaggccacccagagacaggagagattcgccgacagaagcctgctggagatggagaagagagagagaagagccctggagagaagaatcagcgagatggaggaggagctgaagatgctgcccgacctgaaggccgacaaccagagactgaaggacgagaacggcgccctgatcagagtgatcagcaagctgagcaagtag

SEQ ID NO: 87728 - DNA, 2925 bp, Artificial Sequence
  derived and/or modified sequence
atgaagatggccgacgccaagcagaagagaaacgagcagctgaagagatggatcggcagcgagaccgacctggagccccccgtggtgaagagacagaagaccaaggtgaagttcgacgacggcgccgtgttcctggccgcctgcagcagcggcgacaccgacgaggtgctgaagctgctgcacagaggcgccgacatcaactacgccaacgtggacggcctgaccgccctgcaccaggcctgcatcgacgacaacgtggacatggtgaagttcctggtggagaacggcgccaacatcaaccagcccgacaacgagggctggatccccctgcacgccgccgccagctgcggctacctggacatcgccgagttcctgatcggccagggcgcccacgtgggcgccgtgaacagcgagggcgacacccccctggacatcgccgaggaggaggccatggaggagctgctgcagaacgaggtgaacagacagggcgtggacatcgaggccgccagaaaggaggaggagagaatcatgctgagagacgccagacagtggctgaacagcggccacatcaacgacgtgagacacgccaagagcggcggcaccgccctgcacgtggccgccgccaagggctacaccgaggtgctgaagctgctgatccaggccggctacgacgtgaacatcaaggactacgacggctggacccccctgcacgccgccgcccactggggcaaggaggaggcctgcagaatcctggtggacaacctgtgcgacatggagatggtgaacaaggtgggccagaccgccttcgacgtggccgacgaggacatcctgggctacctggaggagctgcagaagaagcagaacctgctgcacagcgagaagagagacaagaagagccccctgatcgagagcaccgccaacatggacaacaaccagagccagaagaccttcaagaacaaggagaccctgatcatcgagcccgagaagaacgccagcagaatcgagagcctggagcaggagaaggtggacgaggaggaggagggcaagaaggacgagagcagctgcagcagcgaggaggacgaggaggacgacagcgagagcgaggccgagaccgacaagaccaagcccctggccagcgtgaccaacgccaacaccagcagcacccaggccgcccccgtggccgtgaccacccccaccgtgagcagcggccaggccacccccaccagccccatcaagaagttccccaccaccgccaccaagatcagccccaaggaggaggagagaaaggacgagagccccgccacctggagactgggcctgagaaagaccggcagctacggcgccctggccgagatcaccgccagcaaggagggccagaaggagaaggacaccgccggcgtgaccagaagcgccagcagccccagactgagcagcagcctggacaacaaggagaaggagaaggacagcaagggcaccagactggcctacgtggcccccaccatccccagaagactggccagcaccagcgacatcgaggagaaggagaacagagacagcagcagcctgagaaccagcagcagctacaccagaagaaagtgggaggacgacctgaagaagaacagcagcgtgaacgagggcagcacctaccacaagagcaccagcaacagactgtgggccgaggacagcaccgagaaggagaaggacagcgtgcccaccgccgtgaccatccccgtggcccccaccgtggtgaacgccgccgccagcaccaccaccctgaccaccaccaccgccggcaccgtgagcagcaccaccgaggtgagagagagaagaagaagctacctgacccccgtgagagacgaggagagcgagagccagagaaaggccagaagcagacaggccagacagagcagaagaagcacccagggcgtgaccctgaccgacctgcaggaggccgagaagaccatcggcagaagcagaagcaccagaaccagagagcaggagaacgaggagaaggagaaggaggagaaggagaagcaggacaaggagaagcaggaggagaagaaggagagcgagaccagcagagaggacgagtacaagcagaagtacagcagaacctacgacgagacctaccagagatacagacccgtgagcaccagcagcagcaccacccccagcagcagcctgagcaccatgagcagcagcctgtacgccagcagccagctgaacagacccaacagcctggtgggcatcaccagcgcctacagcagaggcatcaccaaggagaacgagagagagggcgagaagagagaggaggagaaggagggcgaggacaagagccagcccaagagcatcagagagagaagaagacccagagagaagagaagaagcaccggcgtgagcttctggacccaggacagcgacgagaacgagcaggagcagcagagcgacaccgaggagggcagcaacaagaaggagacccagaccgacagcatcagcagatacgagaccagcagcaccagcgccggcgacagatacgacagcctgctgggcagaagcggcagctacagctacctggaggagagaaagccctacagcagcagactggagaaggacgacagcaccgacttcaagaagctgtacgagcagatcctggccgagaacgagaagctgaaggcccagctgcacgacaccaacatggagctgaccgacctgaagctgcagctggagaaggccacccagagacaggagagattcgccgacagaagcctgctggagatggagaagagagagagaagagccctggagagaagaatcagcgagatggaggaggagctgaagatgctgcccgacctgaaggccgacaaccagagactgaaggacgagaacggcgccctgatcagagtgatcagcaagctgagcaagtag

SEQ ID NO: 87729 - protein, 563 aa, Artificial Sequence
  derived and/or modified sequence
MERDSHGNASPARTPSAGASPAQASPAGTPPGRASPAQASPAQASPAGTPPGRASPAQASPAGTPPGRASPGRASPAQASPAQASPARASPALASLSRSSSGRSSSARSASVTTSPTRVYLVRATPVGAVPIRSSPARSAPATRATRESPGTSLPKFTWREGQKQLPLIGCVLLLIALVVSLIILFQFWQGHTGIRYKEQRESCPKHAVRCDGVVDCKLKSDELGCVRFDWDKSLLKIYSGSSHQWLPICSSNWNDSYSEKTCQQLGFESAHRTTEVAHRDFANSFSILRYNSTIQESLHRSECPSQRYISLQCSHCGLRAMTGRIVGGALASDSKWPWQVSLHFGTTHICGGTLIDAQWVLTAAHCFFVTREKVLEGWKVYAGTSNLHQLPEAASIAEIIINSNYTDEEDDYDIALMRLSKPLTLSAHIHPACLPMHGQTFSLNETCWITGFGKTRETDDKTSPFLREVQVNLIDFKKCNDYLVYDSYLTPRMMCAGDLRGGRDSCQGDSGGPLVCEQNNRWYLAGVTSWGTGCGQRNKPGVYTKVTEVLPWIYSKMESSAG

SEQ ID NO: 87730 - DNA, 1692 bp, Artificial Sequence
  derived and/or modified sequence
atggagagagacagccacggcaacgccagccccgccagaacccccagcgccggcgccagccccgcccaggccagccccgccggcaccccccccggcagagccagccccgcccaggccagccccgcccaggccagccccgccggcaccccccccggcagagccagccccgcccaggccagccccgccggcaccccccccggcagagccagccccggcagagccagccccgcccaggccagccccgcccaggccagccccgccagagccagccccgccctggccagcctgagcagaagcagcagcggcagaagcagcagcgccagaagcgccagcgtgaccaccagccccaccagagtgtacctggtgagagccacccccgtgggcgccgtgcccatcagaagcagccccgccagaagcgcccccgccaccagagccaccagagagagccccggcaccagcctgcccaagttcacctggagagagggccagaagcagctgcccctgatcggctgcgtgctgctgctgatcgccctggtggtgagcctgatcatcctgttccagttctggcagggccacaccggcatcagatacaaggagcagagagagagctgccccaagcacgccgtgagatgcgacggcgtggtggactgcaagctgaagagcgacgagctgggctgcgtgagattcgactgggacaagagcctgctgaagatctacagcggcagcagccaccagtggctgcccatctgcagcagcaactggaacgacagctacagcgagaagacctgccagcagctgggcttcgagagcgcccacagaaccaccgaggtggcccacagagacttcgccaacagcttcagcatcctgagatacaacagcaccatccaggagagcctgcacagaagcgagtgccccagccagagatacatcagcctgcagtgcagccactgcggcctgagagccatgaccggcagaatcgtgggcggcgccctggccagcgacagcaagtggccctggcaggtgagcctgcacttcggcaccacccacatctgcggcggcaccctgatcgacgcccagtgggtgctgaccgccgcccactgcttcttcgtgaccagagagaaggtgctggagggctggaaggtgtacgccggcaccagcaacctgcaccagctgcccgaggccgccagcatcgccgagatcatcatcaacagcaactacaccgacgaggaggacgactacgacatcgccctgatgagactgagcaagcccctgaccctgagcgcccacatccaccccgcctgcctgcccatgcacggccagaccttcagcctgaacgagacctgctggatcaccggcttcggcaagaccagagagaccgacgacaagaccagccccttcctgagagaggtgcaggtgaacctgatcgacttcaagaagtgcaacgactacctggtgtacgacagctacctgacccccagaatgatgtgcgccggcgacctgagaggcggcagagacagctgccagggcgacagcggcggccccctggtgtgcgagcagaacaacagatggtacctggccggcgtgaccagctggggcaccggctgcggccagagaaacaagcccggcgtgtacaccaaggtgaccgaggtgctgccctggatctacagcaagatggagagcagcgccggctag

SEQ ID NO: 87731 - DNA, 1692 bp, Artificial Sequence
  derived and/or modified sequence
atggagagggatagtcacgggaacgcttccccagcgaggacaccatctgcgggagctagccctgcacaggccagcccagccggcacgccccctggaagggccagcccggcccaggcttcccctgcccaggcgagtccggcgggtacaccgcctgggagagcgtcgccggctcaggcgtctcccgcaggcacacctcccgggagagcatcccctggacgggcctcacctgcacaggctagccccgctcaggcaagtcccgccagagcctcgccagccttagccagcttgagccgcagttccagcggtcggtcttcctctgccagaagcgctagcgtgactacatcacctactagggtctacctcgtccgcgctacaccagtgggagccgtgcccatccgatcgagccctgctaggtccgcgccagcgactagggcaactcgcgagtctcccggaacctctttgcctaagtttacttggcgagagggccaaaaacaactacccctgattggttgtgtgctcttgctgatcgccctcgtagttagtctgattatcctcttccagttttggcagggccacaccggtataagatataaagagcagcgggagagctgcccaaagcacgcagtgcggtgtgatggggtggtcgactgtaagctgaagtctgacgagctagggtgtgtgcgattcgactgggacaagtcgcttcttaaaatttattccggctcctcccatcaatggctccctatttgctcttctaattggaatgactcttattctgaaaaaacatgccaacagctcggcttcgaatccgcacaccgcactacagaggtggcgcatcgcgactttgccaactccttctctatcctaagatacaactcaaccatacaggagtctctccataggagtgaatgtccttcgcaaagatatatcagcctgcagtgttcgcactgtggcctcagggcgatgactggacggattgttggtggggcactagcctccgatagcaagtggccgtggcaggtctctctgcacttcggcacaacacacatatgcggtggcacgcttatcgatgctcaatgggtactcacagccgcacattgcttctttgttacgagagagaaggtgcttgagggctggaaagtgtatgcaggaaccagcaacctgcaccagctgcctgaggccgcttctatcgctgaaataataattaattcaaattacacagacgaggaagacgattacgacatagcactgatgagactatcaaagccactgacactcagcgcccatatccatcccgcctgtctgcccatgcatggccaaacgttttctcttaacgagacctgctggattacaggctttggaaagacacgggaaacagatgacaaaacaagcccctttctgagagaggtgcaggttaatctcatcgacttcaaaaagtgtaacgattatctcgtttatgattcttaccttacaccgcggatgatgtgcgccggagacctccgcgggggacgtgatagttgtcagggagacagcggcgggcctttggtctgcgagcagaacaacagatggtacttggccggcgtaacatcttggggcacgggttgcggacaaagaaacaaaccaggtgtgtacacaaaggtgactgaggtgctgccctggatttattctaagatggagtcttcagcagggtag

SEQ ID NO: 87732 - DNA, 1692 bp, Artificial Sequence
  derived and/or modified sequence
atggagcgggacagccacggcaatgccagccctgcccggacccccagcgctggggccagccctgcccaggccagccctgctggcaccccacctggccgggccagccctgcccaggccagccctgcccaggccagccctgctggcaccccacctggccgggccagccctgcccaggccagccctgctggcaccccacctggccgggccagccctggccgggccagccctgcccaggccagccctgcccaggccagccctgcccgggccagccctgccctggccagcctgagccgcagcagcagcggccgcagcagcagcgcccggagcgcctctgtgaccaccagccccaccagggtgtacctggtgcgggccacccctgtgggcgctgtgcccatccgcagcagccctgcccggagcgccccagccacccgggccacccgggagagccctggcaccagcctgcccaagttcacctggagggagggccagaagcagctgcccctgattggctgtgtgctgctgctgattgccctggtggtgtccctcatcatcctcttccagttctggcagggccacacaggcatccgctacaaggagcagcgggagagctgccccaagcatgctgtgcgctgtgatggagtggtggactgcaagctgaagagtgatgagctgggctgtgtgcgctttgactgggacaagagcctgctgaagatctacagcggcagcagccaccagtggctgcccatctgcagcagcaactggaatgacagctacagcgagaagacctgccagcagctgggctttgagagcgcccacaggaccacagaggtggcccaccgggactttgccaacagcttcagcatcctgcgctacaacagcaccatccaggagagcctgcacagaagtgaatgtcccagccagcgctacatcagcctgcagtgcagccactgcggcctgcgggccatgacaggccgcatcgtgggcggggccctggccagtgacagcaagtggccctggcaggtgtccctgcacttcggcaccacccacatctgtggcggcaccctgattgatgcccagtgggtgctgacagctgcccactgcttctttgtgacccgggagaaggtgctggagggctggaaggtgtatgccggcaccagcaacctgcaccagctgcctgaggccgccagcattgctgagatcatcatcaacagcaactacacagatgaggaggatgattatgacatcgccctgatgaggctgagcaagcccctgaccctgagcgcccacatccacccagcctgcctgcccatgcacggccagaccttcagcctgaatgagacctgctggatcactggatttgggaagacccgggagacagatgacaagaccagccccttcctgcgggaggtgcaggtgaacctgattgacttcaagaagtgcaatgactacctggtgtatgacagctacctgacccccaggatgatgtgtgccggggacctgcggggcggccgggacagctgccagggcgacagcggcggccccctggtgtgtgagcagaacaaccgctggtacctggccggcgtgacctcctggggcaccggctgcggccagaggaacaagccaggagtgtacaccaaggtgacagaggtgctgccctggatctacagcaagatggagagcagcgctggatag

SEQ ID NO: 87733 - DNA, 1692 bp, Artificial Sequence
  derived and/or modified sequence
atggagcgggacagccacggcaacgccagccccgcccggaccccctcggccggagcttcacccgcccaggcatcccccgcaggcaccccccctgggagggcaagtcccgcacaggccagccctgcacaagccagccctgctggtaccccgcccgggcgcgcctctccagcccaggctagccccgccgggacccctccaggacgcgcttctccaggcagagcgagccctgctcaggcctccccagcccaggcatctcctgccagggcaagcccagctctggcctctttgagccgaagcagctctggtcgatcctcgtccgccagatccgcctctgtcacaacatcccccacacgtgtgtaccttgtcagggccactccagtgggcgccgttccaattaggtcttcacctgctagaagcgcccctgcaaccagagccacacgcgagtcgcctgggacttcgctgcccaagttcacgtggcgcgaaggccagaaacaactgccattgattggatgtgtcctcctgctgatcgcgttagtagtgtccctcatcattctgtttcaattctggcaggggcacactggaatccggtacaaggaacagcgggagtcatgtccaaaacatgcagttaggtgcgatggggtcgtggattgcaaattaaagagcgacgagttgggttgtgtgcgttttgattgggataagagcttgctgaaaatatacagcgggagttcgcaccagtggctgcccatttgttcttcaaactggaacgacagttattccgaaaaaacttgtcaacagcttggcttcgagtctgctcacagaacaactgaggtagcacaccgcgattttgctaactccttctccattctgagatataattcaactatccaggagtctctgcatagaagcgagtgtccaagccagaggtatatctctctccagtgtagtcattgcggtcttcgcgccatgaccggaaggatcgtcgggggggcgctggcatctgattccaagtggccttggcaggtgtcactgcacttcggcacaacccatatctgtggcgggaccctgatagacgctcaatgggtgctaacagccgcacactgcttttttgtgacccgagagaaagtgctggagggatggaaggtgtacgctggcactagtaacctccatcagctgcctgaggccgcttctatagccgagatcatcatcaactccaactataccgacgaggaagacgactacgatatcgcactcatgaggttgtcaaagcccctcacgttgtccgcacacattcaccccgcctgccttcctatgcatggccagacgttctctctgaatgagacttgctggatcacaggatttggaaaaacccgtgaaacagacgacaaaacatcaccttttctcagagaggttcaggtgaaccttatcgatttcaagaagtgtaacgactacctcgtctacgactcctacctgacaccaaggatgatgtgtgccggcgatctgcgcggaggccgggactcctgtcagggcgatagtggcggtccactcgtgtgtgagcaaaataatcgctggtatctggctggggtgacttcttggggcacgggttgcggtcagcgcaacaaacctggggtttatacaaaggttaccgaggtgctgccttggatctacagtaaaatggagtcttcagcaggctag

SEQ ID NO: 87734 - DNA, 1692 bp, Artificial Sequence
  derived and/or modified sequence
atggagcgagactcacacggaaatgcctcaccggcacgcaccccatcggcaggcgctagcccggctcaggcaagtccggcagggactcccccaggcagggcatctcctgcccaagcctctcctgctcaggcctctcctgctggaactccgcctggacgcgctagccctgctcaagccagcccagccggtacgcctcccggacgggctagcccgggacgggcttcgcccgctcaagcctccccggctcaggccagcccagcccgtgcatccccagcgctcgctagccttagccggtcttccagcgggagatcctcttccgcgagatctgcaagcgtgaccaccagtccgacacgcgtgtacttagtgagagctacaccagtgggcgcagtccctatccgcagctcccccgctcggtcagccccagcgacccgggcaactcgagaatcacccggaacctctttgcccaagttcacctggagggaggggcagaagcagctcccgctgatcggatgcgtgcttttgctgattgccctagtcgtgagtctcatcattctctttcaattctggcagggccacactggtataaggtataaagagcaacgcgaaagttgtcctaagcacgcggtaaggtgcgatggggtggtggactgtaagcttaaatcagacgagctggggtgtgtgcggttcgactgggataaatcccttctcaagatttatagtggaagcagccaccagtggttgcccatttgttcctcaaattggaatgacagctatagcgagaagacctgtcaacaactcggcttcgagagcgcgcaccggacaactgaagttgcacaccgtgacttcgccaacagttttagcattctgagatacaattctacaatccaggaatctctgcaccgctcagagtgtcctagtcagcgctacatatcactgcaatgtagtcactgtggcctgcgggcaatgacgggaagaatagtgggtggggcattagcttccgacagcaagtggccttggcaagtatccctgcatttcggtaccacccacatttgtggcggaacactgatcgacgctcaatgggtgctcaccgcggcacactgtttcttcgtcacaagggaaaaggtgctggaaggctggaaagtgtatgcaggaacgagtaatctccatcaactcccggaggctgcttccatcgctgagatcatcatcaactccaactacacggatgaggaggacgactacgacattgcccttatgaggctgagcaaacccctgaccctaagcgctcacattcatccagcctgtctgccaatgcatggacagactttcagcctgaatgagacatgctggatcacgggtttcggtaaaacgcgggagactgatgacaagacttcgccattcttgagagaggtccaggtgaacctaatcgactttaagaaatgtaatgattacctggtgtacgactcttacctcacaccaagaatgatgtgtgcaggcgacctcaggggaggcagggattcttgccagggggattctgggggtccgcttgtgtgtgagcagaacaacagatggtatctagccggagtaacatcttgggggacgggatgtgggcagagaaataaacctggggtgtatacaaaagtgacagaggtgctgccctggatatactccaagatggagagctctgctgggtag

SEQ ID NO: 87735 - DNA, 2175 bp, Artificial Sequence
  derived and/or modified sequence
ttaccctacatgcctgagaagccagggaccaagatggatcttctcctcgacatcagctaagcctggaggactcttcccctcagagaccatggagagggacagccacgggaatgcatctccagcaagaacaccttcagctggagcatctccagcccaggcatctccagctgggacacctccaggccgggcatctccagcccaggcatctccagcccaggcatctccagctgggacacctccgggccgggcatctccagcccaggcatctccagctggtacacctccaggccgggcatctccaggccgggcatctccagcccaggcatctccagcccaggcatctccagcccgggcatctccggctctggcatcactttccaggtcctcatccggcaggtcatcatccgccaggtcagcctcggtgacaacctccccaaccagagtgtaccttgttagagcaacaccagtgggggctgtacccatccgatcatctcctgccaggtcagcaccagcaaccagggccaccagggagagcccaggtacgagcctgcccaagttcacctggcgggagggccagaagcagctaccgctcatcgggtgcgtgctcctcctcattgccctggtggtttcgctcatcatcctcttccagttctggcagggccacacagggatcaggtacaaggagcagagggagagctgtcccaagcacgctgttcgctgtgacggggtggtggactgcaagctgaagagtgacgagctgggctgcgtgaggtttgactgggacaagtctctgcttaaaatctactctgggtcctcccatcagtggcttcccatctgtagcagcaactggaatgactcctactcagagaagacctgccagcagctgggtttcgagagtgctcaccggacaaccgaggttgcccacagggattttgccaacagcttctcaatcttgagatacaactccaccatccaggaaagcctccacaggtctgaatgcccttcccagcggtatatctctctccagtgttcccactgcggactgagggccatgaccgggcggatcgtgggaggggcgctggcctcggatagcaagtggccttggcaagtgagtctgcacttcggcaccacccacatctgtggaggcacgctcattgacgcccagtgggtgctcactgccgcccactgcttcttcgtgacccgggagaaggtcctggagggctggaaggtgtacgcgggcaccagcaacctgcaccagttgcctgaggcagcctccattgccgagatcatcatcaacagcaattacaccgatgaggaggacgactatgacatcgccctcatgcggctgtccaagcccctgaccctgtccgctcacatccaccctgcttgcctccccatgcatggacagacctttagcctcaatgagacctgctggatcacaggctttggcaagaccagggagacagatgacaagacatcccccttcctccgggaggtgcaggtcaatctcatcgacttcaagaaatgcaatgactacttggtctatgacagttaccttaccccaaggatgatgtgtgctggggaccttcgtgggggcagagactcctgccagggagacagcggggggcctcttgtctgtgagcagaacaaccgctggtacctggcaggtgtcaccagctggggcacaggctgtggccagagaaacaaacctggtgtgtacaccaaagtgacagaagttcttccctggatttacagcaagatggagagctcagcgggttgaaaaagggtggacctacaggccaggcaggcagttgctgggcagatgttctcccagaagtatttttttgtgtaaggttgcaatggactttgaaaacgtttcagtttctgcagaggattttgtgatagtttttgttatcaagcatttatgcatgggaatccgctcttcatggcctttcccagctctgtttgttttagtctttttgattttctttttgttgttgttgttgtctttttttaaaaacacaagtgactccattttaactctgacaactttcacagctgtcaccagaatgctccctgagaactaccattctttccctttcccacttaaaatatttcatcagaacctcactactatcataaaagagtataaagtaataaaataataaaaagtta

SEQ ID NO: 87736 - DNA, 2361 bp, Artificial Sequence
  derived and/or modified sequence
tgagaagccagggaccaagatggatcttctcctcgacatcagctaagcctggaggactcttcccctcagagaccatggagagggacagccacgggaatgcatctccagcaagaacaccttcagctggagcatctccagcccaggcatctccagctgggacacctccaggccgggcatctccagcccaggcatctccagcccaggcatctccagctgggacacctccgggccgggcatctccagcccaggcatctccagctggtacacctccaggccgggcatctccaggccgggcatctccagcccaggcatctccagcccaggcatctccagcccgggcatctccggctctggcatcactttccaggtcctcatccggcaggtcatcatccgccaggtcagcctcggtgacaacctccccaaccagagtgtaccttgttagagcaacaccagtgggggctgtacccatccgatcatctcctgccaggtcagcaccagcaaccagggccaccagggagagcccaggtacgagcctgcccaagttcacctggcgggagggccagaagcagctaccgctcatcgggtgcgtgctcctcctcattgccctggtggtttcgctcatcatcctcttccagttctggcagggccacacagggatcaggtacaaggagcagagggagagctgtcccaagcacgctgttcgctgtgacggggtggtggactgcaagctgaagagtgacgagctgggctgcgtgaggtttgactgggacaagtctctgcttaaaatctactctgggtcctcccatcagtggcttcccatctgtagcagcaactggaatgactcctactcagagaagacctgccagcagctgggtttcgagagtgctcaccggacaaccgaggttgcccacagggattttgccaacagcttctcaatcttgagatacaactccaccatccaggaaagcctccacaggtctgaatgcccttcccagcggtatatctctctccagtgttcccactgcggactgagggccatgaccgggcggatcgtgggaggggcgctggcctcggatagcaagtggccttggcaagtgagtctgcacttcggcaccacccacatctgtggaggcacgctcattgacgcccagtgggtgctcactgccgcccactgcttcttcgtgacccgggagaaggtcctggagggctggaaggtgtacgcgggcaccagcaacctgcaccagttgcctgaggcagcctccattgccgagatcatcatcaacagcaattacaccgatgaggaggacgactatgacatcgccctcatgcggctgtccaagcccctgaccctgtccgctcacatccaccctgcttgcctccccatgcatggacagacctttagcctcaatgagacctgctggatcacaggctttggcaagaccagggagacagatgacaagacatcccccttcctccgggaggtgcaggtcaatctcatcgacttcaagaaatgcaatgactacttggtctatgacagttaccttaccccaaggatgatgtgtgctggggaccttcgtgggggcagagactcctgccagggagacagcggggggcctcttgtctgtgagcagaacaaccgctggtacctggcaggtgtcaccagctggggcacaggctgtggccagagaaacaaacctggtgtgtacaccaaagtgacagaagttcttccctggatttacagcaagatggaggtaagatccctgcagcaggacactgcacccagcaggctgggaacttcctcaggtggggaccctggaggagcacccaggttgtaggcagaggtcccctcagcgtccccatattcggggggtgttctggacagggtcaaatgtgatgcctggggtcaatcccagctgtctgtgtttctttccctgcttttcttccctcagaacagagctcagcgggttgaaaaagggtggacctacaggccaggcaggcagttgctgggcagatgttctcccagaagtatttttttgtgtaaggttgcaatggactttgaaaacgtttcagtttctgcagaggattttgtgatagtttttgttatcaagcatttatgcatgggaatccgctcttcatggcctttcccagctctgtttgttttagtctttttgattttctttttgttgttgttgttgtctttttttaaaaacacaagtgactccattttaactctgacaactttcacagctgtcaccagaatgctccctgagaactaccattctttccctttcccacttaaaatatttcatcagaacctcactactatcataaaagagtataaagtaataaaataataaaaag

SEQ ID NO: 87737 - protein, 508 aa, Artificial Sequence
  derived and/or modified sequence
MYSSPLCLTQDEFHPFIEALLPHVRAFAYTWFNLQARKRKYFKKHEKRMSKDEERAVKDELLGEKPEVKQKWASRLLAKLRKDIRPECREDFVLSITGKKAPGCVLSNPDQKGKMRRIDCLRQADKVWRLDLVMVILFKGIPLESTDGERLVKAAQCGHPVLCVQPHHIGVAVKELDLYLAYFVRERDAEQSGSPRTGMGSDQEDSKPITLDTTDFQESFVTSGVFSVTELIQVSRTPVVTGTGPNFSLGELQGHLAYDLNPASTGLRRTLPSTSSSGSKRHKSGSMEEDVDTSPGGDYYTSPSSPTSSSRNWTEDMEGGISSPVKKTEMDKSPFNSPSPQDSPRLSSFTQHHRPVIAVHSGIARSPHPSSALHFPTTSILPQTASTYFPHTAIRYPPHLNPQDPLKDLVSLACDPASQQPGPLNGSGQLKMPSHCLSAQMLAPPPPGLPRLALPPATKPATTSEGGATSPTSPSYSPPDTSPANRSFVGLGPRDPAGIYQAQSWGDG

SEQ ID NO: 87738 - DNA, 1527 bp, Artificial Sequence
  derived and/or modified sequence
atgtatagcagccccttgtgcctaactcaggacgaattccacccattcatcgaagcccttctgcctcatgtgagagcatttgcttatacatggttcaacttgcaggccaggaagcgaaagtactttaaaaaacacgagaagagaatgtctaaggacgaggagagggcggtaaaagacgagctgctgggcgagaagccggaggtgaagcagaaatgggctagcagactgctggcgaagctgaggaaagatataagacccgagtgtcgcgaagattttgtgctgtctatcacaggcaagaaagcaccgggctgtgtcctctcgaatccggatcagaaaggtaagatgaggcgtatcgactgccttaggcaggcagacaaggtgtggagacttgacctagtaatggttatactatttaaaggtattccgctagaatcaacagacggcgagcggctggtgaaggcagcccagtgcgggcatcccgtgttgtgtgtacagcctcatcacattggtgtagccgtgaaggaactggacttatatttggcctatttcgttcgcgagcgggacgcggagcaatctggatcaccaaggaccggcatggggtcagaccaggaggactctaagcccattactctcgatactactgactttcaagagtctttcgtcacaagcggggtattcagtgtaactgaattgattcaagttagccgtaccccggtggtgaccggaacagggcctaatttttcactcggtgagctccaaggtcatctcgcttatgaccttaaccccgcatcgacaggactgcgaaggactctgccctctacatcaagttctggctcaaagcgtcacaagtcaggctcaatggaagaggacgtagacacctctccaggcggggattattatactagcccctcctcacccactagtagcagtcgcaactggacagaggacatggaaggtggaatatcctcacccgtaaaaaaaactgagatggataaatcccctttcaacagtcccagcccccaggactcaccccggttgagctccttcacccaacatcaccgtcctgtgattgctgtccattcaggcattgcccggagccctcacccttcatccgctcttcacttccctacgacaagtatcttaccccagacggcctccacctattttcctcatactgccatccgctacccgccccacctaaacccacaagatccacttaaagatctcgtgtcactcgcttgtgatccagcatcgcaacagcctggacctctcaacgggtccggtcagctgaagatgccttcccattgcctgtcagcccagatgctagctcctccacctcctggactgccacggttggccctgccacccgccactaagcccgccactaccagtgagggaggcgccacatcaccaacgtcaccttcttattcccctcccgacaccagccctgcaaaccggagctttgtcggtctgggacctagagatccagccggcatatatcaggcacagtcatggggcgacggttag

SEQ ID NO: 87739 - DNA, 1527 bp, Artificial Sequence
  derived and/or modified sequence
atgtacagcagccccctgtgcctgacccaggatgagttccaccccttcatcgaggccctgctgccccacgtgcgggcctttgcctacacctggttcaacctgcaggccaggaagaggaagtacttcaagaagcatgagaagaggatgagcaaggatgaggagagagctgtgaaggatgagctgctgggggagaagccagaggtgaagcagaagtgggccagccggctgctggccaagctgaggaaggacatccggccagaatgtcgggaggactttgtgctgagcatcaccgggaagaaggcccctggctgtgtgctgagcaacccagaccagaagggcaagatgagaagaattgactgcctgcggcaggccgacaaggtgtggaggctggacctggtgatggtgatcctcttcaagggcatccccctggagagcacagatggagagcggctggtgaaggccgcccagtgtggccaccctgtgctgtgtgtgcagccccaccacatcggcgtggccgtgaaggagctggacctgtacctggcctactttgtgcgggagagagatgctgagcagagcggcagccccaggacaggcatgggcagtgaccaggaggacagcaagcccatcaccctggacaccacagacttccaggagagctttgtgaccagcggggtcttctctgtgacagagctgatccaggtgtccaggacccctgtggtgactggaacaggccccaacttcagcctgggggagctgcagggccacctggcctatgacctgaacccagccagcacaggcctgcggaggaccctgcccagcaccagcagcagcggcagcaagaggcacaagagcggctccatggaggaggatgtggacaccagccctggaggagactactacaccagccccagcagccccaccagcagcagcaggaactggacagaggacatggagggcggcatcagcagccctgtgaagaagacagagatggacaagagccccttcaacagccccagcccccaggacagcccccggctgagcagcttcacccagcaccacaggcctgtgattgctgtgcacagcggcatcgcccggagcccccaccccagcagcgccctgcacttccccaccaccagcatcctgccccagacagccagcacctacttcccccacacagccatccgctacccaccccacctgaacccccaggaccccctgaaggacctggtgtccctggcctgtgaccctgccagccagcagcccggccccctgaatggaagtggccagctgaagatgcccagccactgcctgagcgcccagatgctggcccctcctcctcctggcctgccccggctggccctgcccccagccaccaagccagccaccaccagcgagggcggggccaccagccccaccagccccagctacagccccccagacaccagccctgccaacagaagctttgtgggcctgggcccccgggaccctgctggcatctaccaggcccagagctggggagatggatag

SEQ ID NO: 87740 - DNA, 1527 bp, Artificial Sequence
  derived and/or modified sequence
atgtacagcagccccctgtgcctgacccaggacgagttccaccccttcatagaggcactcttgcctcacgttagggccttcgcctacacctggttcaacctgcaggctaggaagagaaagtatttcaaaaagcacgagaaacgaatgagtaaagatgaggagagggctgtgaaggatgagttgctgggtgagaaacccgaagtgaagcagaaatgggcctctcggctgctggccaagctccgtaaggatatccggccagaatgccgagaggacttcgtattgagtattaccgggaagaaggcccctggctgcgtgctgtcaaatccagatcagaaggggaaaatgcgtagaattgactgtctcagacaagcagacaaggtgtggcgcctagatctcgtgatggttatcctgttcaagggcattcccttagaaagtaccgatggagaacgattggtgaaagccgctcaatgtggccacccagtcttgtgtgttcagccacaccacattggggttgccgttaaagaactggacctctacctggcatactttgtcagagaaagggatgcggagcagtcaggttcgccaaggacaggcatgggctctgaccaggaggacagcaaacccatcaccctggacaccaccgattttcaggagtctttcgtaacatccggggttttttctgtgaccgagttaatccaggtttcaaggaccccagttgttacaggtacaggccctaactttagtctgggcgaactccaagggcatctcgcgtacgacttgaaccctgctagcacaggtctaaggcgcaccctcccctcaaccagttctagtggatctaaaaggcacaagtcaggtagtatggaggaagatgttgatacatcaccagggggcgactactatacctcaccctcctcgcctactagctcttcccggaactggacggaagacatggagggcggcatttcctcccctgtaaaaaaaactgaaatggacaaatctcctttcaatagcccttcacctcaggattcccctcgtctgtctagctttactcaacaccatagacctgtgattgctgtacatagcggaatcgcacgcagcccccatccctcttctgccctgcacttcccaacaaccagcatactacctcaaacagcaagtacgtacttcccacacactgccattcgatatcccccccaccttaatccccaagaccccctgaaagacctggtctccctcgcctgtgaccctgcgagccagcagcctggaccccttaacgggtcaggtcaactgaaaatgcccagtcattgtctctctgcccagatgttagccccccccccacctggcctgccaaggctggcgctgccccccgctacaaaacctgccacaaccagcgagggaggagcgactagccctacatcacctagctattcccctcccgatacgtcgcctgcaaacaggagcttcgtaggcctcgggccgcgggaccccgccggaatctatcaggcccagtcatggggggatggttag

SEQ ID NO: 87741 - DNA, 2363 bp, Artificial Sequence
  derived and/or modified sequence
atgtattcgtccccgctctgcctcacccaggatgagttccacccgttcatcgaggccctgctgcctcacgtccgcgccttcgcctacacctggttcaacctgcaggcgcggaagcgcaagtacttcaagaagcacgagaagcggatgtcgaaggacgaggagcgtgcggtcaaggacgagctgctgggcgagaagcccgaggtcaagcagaagtgggcgtcgcggctgctggccaagctgcgcaaggacatccggcccgagtgccgcgaggacttcgtgctgagcatcaccggcaagaaggcgccgggctgcgtgctctccaaccccgaccagaagggcaagatgcggcgcatcgactgtctccggcaggcggacaaggtgtggcggctggacctggtcatggtcatcctgttcaagggcatcccgctggagagcaccgacggcgagcgcctggtcaaggctgcgcagtgcggtcacccggtcctgtgcgtgcagccgcaccacattggcgtggccgtcaaggagctggacctctacctggcctacttcgtgcgtgagcgagatgcagagcaaagcggcagtccccggacagggatgggctctgaccaggaggacagcaagcccatcacgctggacacgaccgacttccaggagagctttgtcacctccggcgtgttcagcgtcactgagctcatccaagtgtcccggacacccgtggtgactggaacaggacccaacttctccctgggggagctgcaggggcacctggcatacgacctgaacccagccagcactggcctcagaagaacgctgcccagcacctcctccagtgggagcaagcggcacaaatcgggctcgatggaggaagacgtggacacgagccctggcggcgattactacacttcgcccagctcgcccacgagtagcagccgcaactggacggaggacatggaaggaggcatctcgtccccggtgaagaagacagagatggacaagtcaccattcaacagcccgtccccccaggactctccccgcctctccagcttcacccagcaccaccggcccgtcatcgccgtgcacagcgggatcgcccggagcccacacccgtcctccgctctgcatttccctacgacgtccatcctaccccagacggcctccacctacttcccccacacggccatccgctacccacctcatctcaacccccaggacccgctcaaagatcttgtctcgctggcctgcgacccagccagccagcaacctggaccgttaaatggaagtggtcagctcaaaatgcccagccactgcctttctgctcagatgctggcacctccgcccccggggctgccacggctggcgctcccccctgccaccaaacccgccaccacctccgagggaggagccacgtcgccgacctcgccttcctactctccgcccgacacgtcccctgcaaaccgttcctttgtgggattaggaccaagggatcctgcgggcatttatcaggcacagtcctggtatctgggatagcaaaggtcttcttccctcgccccttctccatcgtcccaggaatcccagggggcagcacagccggcccccggcccacgttttcggtggaaaattagagtgaacaagaacacccctgccgactcccagcccggccaaaaagacaaaacacatagacgcacacactcaggaggaaaagaaaaaacaaaggcagaagaagaagaagaagaaataaaaacccacccaagcaagaagacaaaaggtaaagacgcaacgtttccaactctcgggacgccaaggccgcaggactggagggccaggccccgccacccccacgggagacccgggacagggcgtcttcctaagttattcatctcctctccgcctgctgctcgggaaggacagacgccggccgcccgcccgcgccccggaggccctggctctgtccggagaccaggtgagcacagcctggagcctgtgcccagggccgacaggcgcgacacccagcaaggccacctctccccgggcccccgcgcctctgccggacacggaccggcccctcagcccccaccgaggacgcagccactggggggaaagggagacacagcggaccccggccgggcagcggagaccgcagaggcgggcagggtggggcaggcgagtggtgtcgcgggggtgcgtggcgcttgcgagccctggccaggggaggaagtgaggcccaggcacctgctgcccctcgagggggccctgcctgccgcggggcctccccacaagcccctcccaaagcgccggccgactcgctgtctcgctggggactctttcagccctcgcgcccgcccgtttgggaggagaagtctcta

SEQ ID NO: 87742 - DNA, 1586 bp, Artificial Sequence
  derived and/or modified sequence
aatgactcagtaagttcagcgcgcccgctccggccggccctgcgcctcccgccgcgcccgggatgtattcgtccccgctctgcctcacccaggatgagttccacccgttcatcgaggccctgctgcctcacgtccgcgccttcgcctacacctggttcaacctgcaggcgcggaagcgcaagtacttcaagaagcacgagaagcggatgtcgaaggacgaggagcgtgcggtcaaggacgagctgctgggcgagaagcccgaggtcaagcagaagtgggcgtcgcggctgctggccaagctgcgcaaggacatccggcccgagtgccgcgaggacttcgtgctgagcatcaccggcaagaaggcgccgggctgcgtgctctccaaccccgaccagaagggcaagatgcggcgcatcgactgtctccggcaggcggacaaggtgtggcggctggacctggtcatggtcatcctgttcaagggcatcccgctggagagcaccgacggcgagcgcctggtcaaggctgcgcagtgcggtcacccggtcctgtgcgtgcagccgcaccacattggcgtggccgtcaaggagctggacctctacctggcctacttcgtgcgtgagcgagatgcagagcaaagcggcagtccccggacagggatgggctctgaccaggaggacagcaagcccatcacgctggacacgaccgacttccaggagagctttgtcacctccggcgtgttcagcgtcactgagctcatccaagtgtcccggacacccgtggtgactggaacaggacccaacttctccctgggggagctgcaggggcacctggcatacgacctgaacccagccagcactggcctcagaagaacgctgcccagcacctcctccagtgggagcaagcggcacaaatcgggctcgatggaggaagacgtggacacgagccctggcggcgattactacacttcgcccagctcgcccacgagtagcagccgcaactggacggaggacatggaaggaggcatctcgtccccggtgaagaagacagagatggacaagtcaccattcaacagcccgtccccccaggactctccccgcctctccagcttcacccagcaccaccggcccgtcatcgccgtgcacagcgggatcgcccggagcccacacccgtcctccgctctgcatttccctacgacgtccatcctaccccagacggcctccacctacttcccccacacggccatccgctacccacctcatctcaacccccaggacccgctcaaagatcttgtctcgctggcctgcgacccagccagccagcaacctggaccgttaaatggaagtggtcagctcaaaatgcccagccactgcctttctgctcagatgctggcacctccgcccccggggctgccacggctggcgctcccccctgccaccaaacccgccaccacctccgagggaggagccacgtcgccgacctcgccttcctactctccgcccgacacgtcccctgcaaaccgttcctttgtgggattaggaccaagggatcctgcgggcatttatcaggcacagtcctggggggatggg

SEQ ID NO: 87743 - DNA, 1527 bp, Artificial Sequence
  derived and/or modified sequence
atgtactcgtcgcccctctgcctgacccaggatgagttccatccatttattgaagccctgttaccacacgtgcgagcattcgcttacacatggttcaacttacaggctaggaaacgcaaatattttaaaaagcacgagaagagaatgtccaaggacgaggaacgcgcagtaaaagacgagctgctcggggaaaagcctgaggtgaaacagaaatgggcctctcgtctccttgccaagctcaggaaagacattaggcccgaatgccgtgaagattttgtgctgtccattacaggaaaaaaagcccctggctgtgtcttgtcaaaccccgatcagaaggggaagatgaggcgaatcgattgcctgagacaggctgacaaagtctggcgtctggaccttgtgatggtgattctgttcaagggaattccactggagagtacagacggggaacgacttgtcaaggccgcacagtgtggccatcctgtgctgtgcgttcagcctcaccatattggcgttgcagtgaaagagctcgacctttatctggcatactttgttcgggagagagatgcagaacagtccggctcccccaggacaggaatggggtccgatcaggaggacagcaaacctataacattggacaccacagatttccaggagagcttcgtcacctccggcgttttctctgtgacagagttgatccaggtctcccggacgcctgtggttacagggacagggcctaacttttcactgggggagttgcagggacatcttgcatacgacctgaaccctgcatctactggtctgcgcagaacactcccaagtacttcaagcagcggatccaaacgtcacaagagtgggtcaatggaggaagatgtggatacctcccccggaggagattattatacatcgccctcgtctcccacaagttctagccgtaattggacagaggacatggaaggcggaatctcttctccagtgaaaaaaactgagatggataaaagcccctttaattcacctagcccgcaggatagtcctcggctctcttcctttacacagcatcaccggcctgtgatcgcagttcactcgggcatcgcgagaagccctcacccatcctctgctctccactttcctacaacaagcattctgccccagaccgcctctacctattttccacacacagctattcggtacccgcctcatctgaaccctcaggatccactgaaggacctggtcagcttggcttgcgaccctgcgagccagcagccagggcctctgaatggatcaggacagctgaagatgccttctcactgcctcagcgcacaaatgctggcacccccaccgccaggactgcctagactggccttgcctcccgcaacaaagcccgctacgacttctgaaggcggagccacttctccaacatctccatcgtattcccccccagatacctccccagcgaaccggtcctttgtgggtttgggcccacgggaccctgcaggtatctatcaggctcagagttggggggatggctag

SEQ ID NO: 87744 - DNA, 1527 bp, Artificial Sequence
  derived and/or modified sequence
atgtacagcagccccctgtgcctgacccaggacgagttccaccccttcatcgaggccctgctgccccacgtgagagccttcgcctacacctggttcaacctgcaggccagaaagagaaagtacttcaagaagcacgagaagagaatgagcaaggacgaggagagagccgtgaaggacgagctgctgggcgagaagcccgaggtgaagcagaagtgggccagcagactgctggccaagctgagaaaggacatcagacccgagtgcagagaggacttcgtgctgagcatcaccggcaagaaggcccccggctgcgtgctgagcaaccccgaccagaagggcaagatgagaagaatcgactgcctgagacaggccgacaaggtgtggagactggacctggtgatggtgatcctgttcaagggcatccccctggagagcaccgacggcgagagactggtgaaggccgcccagtgcggccaccccgtgctgtgcgtgcagccccaccacatcggcgtggccgtgaaggagctggacctgtacctggcctacttcgtgagagagagagacgccgagcagagcggcagccccagaaccggcatgggcagcgaccaggaggacagcaagcccatcaccctggacaccaccgacttccaggagagcttcgtgaccagcggcgtgttcagcgtgaccgagctgatccaggtgagcagaacccccgtggtgaccggcaccggccccaacttcagcctgggcgagctgcagggccacctggcctacgacctgaaccccgccagcaccggcctgagaagaaccctgcccagcaccagcagcagcggcagcaagagacacaagagcggcagcatggaggaggacgtggacaccagccccggcggcgactactacaccagccccagcagccccaccagcagcagcagaaactggaccgaggacatggagggcggcatcagcagccccgtgaagaagaccgagatggacaagagccccttcaacagccccagcccccaggacagccccagactgagcagcttcacccagcaccacagacccgtgatcgccgtgcacagcggcatcgccagaagcccccaccccagcagcgccctgcacttccccaccaccagcatcctgccccagaccgccagcacctacttcccccacaccgccatcagataccccccccacctgaacccccaggaccccctgaaggacctggtgagcctggcctgcgaccccgccagccagcagcccggccccctgaacggcagcggccagctgaagatgcccagccactgcctgagcgcccagatgctggccccccccccccccggcctgcccagactggccctgccccccgccaccaagcccgccaccaccagcgagggcggcgccaccagccccaccagccccagctacagcccccccgacaccagccccgccaacagaagcttcgtgggcctgggccccagagaccccgccggcatctaccaggcccagagctggggcgacggctag

SEQ ID NO: 87745 - protein, 406 aa, Artificial Sequence
  derived and/or modified sequence
MDEFHPFIEALLPHVRAFAYTWFNLQARKRKYFKKHEKRMSKDEERAVKDELLGEKPEVKQKWASRLLAKLRKDIRPECREDFVLSITGKKAPGCVLSNPDQKGKMRRIDCLRQADKVWRLDLVMVILFKGIPLESTDGERLVKAAQCGHPVLCVQPHHIGVAVKELDLYLAYFVRERDTTDFQESFVTSGVFSVTELIQVSRTPVVTGTGPNFSLGELQGHLAYDLNPASTGLRRTLPSTSSSGSKRHKSGSMEEDVDTSPGGDYYTSPSSPTSSSRNWTEDMEGGISSPVKKTEMDKSPFNSPSPQDSPRLSSFTQHHRPVIAVHSGIARSPHPSSALHFPTTSILPQTASTYFPHTAIRYPPHLNPQDPLKDLVSLACDPASQQPGPPTLRPTRPLQTVPLWD

SEQ ID NO: 87746 - protein, 430 aa, Artificial Sequence
  derived and/or modified sequence
MDEFHPFIEALLPHVRAFAYTWFNLQARKRKYFKKHEKRMSKDEERAVKDELLGEKPEVKQKWASRLLAKLRKDIRPECREDFVLSITGKKAPGCVLSNPDQKGKMRRIDCLRQADKVWRLDLVMVILFKGIPLESTDGERLVKAAQCGHPVLCVQPHHIGVAVKELDLYLAYFVRERDAEQSGSPRTGMGSDQEDSKPITLDTTDFQESFVTSGVFSVTELIQVSRTPVVTGTGPNFSLGELQGHLAYDLNPASTGLRRTLPSTSSSGSKRHKSGSMEEDVDTSPGGDYYTSPSSPTSSSRNWTEDMEGGISSPVKKTEMDKSPFNSPSPQDSPRLSSFTQHHRPVIAVHSGIARSPHPSSALHFPTTSILPQTASTYFPHTAIRYPPHLNPQDPLKDLVSLACDPASQQPGPPTLRPTRPLQTVPLWD

SEQ ID NO: 87747 - DNA, 1221 bp, Artificial Sequence
  derived and/or modified sequence
atggatgagttccatcctttcattgaagcactactcccccacgtgcgcgcctttgcctatacttggtttaacctgcaggctagaaaaagaaaatatttcaagaaacacgagaaacgtatgagcaaggacgaagaaagagctgtcaaggacgaactgctgggtgagaagcctgaggttaagcagaagtgggctagccgcctgctagctaaactgcggaaagatataagacccgagtgtcgggaggacttcgtcttgtctatcacagggaaaaaagcccctggctgtgtgttgtccaacccagaccagaagggcaaaatgcgaagaatcgattgtctgagacaagctgataaagtgtggcggctggatctggttatggtcatcctgttcaaagggatcccactggagtcaacggacggagaacgcctagtaaaagccgcccagtgcggacaccctgttctgtgcgtgcagccccaccatattggggtcgctgtgaaagaactcgacctatacctggcctacttcgtgagggagcgcgatacaacagacttccaggagtccttcgtcaccagcggtgtgtttagcgtgaccgaactgatccaggtaagccggacgcctgttgttacaggcaccggccccaatttcagtctaggcgaattgcagggccatctggcttatgacctcaacccagcttctactgggctgcgcaggaccttgccgtcaacttccagcagcggatctaagagacataaatccggttcgatggaagaagatgtggatacatctcccggcggggattactatacttcacccagcagtccaacttcaagtagccgcaattggactgaagacatggaaggcggcatttcgtcccctgtgaagaaaacagaaatggataaatccccgtttaactcaccctcccctcaagactccccacgactgtcaagcttcactcagcatcacaggcctgttattgcagtgcactctggcatcgcccgatccccacaccctagcagtgcccttcactttccaacgacatctatcctgccacagacagcctcgacctatttccctcataccgcaataagatacccgcctcatctcaatccacaggatcctcttaaagatcttgtcagtcttgcctgtgatccagcatcccagcaaccaggccctcctaccctgcgccctaccaggcctctgcagacagtgccgctgtgggactag

SEQ ID NO: 87748 - DNA, 1293 bp, Artificial Sequence
  derived and/or modified sequence
atggacgagtttcacccttttatagaagcccttctaccccacgtgagagcttttgcgtacacctggtttaatttgcaggctcgcaagagaaagtactttaaaaaacatgaaaagaggatgtcaaaagacgaagagagagccgttaaagatgaactgctgggcgagaagcccgaagtcaagcagaaatgggcaagcagacttttggcgaagctcagaaaagacatcagaccagagtgccgggaggactttgtattatccataaccggcaagaaagctccaggctgtgtgctgagtaatcctgaccagaaggggaaaatgcggagaattgattgtctgcggcaggccgacaaggtctggagattagatctcgtaatggtgattctctttaagggcatccctctggaaagcactgacggggagcggcttgtcaaggcggcccaatgcggccaccccgttctgtgcgtgcagccccaccatatcggagtggctgtcaaggaattggatctttatctggcgtattttgtccgtgaaagggatgctgaacagtccggttccccccggaccggtatggggtctgaccaggaggattccaaacccattaccctggacactactgattttcaagaatctttcgtgacctcaggcgtcttttctgtcaccgagcttattcaagtatcccgaacccctgtggttacagggacaggacccaacttttcattgggtgaactccagggtcacttggcttacgacctcaacccggcctccacaggtttacgcagaactctgccaagcaccagttctagtgggagcaagcgacacaaatcgggcagcatggaagaagacgtggatacatctcccgggggcgattattacactagtcccagtagccccacctccagttctcgtaattggactgaggacatggagggaggtatttctagccccgtcaagaagacagaaatggacaagtctccttttaattccccatcaccccaagatagccctcgactgagctcattcactcagcatcaccgacccgtgattgccgtgcatagcggtatcgccaggtccccccaccccagcagtgctttgcatttcccaactacgtccatcctcccccagaccgctagcacttactttccccacactgcaatccggtaccccccccacctcaaccctcaggacccgcttaaggacctcgtatccctggcatgcgatcctgcctctcagcagcccgggccgccaaccctgcgcccaaccagacctctccagaccgtgcccttgtgggattag

SEQ ID NO: 87749 - DNA, 1221 bp, Artificial Sequence
  derived and/or modified sequence
atggatgagttccaccccttcatcgaggccctgctgccccacgtgcgggcctttgcctacacctggttcaacctgcaggccaggaagaggaagtacttcaagaagcatgagaagaggatgagcaaggatgaggagagagctgtgaaggatgagctgctgggggagaagccagaggtgaagcagaagtgggccagccggctgctggccaagctgaggaaggacatccggcctgagtgcagagaagattttgtgctgagcatcaccgggaagaaggcccctggctgtgtgctgagcaacccagaccagaagggcaagatgagaagaattgactgcctgcggcaggccgacaaggtgtggaggctggacctggtgatggtgatcctcttcaagggcatccccctggagagcacagatggagagcggctggtgaaggccgcccagtgtggccaccctgtgctgtgtgtgcagccccaccacatcggcgtggccgtgaaggagctggacctgtacctggcctactttgtgcgggagcgggacaccacagacttccaggagagctttgtgaccagcggggtcttctctgtgacagagctgatccaggtgtccaggacccctgtggtgacaggcaccggccccaacttcagcctgggggagctgcagggccacctggcctatgacctgaacccagccagcacaggcctgcggaggaccctgcccagcaccagcagcagcggcagcaagaggcacaagagcggctccatggaggaggatgtggacaccagccctggaggagactactacaccagccccagcagccccaccagcagcagcaggaactggacagaggacatggagggcggcatcagcagccctgtgaagaagacagagatggacaagagccccttcaacagccccagcccccaggacagcccccggctgagcagcttcacccagcaccacaggcctgtgattgctgtgcacagcggcatcgcccggagcccccaccccagcagcgccctgcacttccccaccaccagcatcctgccccagacagccagcacctacttcccccacacagccatccgctacccaccccacctgaacccccaggaccccctgaaggacctggtgtccctggcctgtgaccctgccagccagcagcccggcccccccaccctgcggcccacccggcccctgcagacagtgcccctgtgggactag

SEQ ID NO: 87750 - DNA, 1293 bp, Artificial Sequence
  derived and/or modified sequence
atggatgagttccaccccttcatcgaggccctgctgccccacgtgcgggcctttgcctacacctggttcaacctgcaggccaggaagaggaagtacttcaagaagcatgagaagaggatgagcaaggatgaggagagagctgtgaaggatgagctgctgggggagaagccagaggtgaagcagaagtgggccagccggctgctggccaagctgaggaaggacatccggcctgagtgcagagaagattttgtgctgagcatcaccgggaagaaggcccctggctgtgtgctgagcaacccagaccagaagggcaagatgagaagaattgactgcctgcggcaggccgacaaggtgtggaggctggacctggtgatggtgatcctcttcaagggcatccccctggagagcacagatggagagcggctggtgaaggccgcccagtgtggccaccctgtgctgtgtgtgcagccccaccacatcggcgtggccgtgaaggagctggacctgtacctggcctactttgtgcgggagagagatgctgagcagagcggcagccccaggacaggcatgggcagtgaccaggaggacagcaagcccatcaccctggacaccacagacttccaggagagctttgtgaccagcggggtcttctctgtgacagagctgatccaggtgtccaggacccctgtggtgacaggcaccggccccaacttcagcctgggggagctgcagggccacctggcctatgacctgaacccagccagcacaggcctgcggaggaccctgcccagcaccagcagcagcggcagcaagaggcacaagagcggctccatggaggaggatgtggacaccagccctggaggagactactacaccagccccagcagccccaccagcagcagcaggaactggacagaggacatggagggcggcatcagcagccctgtgaagaagacagagatggacaagagccccttcaacagccccagcccccaggacagcccccggctgagcagcttcacccagcaccacaggcctgtgattgctgtgcacagcggcatcgcccggagcccccaccccagcagcgccctgcacttccccaccaccagcatcctgccccagacagccagcacctacttcccccacacagccatccgctacccaccccacctgaacccccaggaccccctgaaggacctggtgtccctggcctgtgaccctgccagccagcagcccggcccccccaccctgcggcccacccggcccctgcagacagtgcccctgtgggactag

SEQ ID NO: 87751 - DNA, 1221 bp, Artificial Sequence
  derived and/or modified sequence
atggacgagttccaccccttcatcgaggccctgctgccccacgtgagagccttcgcctatacgtggttcaatctgcaagcccgaaaaagaaagtatttcaaaaagcacgaaaaaaggatgtccaaagatgaggagcgagcggtcaaagacgaattactgggcgagaagcccgaggtcaaacagaagtgggccagccgcctgcttgccaagttaaggaaggacattcggcccgagtgtcgcgaggattttgtcctgtctatcaccgggaaaaaagcaccgggctgtgtgctgtctaacccggatcagaagggaaagatgcggcggatcgattgcctgcggcaggctgataaggtatggcggctcgatttggtcatggttattttattcaaagggatcccattggaaagtacggacggcgagagactggtgaaggcagcccagtgtggccatcccgtactctgcgtgcagccccaccatatcggtgtcgctgttaaggaattggatctctacttagcctactttgtcagagagcgcgataccaccgacttccaggaatccttcgtcacctccggagttttttctgtgaccgagctgatacaggtgagtaggacccctgtggtgaccggcaccggacccaacttttccctgggagagctgcaaggacatctcgcttacgacctcaatcccgccagcacagggttgaggcgaactctcccctccactagctcttccggctccaaacgacacaagagtgggtccatggaagaagatgtagacacatcacccggcggagattactatacttcccccagtagccctacttcttcctcgcggaactggacggaagatatggagggcggaataagctccccagtcaagaagaccgagatggataaatctcccttcaattccccatcacctcaagacagccctagactttcatcatttacccagcaccatcgaccggtgatagccgtccacagcgggatcgcccgctcaccacatccttcatccgcactacacttccctacgacaagcatactgccccaaactgcctccacgtatttcccacataccgccatccgctatcccccccatctgaatccacaggacccattgaaggatctggttagtctcgcttgcgatccggcctcccagcagcccgggcccccaactcttcgcccgacccgacccctccagacagtccccttgtgggactag

SEQ ID NO: 87752 - DNA, 1293 bp, Artificial Sequence
  derived and/or modified sequence
atggacgagttccaccccttcatcgaggccctgctgccccacgtgcgagctttcgcttacacgtggttcaacctgcaggccagaaagcggaagtatttcaagaaacatgaaaagcggatgtccaaggatgaggaacgcgctgtaaaagatgagctgttgggcgagaagcccgaagtcaagcaaaaatgggcctcaaggttactagccaagctgcgtaaggatatcaggccagaatgtcgtgaggacttcgtcttgtccatcaccgggaaaaaggcccccgggtgtgtcctcagtaatcctgaccagaaagggaaaatgagaaggattgactgtctccgacaggccgacaaagtgtggcgcctcgaccttgtgatggtgattctcttcaagggaataccattggagagtaccgacggcgagagattagtcaaagcagcacagtgcgggcaccccgtgctgtgcgtgcagcctcaccacattggcgtggccgtaaaggaactagacctgtacctggcttacttcgtgcgagagagagatgcagagcagtctgggtcaccccgcaccggcatgggaagcgaccaagaggactcgaagcccattaccttggatacgaccgacttccaggagtcttttgtgaccagtggggtgttttcagtgacagaactgatccaggtgtcgagaacgcccgtcgtcacagggaccggacccaactttagtctcggcgagctacaggggcatttggcatacgaccttaacccagcctctacgggcttgagaagaacacttcctagcacttcttcaagcggcagcaaaaggcacaagtccggaagcatggaagaagacgtggatacttccccaggtggagattactacacatcgccaagctccccaacctcatcctcgagaaattggacagaagacatggaggggggcatctcaagtcctgttaaaaagaccgagatggataagtctcccttcaattctccttccccacaggatagtcctaggttatctagtttcacacagcatcaccgcccagtgattgctgtgcattcggggatcgctcggtccccccacccaagctccgcgcttcattttcccacaacgtccatcctgccgcagactgctagtacgtacttcccacatacagcaatcaggtatcccccccatctcaacccccaggatccactgaaagacctcgtgtccctggcatgtgaccctgcgtcgcaacaaccgggaccacctaccctgcgccccacgaggcctctgcagacagtacccctatgggactag

SEQ ID NO: 87753 - DNA, 2175 bp, Artificial Sequence
  derived and/or modified sequence
ccccccctcgccggggaccgagcgcgctcgctccggcgccggcctcgcctcctcgcagcagcgccatggatgagttccacccgttcatcgaggccctgctgcctcacgtccgcgccttcgcctacacctggttcaacctgcaggcgcggaagcgcaagtacttcaagaagcacgagaagcggatgtcgaaggacgaggagcgtgcggtcaaggacgagctgctgggcgagaagcccgaggtcaagcagaagtgggcgtcgcggctgctggccaagctgcgcaaggacatccggcccgagtgccgcgaggacttcgtgctgagcatcaccggcaagaaggcgccgggctgcgtgctctccaaccccgaccagaagggcaagatgcggcgcatcgactgtctccggcaggcggacaaggtgtggcggctggacctggtcatggtcatcctgttcaagggcatcccgctggagagcaccgacggcgagcgcctggtcaaggctgcgcagtgcggtcacccggtcctgtgcgtgcagccgcaccacattggcgtggccgtcaaggagctggacctctacctggcctacttcgtgcgtgagcgagacacgaccgacttccaggagagctttgtcacctccggcgtgttcagcgtcactgagctcatccaagtgtcccggacacccgtggtgactggaacaggacccaacttctccctgggggagctgcaggggcacctggcatacgacctgaacccagccagcactggcctcagaagaacgctgcccagcacctcctccagtgggagcaagcggcacaaatcgggctcgatggaggaagacgtggacacgagccctggcggcgattactacacttcgcccagctcgcccacgagtagcagccgcaactggacggaggacatggaaggaggcatctcgtccccggtgaagaagacagagatggacaagtcaccattcaacagcccgtccccccaggactctccccgcctctccagcttcacccagcaccaccggcccgtcatcgccgtgcacagcgggatcgcccggagcccacacccgtcctccgctctgcatttccctacgacgtccatcctaccccagacggcctccacctacttcccccacacggccatccgctacccacctcatctcaacccccaggacccgctcaaagatcttgtctcgctggcctgcgacccagccagccagcaacctggaccgcctactctccgcccgacacgtcccctgcaaaccgttcctttgtgggattaggaccaagggatcctgcgggcatttatcaggcacagtcctggtatctgggatagcaaaggtcttcttccctcgccccttctccatcgtcccaggaatcccagggggcagcacagccggcccccggcccacgttttcggtggaaaattagagtgaacaagaacacccctgccgactcccagcccggccaaaaagacaaaacacatagacgcacacactcaggaggaaaagaaaaaacaaaggcagaagaagaagaagaagaaataaaaacccacccaagcaagaagacaaaaggtaaagacgcaacgtttccaactctcgggacgccaaggccgcaggactggagggccaggccccgccacccccacgggagacccgggacagggcgtcttcctaagttattcatctcctctccgcctgctgctcgggaaggacagacgccggccgcccgcccgcgccccggaggccctggctctgtccggagaccaggtgagcacagcctggagcctgtgcccagggccgacaggcgcgacacccagcaaggccacctctccccgggcccccgcgcctctgccggacacggaccggcccctcagcccccaccgaggacgcagccactggggggaaagggagacacagcggaccccggccgggcagcggagaccgcagaggcgggcagggtggggcaggcgagtggtgtcgcgggggtgcgtggcgcttgcgagccctggccaggggaggaagtgaggcccaggcacctgctgcccctcgagggggccctgcctgccgcggggcctccccacaagcccctcccaaagcgccggccgactcgctgtctcgctggggactctttcagccctcgcgcccgcccgtttgggaggagaagtctcta

SEQ ID NO: 87754 - DNA, 2247 bp, Artificial Sequence
  derived and/or modified sequence
ccccccctcgccggggaccgagcgcgctcgctccggcgccggcctcgcctcctcgcagcagcgccatggatgagttccacccgttcatcgaggccctgctgcctcacgtccgcgccttcgcctacacctggttcaacctgcaggcgcggaagcgcaagtacttcaagaagcacgagaagcggatgtcgaaggacgaggagcgtgcggtcaaggacgagctgctgggcgagaagcccgaggtcaagcagaagtgggcgtcgcggctgctggccaagctgcgcaaggacatccggcccgagtgccgcgaggacttcgtgctgagcatcaccggcaagaaggcgccgggctgcgtgctctccaaccccgaccagaagggcaagatgcggcgcatcgactgtctccggcaggcggacaaggtgtggcggctggacctggtcatggtcatcctgttcaagggcatcccgctggagagcaccgacggcgagcgcctggtcaaggctgcgcagtgcggtcacccggtcctgtgcgtgcagccgcaccacattggcgtggccgtcaaggagctggacctctacctggcctacttcgtgcgtgagcgagatgcagagcaaagcggcagtccccggacagggatgggctctgaccaggaggacagcaagcccatcacgctggacacgaccgacttccaggagagctttgtcacctccggcgtgttcagcgtcactgagctcatccaagtgtcccggacacccgtggtgactggaacaggacccaacttctccctgggggagctgcaggggcacctggcatacgacctgaacccagccagcactggcctcagaagaacgctgcccagcacctcctccagtgggagcaagcggcacaaatcgggctcgatggaggaagacgtggacacgagccctggcggcgattactacacttcgcccagctcgcccacgagtagcagccgcaactggacggaggacatggaaggaggcatctcgtccccggtgaagaagacagagatggacaagtcaccattcaacagcccgtccccccaggactctccccgcctctccagcttcacccagcaccaccggcccgtcatcgccgtgcacagcgggatcgcccggagcccacacccgtcctccgctctgcatttccctacgacgtccatcctaccccagacggcctccacctacttcccccacacggccatccgctacccacctcatctcaacccccaggacccgctcaaagatcttgtctcgctggcctgcgacccagccagccagcaacctggaccgcctactctccgcccgacacgtcccctgcaaaccgttcctttgtgggattaggaccaagggatcctgcgggcatttatcaggcacagtcctggtatctgggatagcaaaggtcttcttccctcgccccttctccatcgtcccaggaatcccagggggcagcacagccggcccccggcccacgttttcggtggaaaattagagtgaacaagaacacccctgccgactcccagcccggccaaaaagacaaaacacatagacgcacacactcaggaggaaaagaaaaaacaaaggcagaagaagaagaagaagaaataaaaacccacccaagcaagaagacaaaaggtaaagacgcaacgtttccaactctcgggacgccaaggccgcaggactggagggccaggccccgccacccccacgggagacccgggacagggcgtcttcctaagttattcatctcctctccgcctgctgctcgggaaggacagacgccggccgcccgcccgcgccccggaggccctggctctgtccggagaccaggtgagcacagcctggagcctgtgcccagggccgacaggcgcgacacccagcaaggccacctctccccgggcccccgcgcctctgccggacacggaccggcccctcagcccccaccgaggacgcagccactggggggaaagggagacacagcggaccccggccgggcagcggagaccgcagaggcgggcagggtggggcaggcgagtggtgtcgcgggggtgcgtggcgcttgcgagccctggccaggggaggaagtgaggcccaggcacctgctgcccctcgagggggccctgcctgccgcggggcctccccacaagcccctcccaaagcgccggccgactcgctgtctcgctggggactctttcagccctcgcgcccgcccgtttgggaggagaagtctcta

SEQ ID NO: 87755 - DNA, 1221 bp, Artificial Sequence
  derived and/or modified sequence
atggacgagtttcatcccttcattgaggctttgcttccgcacgtacgcgctttcgcttatacatggtttaatttgcaggcccgaaaaaggaaatattttaagaaacacgaaaagcggatgagtaaggacgaagagagggcagtgaaggatgagcttctgggggagaaacccgaggttaaacagaaatgggcctctagactgctggccaagctgagaaaagacattcgtcctgaatgccgggaggactttgtcctgagcatcacaggaaaaaaagcgcctgggtgcgtcttatctaacccggaccagaaggggaaaatgcgaagaattgattgtcttcggcaggccgataaggtctggagacttgacttggttatggtcatcctgttcaaaggaatacctctggaatccacagacggcgagagattggtaaaggcggctcagtgcggtcatcccgtattatgtgtgcagccacaccacatcggcgtcgccgttaaggagctggacctgtacctagcctatttcgtccgagagcgagataccactgatttccaggaatcctttgtgacctccggcgttttttcagtgaccgagctgatccaagtctcccggacacccgttgtgacaggcaccggacctaatttctcacttggcgagttgcagggacatttggcctatgatcttaaccccgcttccactggcctgagaaggactttaccatcaacatccagtagcgggtctaaaagacacaagagcgggtctatggaagaagatgtagatacctcgcccggaggtgattattatacatcgccaagctctccgacatctagctcgcgaaactggactgaggacatggaaggtgggatctcaagcccagtgaagaaaacagaaatggataagtcgccattcaatagcccttcacctcaggacagccctaggctttcttccttcactcagcatcatagacccgtgattgcagtacactccgggattgctcgaagcccgcacccctcctctgccctgcactttcccaccaccagcatattgccacagactgcctcaacctacttccctcatacagccatcagatacccgccacacctgaatcctcaggacccattgaaggatctggtgagtttggcatgtgaccctgcctctcaacaacccggtcccccaacactccggccaacccgccctctacagaccgttccattgtgggattag

SEQ ID NO: 87756 - DNA, 1293 bp, Artificial Sequence
  derived and/or modified sequence
atggatgagtttcatcccttcattgaggccctccttccgcacgtgcgcgcatttgcctacacctggtttaatctgcaagcccgaaagaggaaatactttaagaaacacgagaaacggatgtctaaagatgaagagagggccgtgaaggacgagctgctaggagaaaaacccgaagtaaagcagaagtgggctagcaggctgctcgccaagctgcgaaaagatattagacccgaatgtagagaggacttcgtgctcagtatcaccggaaaaaaggctcccggatgtgtactatccaatccagatcaaaaaggcaaaatgagacgcatcgattgtctccgacaggccgacaaggtctggagactggacctggtcatggtgattctgttcaaaggtattcctttggagagcactgacggcgagcgtctggtaaaagccgcacaatgcggccacccagttctgtgtgttcagccacaccacataggcgtcgctgtgaaggaactcgacctctacctcgcttactttgtgcgcgagcgagacgctgaacaaagcggctctcctcgcacaggcatgggatctgaccaggaagatagtaaaccaattactctggatacaaccgatttccaggagtccttcgtgacatccggggtcttttcggtgacagagttgatccaggtttcaagaaccccagtggtaacaggtacaggcccaaacttctctttaggggagctccaggggcacctggcatacgatctaaatcccgcaagcacaggcttaagaaggacactgccatccacgtcctccagcggctctaaaagacacaaaagcggcagcatggaagaggacgtggatacgagtccaggtggcgactactatactagccccagtagccccacctccagcagccgaaactggactgaggacatggaaggaggaattagctctcccgtgaagaaaactgagatggacaagagcccattcaacagcccctcaccgcaagactccccaaggctgtcctctttcacacagcatcaccggccagttatagccgtccactctggcatagctaggtctccccacccgtctagcgctctgcacttcccaactaccagcattctgcctcaaactgcctctacatacttcccccatactgcaataaggtacccccctcatctcaatccccaggatcctttgaaggatctcgtatcgttggcttgtgatccagcgtcacaacagcctgggccaccaactttgaggcccaccaggccactgcagacagtaccactctgggactag

SEQ ID NO: 87757 - DNA, 1221 bp, Artificial Sequence
  derived and/or modified sequence
atggacgagttccaccccttcatcgaggccctgctgccccacgtgagagccttcgcctacacctggttcaacctgcaggccagaaagagaaagtacttcaagaagcacgagaagagaatgagcaaggacgaggagagagccgtgaaggacgagctgctgggcgagaagcccgaggtgaagcagaagtgggccagcagactgctggccaagctgagaaaggacatcagacccgagtgcagagaggacttcgtgctgagcatcaccggcaagaaggcccccggctgcgtgctgagcaaccccgaccagaagggcaagatgagaagaatcgactgcctgagacaggccgacaaggtgtggagactggacctggtgatggtgatcctgttcaagggcatccccctggagagcaccgacggcgagagactggtgaaggccgcccagtgcggccaccccgtgctgtgcgtgcagccccaccacatcggcgtggccgtgaaggagctggacctgtacctggcctacttcgtgagagagagagacaccaccgacttccaggagagcttcgtgaccagcggcgtgttcagcgtgaccgagctgatccaggtgagcagaacccccgtggtgaccggcaccggccccaacttcagcctgggcgagctgcagggccacctggcctacgacctgaaccccgccagcaccggcctgagaagaaccctgcccagcaccagcagcagcggcagcaagagacacaagagcggcagcatggaggaggacgtggacaccagccccggcggcgactactacaccagccccagcagccccaccagcagcagcagaaactggaccgaggacatggagggcggcatcagcagccccgtgaagaagaccgagatggacaagagccccttcaacagccccagcccccaggacagccccagactgagcagcttcacccagcaccacagacccgtgatcgccgtgcacagcggcatcgccagaagcccccaccccagcagcgccctgcacttccccaccaccagcatcctgccccagaccgccagcacctacttcccccacaccgccatcagataccccccccacctgaacccccaggaccccctgaaggacctggtgagcctggcctgcgaccccgccagccagcagcccggcccccccaccctgagacccaccagacccctgcagaccgtgcccctgtgggactag

SEQ ID NO: 87758 - DNA, 1293 bp, Artificial Sequence
  derived and/or modified sequence
atggacgagttccaccccttcatcgaggccctgctgccccacgtgagagccttcgcctacacctggttcaacctgcaggccagaaagagaaagtacttcaagaagcacgagaagagaatgagcaaggacgaggagagagccgtgaaggacgagctgctgggcgagaagcccgaggtgaagcagaagtgggccagcagactgctggccaagctgagaaaggacatcagacccgagtgcagagaggacttcgtgctgagcatcaccggcaagaaggcccccggctgcgtgctgagcaaccccgaccagaagggcaagatgagaagaatcgactgcctgagacaggccgacaaggtgtggagactggacctggtgatggtgatcctgttcaagggcatccccctggagagcaccgacggcgagagactggtgaaggccgcccagtgcggccaccccgtgctgtgcgtgcagccccaccacatcggcgtggccgtgaaggagctggacctgtacctggcctacttcgtgagagagagagacgccgagcagagcggcagccccagaaccggcatgggcagcgaccaggaggacagcaagcccatcaccctggacaccaccgacttccaggagagcttcgtgaccagcggcgtgttcagcgtgaccgagctgatccaggtgagcagaacccccgtggtgaccggcaccggccccaacttcagcctgggcgagctgcagggccacctggcctacgacctgaaccccgccagcaccggcctgagaagaaccctgcccagcaccagcagcagcggcagcaagagacacaagagcggcagcatggaggaggacgtggacaccagccccggcggcgactactacaccagccccagcagccccaccagcagcagcagaaactggaccgaggacatggagggcggcatcagcagccccgtgaagaagaccgagatggacaagagccccttcaacagccccagcccccaggacagccccagactgagcagcttcacccagcaccacagacccgtgatcgccgtgcacagcggcatcgccagaagcccccaccccagcagcgccctgcacttccccaccaccagcatcctgccccagaccgccagcacctacttcccccacaccgccatcagataccccccccacctgaacccccaggaccccctgaaggacctggtgagcctggcctgcgaccccgccagccagcagcccggcccccccaccctgagacccaccagacccctgcagaccgtgcccctgtgggactag

SEQ ID NO: 87759 - protein, 726 aa, Artificial Sequence
  derived and/or modified sequence
MEGERKNNNKRWYFTREQLENSPSRRFGVDPDKELSYRQQAANLLQDMGQRLNVSQLTINTAIVYMHRFYMIQSFTQFPGNSVAPAALFLAAKVEEQPKKLEHVIKVAHTCLHPQESLPDTRSEAYLQQVQDLVILESIILQTLGFELTIDHPHTHVVKCTQLVRASKDLAQTSYFMATNSLHLTTFSLQYTPPVVACVCIHLACKWSNWEIPVSTDGKHWWEYVDATVTLELLDELTHEFLQILEKTPNRLKRIWNWRACEAAKKTKADDRGTDEKTSEQTILNMISQSSSDTTIAGLMSMSTSTTSAVPSLPVSEESSSNLTSVEMLPGKRWLSSQPSFKLEPTQGHRTSENLALTGVDHSLPQDGSNAFISQKQNSKSVPSAKVSLKEYRAKHAEELAAQKRQLENMEANVKSQYAYAAQNLLSHHDSHSSVILKMPIEGSENPERPFLEKADKTALKMRIPVAGGDKAASSKPEEIKMRIKVHAAADKHNSVEDSVTKSREHKEKHKTHPSNHHHHHNHHSHKHSHSQLPVGTGNKRPGDPKHSSQTSNLAHKTYSLSSSFSSSSSTRKRGPSEETGGAVFDHPAKIAKSTKSSSLNFSFPSLPTMGQMPGHSSDTSGLSFSQPSCKTRVPHSKLDKGPTGANGHNTTQTIDYQDTVNMLHSLLSAQGVQPTQPTAFEFVRPYSDYLNPRSGGISSRSGNTDKPRPPPLPSEPPPPLPPLPK

SEQ ID NO: 87760 - protein, 260 aa, Artificial Sequence
  derived and/or modified sequence
MARPHPWWLCVLGTLVGLSATPAPKSCPERHYWAQGKLCCQMCEPGTFLVKDCDQHRKAAQCDPCIPGVSFSPDHHTRPHCESCRHCNSGLLVRNCTITANAECACRNGWQCRDKECTECDPLPNPSLTARSSQALSPHPQPTHLPYVSEMLEARTAGHMQTLADFRQLPARTLSTHWPPQRSLCSSDFIRILVIFSGMFLVFTLAGALFLHQRRKYRSNKGESPVEPAEPCHYSCPREEEGSTIPIQEDYRKPEPACSP

SEQ ID NO: 87761 - DNA, 783 bp, Artificial Sequence
  derived and/or modified sequence
atggcacggccccatccctggtggctctgcgttctgggtactctagtaggcttgtctgccactccagcacccaaatcttgtccagagcggcactactgggcccagggaaaactgtgttgccagatgtgcgagcccgggacatttctggtcaaggactgcgatcagcatagaaaggcggcccaatgtgacccctgcatccctggggtgtcgttcagtcccgatcaccatacccgcccacattgtgaatcttgccggcattgcaatagtggtcttttagtgaggaattgcaccataaccgccaacgctgaatgtgcatgtcgcaacggttggcaatgccgggataaagagtgtaccgaatgtgacccgctacctaacccctccctgaccgctagaagttcacaggctctttctccccatccccaacccacacacctgccatacgtgtcagagatgctggaggcgcgtactgctggtcacatgcaaacactggccgatttccggcagctgcctgccaggaccctgtctacgcattggcccccacagagatcgctgtgctccagcgacttcatacggatacttgtaatcttctctgggatgtttctagtctttacattggcgggagctttattccttcatcagcggcgaaagtatcgtagtaataaaggtgagtccccagtggaacctgccgagccgtgccactacagttgtccacgcgaagaagaaggctccacaatccccatccaggaagattataggaaaccagaacccgcgtgttcgccgtag

SEQ ID NO: 87762 - DNA, 783 bp, Artificial Sequence
  derived and/or modified sequence
atggcccggccccacccctggtggctgtgtgtgctgggcaccctggtgggcctgagcgccaccccagcccccaagagctgcccagagcggcactactgggcccagggcaagctgtgctgccagatgtgtgagcccggcaccttcctggtgaaggactgtgaccagcacaggaaggccgcccagtgtgacccctgcatccctggggtgtccttctccccagaccaccacacccggccccactgtgagagctgccgccactgcaacagcggcctgctggtgaggaactgcaccatcacagccaatgcagaatgtgcctgcagaaatggctggcagtgccgggacaaggagtgcacagaatgtgaccccctgcccaaccccagcctgacagcccggagcagccaggccctgagcccccacccccagcccacccacctgccctacgtgtctgagatgctggaggccaggacagctggccacatgcagaccctggccgacttccggcagctgcctgcccggaccctgagcacccactggccaccccagaggagcctgtgcagcagtgacttcatccgcatcctggtgatcttcagcggcatgttcctggtgttcaccctggccggggccctcttcctgcaccagaggaggaagtaccgcagcaacaagggggagagccctgtggagcctgctgagccctgccactacagctgcccccgggaggaggagggcagcaccatccccatccaggaggactacaggaagccagagcccgcctgcagcccctag

SEQ ID NO: 87763 - DNA, 783 bp, Artificial Sequence
  derived and/or modified sequence
atggcccggccccacccctggtggctgtgcgtgctgggcaccctggtagggttgtctgctactccggcacctaagtcatgtccagagcggcattactgggcccaaggcaagctgtgctgtcagatgtgcgagcccgggactttcctggtcaaggattgtgatcaacatagaaaggcagcccaatgcgacccctgtattccgggagtgtcctttagccccgaccaccacactagaccccattgtgaatcttgcagacattgcaactccggtctgctcgtgagaaattgtaccatcaccgccaatgctgagtgtgcctgtagaaacggatggcaatgccgcgataaagaatgcaccgagtgcgacccactgcctaatccgtcactgaccgccaggtcctcacaagcactctctccccatcctcagcctacccacttgccatacgtgtctgagatgcttgaagcccgaacagcagggcatatgcaaaccctggccgacttcagacaacttcccgcccggaccctttcaacccactggcctccgcagagatcattgtgttccagcgatttcatccggatacttgtcattttttctggcatgtttctagtttttactcttgcgggggccctgttcctccaccaacgccggaagtataggtctaacaagggagaaagtcccgtggagccggccgaaccctgccactattcttgtccccgggaggaagaaggctcgaccatccctattcaggaagattataggaaaccagaacccgcatgcagcccttag

SEQ ID NO: 87764 - DNA, 783 bp, Artificial Sequence
  derived and/or modified sequence
atggcacgccctcacccctggtggctctgtgtgctgggtaccctcgttgggctttccgcaaccccggctccaaagtcgtgccccgagcgacactactgggcccaaggcaagctctgctgtcaaatgtgtgagccaggaacttttcttgtcaaagattgtgatcagcataggaaggccgctcagtgtgatccctgtattccaggcgtttcattcagccctgaccatcatactcgccctcactgtgagagctgcaggcattgcaactccggcctgttggtgagaaattgtaccatcaccgccaatgcagagtgtgcctgcaggaatgggtggcagtgccgtgataaagagtgtacggaatgcgatccgctcccaaaccctagcctaaccgctcgatctagccaagctctgtctcctcacccccagccaacacatcttccatacgtgtccgaaatgttagaggccaggacagcaggacacatgcaaacactggctgatttccgtcaattacccgctcggacactgagcacacactggcctccccagagaagtctttgttctagcgattttattcgcatccttgtgatcttctctggcatgttcctggtcttcactcttgctggggctctcttcctacatcagcgccgtaaatataggagcaataaaggggaaagccccgttgaacccgcagagccttgtcactactcgtgccccagagaagaggagggaagcacaatcccaattcaagaagattaccgtaaaccggagccagcctgctccccatag

SEQ ID NO: 87765 - DNA, 1338 bp, Artificial Sequence
  derived and/or modified sequence
aatactctccccagcacacggaaggggaagggggtggaggttgctgctatgagagagaaaaaaaaaacagccacaatagagattctgccttcaaaggttggcttgccacctgaagcagccactgcccagggggtgcaaagaagagacagcagcgcccagcttggaggtgctaactccagaggccagcatcagcaactgggcacagaaaggagccgcctgggcagggaccatggcacggccacatccctggtggctgtgcgttctggggaccctggtggggctctcagctactccagcccccaagagctgcccagagaggcactactgggctcagggaaagctgtgctgccagatgtgtgagccaggaacattcctcgtgaaggactgtgaccagcatagaaaggctgctcagtgtgatccttgcataccgggggtctccttctctcctgaccaccacacccggccccactgtgagagctgtcggcactgtaactctggtcttctcgttcgcaactgcaccatcactgccaatgctgagtgtgcctgtcgcaatggctggcagtgcagggacaaggagtgcaccgagtgtgatcctcttccaaacccttcgctgaccgctcggtcgtctcaggccctgagcccacaccctcagcccacccacttaccttatgtcagtgagatgctggaggccaggacagctgggcacatgcagactctggctgacttcaggcagctgcctgcccggactctctctacccactggccaccccaaagatccctgtgcagctccgattttattcgcatccttgtgatcttctctggaatgttccttgttttcaccctggccggggccctgttcctccatcaacgaaggaaatatagatcaaacaaaggagaaagtcctgtggagcctgcagagccttgtcattacagctgccccagggaggaggagggcagcaccatccccatccaggaggattaccgaaaaccggagcctgcctgctccccctgagccagcacctgcgggagctgcactacagccctggcctccacccccaccccgccgaccatccaagggagagtgagacctggcagccacaactgcagtcccatcctcttgtcagggccctttcctgtgtacacgtgacagagtgccttttcgagactggcagggacgaggacaaatatggatgaggtggagagtgggaagcaggagcccagccagctgcgcctgcgctgcaggagggcgggggctctggttgtaaaacacacttcctgctgcgaaagacccacatgctacaagacgggcaaaataaagtgacagatgaccaccctgca

SEQ ID NO: 87766 - DNA, 783 bp, Artificial Sequence
  derived and/or modified sequence
atggccagaccccacccctggtggctgtgcgtgctgggcaccctggtgggcctgagcgccacccccgcccccaagagctgccccgagagacactactgggcccagggcaagctgtgctgccagatgtgcgagcccggcaccttcctggtgaaggactgcgaccagcacagaaaggccgcccagtgcgacccctgcatccccggcgtgagcttcagccccgaccaccacaccagaccccactgcgagagctgcagacactgcaacagcggcctgctggtgagaaactgcaccatcaccgccaacgccgagtgcgcctgcagaaacggctggcagtgcagagacaaggagtgcaccgagtgcgaccccctgcccaaccccagcctgaccgccagaagcagccaggccctgagcccccacccccagcccacccacctgccctacgtgagcgagatgctggaggccagaaccgccggccacatgcagaccctggccgacttcagacagctgcccgccagaaccctgagcacccactggcccccccagagaagcctgtgcagcagcgacttcatcagaatcctggtgatcttcagcggcatgttcctggtgttcaccctggccggcgccctgttcctgcaccagagaagaaagtacagaagcaacaagggcgagagccccgtggagcccgccgagccctgccactacagctgccccagagaggaggagggcagcaccatccccatccaggaggactacagaaagcccgagcccgcctgcagcccctag

SEQ ID NO: 87767 - protein, 809 aa, Artificial Sequence
  derived and/or modified sequence
MEEPGVTPQPYLGLLLEELRRVVAALPEGMRPDSNLYGFPWELVICAAVVGFFAVLFFLWRSFRSVRSRLYVGREKKLALMLSGLIEEKSKLLEKFSLVQKEYEGYEVESSLKDASFEKEATEAQSLEVENQMATCEKLNRSNSELEDEILCLEKELKEEKSKHSEQDELMADISKRIQSLEDESKSLKSQVAEAKMTFKIFQMNEERLKIAIKDALNENSQLQESQKQLLQEAEVWKEQVSELNKQKVTFEDSKVHAEQVLNDKESHIKTLTERLLKMKDWAAMLGEDITDDDNLELEMNSESENGAYLDNPPKGALKKLIHAAKLNASLKTLEGERNQIYIQLSEVDKTKEELTEHIKNLQTEQASLQSENTHFENENQKLQQKLKVMTELYQENEMKLHRKLTVEENYRLEKEEKLSKVDEKISHATEELETYRKRAKDLEEELERTIHSYQGQIISHEKKAHDNWLAARNAERNLNDLRKENAHNRQKLTETELKFELLEKDPYALDVPNTAFGREHSPYGPSPLGWPSSETRAFLSPPTLLEGPLRLSPLLPGGGGRGSRGPGNPLDHQITNERGESSCDRLTDPHRAPSDTGSLSPPWDQDRRMMFPPPGQSYPDSALPPQRQDRFCSNSGRLSGPAELRSFNMPSLDKMDGSMPSEMESSRNDTKDDLGNLNVPDSSLPAENEATGPGFVPPPLAPIRGPLFPVDARGPFLRRGPPFPPPPPGAMFGASRDYFPPGDFPGPPPAPFAMRNVYPPRGFPPYLPPRPGFFPPPPHSEGRSEFPSGLIPPSNEPATEHPEPQQET

SEQ ID NO: 87768 - DNA, 2430 bp, Artificial Sequence
  derived and/or modified sequence
atggaggagcccggcgtgaccccccagccctacctgggcctgctgctggaggagctgagaagagtggtggccgccctgcccgagggcatgagacccgacagcaacctgtacggcttcccctgggagctggtgatctgcgccgccgtggtgggcttcttcgccgtgctgttcttcctgtggagaagcttcagaagcgtgagaagcagactgtacgtgggcagagagaagaagctggccctgatgctgagcggcctgatcgaggagaagagcaagctgctggagaagttcagcctggtgcagaaggagtacgagggctacgaggtggagagcagcctgaaggacgccagcttcgagaaggaggccaccgaggcccagagcctggaggtggagaaccagatggccacctgcgagaagctgaacagaagcaacagcgagctggaggacgagatcctgtgcctggagaaggagctgaaggaggagaagagcaagcacagcgagcaggacgagctgatggccgacatcagcaagagaatccagagcctggaggacgagagcaagagcctgaagagccaggtggccgaggccaagatgaccttcaagatcttccagatgaacgaggagagactgaagatcgccatcaaggacgccctgaacgagaacagccagctgcaggagagccagaagcagctgctgcaggaggccgaggtgtggaaggagcaggtgagcgagctgaacaagcagaaggtgaccttcgaggacagcaaggtgcacgccgagcaggtgctgaacgacaaggagagccacatcaagaccctgaccgagagactgctgaagatgaaggactgggccgccatgctgggcgaggacatcaccgacgacgacaacctggagctggagatgaacagcgagagcgagaacggcgcctacctggacaacccccccaagggcgccctgaagaagctgatccacgccgccaagctgaacgccagcctgaagaccctggagggcgagagaaaccagatctacatccagctgagcgaggtggacaagaccaaggaggagctgaccgagcacatcaagaacctgcagaccgagcaggccagcctgcagagcgagaacacccacttcgagaacgagaaccagaagctgcagcagaagctgaaggtgatgaccgagctgtaccaggagaacgagatgaagctgcacagaaagctgaccgtggaggagaactacagactggagaaggaggagaagctgagcaaggtggacgagaagatcagccacgccaccgaggagctggagacctacagaaagagagccaaggacctggaggaggagctggagagaaccatccacagctaccagggccagatcatcagccacgagaagaaggcccacgacaactggctggccgccagaaacgccgagagaaacctgaacgacctgagaaaggagaacgcccacaacagacagaagctgaccgagaccgagctgaagttcgagctgctggagaaggacccctacgccctggacgtgcccaacaccgccttcggcagagagcacagcccctacggccccagccccctgggctggcccagcagcgagaccagagccttcctgagcccccccaccctgctggagggccccctgagactgagccccctgctgcccggcggcggcggcagaggcagcagaggccccggcaaccccctggaccaccagatcaccaacgagagaggcgagagcagctgcgacagactgaccgacccccacagagcccccagcgacaccggcagcctgagccccccctgggaccaggacagaagaatgatgttccccccccccggccagagctaccccgacagcgccctgcccccccagagacaggacagattctgcagcaacagcggcagactgagcggccccgccgagctgagaagcttcaacatgcccagcctggacaagatggacggcagcatgcccagcgagatggagagcagcagaaacgacaccaaggacgacctgggcaacctgaacgtgcccgacagcagcctgcccgccgagaacgaggccaccggccccggcttcgtgcccccccccctggcccccatcagaggccccctgttccccgtggacgccagaggccccttcctgagaagaggcccccccttccccccccccccccccggcgccatgttcggcgccagcagagactacttcccccccggcgacttccccggccccccccccgcccccttcgccatgagaaacgtgtacccccccagaggcttccccccctacctgccccccagacccggcttcttccccccccccccccacagcgagggcagaagcgagttccccagcggcctgatcccccccagcaacgagcccgccaccgagcaccccgagccccagcaggagacctag

SEQ ID NO: 87769 - DNA, 3695 bp, Artificial Sequence
  derived and/or modified sequence
cgcctccccgccttctcgcggctgcccggccgaaaccaaaccgaggggtggggtggcgaggacagggtacgtcgcaggcttgtgcgggtcgggctcggacctgcgctgcctcgggatgtaaagtataacaagagggtcgggatgggcagcgtaggcctgtgaggcctgcgggtgcccctgtcccccagctccccccgcagccggctccgcagtggtccactccggttgccgggtgcggattcgggttccggaccgaaggctgtgtgttctccgccgtttattgtggccccgacaggccggggttactgtggcgaccacgagagcagctttggcgctatggaggagcccggggttacccctcaaccgtatttggggctgctcctggaggagctacgcagggttgtggcagcactgcctgaaggtatgagaccagattctaatctttatggttttccatgggaattggtgatatgtgcagctgttgttggattttttgctgttctcttttttttgtggagaagttttagatcggttaggagtcggctttatgtgggacgagagaaaaagcttgctctaatgctttctggactaattgaagaaaaaagtaaactacttgaaaaatttagccttgttcaaaaagagtatgaaggctatgaagtagagtcatctttaaaggatgccagctttgagaaggaggcaacagaagcacaaagtttggaggtagaaaatcaaatggcaacctgtgaaaagctgaacaggtccaattctgaacttgaggatgaaatactctgtctagaaaaagagttaaaagaagagaaatccaaacattctgaacaagatgaattgatggcggatatttcaaaaaggatacagtctctagaagatgagtcaaaatccctcaaatcacaagtagctgaagccaaaatgaccttcaagatatttcaaatgaatgaagaacgactgaagatagcaataaaagatgctttgaatgaaaattctcaacttcaggaaagccagaaacagcttttgcaagaagctgaagtatggaaagaacaagtgagtgaacttaataaacagaaagtaacatttgaagactccaaagtacatgcagaacaagttctaaatgataaagaaagtcacatcaagactctgactgaacgcttgttaaagatgaaagattgggctgctatgcttggagaagacataacggatgatgataacttggaattagaaatgaacagtgaatcggaaaatggtgcttacttagataatcctccaaaaggagctttgaagaaactgattcatgctgctaagttaaatgcttctttaaaaaccttagaaggagaaagaaaccaaatttatattcagttgtctgaagttgataaaacaaaggaagagcttacagagcatattaaaaatcttcagactgaacaagcatctttgcagtcagaaaacacacattttgaaaatgagaatcagaagcttcaacagaaacttaaagtaatgactgaattatatcaagaaaatgaaatgaaactccacaggaaattaacagtagaggaaaattatcggttagagaaagaagagaaactttctaaagtagatgaaaagatcagccatgccactgaagagctggagacctatagaaagcgagccaaagatcttgaagaagaattggagagaactattcattcttatcaagggcagattatttcccatgagaaaaaagcacatgataattggttggcagctcggaatgctgaaagaaacctcaatgatttaaggaaagaaaatgctcacaacagacaaaaattaactgaaacagagcttaaatttgaacttttagaaaaagatccttatgcactcgatgttccaaatacagcatttggcagagagcattccccatatggtccctcaccattgggttggccttcatctgaaacaagagcttttctctctcctccaactttgttggagggtccactcagactctcacctttgcttccagggggaggaggaagaggctcacgaggcccagggaatcctctggaccatcagattaccaatgaaagaggagaatcaagctgtgataggttaaccgatcctcatagggctccctctgacactgggtctctgtcacctccatgggaccaggaccgtaggatgatgtttcctccgccaggacaatcatatcctgattcagcccttcctccacaaaggcaagacagattttgttctaattctggtagactgtctggaccagcagaactcagaagttttaatatgccttctttggataaaatggatgggtcaatgccttcagaaatggaatccagtagaaatgataccaaagatgatcttggtaatttaaatgtgcctgattcatctctccctgctgaaaatgaagccactggccctggctttgttcctccacctcttgctccaatcagaggtccattgtttccagtggatgcaagaggcccattcttgagaagaggacctcctttccccccacctcctccaggagccatgtttggagcttctcgagattattttccaccaggggatttcccaggtccaccacctgctccatttgcaatgagaaatgtctatccaccgaggggttttcctccttaccttcccccaagacctggatttttccccccacccccacattctgaaggtagaagtgagttcccctcaggtttgattccaccttcaaatgagcctgctactgaacatccagaaccacagcaagaaacctgacaatatttttgctctcttcaaaagtaattttgactgatctcattttcagtttaagtaactgctgttacttaagtgattacacttttgctcaaattgaagcttaatggaattataattctcaggatagtattttgtaaataaagatgatttaaatatgaatcttatgagtaaattatttcaattttattttagacggtataactatttcaatttgattaatccactattatataaacaatagtgggagttttatatatgtaatctttcaggtggggaggctttaaattctgaagtctgtgtctttatgccaagaactgtatttactgtggttgtggacaaatgtgaaagtaactttatgcttaaataaattatagttgatttaaagatttgtttggcattgataataataaaatcagtagtttttctataactatggctctattaacttttttccttttaccaataactttgaggtgcaaaactcaaacttatgtgggtcttttgtgttcaattatgttatgacaaatgtgctctctttcttgtaaatagacatgagtggcccaaagcaacaaattaatacacttttaaaagtcaaaattgattatattttaaagataaccaggatattatctaatggtgaattgtagaattttgatcttcttattcactgagtttcttgcacggtttctttattgcttttttttccccgcctgttcttttgtaaggtatttactattttctgtggaggatattgagatgtactacaggataactgtagtgaatgatgtgtcatcattttgagctttggactcaatatctttagtgtttccctaaatcagatttgtaggtcatgttaagcttcttgcacattaatatgattatggaaggaaaggcagtgaagcataactaataaacatcataatacttaa

SEQ ID NO: 87770 - DNA, 2430 bp, Artificial Sequence
  derived and/or modified sequence
atggaagagccgggtgtgaccccacagccttatctgggcctcttattagaggaactccgccgggtggtggcagcactgcctgaggggatgcgacctgactctaacctttacggcttcccatgggagctcgtgatctgtgctgccgtggttggatttttcgcagtcctcttctttctgtggagaagtttccgctcagtccgctcccgcctatacgtgggcagagagaaaaaactcgcattgatgctgagcggtctcattgaagagaaaagcaagctgctggagaaattcagtctggtccagaaggagtatgagggctacgaagtggaatcctccctgaaagacgcaagttttgagaaagaggctactgaagcacaaagtctggaggttgaaaaccagatggcgacctgcgagaaactgaaccgcagcaacagcgagcttgaagatgagatactttgtctcgagaaagaattgaaagaggaaaagtctaagcattcagaacaggacgagctgatggctgacatctctaagcgcattcaatctctggaagatgagagtaaaagtctgaagtcgcaagtggcagaagcaaagatgactttcaaaattttccagatgaatgaagaaaggttaaagatcgccatcaaggacgcactaaacgaaaactctcagctccaggagtcccaaaaacaacttctgcaggaagccgaagtatggaaagaacaagtctctgaactgaacaaacagaaggtaacctttgaggattccaaggtgcacgctgagcaggtattgaacgacaaagaatctcacatcaagacgctcacagaaagactgctgaaaatgaaggactgggccgcaatgctgggcgaggacatcacagatgatgacaacctcgaactggagatgaacagtgagagcgagaacggagcttatctggacaaccctcccaagggtgcactcaagaagttgatccatgcggcaaagctgaacgcatccctcaaaaccctggagggcgagcgaaaccagatttatatacagctctcagaggtggataaaacaaaagaggagctgactgagcatatcaagaacctccagactgagcaggcctccctgcagagcgagaatacccacttcgagaacgagaatcagaaattgcagcagaaattgaaagttatgactgaactgtatcaggagaacgagatgaagctgcaccgcaagctgactgtagaggagaattatcggctggagaaggaggagaagctgtccaaggtcgatgagaaaattagtcatgctacggaagagctggaaacatataggaaacgggcaaaggatctggaggaggaactggagcgtaccattcattcttatcaggggcagatcatctctcacgagaaaaaggcccacgataattggctggctgccaggaacgccgaaaggaacctgaacgacctgcgaaaggaaaacgctcacaaccggcagaaactcacggagacagagttaaagttcgaattactggaaaaggatccctatgcactagacgtgcccaataccgcattcggtcgagagcattcaccgtatggtccctctcctctcggttggccatcatccgaaacccgcgccttcttgtcaccccccacgttgctagaagggcccctccgtctttctccgctgcttcctggcggaggaggacgtggttccagaggcccaggaaaccctttagaccaccaaatcactaacgaaaggggtgagtcctcatgtgaccggttgacagacccacacagggccccaagcgacacagggagtttgagccctccatgggaccaggacagacgcatgatgttcccgcctcccggtcagtcgtatccggatagcgctttgccaccccagcggcaggacagattttgttccaatagtgggaggctgtctgggcctgcagaactgcggtctttcaatatgccaagtctagacaaaatggacggttcaatgcccagcgaaatggagagtagcagaaacgacaccaaggacgaccttgggaatctcaacgtgcctgacagtagcctcccagccgagaacgaggcgactggacccggtttcgttcctcccccattggcccctatccggggtccgctcttccctgtggatgcccgcggccccttcctgaggaggggcccaccattcccccctcctccacccggagccatgttcggagcttccagggactattttccccctggagatttccctgggccaccgcccgctccgttcgcaatgcgcaatgtctacccccctagagggtttcccccgtatctgccccccagacctgggttttttccacctcctccccactccgagggaagaagcgaattcccctcaggtctgattcccccatcaaacgagcccgctacagaacaccctgagccacagcaagagacgtag

SEQ ID NO: 87771 - DNA, 2430 bp, Artificial Sequence
  derived and/or modified sequence
atggaggagcccggggtgaccccccagccctacctgggcctgctgctggaggagctgcggcgggtggtggccgccctgcctgagggcatgaggccagacagcaacctgtatggcttcccctgggagctggtgatctgtgccgctgtggtgggcttctttgctgtgctcttcttcctgtggaggagcttccgctctgtgcgcagccggctgtatgtgggccgggagaagaagctggccctgatgctgagcggcctcatcgaggagaagagcaagctgctggagaagttcagcctggtgcagaaggagtatgagggctatgaggtggagagcagcctgaaggatgccagctttgagaaggaggccacagaggcccagagcctggaggtggagaaccagatggccacctgtgagaagctgaacagaagcaacagcgagctggaggatgagatcctgtgcctggagaaggagctgaaggaggagaagagcaagcacagcgagcaggatgagctgatggctgacatcagcaagaggatccagagcctggaggatgagagcaagagcctgaagagccaggtggccgaggccaagatgaccttcaagatcttccagatgaatgaggagcggctgaagatcgccatcaaggatgccctgaatgaaaacagccagctgcaggagagccagaagcagctgctgcaggaggccgaggtgtggaaggagcaggtgtctgagctgaacaagcagaaggtgacctttgaggacagcaaggtgcacgccgagcaggtgctgaatgacaaggagagccacatcaagaccctgacagagcggctgctgaagatgaaggactgggccgccatgctgggggaggacatcacagatgatgacaacctggagctggagatgaacagcgagagtgaaaatggagcctacctggacaacccccccaagggggccctgaagaagctgattcatgctgccaagctgaatgccagcctgaagaccctggagggggagaggaaccagatctacatccagctgtctgaggtggacaagaccaaggaggagctgacagagcacatcaagaacctgcagacagagcaggccagcctgcagagcgagaacacccactttgaaaatgaaaaccagaagctgcagcagaagctgaaggtgatgacagagctgtaccaggagaatgagatgaagctgcacaggaagctgactgtggaggagaactaccgcctggagaaggaggagaagctgagcaaggtggatgagaagatcagccacgccacagaggagctggagacctacaggaagagggccaaggacctggaggaggagctggagaggaccatccacagctaccagggccagatcatcagccatgagaagaaggcccatgacaactggctggccgccagaaatgctgagaggaacctgaatgacctgaggaaagaaaatgcccacaaccggcagaagctgacagaaacagagctgaagtttgagctgctggagaaggacccctatgccctggatgtgcccaacacagccttcggccgggagcacagcccctacggccccagccccctgggctggcccagcagcgagacccgggccttcctgagcccccccaccctgctggagggccccctgcggctgagccccctgctgcccggcggcggcggccggggcagccggggccctggcaaccccctggaccaccagatcaccaatgaaagaggagagagcagctgtgaccggctgacagacccccaccgggcccccagcgacaccggcagcctgagccccccctgggaccaggacaggaggatgatgtttcctcctcctggccagagctacccagacagcgccctgcccccccagaggcaggaccgcttctgcagcaacagcggccgcctgagcggccctgctgagctgcgctccttcaacatgcccagcctggacaagatggatggctccatgcccagcgagatggagagcagcagaaatgacaccaaggatgacctgggcaacctgaatgtgcctgacagcagcctgcctgcagaaaatgaggccaccggccctggctttgtgcccccacccctggcccccatccggggccccctcttccctgtggatgcccggggccccttcctgcggcggggcccccccttccccccacctcctcctggggccatgtttggagccagccgggactacttccccccaggggacttccctggccccccaccagccccctttgccatgagaaatgtgtacccaccccggggcttccccccctacctgcccccccggcccggcttcttccccccaccaccccacagcgagggccgctctgagttccccagcggcctcatcccccccagcaatgagcccgccacagagcaccctgagccccagcaggagacctag

SEQ ID NO: 87772 - DNA, 2430 bp, Artificial Sequence
  derived and/or modified sequence
atggaggagcccggcgtgaccccccagccctacctgggcctgctgctcgaggaactgagacgggtcgtagccgcattgcctgaggggatgcgccctgacagcaatttgtatggctttccctgggagctagtaatctgtgctgccgttgtgggcttttttgccgtgctctttttcttgtggaggagctttagatcagtaaggagccggctgtatgttggaagagaaaaaaagctcgcgctcatgctatctgggttgattgaagaaaaatctaaactgctcgaaaaattttcactggtccagaaagagtacgagggctacgaggtggagagcagcctgaaagatgcttcctttgagaaagaggccaccgaagctcagagcttagaagtggaaaaccaaatggccacttgtgagaagctcaaccgctccaatagcgaactggaagatgaaattttgtgcctggagaaggaactgaaggaagagaagagcaaacattcagagcaagatgagctgatggctgacatctcaaagcgaatccaaagcctggaggacgaaagcaaatctctgaaatctcaagtagctgaggcaaagatgacatttaaaatatttcagatgaacgaagagcggctgaagatcgcaatcaaagacgccctaaatgaaaattcccagctgcaggagtctcagaagcaactgcttcaggaagcagaagtatggaaagagcaggtcagtgagctgaataaacagaaggtcacgttcgaggatagcaaggtgcatgctgagcaggttctcaacgataaagagagtcacattaagaccttaaccgagcggcttctcaaaatgaaagactgggctgctatgcttggcgaggacatcactgatgatgataatcttgaacttgagatgaattctgagtcagagaacggtgcgtatttggataatcctcccaagggtgccttaaagaaactgatacacgccgccaagctcaacgcttcgctgaagacacttgagggtgagcgcaaccaaatttatatacagctgtccgaagtggacaaaaccaaagaagagctgaccgagcatatcaaaaacctccagactgagcaggcgtctttgcaaagcgaaaacacacactttgagaatgaaaatcagaagttacaacagaagcttaaagtcatgaccgagctctatcaggagaacgaaatgaaactgcatcgcaagcttactgtggaagaaaattatcggctggagaaagaggagaagcttagcaaggtggacgaaaagatctctcatgccacagaggagttagagacctatagaaagagagcaaaagaccttgaggaagagctggagagaacaatacacagctaccagggacagataatcagtcacgagaagaaggctcatgataactggcttgccgcacgaaacgctgaacggaatctgaacgacctccggaaggagaacgcacacaacaggcaaaagcttactgaaacagaattaaaattcgagcttcttgaaaaagatccctacgcactcgacgtccccaatacagccttcggccgtgagcatagtccgtatggcccatctcccctgggttggccctcttctgagacacgagccttcttatctccacctaccttattagaaggtccacttcgtctcagtccattactgcccgggggcggaggacgtggcagtaggggacctggaaatcctctcgaccatcagattacgaacgagcgcggtgagagctcatgtgaccgcctgacagatccccatcgcgccccaagcgataccggctctctcagcccaccctgggaccaagatcgacgcatgatgtttccacccccagggcaatcatatcccgacagtgcacttccaccccagcgtcaggatcgtttctgttcaaatagcggccgactcagcggcccggctgaactgagaagttttaacatgccctcactagataaaatggatggaagcatgccctccgaaatggaaagcagccggaatgacaccaaagacgacctgggaaacctcaatgtgccagattcatcactgcctgctgagaacgaagctacgggcccaggctttgtaccaccaccactggctcctattaggggacccctgtttccagtcgatgcaagggggccattcctgcgaagaggtcccccatttcctccacctccccccggagcaatgttcggggcctcaagagattactttcctcctggtgactttcccgggccgccgccagccccctttgcgatgagaaatgtgtaccctccaaggggtttccctccttacctgcctccgagacccggctttttcccacctccgcctcactctgagggccgctctgagtttccctccgggttaatcccaccttcgaatgaacccgcaaccgaacaccccgagccacagcaggagacatag

SEQ ID NO: 87773 - DNA, 2430 bp, Artificial Sequence
  derived and/or modified sequence
atggaggaacccggagtcaccccccagccctaccttgggctcttgcttgaagaactgcgccgagttgtggccgcacttcctgagggaatgcgccctgactccaacctgtatgggtttccatgggagctggtcatctgtgccgctgtggtgggctttttcgccgtcttgtttttcctctggcgaagttttagatccgtcaggtccaggctctacgtgggccgtgagaaaaaactggctctgatgttgagtggcctgattgaggagaagtcaaagctactggagaaattcagcctggtacagaaggagtacgaagggtatgaggtggaaagctcgctgaaggacgcgtcctttgagaaagaagctactgaagcacagagccttgaggtggagaaccagatggcgacttgcgagaagcttaaccgctccaactctgagcttgaggacgagatcctgtgcctggagaaagaactcaaggaagagaagtctaaacactctgagcaggacgagctgatggccgatatatcaaaacggattcagtcactggaggatgaatccaaatccctcaagtcacaggtggcagaggccaaaatgacattcaaaattttccagatgaacgaagaacggctgaagatcgcaataaaagacgcacttaatgagaattctcagctccaggagagccaaaagcagctcttacaggaggctgaggtctggaaggagcaagtgtcagaattaaataagcaaaaggtcactttcgaagattctaaagtgcatgccgaacaggtgctcaatgataaggagtctcatatcaaaaccctgacggagcggttgctcaagatgaaggactgggctgccatgctgggagaagacattactgatgatgataaccttgaattggagatgaatagtgaatcagagaacggtgcctacttagataaccctcccaaaggcgctcttaagaagctcatccatgccgcaaagctcaatgccagcttaaaaaccctagagggcgagcggaatcagatttacattcaactgagcgaggttgacaaaacaaaggaggaactgaccgagcatatcaagaacttacagacagaacaggctagtctccagtcggagaatacacattttgagaacgagaaccaaaaactccagcagaaactgaaggtaatgactgagctttaccaagaaaacgaaatgaagctgcacagaaaattgacagtcgaggagaattataggctggagaaagaggagaaactttcaaaggttgacgaaaaaattagccatgcaaccgaagaactggaaacctatagaaaaagggcgaaagacctcgaggaggaactcgaacgaaccatccatagttatcaggggcagattatttcgcacgagaaaaaagctcacgacaactggttggccgctcgcaatgctgagaggaaccttaacgatctgcgaaaggagaatgcccacaaccgtcaaaaactgactgaaactgagctcaagtttgagctgttagagaaggatccgtacgctctggatgtacccaataccgcctttggacgcgagcactcaccctacggtccatctcctctggggtggccaagttccgagacacgtgcctttctgtccccaccaacccttctggagggtcctctgaggctgtcccccttgctgcctggcggtgggggaaggggtagtcgaggcccaggtaacccattagatcatcagatcacaaatgagaggggggagtcctcctgtgatcggttgactgatccgcacagagccccaagtgataccggatccttatcccctccatgggatcaggacagacggatgatgtttccccctcccggtcagagctaccctgatagcgctctcccgcctcagcgacaggaccggttctgtagcaactccggcaggttatcaggcccagctgagctgcggtctttcaatatgccatcacttgataagatggacggctccatgccatccgaaatggagtcttcccgcaatgatactaaagacgacctgggtaatttaaacgtacctgattccagcctgccagccgaaaatgaagccactggtcccggtttcgttcctccgcctctcgcgcctattcgcggacccctgttcccggttgatgccagaggcccattcctgagaagggggccacccttccccccacctccacccggagctatgttcggcgcaagtagagactacttcccaccgggtgacttccctggcccaccaccagccccatttgccatgagaaacgtttaccccccacgcggattccccccatatctgcctcccagacccggttttttccccccacccccacatagtgaagggagatctgaattcccctctggccttatacccccttccaacgaacctgcaaccgagcatcccgaacctcaacaagaaacatag

SEQ ID NO: 87774 - protein, 400 aa, Artificial Sequence
  derived and/or modified sequence
MVHSSMGAPEIRMSKPLEAEKQGLDSPSEHTDTERNGPDTNHQNPQNKTSPFSVSPTGPSTKIKAEDPSGDSAPAAPLPPQPAQPHLPQAQLMLTGSQLAGDIQQLLQLQQLVLVPGHHLQPPAQFLLPQAQQSQPGLLPTPNLFQLPQQTQGALLTSQPRAGLPTQPPKCLEPPSHPEEPSDLEELEQFARTFKQRRIKLGFTQGDVGLAMGKLYGNDFSQTTISRFEALNLSFKNMCKLKPLLEKWLNDAETMSVDSSLPSPNQLSSPSLGFDGLPGRRRKKRTSIETNVRFALEKSFLANQKPTSEEILLIAEQLHMEKEVIRVWFCNRRQKEKRINPCSAAPMLPSPGKPASYSPHMVTPQGGAGTLPLSQASSSLSTTAQTPALKAATRLSACQA

SEQ ID NO: 87775 - DNA, 294 bp, Artificial Sequence
  derived and/or modified sequence
atgggatcaatcccatccaagccttgtaacaaccccgagggacccctgctgcagggtatggaagctgccgattggaccggaatcggagtatgccttccaccaggcggtgcccgagggcacatttactgttgcacgagattatgtcatcagcgcgcagcgtctgctcacaggtctctgttactgcccaggactgtacagaccggcggtacggaacgggaaaaacctggacccggacaaagaaagcggggtgcccattgctccgcctgcaagagaagctccacccggccatcctag

SEQ ID NO: 87776 - DNA, 1203 bp, Artificial Sequence
  derived and/or modified sequence
atggtgcactcatctatgggtgcacccgagattagaatgtctaaacccttagaggcagaaaagcagggtctggattcacccagcgaacataccgacaccgaacgaaatgggcctgacaccaaccaccagaacccccagaacaagaccagtcccttttccgtgagcccaacaggacccagcactaaaatcaaagctgaagaccccagcggagacagtgctccagctgctccgctaccgccccagcccgcccagccgcaccttcctcaggcacagctgatgctgacaggtagccagctcgctggtgacatccagcagctccttcaattgcagcagctggtgctggtcccgggacaccacctccagccccccgcccagttcctcttgccccaagcccaacagtcacagcctggcttgttgcccactccgaatctcttccagttgccacagcaaactcagggagccttactgacgagtcagccaagggccggtttacctacccaaccccccaaatgtctggaaccacctagccatccagaggagccgagtgacctggaggagttggagcagttcgcaagaacatttaagcagaggaggataaagctgggtttcacgcaaggcgatgtgggccttgcaatgggaaaattatatggaaacgatttttcacaaacgactatctcgcggttcgaggccctgaacctgtccttcaagaatatgtgtaaactaaagcctctgctggagaaatggcttaacgacgcggaaactatgtctgtagatagcagtctcccgtccccaaatcagctgtctagcccctcactggggttcgacggcctgccaggcaggcgccggaaaaagcgtacgagtatagagaccaatgtccggtttgctctcgaaaagtcatttctcgccaaccagaagccaacgtccgaggagatacttctcatcgctgagcaactccacatggagaaagaagtcattcgggtgtggttttgcaaccgaagacagaaagaaaaaagaatcaacccttgctcggccgctcctatgttgccttcgcccgggaagccagcttcttattccccacatatggtgaccccccaagggggtgctggaacattgccactttcccaggcctcgtcttcactgagcactacggcccagactccggccctgaaagccgccacaaggctgtctgcatgccaggcatag

SEQ ID NO: 87777 - DNA, 1203 bp, Artificial Sequence
  derived and/or modified sequence
atggtgcacagctccatgggcgcccctgagatccgcatgagcaagcccctggaggccgagaagcagggcctggacagccccagcgagcacacagacacagaaagaaatggaccagacaccaaccaccagaacccccagaacaagaccagccccttctctgtgagccccaccggccccagcaccaagatcaaggccgaggaccccagcggggacagcgccccagctgcccccctgcccccccagcctgcccagccccacctgccccaggcccagctgatgctgaccggcagccagctggccggggacatccagcagctgctgcagctgcagcagctggtgctggtgcccggccaccacctgcagcccccagcccagttcctgctgccccaggcccagcagagccagcccggcctgctgcccacccccaacctcttccagctgccccagcagacccagggcgccctgctgaccagccagccccgggccggcctgcccacccagccccccaagtgcctggagccccccagccaccctgaggagcccagcgacctggaggagctggagcagtttgcccggaccttcaagcagaggcgcatcaagctgggcttcacccagggagatgtgggcctggccatgggcaagctgtatggaaatgacttcagccagaccaccatcagcagatttgaggccctgaacctgtccttcaagaacatgtgcaagctgaagcccctgctggagaagtggctgaatgatgctgagaccatgtctgtggacagcagcctgcccagccccaaccagctgagcagccccagcctgggctttgatggcctgcccggcagaagaaggaagaagaggaccagcattgagaccaacgtgcgctttgccctggagaagagcttcctggccaaccagaagcccaccagcgaggagatcctgctgattgctgagcagctgcacatggagaaggaggtgatccgggtgtggttctgcaacagacggcagaaggagaagaggatcaacccctgcagcgctgcccccatgctgcccagccctgggaagccagccagctacagcccccacatggtgaccccccagggcggggccggcaccctgcccctgagccaggccagcagcagcctgagcaccacagcccagaccccagccctgaaggccgccacccggctgagcgcctgccaggcctag

SEQ ID NO: 87778 - DNA, 1203 bp, Artificial Sequence
  derived and/or modified sequence
atggtgcacagcagcatgggcgcccccgagatccggatgagcaagccacttgaagccgagaagcagggactggactcaccttccgaacacacagacaccgaaagaaacggaccggacaccaatcatcaaaacccccaaaacaagactagccctttttcagtaagccccactggcccatctactaagataaaggcagaggaccccagtggagatagcgcgcccgcagccccattgcctccacagcccgctcagccccatctcccacaggcacagttgatgttgacggggtcccaactagcaggggacatccagcagcttcttcagctacagcagctggtcctcgtgcccggacaccacctccaaccacccgcccaattcctattgcctcaagcacaacagagtcaacccggcctcctgcccacccccaacttgttccaacttccacagcagactcagggggcacttctcacgagccagccgagggcggggctccccacccagcccccaaaatgcttggagccaccttctcacccagaagagccaagtgatcttgaagaactggaacagtttgccagaacttttaaacaaagaagaatcaagctagggttcactcaaggcgacgttgggctggctatggggaagttgtacggcaacgatttctcacagacaacgatttcacggtttgaggcactaaatttgagctttaaaaatatgtgtaagctgaagcctctcctagaaaagtggctgaacgatgcagaaaccatgagcgttgacagcagcctcccctcccccaatcagttatcctccccatccctggggtttgatgggcttccaggccgtcggcgtaagaagcggacatccatcgaaaccaatgtcaggtttgcattagagaaaagcttcctagcaaaccagaaacctactagcgaggaaattctgctgatcgcagagcagctgcacatggaaaaagaggtgataagggtgtggttctgtaaccgtaggcagaaggaaaagcggatcaatccttgttccgccgcaccaatgcttccctcccctggcaagcccgcctcctactcccctcacatggtaaccccccagggaggggccggcacccttcctctctcacaggcgtcttcatccctatctaccaccgctcagacccctgcgttgaaggctgctacgcgcctctccgcttgtcaggcctag

SEQ ID NO: 87779 - DNA, 1776 bp, Artificial Sequence
  derived and/or modified sequence
gagagggtggggagatgacacagttgttcccccagccctggcggggcgggcagcatggttcactccagcatgggggctccagaaataagaatgtctaagcccctggaggccgagaagcaaggtctggactccccatcagagcacacagacaccgaaagaaatggaccagacactaatcatcagaacccccaaaataagacctccccattctccgtgtccccaactggccccagtacaaagatcaaggctgaagaccccagtggcgattcagccccagcagcacccctgccccctcagccggcccagcctcatctgccccaggcccaactcatgttgacgggcagccagctagctggggacatacagcagctcctccagctccagcagctggtgcttgtgccaggccaccacctccagccacctgctcagttcctgctaccgcaggcccagcagagccagccaggcctgctaccgacaccaaatctattccagctacctcagcaaacccagggagctcttctgacctcccagccccgggccgggcttcccacacagccccccaaatgcttggagccaccatcccaccccgaggagcccagtgatctggaggagctggagcaattcgcccgcaccttcaagcaacgccgcatcaagctgggcttcacgcagggtgatgtgggcctggccatgggcaagctctacggcaacgacttcagccagacgaccatttcccgcttcgaggccctcaacctgagcttcaagaacatgtgcaaactcaagcccctcctggagaagtggctcaacgatgcagagactatgtctgtggactcaagcctgcccagccccaaccagctgagcagccccagcctgggtttcgacggcctgcccggccggagacgcaagaagaggaccagcatcgagacaaacgtccgcttcgccttagagaagagttttctagcgaaccagaagcctacctcagaggagatcctgctgatcgccgagcagctgcacatggagaaggaagtgatccgcgtctggttctgcaaccggcgccagaaggagaaacgcatcaacccctgcagtgcggcccccatgctgcccagcccagggaagccggccagctacagcccccatatggtcacaccccaagggggcgcggggaccttaccgttgtcccaagcttccagcagtctgagcacaacagcacaaaccccagccctcaaggcagccactcggctatcggcttgtcaggcctgaaccccagcacgggccctggcctctggtggaaccctgccccttaccagccttgatggcagcgggaatctggtgctgggggcagccggtgcagccccggggagccctggcctggtgacctcgccgctcttcttgaatcatgctgggctgcccctgctcagcaccccgcctggtgtgggcctggtctcagcagcggctgcggctgtggcagcctccatctccagcaagtctcctggcctctcctcctcatcctcttcatcctcatcctcctcctcctccacttgcagcgagacggcagcacagacccctggaggtccaggggggcccgaggcagggtccaaacctgagtgagggccagccatgcctcccctcccattcctctggtccctgccttggtcccttgcctgggaagagggcgaggaggccagtggtggggacgcagagggtcctcagagcaggagtgacaagggaggaaagaccaaaaaaacaaccaaccaaaaaaaaaaaaaaaaaggaaagaaa

SEQ ID NO: 87780 - DNA, 1203 bp, Artificial Sequence
  derived and/or modified sequence
atggtgcatagctccatgggtgccccagaaataagaatgtccaaacccctcgaagccgaaaagcaaggacttgacagcccctcagagcacaccgataccgaacgtaatgggcctgataccaaccaccaaaacccacagaataagacaagcccctttagcgtgagccctaccggaccttccaccaaaattaaggcggaggatccatcaggggactcggctcccgcagccccattgcccccacagccggctcagccacatctgccccaggctcaactcatgttgactggcagccaactcgccggagacatccagcagcttcttcagctccaacagctagttctggttccgggacatcacttgcagccgccagcacagtttctgctgcctcaagctcagcagtctcagcccggtctgttacccactcctaacttgtttcagctcccccagcaaactcaaggggctctgctgacatcccagccgagagccggtctccccacccagccgcctaaatgtctagaacccccttcacaccccgaagagccatcagaccttgaagagttggaacagtttgcgaggactttcaaacagcggaggatcaagctggggttcacccagggagacgtcggtctcgctatgggcaaactgtatgggaacgacttttcacagacgaccatttctcgctttgaggctcttaatctgtcctttaagaacatgtgtaaattaaagcctcttcttgagaagtggctgaacgatgcagagaccatgtccgtggattcatccttgccctccccaaaccaactcagcagcccttccttaggttttgatgggcttcccggacggagaaggaagaaaagaacatccattgaaacaaacgtaaggtttgcactggagaagagctttcttgctaatcagaagcccacatctgaggaaatcctccttattgccgagcagttacacatggaaaaagaagtcattcgggtctggttttgtaaccggagacaaaaagaaaagcggattaacccatgctctgcagcccctatgctcccaagcccgggtaaacccgctagctactccccccacatggtgacaccacagggcggagccggaaccctccccctcagccaagcatcatccagtttaagcaccaccgcccagacgcccgcactaaaagccgctacccgcctgagcgcctgccaggcctag

SEQ ID NO: 87781 - DNA, 1203 bp, Artificial Sequence
  derived and/or modified sequence
atggtgcacagcagcatgggcgcccccgagatcagaatgagcaagcccctggaggccgagaagcagggcctggacagccccagcgagcacaccgacaccgagagaaacggccccgacaccaaccaccagaacccccagaacaagaccagccccttcagcgtgagccccaccggccccagcaccaagatcaaggccgaggaccccagcggcgacagcgcccccgccgcccccctgcccccccagcccgcccagccccacctgccccaggcccagctgatgctgaccggcagccagctggccggcgacatccagcagctgctgcagctgcagcagctggtgctggtgcccggccaccacctgcagccccccgcccagttcctgctgccccaggcccagcagagccagcccggcctgctgcccacccccaacctgttccagctgccccagcagacccagggcgccctgctgaccagccagcccagagccggcctgcccacccagccccccaagtgcctggagccccccagccaccccgaggagcccagcgacctggaggagctggagcagttcgccagaaccttcaagcagagaagaatcaagctgggcttcacccagggcgacgtgggcctggccatgggcaagctgtacggcaacgacttcagccagaccaccatcagcagattcgaggccctgaacctgagcttcaagaacatgtgcaagctgaagcccctgctggagaagtggctgaacgacgccgagaccatgagcgtggacagcagcctgcccagccccaaccagctgagcagccccagcctgggcttcgacggcctgcccggcagaagaagaaagaagagaaccagcatcgagaccaacgtgagattcgccctggagaagagcttcctggccaaccagaagcccaccagcgaggagatcctgctgatcgccgagcagctgcacatggagaaggaggtgatcagagtgtggttctgcaacagaagacagaaggagaagagaatcaacccctgcagcgccgcccccatgctgcccagccccggcaagcccgccagctacagcccccacatggtgaccccccagggcggcgccggcaccctgcccctgagccaggccagcagcagcctgagcaccaccgcccagacccccgccctgaaggccgccaccagactgagcgcctgccaggcctag

SEQ ID NO: 87782 - protein, 83 aa, Artificial Sequence
  derived and/or modified sequence
MSMLKPSGLKAPTKILKPGSTALKTPTAVVAPVEKTISSEKASSTPSSETQEEFVDDFRVGERVWVNGNKPGFIQFLGETQFA

SEQ ID NO: 87783 - protein, 1438 aa, Artificial Sequence
  derived and/or modified sequence
MSMLKPSGLKAPTKILKPGSTALKTPTAVVAPVEKTISSEKASSTPSSETQEEFVDDFRVGERVWVNGNKPGFIQFLGETQFAPGQWAGIVLDEPIGKNDGSVAGVRYFQCEPLKGIFTRPSKLTRKVQAEDEANGLQTTPASRATSPLCTSTASMVSSSPSTPSNIPQKPSQPAAKEPSATPPISNLTKTASESISNLSEAGSIKKGERELKIGDRVLVGGTKAGVVRFLGETDFAKGEWCGVELDEPLGKNDGAVAGTRYFQCQPKYGLFAPVHKVTKIGFPSTTPAKAKANAVRRVMATTSASLKRSPSASSLSSMSSVASSVSSRPSRTGLLTETSSRYARKISGTTALQEALKEKQQHIEQLLAERDLERAEVAKATSHVGEIEQELALARDGHDQHVLELEAKMDQLRTMVEAADREKVELLNQLEEEKRKVEDLQFRVEEESITKGDLEQKSQISEDPENTQTKLEHARIKELEQSLLFEKTKADKLQRELEDTRVATVSEKSRIMELEKDLALRVQEVAELRRRLESNKPAGDVDMSLSLLQEISSLQEKLEVTRTDHQREITSLKEHFGAREETHQKEIKALYTATEKLSKENESLKSKLEHANKENSDVIALWKSKLETAIASHQQAMEELKVSFSKGLGTETAEFAELKTQIEKMRLDYQHEIENLQNQQDSERAAHAKEMEALRAKLMKVIKEKENSLEAIRSKLDKAEDQHLVEMEDTLNKLQEAEIKVKELEVLQAKCNEQTKVIDNFTSQLKATEEKLLDLDALRKASSEGKSEMKKLRQQLEAAEKQIKHLEIEKNAESSKASSITRELQGRELKLTNLQENLSEVSQVKETLEKELQILKEKFAEASEEAVSVQRSMQETVNKLHQKEEQFNMLSSDLEKLRENLADMEAKFREKDEREEQLIKAKEKLENDIAEIMKMSGDNSSQLTKMNDELRLKERDVEELQLKLTKANENASFLQKSIEDMTVKAEQSQQEAAKKHEEEKKELERKLSDLEKKMETSHNQCQELKARYERATSETKTKHEEILQNLQKTLLDTEDKLKGAREENSGLLQELEELRKQADKAKAAQTAEDAMQIMEQMTKEKTETLASLEDTKQTNAKLQNELDTLKENNLKNVEELNKSKELLTVENQKMEEFRKEIETLKQAAAQKSQQLSALQEENVKLAEELGRSRDEVTSHQKLEEERSVLNNQLLEMKKRESKFIKDADEEKASLQKSISITSALLTEKDAELEKLRNEVTVLRGENASAKSLHSVVQTLESDKVKLELKVKNLELQLKENKRQLSSSSGNTDTQADEDERAQESQIDFLNSVIVDLQRKNQDLKMKVEMMSEAALNGNGDDLNNYDSDDQEKQSKKKPRLFCDICDCFDLHDTEDCPTQAQMSEDPPHSTHHGSRGEERPYCEICEMFGHWATNCNDDETF

SEQ ID NO: 87784 - DNA, 198 bp, Artificial Sequence
  derived and/or modified sequence
atggtggaggccgccgacagagagaaggtggagctgctgaaccagctggaggaggagaagagaaaggtggaggacctgcagttcagagtggaggaggagagcatcaccaagggcgacctggagcagaagagccagatcagcgaggaccccgagaacgtggccaccgtgagcgagaagagcagaatcatggagctgtag

SEQ ID NO: 87785 - DNA, 1287 bp, Artificial Sequence
  derived and/or modified sequence
atgagcatgctgaagcccagcggcctgaaggcccccaccaagatcctgaagcccggcagcaccgccctgaagacccccaccgccgtggtggcccccgtggagaagaccatcagcagcgagaaggccagcagcacccccagcagcgagacccaggaggagttcgtggacgacttcagagtgggcgagagagtgtgggtgaacggcaacaagcccggcttcatccagttcctgggcgagacccagttcgcccccggccagtgggccggcatcgtgctggacgagcccatcggcaagaacgacggcagcgtggccggcgtgagatacttccagtgcgagcccctgaagggcatcttcaccagacccagcaagctgaccagaaaggtgcaggccgaggacgaggccaacggcctgcagaccacccccgccagcagagccaccagccccctgtgcaccagcaccgccagcatggtgagcagcagccccagcacccccagcaacatcccccagaagcccagccagcccgccgccaaggagcccagcgccaccccccccatcagcaacctgaccaagaccgccagcgagagcatcagcaacctgagcgaggccggcagcatcaagaagggcgagagagagctgaagatcggcgacagagtgctggtgggcggcaccaaggccggcgtggtgagattcctgggcgagaccgacttcgccaagggcgagtggtgcggcgtggagctggacgagcccctgggcaagaacgacggcgccgtggccggcaccagatacttccagtgccagcccaagtacggcctgttcgcccccgtgcacaaggtgaccaagatcggcttccccagcaccacccccgccaaggccaaggccaacgccgtgagaagagtgatggccaccaccagcgccagcctgaagagaagccccagcgccagcagcctgagcagcatgagcagcgtggccagcagcgtgagcagcagacccagcagaaccggcctgcacgtgctggagctggaggccaagatggaccagctgagaaccatggtggaggccgccgacagagagaaggtggagctgctgaaccagctggaggaggagaagagaaaggtggaggacctgcagttcagagtggaggaggagagcatcaccaagggcgacctggagcagaagagccagatcagcgaggaccccgagaacgtgagaggccacctgaccgtgtggatcttccccctgctgaccaagatcgaccacagactgaagtgcctgctgatctacagctag

SEQ ID NO: 87786 - DNA, 4317 bp, Artificial Sequence
  derived and/or modified sequence
atgagcatgctgaagcccagcggcctgaaggcccccaccaagatcctgaagcccggcagcaccgccctgaagacccccaccgccgtggtggcccccgtggagaagaccatcagcagcgagaaggccagcagcacccccagcagcgagacccaggaggagttcgtggacgacttcagagtgggcgagagagtgtgggtgaacggcaacaagcccggcttcatccagttcctgggcgagacccagttcgcccccggccagtgggccggcatcgtgctggacgagcccatcggcaagaacgacggcagcgtggccggcgtgagatacttccagtgcgagcccctgaagggcatcttcaccagacccagcaagctgaccagaaaggtgcaggccgaggacgaggccaacggcctgcagaccacccccgccagcagagccaccagccccctgtgcaccagcaccgccagcatggtgagcagcagccccagcacccccagcaacatcccccagaagcccagccagcccgccgccaaggagcccagcgccaccccccccatcagcaacctgaccaagaccgccagcgagagcatcagcaacctgagcgaggccggcagcatcaagaagggcgagagagagctgaagatcggcgacagagtgctggtgggcggcaccaaggccggcgtggtgagattcctgggcgagaccgacttcgccaagggcgagtggtgcggcgtggagctggacgagcccctgggcaagaacgacggcgccgtggccggcaccagatacttccagtgccagcccaagtacggcctgttcgcccccgtgcacaaggtgaccaagatcggcttccccagcaccacccccgccaaggccaaggccaacgccgtgagaagagtgatggccaccaccagcgccagcctgaagagaagccccagcgccagcagcctgagcagcatgagcagcgtggccagcagcgtgagcagcagacccagcagaaccggcctgctgaccgagaccagcagcagatacgccagaaagatcagcggcaccaccgccctgcaggaggccctgaaggagaagcagcagcacatcgagcagctgctggccgagagagacctggagagagccgaggtggccaaggccaccagccacgtgggcgagatcgagcaggagctggccctggccagagacggccacgaccagcacgtgctggagctggaggccaagatggaccagctgagaaccatggtggaggccgccgacagagagaaggtggagctgctgaaccagctggaggaggagaagagaaaggtggaggacctgcagttcagagtggaggaggagagcatcaccaagggcgacctggagcagaagagccagatcagcgaggaccccgagaacacccagaccaagctggagcacgccagaatcaaggagctggagcagagcctgctgttcgagaagaccaaggccgacaagctgcagagagagctggaggacaccagagtggccaccgtgagcgagaagagcagaatcatggagctggagaaggacctggccctgagagtgcaggaggtggccgagctgagaagaagactggagagcaacaagcccgccggcgacgtggacatgagcctgagcctgctgcaggagatcagcagcctgcaggagaagctggaggtgaccagaaccgaccaccagagagagatcaccagcctgaaggagcacttcggcgccagagaggagacccaccagaaggagatcaaggccctgtacaccgccaccgagaagctgagcaaggagaacgagagcctgaagagcaagctggagcacgccaacaaggagaacagcgacgtgatcgccctgtggaagagcaagctggagaccgccatcgccagccaccagcaggccatggaggagctgaaggtgagcttcagcaagggcctgggcaccgagaccgccgagttcgccgagctgaagacccagatcgagaagatgagactggactaccagcacgagatcgagaacctgcagaaccagcaggacagcgagagagccgcccacgccaaggagatggaggccctgagagccaagctgatgaaggtgatcaaggagaaggagaacagcctggaggccatcagaagcaagctggacaaggccgaggaccagcacctggtggagatggaggacaccctgaacaagctgcaggaggccgagatcaaggtgaaggagctggaggtgctgcaggccaagtgcaacgagcagaccaaggtgatcgacaacttcaccagccagctgaaggccaccgaggagaagctgctggacctggacgccctgagaaaggccagcagcgagggcaagagcgagatgaagaagctgagacagcagctggaggccgccgagaagcagatcaagcacctggagatcgagaagaacgccgagagcagcaaggccagcagcatcaccagagagctgcagggcagagagctgaagctgaccaacctgcaggagaacctgagcgaggtgagccaggtgaaggagaccctggagaaggagctgcagatcctgaaggagaagttcgccgaggccagcgaggaggccgtgagcgtgcagagaagcatgcaggagaccgtgaacaagctgcaccagaaggaggagcagttcaacatgctgagcagcgacctggagaagctgagagagaacctggccgacatggaggccaagttcagagagaaggacgagagagaggagcagctgatcaaggccaaggagaagctggagaacgacatcgccgagatcatgaagatgagcggcgacaacagcagccagctgaccaagatgaacgacgagctgagactgaaggagagagacgtggaggagctgcagctgaagctgaccaaggccaacgagaacgccagcttcctgcagaagagcatcgaggacatgaccgtgaaggccgagcagagccagcaggaggccgccaagaagcacgaggaggagaagaaggagctggagagaaagctgagcgacctggagaagaagatggagaccagccacaaccagtgccaggagctgaaggccagatacgagagagccaccagcgagaccaagaccaagcacgaggagatcctgcagaacctgcagaagaccctgctggacaccgaggacaagctgaagggcgccagagaggagaacagcggcctgctgcaggagctggaggagctgagaaagcaggccgacaaggccaaggccgcccagaccgccgaggacgccatgcagatcatggagcagatgaccaaggagaagaccgagaccctggccagcctggaggacaccaagcagaccaacgccaagctgcagaacgagctggacaccctgaaggagaacaacctgaagaacgtggaggagctgaacaagagcaaggagctgctgaccgtggagaaccagaagatggaggagttcagaaaggagatcgagaccctgaagcaggccgccgcccagaagagccagcagctgagcgccctgcaggaggagaacgtgaagctggccgaggagctgggcagaagcagagacgaggtgaccagccaccagaagctggaggaggagagaagcgtgctgaacaaccagctgctggagatgaagaagagagagagcaagttcatcaaggacgccgacgaggagaaggccagcctgcagaagagcatcagcatcaccagcgccctgctgaccgagaaggacgccgagctggagaagctgagaaacgaggtgaccgtgctgagaggcgagaacgccagcgccaagagcctgcacagcgtggtgcagaccctggagagcgacaaggtgaagctggagctgaaggtgaagaacctggagctgcagctgaaggagaacaagagacagctgagcagcagcagcggcaacaccgacacccaggccgacgaggacgagagagcccaggagagccagatcgacttcctgaacagcgtgatcgtggacctgcagagaaagaaccaggacctgaagatgaaggtggagatgatgagcgaggccgccctgaacggcaacggcgacgacctgaacaactacgacagcgacgaccaggagaagcagagcaagaagaagcccagactgttctgcgacatctgcgactgcttcgacctgcacgacaccgaggactgccccacccaggcccagatgagcgaggaccccccccacagcacccaccacggcagcagaggcgaggagagaccctactgcgagatctgcgagatgttcggccactgggccaccaactgcaacgacgacgagaccttctag

SEQ ID NO: 87787 - DNA, 198 bp, Artificial Sequence
  derived and/or modified sequence
atggtcgaggctgcggatcgtgagaaggtggagctactgaaccaacttgaagaggaaaaacgtaaagtcgaagatcttcaatttagggtagaggaagagtccatcaccaagggggatctagaacaaaaaagccagatatcagaagatcccgagaacgtcgcaacagtatctgagaagtccagaattatggagctgtag

SEQ ID NO: 87788 - DNA, 1287 bp, Artificial Sequence
  derived and/or modified sequence
atgtccatgttgaaacccagtggacttaaggctcccacaaagatcctgaagccagggtcgacggccctgaagaccccgaccgctgttgtcgcacctgtcgagaaaacaatcagttccgaaaaggcttcgagtacacctagtagtgagacccaagaggagtttgtggatgatttcagggtcggagagagggtgtgggtcaatggaaacaagcccggtttcatccaattcttaggagagacgcagtttgctccaggtcagtgggcagggatcgtgttagacgaacctattggaaagaatgacgggagtgttgccggcgtgagatatttccagtgcgaacctctgaaagggatattcacccgcccttctaagctgaccagaaaggtgcaggccgaggatgaggccaatggcttgcagaccacccccgcgagtcgggccacgtcccccctgtgcacaagcacagcatctatggtgagttcttcccccagtacccctagtaatattccgcaaaagccttcccagccggcagcaaaggagccatcagcaacgccccctatcagtaacttaacaaaaacggcatccgagtccatcagcaacctctctgaagctggatcaataaaaaagggcgaaagagagctgaaaattggggaccgcgtgctcgtggggggcaccaaagccggcgtggtaaggtttcttggagagactgacttcgccaaaggcgaatggtgtggggtggaacttgatgagccattgggcaagaatgatggagcagtggctggtacgcggtactttcagtgccaacctaagtatggattattcgctcctgtgcacaaggtgaccaaaataggatttcctagcacaacacccgccaaggcgaaggccaacgcagtgaggagggtcatggctaccacttccgcttccctcaagaggtccccctcagcctccagcttatcctcgatgtcaagcgtcgcgtcatcagtcagctccaggccaagccgaaccgggcttcacgtgcttgagctggaagccaagatggaccagctgaggaccatggtggaggctgcagatcgcgaaaaggtcgagctccttaatcagctcgaggaagagaagcggaaagtggaggatcttcagttcagggtggaggaggagagcattacgaaaggagatttggaacagaaatcccagatttctgaggaccctgagaacgtgcgcgggcacctgactgtctggatatttcctctgttgaccaagatagatcacagattgaagtgtctgctgatctatagctag

SEQ ID NO: 87789 - DNA, 4317 bp, Artificial Sequence
  derived and/or modified sequence
atgagcatgctgaaacccagtgggcttaaggctcctacaaagatcctgaagcctgggtcaactgccttgaaaactcccacagccgtcgtggcgcctgtcgagaaaacaatttcgagcgaaaaagcttcttcaacccctagttccgaaacccaggaagagttcgtggacgacttcagggttggagaaagagtctgggtgaatggaaacaaaccaggctttatccagttcctgggcgagacgcagtttgctccaggacagtgggctggtatcgtgctcgatgaaccaataggaaagaatgacggttcagtggctggcgtgaggtactttcagtgtgaacctcttaagggaattttcacccgccctagcaagctgacaagaaaggtccaggccgaagacgaggccaacggcctgcagacaactcctgcttctcgcgcaacctcgcctttatgtacaagtactgcttcgatggttagcagctccccctccactccatcaaacattcctcagaagccgagtcaaccagccgcaaaggagccttcggccacaccccctattagcaacctaaccaagaccgccagtgaatccatctccaatctgtccgaggcaggtagtatcaagaaaggcgaacgggagcttaagatcggagacagagttctcgtcggtggcactaaagcgggcgtggtgcgcttcttgggcgagacagacttcgctaagggggagtggtgtggcgtggagttggacgaaccgctcggtaagaatgatggggccgtggccggaactagatatttccaatgccagccaaaatacgggttgttcgcccctgtgcacaaggttacgaaaatcggctttccctccacaacgcccgccaaggcaaaagcaaacgccgtcagacgcgtcatggccacaactagcgcatccctgaaaagatctccctcggctagctctctatcttcgatgtcctcagtggccagctccgtgagttccaggcccagtcggaccgggctgctgacagaaacctcctctcgatacgcgcggaagattagtggcacaacagccctgcaggaggcccttaaggagaaacagcagcatatcgaacagctgctggcggagcgcgacttagagagggcagaagtggcaaaagctacgtctcacgtcggggagattgagcaggaacttgcgttggccagggatgggcacgaccagcatgtactggagctggaggccaagatggatcagcttagaactatggtcgaggcagctgatcgcgaaaaagtagaactgcttaaccagctggaagaggagaaaagaaaagtcgaagatctacagtttcgagtggaggaggaaagcataactaagggcgacctggagcagaagagtcaaatttcagaagaccctgaaaatacccagacaaaacttgagcacgcccggattaaggagttagagcagtcactgttgtttgagaagaccaaggcggataaactgcagcgcgaactggaggatactcgcgtagcgaccgtctccgagaagtcccgcattatggaactcgagaaggatctggcacttagggttcaggaagtggcggagctcaggcggaggctagagtcaaataagccagccggtgacgtcgacatgtctctatctctgctgcaggagatttcttctctacaggaaaaactggaggtaacaagaaccgatcaccaaagagagattacttctttgaaggagcatttcggagcaagggaggaaactcaccagaaagaaatcaaagccctgtacacagcaaccgaaaaactgagcaaagaaaatgaaagtttgaaatccaaactggagcacgccaataaggagaactcagatgtgatcgctctgtggaagagcaaacttgagaccgcaatcgcctctcaccagcaagcgatggaggagctgaaggtttccttcagcaaaggactaggaactgaaacagctgagtttgccgaactcaaaacccaaattgaaaaaatgaggcttgattatcagcacgagatcgagaacctgcagaatcagcaggactccgaacgggcggcccacgcgaaggagatggaagccctccgggcaaagttaatgaaggtgataaaagagaaggagaattcactcgaagctattaggtcaaagttagacaaagcagaggatcagcacctggtggagatggaggatactctcaacaagttgcaggaagcagagatcaaggtgaaagaactcgaagtgttgcaggccaagtgcaatgaacagacaaaggttatcgataactttacctctcagcttaaggcaaccgaggagaagctcttagatctggatgccctgcgtaaagcttctagtgaaggaaagtccgagatgaagaaactgcggcagcagctggaggcagcggagaagcagattaagcatttggagattgagaagaacgctgagagcagtaaagcctcgtctattactcgtgaactccaagggcgcgaactgaagttaactaaccttcaggaaaatttgagcgaggtttcacaggtgaaggagaccttagagaaggaattacagatactcaaggagaagtttgctgaggcctccgaggaagcagtgtccgtgcagaggtcgatgcaggagaccgtgaacaaacttcaccaaaaggaggagcagtttaacatgctatccagtgacctcgaaaagttgagagagaacctggctgacatggaggccaaatttcgcgaaaaagatgaacgtgaggagcagctcattaaggccaaagaaaagctggagaacgacattgccgagattatgaagatgtcaggcgacaattcttctcagctgactaagatgaatgacgagctccgcttgaaagagagagatgtcgaggaactgcaacttaagctaactaaagccaacgagaatgcttcttttttgcaaaaaagcattgaggacatgaccgtaaaagctgagcagtcccagcaggaggcagccaaaaagcatgaagaagaaaagaaagaacttgagaggaagctgagcgacttggagaaaaagatggagacaagccataatcagtgccaagaactcaaggctagatacgaaagagccacgtcagagaccaagacgaagcatgaagagatcctgcagaacctgcagaagaccttgttggatactgaagacaagctcaaaggtgcccgggaggagaatagcggtctgctgcaggaattggaggagttacggaaacaggccgacaaagccaaagccgcccagacagcagaggacgccatgcagatcatggagcagatgacaaaggagaagactgaaacactggcatcactcgaagacaccaaacagactaacgcaaagctccagaatgaattagacaccctgaaggaaaataatctgaaaaacgtggaggaattgaacaagtcaaaggagctgctgactgtagagaaccagaagatggaagaattccggaaagaaattgagacactgaaacaggccgctgcgcagaagtctcagcaattgtctgctcttcaggaagagaatgtaaaattggcagaggaactcggcagaagcagagacgaggtaacttctcaccagaagctggaggaggaacggtctgtgctcaacaatcagctcctcgagatgaagaaacgggaatctaaattcataaaagatgccgacgaggaaaaggcgagcctgcaaaagtccattagcattacatcagcactccttacagagaaggacgccgagctggagaagttgaggaatgaggtgaccgtgctccgcggagagaacgcttctgctaaatccctccatagcgttgtgcagaccctcgaatcagataaagtgaaactggaacttaaggttaagaatttagaactgcagctcaaagagaacaagaggcagctcagcagttcttctggaaacaccgatacccaggctgacgaagatgagcgtgcacaggagagccagatcgatttcttgaattccgtcattgtggatctgcagcgaaaaaatcaggacttaaagatgaaggtggaaatgatgtcagaagcagctctgaacgggaacggggatgatctcaataattacgatagtgatgatcaggaaaagcagagcaaaaagaaacctagactattctgcgatatttgtgactgcttcgatttgcacgatacagaggactgtccgacccaggctcagatgtctgaggatccaccacacagcactcatcatgggagtaggggcgaggagagaccatactgcgaaatttgcgagatgtttggacattgggctaccaactgtaacgacgatgagacattttag

SEQ ID NO: 87790 - DNA, 198 bp, Artificial Sequence
  derived and/or modified sequence
atggtggaggccgctgaccgggagaaggtggagctgctgaaccagctggaggaggagaagaggaaggtggaggacctgcagttccgggtggaggaggagagcatcaccaagggggacctggagcagaagagccagatcagcgaggaccctgaaaatgtggccaccgtgtctgagaagagccgcatcatggagctgtag

SEQ ID NO: 87791 - DNA, 1287 bp, Artificial Sequence
  derived and/or modified sequence
atgtccatgctgaagcccagcggcctgaaggcccccaccaagatcctgaagccaggcagcacagccctgaagacccccacagctgtggtggcccctgtggagaagaccatcagcagcgagaaggccagcagcacccccagcagcgagacccaggaggagtttgtggatgacttccgggtgggggagcgggtgtgggtgaatggaaacaagccaggcttcatccagttcctgggggagacccagtttgcccctggccagtgggccggcatcgtgctggatgagcccatcggcaagaatgatggctctgtggccggcgtgcgctacttccagtgtgagcccctgaagggcatcttcacccggcccagcaagctgaccaggaaggtgcaggctgaagatgaggccaacggcctgcagaccaccccagccagccgggccaccagccccctgtgcaccagcacagcctccatggtgagcagcagccccagcacccccagcaacatcccccagaagcccagccagcctgctgccaaggagcccagcgccaccccacccatcagcaacctgaccaagacagccagcgagagcatcagcaacctgtctgaggccggcagcatcaagaagggggagcgggagctgaagatcggggacagagtgctggtgggcggcaccaaggccggcgtggtgcgcttcctgggggagacagactttgccaagggggagtggtgtggggtggagctggatgagcccctgggcaagaatgatggagctgtggccggcacccgctacttccagtgccagcccaagtatggcctgtttgcccctgtgcacaaggtgaccaagattggcttccccagcaccaccccagccaaggccaaggccaatgctgtgagaagagtgatggccaccaccagcgccagcctgaagaggagccccagcgccagcagcctgagctccatgagctctgtggccagctctgtgagcagccggcccagcaggacaggcctgcacgtgctggagctggaggccaagatggaccagctgcggaccatggtggaggccgctgaccgggagaaggtggagctgctgaaccagctggaggaggagaagaggaaggtggaggacctgcagttccgggtggaggaggagagcatcaccaagggggacctggagcagaagagccagatcagtgaagatcctgaaaatgtgcggggccacctgactgtgtggatcttccccctgctgaccaagattgaccaccggctgaagtgcctgctgatctacagctag

SEQ ID NO: 87792 - DNA, 4317 bp, Artificial Sequence
  derived and/or modified sequence
atgtccatgctgaagcccagcggcctgaaggcccccaccaagatcctgaagccaggcagcacagccctgaagacccccacagctgtggtggcccctgtggagaagaccatcagcagcgagaaggccagcagcacccccagcagcgagacccaggaggagtttgtggatgacttccgggtgggggagcgggtgtgggtgaatggaaacaagccaggcttcatccagttcctgggggagacccagtttgcccctggccagtgggccggcatcgtgctggatgagcccatcggcaagaatgatggctctgtggccggcgtgcgctacttccagtgtgagcccctgaagggcatcttcacccggcccagcaagctgaccaggaaggtgcaggctgaagatgaggccaacggcctgcagaccaccccagccagccgggccaccagccccctgtgcaccagcacagcctccatggtgagcagcagccccagcacccccagcaacatcccccagaagcccagccagcctgctgccaaggagcccagcgccaccccacccatcagcaacctgaccaagacagccagcgagagcatcagcaacctgtctgaggccggcagcatcaagaagggggagcgggagctgaagatcggggacagagtgctggtgggcggcaccaaggccggcgtggtgcgcttcctgggggagacagactttgccaagggggagtggtgtggggtggagctggatgagcccctgggcaagaatgatggagctgtggccggcacccgctacttccagtgccagcccaagtatggcctgtttgcccctgtgcacaaggtgaccaagattggcttccccagcaccaccccagccaaggccaaggccaatgctgtgagaagagtgatggccaccaccagcgccagcctgaagaggagccccagcgccagcagcctgagctccatgagctctgtggccagctctgtgagcagccggcccagcaggacaggcctgctgacagagaccagcagccgctatgccaggaagatcagcggcaccacagccctgcaggaggccctgaaggagaagcagcagcacatcgagcagctgctggccgagcgggacctggagcgggcagaggtggccaaggccaccagccacgtgggggagattgagcaggagctggccctggccagagatggccatgaccagcacgtgctggagctggaggccaagatggaccagctgcggaccatggtggaggccgctgaccgggagaaggtggagctgctgaaccagctggaggaggagaagaggaaggtggaggacctgcagttccgggtggaggaggagagcatcaccaagggggacctggagcagaagagccagatcagtgaagatcctgagaacacccagaccaagctggagcacgcccgcatcaaggagctggagcagagcctgctgtttgagaagaccaaggctgacaagctgcagcgggagctggaggacaccagggtggccaccgtgtctgagaagagccgcatcatggagctggagaaggacctggccctgcgggtgcaggaggtggccgagctgcggcggcggctggagagcaacaagccagctggagatgtggacatgagcctgagcctgctgcaggagatcagcagcctgcaggagaagctggaggtgaccaggacagaccaccagcgggagatcaccagcctgaaggagcactttggagcccgggaggagacccaccagaaggagatcaaggccctgtacacagccacagagaagctgagcaaagaaaatgaaagcctgaagagcaagctggagcacgccaacaaggaaaattctgatgtgattgccctgtggaagagcaagctggagacagccatcgccagccaccagcaggccatggaggagctgaaggtgtccttcagcaagggcctgggcacagaaacagctgagtttgctgagctgaagacccagatcgagaagatgaggctggactaccagcacgagattgagaacctgcagaaccagcaggacagcgagcgggccgcccacgccaaggagatggaggccctgcgggccaagctgatgaaggtgatcaaggagaaggagaacagcctggaggccatccgcagcaagctggacaaggccgaggaccagcacctggtggagatggaggacaccctgaacaagctgcaggaggccgagatcaaggtgaaggagctggaggtgctgcaggccaagtgcaatgagcagaccaaggtgattgacaacttcaccagccagctgaaggccacagaggagaagctgctggacctggatgccctgaggaaggccagcagcgagggcaagtctgagatgaagaagctgcggcagcagctggaggccgctgagaagcagatcaagcacctggagattgagaagaatgctgagagcagcaaggccagcagcatcacccgggagctgcagggccgggagctgaagctgaccaacctgcaggagaacctgtctgaggtgtcccaggtgaaggagaccctggagaaggagctgcagatcctgaaggagaagtttgctgaggccagcgaggaggccgtgtctgtgcagaggtccatgcaggagaccgtgaacaagctgcaccagaaggaggagcagttcaacatgctgagcagtgacctggagaagctgcgggagaacctggccgacatggaggccaagttccgggagaaggatgagcgggaggagcagctgatcaaggccaaggagaagctggagaatgacattgctgagatcatgaagatgtctggggacaacagcagccagctgaccaagatgaatgatgagctgcggctgaaggagagagatgtggaggagctgcagctgaagctgaccaaggccaatgaaaatgccagcttcctgcagaagagcattgaggacatgacagtgaaggccgagcagagccagcaggaggccgccaagaagcatgaggaggagaagaaggagctggagaggaagctgagtgacctggagaagaagatggagaccagccacaaccagtgccaggagctgaaggcccgctatgagcgggccaccagcgagaccaagaccaagcatgaggagatcctgcagaacctgcagaagaccctgctggacacagaggacaagctgaagggggcccgggaggagaacagcggcctgctgcaggagctggaggagctgaggaagcaggccgacaaggccaaggccgcccagacagcagaagatgccatgcagatcatggagcagatgaccaaggagaagacagagaccctggccagcctggaggacaccaagcagaccaatgccaagctgcagaatgagctggacaccctgaaggagaacaacctgaagaatgtggaggagctgaacaagagcaaggagctgctgactgtggagaaccagaagatggaggagttcaggaaggagattgagaccctgaagcaggccgccgcccagaagagccagcagctgagcgccctgcaggaggagaatgtgaagctggccgaggagctgggccgcagcagagatgaggtgaccagccaccagaagctggaggaggagaggtctgtgctgaacaaccagctgctggagatgaagaagcgggagagcaagttcatcaaggatgctgatgaggagaaggccagcctgcagaagagcatcagcatcaccagcgccctgctgacagagaaggatgctgagctggagaagctgagaaatgaggtgacagtgctgcggggggagaatgccagcgccaagagcctgcacagcgtggtgcagaccctggagagtgacaaggtgaagctggagctgaaggtgaagaacctggagctgcagctgaaggagaacaagaggcagctgagcagcagcagcggcaacacagacacccaggctgatgaagatgagcgggcccaggagagccagattgacttcctgaacagcgtcatcgtggacctgcagaggaagaaccaggacctgaagatgaaggtggagatgatgtctgaggccgccctgaatggaaatggagatgacctgaacaactatgacagtgatgaccaggagaagcagagcaagaagaagcccaggctcttctgtgacatctgtgactgctttgacctgcatgacacagaggactgccccacccaggcccagatgtctgaagatcctccccacagcacccaccacggcagcagaggagaggagcggccctactgtgagatctgtgagatgtttggccactgggccaccaactgcaatgatgatgagaccttctag

SEQ ID NO: 87793 - DNA, 198 bp, Artificial Sequence
  derived and/or modified sequence
atggtggaggccgccgaccgggagaaggtggagctgctgaaccagctagaggaggaaaagaggaaggtagaggatctgcagttcagggttgaggaagaaagcattacaaaaggggacctggagcagaagtcccagatctctgaggatcctgaaaacgtggccaccgtctcagaaaaatcccgaataatggagttgtag

SEQ ID NO: 87794 - DNA, 1287 bp, Artificial Sequence
  derived and/or modified sequence
atgagcatgctgaagcccagcggcctgaaggcccccaccaagatcctgaagcctgggtcgaccgccttaaagactccgaccgctgtcgtcgcccctgtggagaaaactataagcagcgagaaagcttcctcaacaccctcatccgaaacccaggaggagttcgtggacgattttagggtaggggagcgcgtgtgggtcaacggaaacaagccgggtttcattcagttcctgggggagacccagttcgcaccgggccaatgggccggtatcgtcctggatgagccaatcgggaaaaatgatggctcggtcgccggagtccgatactttcagtgcgaacctctgaagggcatctttactcgcccaagtaagctgacaaggaaagtgcaggccgaggacgaggcaaatggcctgcagaccacccccgctagtcgtgctacttccccattatgcactagtaccgcttcgatggtttcctcttcacctagcaccccctctaatatcccccagaaaccgagccagccggcggccaaggagcctagcgcaacaccccccatcagcaacttgactaagacggcctctgagtccattagtaatctgtcggaggccgggtcaattaagaagggcgagagggagttgaaaattggagatagagtcctggtgggcggcacaaaggcaggagttgttcggttcctcggggaaacggatttcgcaaagggcgagtggtgtggcgtggagctcgacgaaccgctagggaaaaacgatggagcggtcgcgggcactcgatattttcagtgtcaacccaagtacggtctgttcgctcccgttcataaagtgactaaaatcggcttcccctctacaactcccgctaaagccaaggctaacgctgtgaggcgtgttatggcaactactagtgccagcctcaagagaagcccatcagcctccagcctgagtagcatgagcagtgtcgcatcctcagtatccagcaggccaagtcggaccggcttgcatgtgctggagctcgaggcgaaaatggatcagctccgtactatggtggaagccgcggatcgcgaaaaggtggagctcctaaatcagctagaggaggaaaaacggaaagtagaggatcttcagtttcgtgtcgaggaggaatcaataactaaaggtgacttggagcagaaatctcaaataagcgaagatcctgaaaacgtaagaggccatcttaccgtttggatatttcccctattaaccaagattgaccaccggctgaaatgtcttttaatatactcgtag

SEQ ID NO: 87795 - DNA, 4317 bp, Artificial Sequence
  derived and/or modified sequence
atgagcatgctgaagcccagcggcctgaaggcccccaccaagatcctgaaacctgggtccactgcattgaaaactcccaccgccgttgtggcacctgtcgagaagactatctctagtgagaaggcttccagcactccctcctcagagacacaagaggagttcgttgacgattttagagtgggtgaacgggtctgggtcaacggcaataagcctggcttcatccagtttcttggtgaaacacagtttgcgcccgggcaatgggccggcattgttttggacgaacctattggaaaaaacgacggaagtgtcgctggggtgaggtacttccaatgtgagccgttaaaagggatttttaccagaccctctaagcttaccagaaaagtgcaggctgaggacgaagctaatgggcttcagaccactccagcttctcgagccacttcacccctgtgtacctcaacagccagcatggtctcgtcttcaccttcaaccccatcaaacatacctcagaagcccagtcaacctgcagcaaaggaaccctctgccacaccccctatttcaaaccttaccaagaccgccagcgaatctattagtaatttgtctgaggccgggagcatcaagaagggagagagggaattgaagatcggggaccgggttctggttggcgggaccaaagctggcgtggttagatttctaggggaaaccgattttgccaagggagagtggtgtggcgtggagctggatgaacctttgggcaaaaatgacggcgccgtcgctggaactagatacttccaatgtcagcctaagtatgggttgttcgcccctgtacataaagtcaccaagatcggtttcccttctactacaccagctaaagccaaggcgaatgcagtccggcgtgtgatggccaccacttctgctagtctgaaacgatctccgtccgcgagcagcttgagtagcatgtcttccgtagctagcagcgtaagtagccggccaagccgcacggggctgctgacggagacctctagcagatatgctcggaaaatctctggaacaactgcactgcaagaagctctaaaggaaaagcagcagcacatcgagcaactacttgcagagagggacctcgagagagctgaggttgctaaagctacatcccatgttggagaaatcgagcaggagctcgccctggcgagagacggacacgatcaacacgtgctagagctggaagcaaagatggatcaactcaggacaatggttgaggcagcagatcgagagaaagtggagttgctcaatcaactggaggaggaaaaacgtaaagttgaggacctgcagttcagggtggaggaggagagtattacaaaaggagacttagaacagaaatcccagatcagcgaggatcccgaaaatacacagaccaaactggagcacgcccgcatcaaggaactcgagcagtccttgctcttcgaaaaaacaaaggccgacaaactccaacgtgagctggaggacactcgggtggcgaccgtgtccgagaagagtcggattatggagctggagaaggatctcgccctacgagtgcaagaagtggctgagctccgacggcgactggaatctaataaaccagccggtgacgttgatatgagcttgagcctgctgcaggagatcagctccctgcaggaaaagcttgaagtgacccgaaccgatcatcagcgtgagatcacctctcttaaggaacattttggagcccgcgaagagactcatcagaaggagattaaggctctctatactgcaaccgagaagctatcaaaagagaatgaatctctgaagtccaagctagaacacgctaataaagagaactccgacgtgatcgccctgtggaaatccaaactggagaccgccatcgcttctcaccagcaggccatggaggaattgaaggttagcttctccaagggcctcggaactgagacggccgagttcgctgagctgaaaacccagattgagaaaatgcgcctagactatcagcacgaaatcgagaaccttcaaaaccagcaggactcggaacgcgccgcccacgccaaggagatggaagccctgagggctaaactgatgaaagtcatcaaggagaaagagaatagtctggaagctattcggagcaagctggacaaagcagaggatcagcacctcgtggagatggaggataccctcaacaagctgcaagaagccgaaattaaggtaaaagagctggaagtgttgcaggctaagtgtaacgaacagaccaaagtgattgacaacttcacatcgcagctgaaagccactgaagaaaagctgctggacctcgatgccctccggaaagcatcttcagagggcaaatctgaaatgaagaaactgagacagcagctggaggccgcagagaaacaaatcaagcatcttgaaatcgaaaaaaacgccgagtcctcaaaggcaagctctatcaccagggagttgcagggacgggaactcaagttgaccaacttgcaagaaaatctaagtgaggtatcccaagtgaaagaaaccctggagaaggaactgcaaatcctgaaagagaagttcgcggaggcaagtgaagaggcggtgtctgtgcaacggtcaatgcaggagaccgtgaacaaactgcatcagaaggaggagcagttcaacatgcttagcagtgacctggagaagctccgtgagaacctggcggatatggaagcgaagtttcgtgaaaaggacgaaagggaagagcagctcatcaaggcgaaggagaagctagaaaacgacatcgccgagatcatgaaaatgagcggcgataatagctcccagctgacaaagatgaatgatgaactgaggcttaaagaacgcgatgtggaagaattgcagctcaaactcactaaggcaaacgaaaatgcatcatttcttcaaaagagcatcgaggacatgaccgtaaaagctgaacagagtcaacaggaggcagcaaaaaaacatgaagaggaaaaaaaggaattggagcgcaaactctcagacttagaaaagaagatggaaacttctcataaccagtgccaggagcttaaagcacgatacgaacgagccacctctgaaacaaaaacaaaacatgaggagatcttgcagaacctgcaaaagaccctgctggataccgaggacaagctgaagggtgcaagagaggagaatagcggcttattgcaagaactggaagaactgcgtaagcaggcggataaagccaaggcggcccagaccgcggaggatgccatgcaaatcatggagcagatgactaaggagaagactgagactttggcgtctcttgaagatactaaacagacaaacgccaagctacagaatgagctggatacactcaaggaaaacaacctcaaaaacgtggaggaactgaacaagtcaaaggaactgctgaccgtagaaaaccagaagatggaggagtttaggaaggaaatagagaccttaaagcaggcagcagcccagaaatcacagcagctgtctgcgctgcaggaggaaaatgttaagctagccgaagagcttggccgatcccgcgacgaggtgacaagccaccagaagctcgaggaggaacgttcggtactgaacaatcagttgctggagatgaaaaagcgggaatccaaattcatcaaagatgcagatgaggaaaaggcatccctacagaagtcaatttctataacctcagctttactgaccgagaaagatgctgagctggagaagctgaggaacgaagttaccgtcctgcgtggcgaaaacgccagcgcgaagagtctccactccgtggttcagaccttagagtctgataaagtgaagctagagctaaaggtgaagaacctggagttacagctgaaggaaaacaagcgccagttatctagttctagtgggaacaccgatactcaggcagacgaggacgagcgcgctcaagaatctcagatagatttcttgaattcagtgattgtcgacctgcagaggaagaaccaggatcttaaaatgaaagtagaaatgatgtctgaggctgctttgaacggcaacggagacgatctgaataactacgattccgatgatcaggagaaacagagcaagaaaaaaccgagactattctgtgatatatgcgactgctttgatcttcacgacactgaagactgccccacccaggctcaaatgtcagaggatccacctcatagcacacaccatgggagccgcggggaggagaggccctattgcgagatctgcgagatgttcggacactgggcaactaattgtaacgatgacgaaacattctag

SEQ ID NO: 87796 - DNA, 198 bp, Artificial Sequence
  derived and/or modified sequence
atggtggaggccgcagatcgagaaaaagtcgagctgctcaatcaacttgaagaagaaaaacgcaaggtcgaggatcttcagtttcgagtcgaagaggaaagcattaccaaaggtgatctggagcaaaagtctcagatctcagaggacccagaaaatgtcgccaccgtatcggagaagtctcggatcatggagctgtag

SEQ ID NO: 87797 - DNA, 1287 bp, Artificial Sequence
  derived and/or modified sequence
atgtcaatgcttaagccctcaggtctgaaagcccctactaagattctgaaacccggaagcaccgcgcttaaaactcctacagcggtagtcgcccctgtggagaaaaccatttcatccgagaaagccagttccactcccagcagcgagacacaggaagagtttgtggacgactttagggtgggtgagcgggtgtgggtgaacggtaacaaacccggttttattcagtttcttggtgagacccagtttgccccaggtcagtgggcgggaattgtgctggacgagcccataggtaagaacgatgggtctgtggctggtgtaaggtattttcagtgtgaacctctcaaaggcatatttaccaggccatccaagcttaccaggaaagtgcaggccgaggacgaagccaatggactccagaccacacctgcttcccgggctacatcaccattgtgtacttctactgcctccatggtgagcagttccccatccaccccctctaatattcctcagaagccgtctcagcctgccgctaaggaaccaagcgccacacctcctatctccaatctgacaaagactgcatctgaatctatctccaatttatccgaggcgggatccataaagaagggcgaaagagaactgaagatcggggatagagtcttggtgggaggaaccaaagcaggagtggttcgcttcttgggggagacggattttgccaaaggggaatggtgtggcgtggagctcgatgaaccgctgggtaaaaacgacggagcagtggctgggacccggtactttcagtgtcaaccaaaatacggcctgtttgcacccgttcataaggtgaccaaaatcggttttcctagcacaacacccgctaaagctaaggccaatgctgtgagaagagtgatggccaccacgagcgctagcttaaaacgcagcccttccgccagcagtctttcatccatgagcagtgtggccagttctgtttcctccagaccatcgcgcaccggtcttcacgttctggagctggaagcaaaaatggaccagcttaggactatggtcgaagccgcagaccgagagaaggtcgagttgttaaatcagctggaagaggaaaagaggaaagtcgaggatcttcaattcagagtagaagaggagtccattactaagggggacctggaacaaaagtctcagatctccgaagatcctgaaaacgtccggggacaccttaccgtgtggatctttcctctgctgactaagatcgaccacaggctgaagtgtctgttgatctactcatag

SEQ ID NO: 87798 - DNA, 4317 bp, Artificial Sequence
  derived and/or modified sequence
atgagcatgttgaaaccaagcggcctgaaggcaccgacaaaaattctgaagcccggaagcaccgccctgaagacgcccactgcagttgtcgcgcctgtggagaagactatttcgtctgaaaaagcttccagcaccccctctagcgagacacaggaggaatttgtggacgattttagagtgggggaacgcgtgtgggtcaacgggaacaagcctggcttcatccaattcctgggcgaaacacagttcgcacctggacaatgggccggtattgtgctggacgagcccattggcaagaacgacggtagtgtggcaggcgtacggtactttcagtgcgaacctctcaagggtatttttacgcggccttcaaagctcacccgcaaagtgcaagcagaagacgaggcgaacggattacagacgactcccgcttcgagagctacttctccactgtgcacaagcaccgcttctatggtgagctcttcccccagcacaccgtcgaatatccctcagaagccttcccagcctgcggctaaggaacccagtgctactccccctatttccaatctgacaaaaaccgcatctgagagcatctcgaatctgtcagaagcaggtagcattaaaaagggcgagcgcgagttgaagatcggagatcgcgtgttggtgggcggtaccaaagctggagttgttagatttctgggtgaaacagactttgccaaaggagagtggtgcggggttgagctggacgagcccctggggaagaatgacggcgctgtggccggaactcgctattttcagtgtcagcctaaatatggcttgttcgcacctgtgcacaaagtaaccaagattgggtttccttcaactaccccagccaaagccaaggcgaatgcggtaagaagggtgatggccactacctctgcaagcctgaagcggtcaccctcggccagttcattgtcctctatgtccagtgtggccagtagcgtgtcgagtcggccaagccggaccggcctgctgacagaaacctctagcagatatgcccgaaaaatttctggtactaccgccctgcaggaagccctgaaagagaagcagcagcacatagagcagcttctcgcggagcgggacctggagcgggctgaggtggcaaaggctacttctcatgtcggagaaatcgaacaggaactggcgctggcacgggatgggcatgatcaacatgtactggagctggaggctaaaatggatcagttgaggaccatggttgaagctgcggatcgcgagaaggttgagctgttgaaccagctagaggaagaaaagcgtaaggtcgaggatctgcagttccgggtcgaagaggagagcatcacgaaaggtgacctggagcaaaaatcacagatctccgaggatccagaaaacactcagaccaagttggagcacgcacgcataaaagaactcgagcagtctcttctcttcgagaaaacgaaggccgataagcttcaacgggagctcgaagacactcgggttgcgaccgtgtcagagaaatccagaattatggagcttgaaaaggaccttgccttaagagttcaggaggtcgccgaactgcgtcgcaggttagaaagtaacaagcccgcaggagatgtagatatgtctttgtcattgttgcaggagatctctagcctgcaagaaaagctggaagtgaccaggacagatcaccaacgggaaatcacgagcctgaaggaacactttggagcgagggaggaaacgcatcagaaggaaatcaaggcgctgtatacagccaccgagaaactgagtaaggaaaatgaatccctgaaaagtaaattggagcacgctaacaaggaaaactctgacgttatcgcattgtggaagagcaagttagaaacagccattgcaagccatcagcaggcaatggaggagctgaaagtgagcttctcaaaaggcctgggcactgagactgctgagttcgccgagttaaaaacacaaattgaaaagatgagactggattatcaacacgaaatagagaacctgcaaaatcagcaggattcagagcgtgcggctcacgcaaaagagatggaggctttgagggctaagctcatgaaagttattaaggaaaaggagaattcccttgaagctatacgtagtaagttggataaggcggaggaccagcacctggtcgaaatggaggatacactcaacaagctgcaggaagccgagataaaagtgaaagagctcgaggttcttcaggctaaatgtaacgaacaaactaaggttattgacaactttacgagccaattaaaagccaccgaagagaaactgctggacttggacgcactccgcaaggcctcttcagagggaaagtctgaaatgaagaaactgcggcagcagcttgaggccgctgagaagcaaatcaagcacttggagatcgaaaagaatgcggagtccagtaaggctagttcaattactagagagctacaaggacgagagttgaagttaaccaacctgcaggagaatcttagtgaggttagccaggtaaaggaaaccctggaaaaagaactgcaaatcctgaaggagaaattcgcggaagcttctgaggaggcggtgagcgtccagagatcaatgcaggaaacggtgaacaaattacatcagaaggaggaacagttcaacatgctcagcagtgatctggaaaagctgagagagaacctggcagatatggaggctaagttccgagagaaggacgaaagggaagagcagttgattaaagcaaaagagaaacttgagaacgacatcgccgagatcatgaagatgagcggtgacaacagcagccagctgacaaagatgaatgacgagttgaggctgaaggagagggacgtggaggagctgcaactgaaactgactaaagcaaacgaaaacgcttccttcctgcagaagagtattgaagatatgaccgtgaaggccgaacaaagtcagcaggaggctgcaaaaaaacatgaagaagagaaaaaggagctcgaaaggaaattaagtgacctggagaaaaaaatggaaacatcgcacaaccagtgccaggagctcaaggctcgatacgagagagccacctctgagactaagaccaaacacgaggaaattttgcaaaacctacaaaagaccctgctagacactgaagacaaacttaagggcgctagagaagaaaattccggcctcctgcaagaattggaggaattgagaaaacaggccgataaagcgaaggcggctcagacagctgaggatgctatgcagatcatggagcagatgaccaaagaaaaaaccgaaacactggctagcctggaggataccaagcagactaatgctaagctgcaaaacgagctggacacactgaaggaaaataatttgaagaacgtggaggagctcaataagtctaaggagctgctaaccgtggagaatcaaaaaatggaggaattcaggaaggaaatagagaccttgaagcaggccgcagcccagaagtctcaacaactttccgctctccaggaggagaacgtgaaactggccgaggagcttggtagatccagagacgaggtgactagccaccagaagctcgaagaggaacgctcggtgctcaataaccagctccttgaaatgaaaaagcgcgagagcaagtttattaaagatgcagacgaagaaaaggcctctctacagaagtcaatctccataacgtcagctcttttaacggagaaggacgccgagctggaaaagctaaggaacgaggtaacagtactgcgaggggagaacgcttctgccaagtcgcttcactcggttgtccagacacttgaaagtgataaagtgaagctggaactgaaggtcaaaaatttggaactgcaactcaaggaaaataagcgacaattgtcttcaagcagcggcaacacggatacacaggccgatgaggatgagcgagctcaggagtcccaaatagatttcctgaactctgtgatcgtcgaccttcagcgaaaaaaccaagacctgaagatgaaagtggagatgatgagtgaagccgcactgaacggcaacggagacgacctgaacaactacgattctgatgatcaagagaaacagagtaagaaaaaacctcgactgttctgtgacatctgcgactgtttcgacttgcatgacaccgaagactgccctacacaggctcagatgagcgaggatccaccacacagtacccatcatggatctagaggcgaggaacgaccttattgtgagatttgtgaaatgtttgggcactgggctacgaactgcaacgatgacgagacattctag

SEQ ID NO: 87799 - DNA, 1403 bp, Artificial Sequence
  derived and/or modified sequence
cagcttctggcaggatatgagctgatgcctgccccgattctacagacaccatgagatttaatccagagactgacttcactatagaacccacagttgtatcaatggttggggaaagatagtggcaacaggcaaaggagaaacagctctgacatacaaagaaaatgagtatgctaaagccaagtgggcttaaggcccccaccaagatcctgaagcctggaagcacagctctgaagacacctacggctgttgtagctccagtagaaaaaaccatatccagtgaaaaagcatcaagcactccatcatctgagactcaggaggaatttgtggatgactttcgagttggggagcgagtttgggtgaatggaaataagcctggatttatccagtttcttggagaaacccagtttgcaccaggccagtgggctggaattgttttagatgaacccataggcaagaacgatggttcggtggcaggagttcggtatttccagtgtgaacctttaaagggcatatttacccgaccttcaaagttaacaaggaaggtgcaagcagaagatgaagctaatggcctgcagacaacgcccgcctcccgagctacttcaccgctgtgcacttctacggccagcatggtgtcttcctccccctccaccccttcaaacatccctcagaaaccatcacagccagcagcaaaggaaccttcagctacgcctccgatcagcaaccttacaaaaactgccagtgaatctatctccaacctttcagaggctggctcaatcaagaaaggagaaagagagctcaaaatcggagacagagtattggttggtggcactaaggctggtgtagtccggtttcttggggagaccgactttgccaagggggagtggtgtggcgtggagttagatgagccacttgggaagaatgatggcgctgttgctggaacaaggtattttcagtgtcaacccaaatatggcttgttcgctcctgtccacaaagttaccaagattggcttcccttccactacaccagccaaagccaaggccaacgcagtgaggcgagtgatggcgaccacgtccgccagcctgaagcgcagcccttctgcctcttccctcagctccatgagctcagtggcctcctctgtgagcagcaggcccagtcggacaggactacatgtcctggaattggaagccaaaatggaccagctgcgaacaatggtggaagctgctgacagggagaaggtggagcttctcaaccagcttgaagaggagaaaaggaaggttgaggaccttcagttccgggttgaagaagaatcaattaccaaaggtgatcttgagcaaaagagccagatttctgaagatcctgagaatgtggctacagtttcagaaaagtcacgtataatggaactg

SEQ ID NO: 87800 - DNA, 2000 bp, Artificial Sequence
  derived and/or modified sequence
gtagctgggactacacgcacgcaccaccatgcccagctaatttttgtattagtagagacggggtttcaccatgttggccagggttgtctctatctcttgacctcatgatcagcctgccttggcctcccaaagtactgcgattacaggcgtgagccaccacgcctggcggggatgcttaaatgtagcccaatcctccagtaaagaatactaagaaaaagtgtttggaaccgaaccaaaataaaaacttgcgtaccagaagtttgcaggtaatacagatatgcgtacatgactggtgttcagctatttaggtggacttgcttgtctctgcttacctgtgttgctgatgctggtcagcagtggagaaaactgagattagatgctgctaatctcagatgggaggataatttcttaggaggaaggacatttcttgagtcatcagctccagattcctttaaagtggtgaggcttcagcccagagggcgactaacatgagaattcctgtttgtgaggtcattgtcatgacctcatagccaggctgttcaaaatgtttgcccagcttctggcaggatatgagctgatgcctgccccgattctacagacaccatgagatttaatccagagactgacttcactatagaacccacagttgtatcaatggttggggaaagatagtggcaacaggcaaaggagaaacagctctgacatacaaagaaaatgagtatgctaaagccaagtgggcttaaggcccccaccaagatcctgaagcctggaagcacagctctgaagacacctacggctgttgtagctccagtagaaaaaaccatatccagtgaaaaagcatcaagcactccatcatctgagactcaggaggaatttgtggatgactttcgagttggggagcgagtttgggtgaatggaaataagcctggatttatccagtttcttggagaaacccagtttgcaccaggccagtgggctggaattgttttagatgaacccataggcaagaacgatggttcggtggcaggagttcggtatttccagtgtgaacctttaaagggcatatttacccgaccttcaaagttaacaaggaaggtgcaagcagaagatgaagctaatggcctgcagacaacgcccgcctcccgagctacttcaccgctgtgcacttctacggccagcatggtgtcttcctccccctccaccccttcaaacatccctcagaaaccatcacagccagcagcaaaggaaccttcagctacgcctccgatcagcaaccttacaaaaactgccagtgaatctatctccaacctttcagaggctggctcaatcaagaaaggagaaagagagctcaaaatcggagacagagtattggttggtggcactaaggctggtgtagtccggtttcttggggagaccgactttgccaagggggagtggtgtggcgtggagttagatgagccacttgggaagaatgatggcgctgttgctggaacaaggtattttcagtgtcaacccaaatatggcttgttcgctcctgtccacaaagttaccaagattggcttcccttccactacaccagccaaagccaaggccaacgcagtgaggcgagtgatggcgaccacgtccgccagcctgaagcgcagcccttctgcctcttccctcagctccatgagctcagtggcctcctctgtgagcagcaggcccagtcggacaggactacatgtcctggaattggaagccaaaatggaccagctgcgaacaatggtggaagctgctgacagggagaaggtggagcttctcaaccagcttgaagaggagaaaaggaaggttgaggaccttcagttccgggttgaagaagaatcaattaccaaaggtgatcttgagcaaaagagccagatttctgaagatcctgagaatgtaagagggcacttaactgtgtggatatttcccttgttaacaaagattgatcacagattaaaatgcttattgatatactcaaa

SEQ ID NO: 87801 - DNA, 4400 bp, Artificial Sequence
  derived and/or modified sequence
tggcaacaggcaaaggagaaacagctctgacatacaaagaaaatgagtatgctaaagccaagtgggcttaaggcccccaccaagatcctgaagcctggaagcacagctctgaagacacctacggctgttgtagctccagtagaaaaaaccatatccagtgaaaaagcatcaagcactccatcatctgagactcaggaggaatttgtggatgactttcgagttggggagcgagtttgggtgaatggaaataagcctggatttatccagtttcttggagaaacccagtttgcaccaggccagtgggctggaattgttttagatgaacccataggcaagaacgatggttcggtggcaggagttcggtatttccagtgtgaacctttaaagggcatatttacccgaccttcaaagttaacaaggaaggtgcaagcagaagatgaagctaatggcctgcagacaacgcccgcctcccgagctacttcaccgctgtgcacttctacggccagcatggtgtcttcctccccctccaccccttcaaacatccctcagaaaccatcacagccagcagcaaaggaaccttcagctacgcctccgatcagcaaccttacaaaaactgccagtgaatctatctccaacctttcagaggctggctcaatcaagaaaggagaaagagagctcaaaatcggagacagagtattggttggtggcactaaggctggtgtagtccggtttcttggggagaccgactttgccaagggggagtggtgtggcgtggagttagatgagccacttgggaagaatgatggcgctgttgctggaacaaggtattttcagtgtcaacccaaatatggcttgttcgctcctgtccacaaagttaccaagattggcttcccttccactacaccagccaaagccaaggccaacgcagtgaggcgagtgatggcgaccacgtccgccagcctgaagcgcagcccttctgcctcttccctcagctccatgagctcagtggcctcctctgtgagcagcaggcccagtcggacaggactattgactgaaacctcctcccgttacgccaggaagatctccggtaccactgccctccaggaggccctgaaggagaagcagcagcacattgagcagctgctggcggaacgggatctggagagggcggaggtggccaaggccacgagccacgtgggggagatagagcaggagctagctctggcccgggacggacatgaccagcatgtcctggaattggaagccaaaatggaccagctgcgaacaatggtggaagctgctgacagggagaaggtggagcttctcaaccagcttgaagaggagaaaaggaaggttgaggaccttcagttccgggttgaagaagaatcaattaccaaaggtgatcttgagcaaaagagccagatttctgaagatcctgagaatacgcagaccaaactggagcatgcccgcattaaggagcttgaacagagcctgctctttgaaaagaccaaagctgacaaactccagagggagttagaagacactagggtggctacagtttcagaaaagtcacgtataatggaactggagaaagacctagcattgagagtacaggaagtagctgagctccgaagaaggctagagtccaataagcctgctggggatgtggacatgtcactttcccttttgcaagagataagctctttgcaagaaaagttagaagtcacccgtactgaccaccagagagaaataacttctctgaaggagcattttggagcccgggaagaaactcatcagaaggagataaaggctctgtataccgccacggaaaagctttccaaagagaacgagtcattgaaaagcaagctggagcatgccaacaaagagaactcagatgtgatagctctatggaagtccaaactggagactgccatcgcatcccaccagcaggcgatggaagaactgaaggtatctttcagcaaagggcttggaacagagacggcagaatttgctgaactaaaaacacaaatagagaaaatgagactagattaccaacacgaaatagaaaatttgcagaatcaacaagactctgaacgggctgcccatgctaaagagatggaagccttgagggctaaactgatgaaagttattaaagaaaaggaaaacagtctggaagccatcaggtcgaaactggacaaagcagaagaccagcatctcgtagaaatggaagacacgttaaacaaattacaggaagctgaaataaaggtaaaggagctagaggtactgcaagccaaatgcaatgaacaaaccaaggttattgataattttacatcacagctcaaggctactgaagaaaagctcttggatcttgatgcacttcggaaagccagttccgaaggtaaatcggaaatgaagaaacttagacagcagcttgaggcagctgagaaacagattaaacatttagagattgaaaagaatgctgaaagtagcaaggctagtagcattaccagagagctccaggggagagagctaaagcttactaaccttcaggaaaatttgagtgaagtcagtcaagtgaaagagactttggaaaaagaacttcagattttgaaagaaaagtttgctgaagcttcagaggaggcagtctctgttcagagaagtatgcaagaaactgtaaataagttacaccaaaaggaggaacagtttaacatgctgtcttctgacttggagaagctgagagaaaacttagcagatatggaggcaaaatttagagagaaagatgagagagaagagcagctgataaaggcaaaggaaaaactggaaaatgacattgcagaaataatgaagatgtcaggagataactcttctcagctgacaaaaatgaacgatgaattacgtctgaaagaaagagatgtagaagaattacagctaaaacttacaaaggctaatgaaaatgcaagttttctgcaaaaaagtattgaggacatgactgtcaaagctgaacagagccagcaagaagcagctaaaaagcatgaggaagaaaagaaagaattggagaggaaattgtcggacctggaaaagaaaatggaaacaagccacaaccagtgtcaggagctgaaagccaggtatgagagagccacttctgagacaaaaaccaagcatgaagaaatcctacagaacctccagaagacgctgctggacacagaggacaagctgaagggcgcacgggaggagaacagtggcttgctgcaggagctggaggagctgagaaagcaagccgacaaagccaaagctgctcaaacagcggaagatgccatgcagataatggaacagatgaccaaagagaagactgagactctggcctccttggaggacaccaagcaaacaaatgcaaaactacagaatgaattggacacacttaaagaaaacaacttgaaaaatgtggaagagctgaacaaatcaaaagaactcctgactgtagagaatcaaaaaatggaagaatttaggaaagaaatagaaaccctaaagcaggcagcagctcagaagtcccagcagctttcagcgttgcaagaagagaacgttaaacttgctgaggagctggggagaagcagggacgaagtcacaagtcatcaaaagctggaagaagaaagatctgtgctcaataatcagttgttagaaatgaaaaaaagagaatccaagttcataaaagacgcagatgaagagaaagcttccttgcagaaatccatcagtataactagtgccttactcacagaaaaggatgccgagctggagaaactgagaaatgaggtcacagtgctcaggggagaaaacgcctctgccaagtccttgcattcagttgttcagactctagagtctgataaggtgaagctcgagctcaaggtaaagaacttggagcttcaactcaaagaaaacaagaggcagctcagcagctcctcaggtaatacagacactcaggcagacgaggatgaaagagcccaggagagtcagattgatttcctaaattcagtaatagtggaccttcaaaggaagaatcaagacctcaagatgaaggtggagatgatgtcagaagcagccctgaatgggaacggggatgacctaaacaattatgacagtgatgatcaggagaaacagtccaagaagaaacctcgcctcttctgtgacatttgtgactgctttgatctccacgacacagaggattgtcctacccaggcacagatgtcagaggaccctccccattccacacaccatggcagtcggggtgaggaacgcccatactgtgaaatctgtgagatgtttggacactgggccaccaactgcaatgacgacgaaaccttctgatgaagcctccagtggagaactgggcttgctcagacgcactc

SEQ ID NO: 87802 - protein, 253 aa, Artificial Sequence
  derived and/or modified sequence
MVLLKLLEVYRKGSAGTFHKSTIFGNTIMTSQPVPNETIIVLPSNVINFSQAEKPEPTNQGQDSLKKHLHAEIKVIGTIQILCGMMVLSLGIILASASFSPNFTQVTSTLLNSAYPFIGPFFFIISGSLSIATEKRLTKLLVHSSLVGSILSALSALVGFIILSVKQATLNPASLQCELDKNNIPTRSYVSYFYHDSLYTTDCYTAKASLAGTLSLMLICTLLEFCLAVLTAVLRWKQAYSDFPGVSVLAGFT

SEQ ID NO: 87803 - protein, 225 aa, Artificial Sequence
  derived and/or modified sequence
MTSQPVPNETIIVLPSNVINFSQAEKPEPTNQGQDSLKKHLHAEIKVIGTIQILCGMMVLSLGIILASASFSPNFTQVTSTLLNSAYPFIGPFFFIISGSLSIATEKRLTKLLVHSSLVGSILSALSALVGFIILSVKQATLNPASLQCELDKNNIPTRSYVSYFYHDSLYTTDCYTAKASLAGTLSLMLICTLLEFCLAVLTAVLRWKQAYSDFPGVSVLAGFT

SEQ ID NO: 87804 - DNA, 762 bp, Artificial Sequence
  derived and/or modified sequence
atggtgctgttgaaacttctggaggtgtaccgcaagggctcggcgggaacctttcataagagtacgatctttggaaatactatcatgacttcacagccagtccctaatgaaacaatcattgttttgccttccaacgtgatcaacttctcacaagccgaaaagccggagccgactaatcaaggacaagacagtctgaagaaacacttgcacgcagagataaaggtaatagggacaatccagattttgtgtggaatgatggttctgtccctcggaataattctcgcctcagcctctttctcacccaactttactcaggtgactagcacactgttaaacagcgcatatccttttattggcccgttcttctttatcatcagtgggagtctctcaattgctactgaaaagaggctgaccaaacttttagtacactcatccctggtaggatctatcctgtctgcactgtcggccctggtgggtttcattatactgagtgtcaagcaagcgacgttgaaccctgcttccctacagtgcgaattggacaaaaacaacatccctacacgttcatacgtgtcctatttctaccatgactctctttacactacagattgttacaccgcaaaagctagtttggccggcactctgtcactgatgctgatatgtactctgctggagttctgcttggcagtgctcacagcagtgctgaggtggaaacaagcatactccgactttcctggcgtatctgtcctggcggggtttacctag

SEQ ID NO: 87805 - DNA, 762 bp, Artificial Sequence
  derived and/or modified sequence
atggtgctgctgaagctgctggaggtgtacaggaagggcagcgctggcaccttccacaagagcaccatcttcggcaacaccatcatgaccagccagcctgtgcccaatgagaccatcatcgtgctgcccagcaatgtcatcaacttcagccaggccgagaagccagagcccaccaaccagggccaggacagcctgaagaagcacctgcatgctgagatcaaggtgattggcaccatccagatcctgtgtggcatgatggtgctgagcctgggcatcatcctggccagcgccagcttcagccccaacttcacccaggtgaccagcaccctgctgaacagcgcctaccccttcatcggccccttcttcttcatcatcagcggcagcctgagcatcgccacagagaagaggctgaccaagctgctggtgcacagcagcctggtgggcagcatcctgagcgccctgagcgccctggtgggcttcatcatcctgtctgtgaagcaggccaccctgaacccagccagcctgcagtgtgagctggacaagaacaacatccccaccaggagctatgtgtcctacttctaccatgacagcctgtacaccacagactgctacacagccaaggccagcctggccggcaccctgagcctgatgctgatctgcaccctgctggagttctgcctggccgtgctgacagctgtgctgcgctggaagcaggcctacagcgacttccctggggtgtctgtgctggccggcttcacctag

SEQ ID NO: 87806 - DNA, 1284 bp, Artificial Sequence
  derived and/or modified sequence
tattagttggctcttttcatggttttactgaagttgctagaagtttacagaaaaggaagtgcaggaacatttcacaaatctacaatctttggcaacaccatcatgacatcacaacctgttcccaatgagaccatcatagtgctcccatcaaatgtcatcaacttctcccaagcagagaaacccgaacccaccaaccaggggcaggatagcctgaagaaacatctacacgcagaaatcaaagttattgggactatccagatcttgtgtggcatgatggtattgagcttggggatcattttggcatctgcttccttctctccaaattttacccaagtgacttctacactgttgaactctgcttacccattcataggaccctttttttttatcatctctggctctctatcaatcgccacagagaaaaggttaaccaagcttttggtgcatagcagcctggttggaagcattctgagtgctctgtctgccctggtgggtttcattatcctgtctgtcaaacaggccaccttaaatcctgcctcactgcagtgtgagttggacaaaaataatataccaacaagaagttatgtttcttacttttatcatgattcactttataccacggactgctatacagccaaagccagtctggctggaactctctctctgatgctgatttgcactctgctggaattctgcctagctgtgctcactgctgtgctgcggtggaaacaggcttactctgacttccctggggtgagtgtgctggccggcttcacttaaccttgcctagtgtatcttatccctgcactgtgttgagtatgtcaccaagagtggtagaaggaacaatcagtcagtcatgagatacacatgggagggcatttgcattgtgatggaagacagagaagaaaagcagatggcaattgagtagctgataagctgaaaattcactggatatgaaaatagttaatcatgagaaatcaactgattcaatcttcctattttgtcagcgaagggaatgagactctgggaagttaaatgactggcctggcattatgctatgagtttgtgcctttgctgaggacactagaacctggcttgcctcccttataagcagaaacaatttctgccacaaccactagtctctttaatagtattgacttggtaaagggcatttacacacgtaactggatccagtgaatgtcttatgctctgcatttgcccctggtgatcttaaaattcgtttgcctttttaaagctatattaaaaatgtattgttgaatcaaa

SEQ ID NO: 87807 - DNA, 1806 bp, Artificial Sequence
  derived and/or modified sequence
ctggaataaggaagggctgatgactttcagaagatgaaggtaagtagaaaccgttgatgggactgagaaaccagagttaaaacctctttggagcttctgaggactcagctggaaccaacgggcacagttggcaacaccatcatgacatcacaacctgttcccaatgagaccatcatagtgctcccatcaaatgtcatcaacttctcccaagcagagaaacccgaacccaccaaccaggggcaggatagcctgaagaaacatctacacgcagaaatcaaagttattgggactatccagatcttgtgtggcatgatggtattgagcttggggatcattttggcatctgcttccttctctccaaattttacccaagtgacttctacactgttgaactctgcttacccattcataggaccctttttttttatcatctctggctctctatcaatcgccacagagaaaaggttaaccaagcttttggtgcatagcagcctggttggaagcattctgagtgctctgtctgccctggtgggtttcattatcctgtctgtcaaacaggccaccttaaatcctgcctcactgcagtgtgagttggacaaaaataatataccaacaagaagttatgtttcttacttttatcatgattcactttataccacggactgctatacagccaaagccagtctggctggaactctctctctgatgctgatttgcactctgctggaattctgcctagctgtgctcactgctgtgctgcggtggaaacaggcttactctgacttccctggggtgagtgtgctggccggcttcacttaaccttgcctagtgtatcttatccctgcactgtgttgagtatgtcaccaagagtggtagaaggaacaatcagtcagtcatgagatacacatgggagggcatttgcattgtgatggaagacagagaagaaaagcagatggcaattgagtagctgataagctgaaaattcactggatatgaaaatagttaatcatgagaaatcaactgattcaatcttcctattttgtcagcgaagggaatgagactctgggaagttaaatgactggcctggcattatgctatgagtttgtgcctttgctgaggacactagaacctggcttgcctcccttataagcagaaacaatttctgccacaaccactagtctctttaatagtattgacttggtaaagggcatttacacacgtaactggatccagtgaatgtcttatgctctgcatttgcccctggtgatcttaaaattcgtttgcctttttaaagctatattaaaaatgtattgttgaatcaaacccctatggacttatggctttatttaactgaattaaaaagccttgatttatccaaaattgtattatagagtgtagaatgaatactagggtgataaattgcaattatttgaagaacctggtgatatgctctacttatcttggattagctaagaattctatgtatacagttggaaaaatggcatatatacatctatcttgaacctgattgaagtctgaagacctaacatattttgtttcttctagagtgtacttttcctgcctcacagttacattggtaattctggcatgtcctcaaaaatgactcatgactgtggatatgaagaactattgacttcttaagaaaaaagggagaaatattaatcagaaagttgattcttatgataatatggaaaagttaaccattatagaaaagcaaagcttgagtttcctaaatgtaagcttttaaagtaatgaacattaaaaaaaaccattatttcactgtca

SEQ ID NO: 87808 - DNA, 762 bp, Artificial Sequence
  derived and/or modified sequence
atggtgctgctgaagctgctggaggtgtaccggaagggcagcgccggcactttccataaatccacgattttcggcaacactattatgacttctcagcccgtgccaaatgagaccattatagtgcttccctccaatgtgatcaacttctcgcaggctgagaagcccgagcccacgaaccagggacaggactcccttaagaaacacctgcacgccgaaattaaggttataggcacaattcagattctttgtggcatgatggtgcttagcctcggcatcatcctggcctccgcgtctttttccccgaatttcacgcaagtgacttctacactcttgaattctgcctaccctttcattggtccgttttttttcattatcagtgggagccttagcattgcgactgaaaagcggctaacaaagttgctcgttcacagttcgttggtgggttccatcctctctgccctgagcgccctggttggattcatcatcctgtctgttaaacaggctacactgaaccccgcatctctgcagtgtgagcttgataaaaataacatacccacaaggagttacgtgtcctatttctaccatgattcgctatacacaactgattgctatactgcaaaagcaagtctggcaggcaccctgtcgctgatgttgatttgcacccttttagagttttgcctggctgtgctcaccgctgtgttgcgttggaagcaggcctattctgattttcctggagtgtccgtcctggccggttttacgtag

SEQ ID NO: 87809 - DNA, 762 bp, Artificial Sequence
  derived and/or modified sequence
atggtgcttttaaaactgctggaagtttacagaaaggggagcgcgggaacttttcataagagcaccatttttggcaacactatcatgaccagccagcccgtgccaaatgagacgatcatcgtcctgccttcgaacgttataaacttcagccaggccgagaaaccagagcctactaatcaaggacaggactcattaaagaagcacctccacgctgaaattaaggtgatcgggaccatccaaatcttatgtggaatgatggttctctcgcttggaattattctcgcttcagcatcctttagccccaacttcacccaggttacttccaccctgctcaattcagcatacccattcatagggcctttttttttcatcataagcggcagtctgagtattgctaccgagaagcggttaactaaactgctggttcatagtagtctggttggatccatcctgtcagcactgtctgcactcgtaggcttcatcatccttagtgttaagcaggctaccctgaatcctgccagcctacagtgcgagctggacaaaaacaacattcccactcggagttacgtgagttatttctaccatgactccctgtacacaaccgactgttatacggccaaggcgagtctggctggcacactgtcattaatgctgatttgtacactgttagagttctgtcttgccgtgctaactgcagtactgaggtggaagcaggcctatagcgactttcccggagtgtccgtcttagctggctttacttag

SEQ ID NO: 87810 - DNA, 762 bp, Artificial Sequence
  derived and/or modified sequence
atggtgctgctgaagctgctggaggtgtacagaaagggcagcgccggcaccttccacaagagcaccatcttcggcaacaccatcatgaccagccagcccgtgcccaacgagaccatcatcgtgctgcccagcaacgtgatcaacttcagccaggccgagaagcccgagcccaccaaccagggccaggacagcctgaagaagcacctgcacgccgagatcaaggtgatcggcaccatccagatcctgtgcggcatgatggtgctgagcctgggcatcatcctggccagcgccagcttcagccccaacttcacccaggtgaccagcaccctgctgaacagcgcctaccccttcatcggccccttcttcttcatcatcagcggcagcctgagcatcgccaccgagaagagactgaccaagctgctggtgcacagcagcctggtgggcagcatcctgagcgccctgagcgccctggtgggcttcatcatcctgagcgtgaagcaggccaccctgaaccccgccagcctgcagtgcgagctggacaagaacaacatccccaccagaagctacgtgagctacttctaccacgacagcctgtacaccaccgactgctacaccgccaaggccagcctggccggcaccctgagcctgatgctgatctgcaccctgctggagttctgcctggccgtgctgaccgccgtgctgagatggaagcaggcctacagcgacttccccggcgtgagcgtgctggccggcttcacctag

SEQ ID NO: 87811 - protein, 268 aa, Artificial Sequence
  derived and/or modified sequence
MGCRDLLPSLKPTLLEKEQQEAIEHIDEVQNEIDRLNEQASEEILKVEQKYNKLRQPFFQKRSELIAKIPNFWVTTFVNHPQVSALLGEEDEEALHYLTRVEVTEFEDIKSGYRIDFYFDENPYFENKVLSKEFHLNESGDPSSKSTEIKWKSGKDLTKRSSQTQNKASRKRQHEEPESFFTWFTDHSDAGADELGEVIKDDIWPNPLQYYLVPDMDDEEGEGEEDDDDDEEEEGLEDIDEEGDEDEGEEDEDDDEGEEGEEDEGEDD

SEQ ID NO: 87812 - DNA, 807 bp, Artificial Sequence
  derived and/or modified sequence
atgggctgcagagacctgctgcccagcctgaagcccaccctgctggagaaggagcagcaggaggccatcgagcacatcgacgaggtgcagaacgagatcgacagactgaacgagcaggccagcgaggagatcctgaaggtggagcagaagtacaacaagctgagacagcccttcttccagaagagaagcgagctgatcgccaagatccccaacttctgggtgaccaccttcgtgaaccacccccaggtgagcgccctgctgggcgaggaggacgaggaggccctgcactacctgaccagagtggaggtgaccgagttcgaggacatcaagagcggctacagaatcgacttctacttcgacgagaacccctacttcgagaacaaggtgctgagcaaggagttccacctgaacgagagcggcgaccccagcagcaagagcaccgagatcaagtggaagagcggcaaggacctgaccaagagaagcagccagacccagaacaaggccagcagaaagagacagcacgaggagcccgagagcttcttcacctggttcaccgaccacagcgacgccggcgccgacgagctgggcgaggtgatcaaggacgacatctggcccaaccccctgcagtactacctggtgcccgacatggacgacgaggagggcgagggcgaggaggacgacgacgacgacgaggaggaggagggcctggaggacatcgacgaggagggcgacgaggacgagggcgaggaggacgaggacgacgacgagggcgaggagggcgaggaggacgagggcgaggacgactag

SEQ ID NO: 87813 - DNA, 807 bp, Artificial Sequence
  derived and/or modified sequence
atggggtgtcgggacctgctgccatcactgaagcctactctgctcgaaaaagagcaacaggaagccattgaacacatcgatgaggtccagaacgagatagacagattgaacgaacaggcttctgaggagattctgaaagtcgagcagaaatataacaaattacgtcagccgttcttccagaagagaagcgaactcatagcgaagatcccaaacttttgggtgactaccttcgtgaaccaccctcaggtatcagctctcctgggagaagaagacgaggaggctcttcactacctgacgcgcgttgaggtgacggaattcgaagacattaagtcgggttacagaatcgacttttatttcgatgaaaatccgtattttgaaaacaaggtgctctcaaaggaattccatttaaatgagtccggcgatccatccagcaaatctacagagataaaatggaaatctggaaaggatctcaccaagcggtcatcacagactcagaacaaggcgtcaaggaaaaggcagcacgaggagccggaatcattttttacctggtttactgatcacagtgatgctggggccgacgagctcggcgaagtcattaaggatgatatttggccaaaccctctccaatactatcttgtgccggacatggatgatgaggagggagaaggcgaggaagatgatgacgatgacgaagaagaggagggcctggaggatattgacgaagagggcgacgaggatgagggcgaggaggatgaagacgatgacgagggggaagaaggggaagaggacgaaggggaagacgactag

SEQ ID NO: 87814 - DNA, 807 bp, Artificial Sequence
  derived and/or modified sequence
atgggctgccgggacctgctgcccagcctgaagcccaccctgctggagaaggagcagcaggaggccatcgagcacattgatgaggtgcagaatgaaattgaccggctgaatgagcaggccagcgaggagatcctgaaggtggagcagaagtacaacaagctgcggcagcccttcttccagaagaggtctgagctgattgccaagatccccaacttctgggtgaccacctttgtgaaccacccccaggtgtctgccctgctgggggaggaggatgaggaggccctgcactacctgaccagggtggaggtgacagaatttgaggacatcaagagcggctacagaattgacttctactttgatgagaacccctactttgagaacaaggtgctgagcaaggagttccacctgaatgaaagtggggaccccagcagcaagagcacagagatcaagtggaagagcggcaaggacctgaccaagaggagcagccagacccagaacaaggccagcaggaagaggcagcacgaggagcctgagagcttcttcacctggttcacagaccacagtgatgctggagcagatgagctgggggaggtgatcaaggatgacatctggcccaaccccctgcagtactacctggtgcctgacatggatgatgaggagggggagggggaggaggatgatgatgatgatgaggaggaggagggcctggaggacattgatgaggagggagatgaagatgaaggagaggaggatgaagatgatgatgaaggagaggagggggaggaggatgaaggagaagatgactag

SEQ ID NO: 87815 - DNA, 807 bp, Artificial Sequence
  derived and/or modified sequence
atgggctgccgggacctgctgcccagcctgaagcccaccctgctggaaaaggagcagcaggaagccatcgaacacatcgacgaggtccagaatgagatcgatagactgaatgaacaggctagcgaggagatcctgaaagtggagcaaaaatataataaactgcgccagcctttcttccagaaaagatcggaactgatcgccaagatcccgaacttctgggtaactaccttcgttaaccaccctcaggtgagtgcactattaggtgaagaagatgaggaggcgctgcactatcttactcgcgttgaggttaccgaattcgaggacatcaagtctgggtatcgcattgacttttattttgatgaaaacccatatttcgagaacaaggtcctgagcaaggagttccatttgaacgagtccggagacccatctagtaagtcaactgagattaaatggaaatcagggaaagatctgacgaaacggtccagccagactcaaaataaggcaagcagaaaacgccaacacgaggaaccagagtctttctttacgtggttcaccgaccatagcgacgccggggccgacgagctgggcgaagtgatcaaagacgacatatggcccaatccactgcagtattacctggtgcctgacatggatgacgaggaaggggagggggaagaagatgacgatgacgacgaggaggaggagggcttggaggacatcgatgaggagggcgatgaggatgaaggggaggaggacgaggatgatgatgaaggtgaggaaggagaagaggacgagggggaagatgattag

SEQ ID NO: 87816 - DNA, 807 bp, Artificial Sequence
  derived and/or modified sequence
atgggctgccgagatcttttgccatctctcaagcccacactgcttgaaaaggaacaacaagaggccatcgagcacatagatgaagtccagaacgagatagaccggcttaacgagcaggcaagcgaggagattctgaaagtggagcagaaatataataagcttcggcagccattcttccagaaaagatccgaattgattgcgaagatcccaaacttttgggtgaccaccttcgtcaaccacccgcaggtaagcgcattgctgggggaagaagacgaggaagctctgcactatctgaccagggtcgaggtgaccgaattcgaagatattaagtctggttacagaatcgacttctactttgacgagaatccttacttcgagaataaagtcctgtcaaaagaattccatctgaacgagtctggggatccttctagcaagagcaccgagattaagtggaagagtgggaaagatcttaccaagcgttcctcacagacgcaaaataaagctagtaggaagcggcagcacgaggaaccagaaagcttctttacatggttcaccgaccattcggatgctggagccgatgagcttggggaagtcatcaaggatgatatttggcccaaccctcttcagtactatttggtgccggatatggatgatgaggaaggggaaggcgaggaggacgatgacgacgatgaagaggaggagggcctagaagacatcgatgaggagggagatgaggacgagggtgaggaggacgaggatgatgatgagggagaagaaggtgaagaagacgaaggggaagacgattag

SEQ ID NO: 87817 - DNA, 962 bp, Artificial Sequence
  derived and/or modified sequence
aagaagcactgaggaggagtcctacctcagggctcagtgtggacctgttggcacttttactgggtctcagtcccttttcctccacatgggatgcagagacctcctgcccagcttgaaacctaccttgctggaaaaagaacagcaagaagcgattgaacacattgatgaagtacaaaatgaaatagacagacttaatgaacaagccagtgaggagattttgaaagtagaacagaaatataacaaactccgccaaccattttttcagaagaggtcagaattgatcgccaaaatcccaaatttttgggtaacaacatttgtcaaccatccacaagtgtctgcactgcttggggaggaagatgaagaggcactgcattatttgaccagagttgaagtgacagaatttgaagatattaaatcaggttacagaatagatttttattttgatgaaaatccttactttgaaaataaagttctctccaaagaatttcatctgaatgagagtggtgatccatcttcgaagtccaccgaaatcaaatggaaatctggaaaggatttgacgaaacgttcgagtcaaacgcagaataaagccagcaggaagaggcagcatgaggaaccagagagcttctttacctggtttactgaccattctgatgcaggtgctgatgagttaggagaggtcatcaaagatgatatttggccaaacccattacagtactacttggttcccgatatggatgatgaagaaggagaaggagaagaagatgatgatgatgatgaagaggaggaaggattagaagatattgacgaagaaggggatgaggatgaaggtgaagaagatgaagatgatgatgaaggggaggaaggagaggaggatgaaggagaagatgactaaatagaacactgatggattccaaccttcctttttttaaattttctccagtccctgggagcaagttgcagtc

SEQ ID NO: 87818 - protein, 265 aa, Artificial Sequence
  derived and/or modified sequence
MPRSHQPPPPPHEKEQQEAIEHIDEVQNEIDRLNEQASEEILKVEQKYNKLRQPFFQKRSELIAKIPNFWVTTFVNHPQVSALLGEEDEEALHYLTRVEVTEFEDIKSGYRIDFYFDENPYFENKVLSKEFHLNESGDPSSKSTEIKWKSGKDLTKRSSQTQNKASRKRQHEEPESFFTWFTDHSDAGADELGEVIKDDIWPNPLQYYLVPDMDDEEGEGEEDDDDDEEEEGLEDIDEEGDEDEGEEDEDDDEGEEGEEDEGEDD

SEQ ID NO: 87819 - protein, 266 aa, Artificial Sequence
  derived and/or modified sequence
MMPRSHQPPPPPHEKEQQEAIEHIDEVQNEIDRLNEQASEEILKVEQKYNKLRQPFFQKRSELIAKIPNFWVTTFVNHPQVSALLGEEDEEALHYLTRVEVTEFEDIKSGYRIDFYFDENPYFENKVLSKEFHLNESGDPSSKSTEIKWKSGKDLTKRSSQTQNKASRKRQHEEPESFFTWFTDHSDAGADELGEVIKDDIWPNPLQYYLVPDMDDEEGEGEEDDDDDEEEEGLEDIDEEGDEDEGEEDEDDDEGEEGEEDEGEDD

SEQ ID NO: 87820 - DNA, 798 bp, Artificial Sequence
  derived and/or modified sequence
atgcccagaagccaccagccccccccccccccccacgagaaggagcagcaggaggccatcgagcacatcgacgaggtgcagaacgagatcgacagactgaacgagcaggccagcgaggagatcctgaaggtggagcagaagtacaacaagctgagacagcccttcttccagaagagaagcgagctgatcgccaagatccccaacttctgggtgaccaccttcgtgaaccacccccaggtgagcgccctgctgggcgaggaggacgaggaggccctgcactacctgaccagagtggaggtgaccgagttcgaggacatcaagagcggctacagaatcgacttctacttcgacgagaacccctacttcgagaacaaggtgctgagcaaggagttccacctgaacgagagcggcgaccccagcagcaagagcaccgagatcaagtggaagagcggcaaggacctgaccaagagaagcagccagacccagaacaaggccagcagaaagagacagcacgaggagcccgagagcttcttcacctggttcaccgaccacagcgacgccggcgccgacgagctgggcgaggtgatcaaggacgacatctggcccaaccccctgcagtactacctggtgcccgacatggacgacgaggagggcgagggcgaggaggacgacgacgacgacgaggaggaggagggcctggaggacatcgacgaggagggcgacgaggacgagggcgaggaggacgaggacgacgacgagggcgaggagggcgaggaggacgagggcgaggacgactag

SEQ ID NO: 87821 - DNA, 801 bp, Artificial Sequence
  derived and/or modified sequence
atgatgcccagaagccaccagccccccccccccccccacgagaaggagcagcaggaggccatcgagcacatcgacgaggtgcagaacgagatcgacagactgaacgagcaggccagcgaggagatcctgaaggtggagcagaagtacaacaagctgagacagcccttcttccagaagagaagcgagctgatcgccaagatccccaacttctgggtgaccaccttcgtgaaccacccccaggtgagcgccctgctgggcgaggaggacgaggaggccctgcactacctgaccagagtggaggtgaccgagttcgaggacatcaagagcggctacagaatcgacttctacttcgacgagaacccctacttcgagaacaaggtgctgagcaaggagttccacctgaacgagagcggcgaccccagcagcaagagcaccgagatcaagtggaagagcggcaaggacctgaccaagagaagcagccagacccagaacaaggccagcagaaagagacagcacgaggagcccgagagcttcttcacctggttcaccgaccacagcgacgccggcgccgacgagctgggcgaggtgatcaaggacgacatctggcccaaccccctgcagtactacctggtgcccgacatggacgacgaggagggcgagggcgaggaggacgacgacgacgacgaggaggaggagggcctggaggacatcgacgaggagggcgacgaggacgagggcgaggaggacgaggacgacgacgagggcgaggagggcgaggaggacgagggcgaggacgactag

SEQ ID NO: 87822 - DNA, 798 bp, Artificial Sequence
  derived and/or modified sequence
atgcctagaagtcaccagcctccaccacccccacacgagaaggagcagcaggaggcaatagagcacatagacgaggtccagaacgagatcgatagactgaacgaacaagccagtgaggaaatcctgaaagttgagcagaagtacaataaacttcgccagccgtttttccaaaagcggtccgaattaatcgcaaaaattccgaatttttgggtcacgaccttcgtcaatcacccccaggtatcagctctcctcggcgaggaggatgaggaagccctacactacttgacaagggtggaggtaactgaatttgaagacatcaaaagtggatataggatcgacttttattttgacgaaaacccctatttcgaaaataaagttctgagcaaggagttccatctgaatgaatccggtgatccatcatccaaaagcaccgagattaagtggaagagtgggaaggacctcacgaagcgaagctcccagacccagaacaaagccagccggaaacgacagcacgaagaaccagaaagtttcttcacatggtttactgaccatagcgatgctggggctgatgagcttggagaggtgattaaggacgacatctggcccaatcctctccagtattacttggttccggacatggacgatgaggaaggcgaaggcgaagaggatgacgatgatgacgaggaagaagagggtcttgaggatattgacgaagagggcgatgaggatgaaggtgaagaggacgaggatgacgacgagggagaggagggtgaggaggatgagggggaagatgactag

SEQ ID NO: 87823 - DNA, 801 bp, Artificial Sequence
  derived and/or modified sequence
atgatgccccgctctcaccaacccccgccgccccctcatgaaaaggaacagcaggaagccattgagcatatagatgaggtgcagaatgaaatcgataggctgaacgaacaggccagtgaggaaatcttgaaggtggagcaaaagtacaacaagctccgccagccattcttccagaagcgctcagagttaatcgcaaaaatccctaatttttgggtcacaaccttcgtcaaccatccgcaggtttcagctttgctgggcgaagaagacgaggaggcactgcattacctcacacgagtggaggtgaccgaattcgaagatataaagtccggctatagaattgacttttattttgacgaaaacccctatttcgagaacaaagttctctctaaagagtttcatctgaacgagtccggggacccatcctccaagtcaactgaaattaaatggaagtctgggaaggaccttaccaaaagatcctctcagacccagaacaaggccagtagaaaacggcagcacgaggagccagaaagtttcttcacttggttcactgatcactccgacgctggggccgatgagctgggagaggtcattaaggatgacatttggcccaacccgctgcaatactatcttgtgccagacatggacgacgaggaaggggaaggagaagaagatgacgacgacgacgaggaggaggaaggacttgaggatatcgatgaagagggagatgaggatgaaggcgaagaagacgaagatgacgacgaaggcgaagagggcgaggaagatgaaggcgaagatgactag

SEQ ID NO: 87824 - DNA, 798 bp, Artificial Sequence
  derived and/or modified sequence
atgcccaggagccaccagcccccacctcctcctcatgagaaggagcagcaggaggccatcgagcacattgatgaggtgcagaatgaaattgaccggctgaatgagcaggccagcgaggagatcctgaaggtggagcagaagtacaacaagctgcggcagcccttcttccagaagaggtctgagctgattgccaagatccccaacttctgggtgaccacctttgtgaaccacccccaggtgtctgccctgctgggggaggaggatgaggaggccctgcactacctgaccagggtggaggtgacagaatttgaggacatcaagagcggctacagaattgacttctactttgatgagaacccctactttgagaacaaggtgctgagcaaggagttccacctgaatgaaagtggggaccccagcagcaagagcacagagatcaagtggaagagcggcaaggacctgaccaagaggagcagccagacccagaacaaggccagcaggaagaggcagcacgaggagcctgagagcttcttcacctggttcacagaccacagtgatgctggagcagatgagctgggggaggtgatcaaggatgacatctggcccaaccccctgcagtactacctggtgcctgacatggatgatgaggagggggagggggaggaggatgatgatgatgatgaggaggaggagggcctggaggacattgatgaggagggagatgaagatgaaggagaagaagatgaagatgatgatgaaggagaggagggggaggaggatgaaggagaagatgactag

SEQ ID NO: 87825 - DNA, 801 bp, Artificial Sequence
  derived and/or modified sequence
atgatgcccaggagccaccagcccccacctcctcctcatgagaaggagcagcaggaggccatcgagcacattgatgaggtgcagaatgaaattgaccggctgaatgagcaggccagcgaggagatcctgaaggtggagcagaagtacaacaagctgcggcagcccttcttccagaagaggtctgagctgattgccaagatccccaacttctgggtgaccacctttgtgaaccacccccaggtgtctgccctgctgggggaggaggatgaggaggccctgcactacctgaccagggtggaggtgacagaatttgaggacatcaagagcggctacagaattgacttctactttgatgagaacccctactttgagaacaaggtgctgagcaaggagttccacctgaatgaaagtggggaccccagcagcaagagcacagagatcaagtggaagagcggcaaggacctgaccaagaggagcagccagacccagaacaaggccagcaggaagaggcagcacgaggagcctgagagcttcttcacctggttcacagaccacagtgatgctggagcagatgagctgggggaggtgatcaaggatgacatctggcccaaccccctgcagtactacctggtgcctgacatggatgatgaggagggggagggggaggaggatgatgatgatgatgaggaggaggagggcctggaggacattgatgaggagggagatgaagatgaaggagaggaggatgaagatgatgatgaaggagaggagggggaggaggatgaaggagaagatgactag

SEQ ID NO: 87826 - DNA, 798 bp, Artificial Sequence
  derived and/or modified sequence
atgccccggagccaccagccccccccccccccccacgagaaggagcagcaggaagctattgaacatatcgacgaagtacagaatgaaatcgacaggttgaacgagcaagccagtgaagagatcctaaaagttgagcagaagtacaacaaactccgccaaccatttttccagaagcggagcgagttaatcgccaaaatacccaacttctgggtgacaacattcgtgaatcatccccaggtctcagcgctcttgggtgaggaagatgaagaggcactacattacctgacgcgagtcgaagttaccgaattcgaagacataaaaagcggataccgcattgacttctactttgatgagaatccctattttgagaataaggtcctcagtaaagagtttcatctcaacgaatcaggggatccgagttccaaaagcactgagataaagtggaagtcaggaaaggatctgacaaaaagatcctcccaaacacagaacaaggcaagccggaagagacaacacgaagagcccgaaagcttcttcacctggtttacagaccactctgacgcgggcgcagatgaactgggagaagtgatcaaggatgatatctggcctaatccactccagtattacctggtgccggacatggatgacgaggagggcgaaggagaggaggatgatgacgacgacgaggaggaagaaggtctcgaggatatcgatgaggaaggagatgaggatgaaggggaggaagacgaagatgatgacgaaggggaggagggcgaggaggatgagggagaagacgactag

SEQ ID NO: 87827 - DNA, 801 bp, Artificial Sequence
  derived and/or modified sequence
atgatgccccggagccaccagccccccccccccccccacgagaaggaacagcaggaggctatagagcatattgatgaggttcaaaacgagattgatcgactaaatgaacaggctagcgaggagatcctgaaggtggaacagaagtataacaagctgcggcagccgtttttccagaaacggtccgaactgatcgccaagatacctaacttttgggtaacaaccttcgtgaatcatccccaggtcagcgcactgttgggcgaggaggatgaagaagccctgcactacctgactagagttgaggttactgagttcgaggatatcaaatctggatataggatcgacttttatttcgatgaaaatccgtactttgaaaacaaggtgctttccaaagagtttcacctgaacgagtccggagatcccagtagtaagtcaacagagataaaatggaaatcaggaaaggatctgacaaaaagatcctcacagactcagaacaaagcgtcaagaaagcgtcagcacgaagaaccagagtccttttttacttggtttacagaccatagcgacgctggtgctgacgagcttggcgaagtaattaaggatgatatctggcctaacccgttgcagtactacctggtgcctgatatggacgacgaggagggggaaggggaggaagacgacgacgatgacgaggaggaagaggggctggaagatattgacgaagaaggcgatgaggacgagggagaggaggacgaggatgacgatgaaggcgaggaaggggaagaagatgaaggcgaggatgactag

SEQ ID NO: 87828 - DNA, 798 bp, Artificial Sequence
  derived and/or modified sequence
atgcctagaagccaccagccccctccaccaccccacgaaaaggagcaacaggaagcaatagaacacatagatgaagtccagaatgagattgacaggcttaatgagcaggcatccgaggaaattctgaaggtcgagcaaaaatacaacaagctgaggcagcctttttttcaaaagcggtcagaactaattgccaaaatccccaacttctgggttaccaccttcgtcaaccatccacaggtgagtgctctcttgggtgaggaggatgaagaggccctgcactatctcaccagagtggaggtcaccgagttcgaagatattaagagcggttaccgaatcgatttctattttgacgagaacccttacttcgaaaataaggtcttatccaaggagttccacctgaatgagtcaggggaccccagctcaaaatcaaccgaaatcaaatggaaaagcggaaaggacctaacgaagcgatcctcccagacccagaacaaagcaagccggaaacgccaacacgaagagccagagtccttttttacttggtttactgatcactctgacgcaggtgccgacgaacttggagaggtgatcaaagacgacatttggccaaacccactgcagtattacttagtcccagacatggacgacgaagagggagaaggagaggaagatgacgacgacgatgaagaggaagagggccttgaagatatcgacgaggagggcgacgaggacgagggagaggaagacgaggatgatgatgagggcgaggagggggaggaagacgagggagaggacgactag

SEQ ID NO: 87829 - DNA, 801 bp, Artificial Sequence
  derived and/or modified sequence
atgatgcccaggtcacatcaacctcctcctcccccacatgagaaagagcaacaggaggccatcgagcacattgacgaagtgcagaatgaaatcgaccggctgaacgaacaggcgagcgaggaaattctgaaggtcgagcaaaagtacaataagttacgacagccattttttcaaaaacggagcgagctgattgctaagattcctaacttttgggttacgacattcgtgaaccacccacaggtaagtgcgctgctgggagaagaggatgaagaagccttacactacctgacccgcgtggaggtaaccgaattcgaggatatcaaaagcggctatcgtatcgatttttactttgacgaaaacccttactttgagaacaaggtcctttccaaagaattccatctgaacgaatctggtgacccgagtagtaagagcacagagatcaagtggaaatctggtaaagatctcaccaagagaagctcccagacacagaacaaggcctctaggaagcgccaacatgaagagccggagagcttctttacatggttcaccgatcacagtgacgcaggcgctgatgaattgggcgaggtgatcaaagacgacatttggccaaacccactgcaatactacctggtacctgacatggacgacgaggaaggggagggggaggaggatgacgatgatgatgaagaggaggaaggtcttgaagatatcgacgaagaaggagatgaggatgagggtgaggaggatgaagatgacgatgaaggcgaggaaggcgaagaggatgagggcgaggacgactag

SEQ ID NO: 87830 - DNA, 1029 bp, Artificial Sequence
  derived and/or modified sequence
gatgcctcgctcccatcagccgccgccgccgccacatgaaaaagaacagcaagaagcgattgaacacattgatgaagtacaaaatgaaatagacagacttaatgaacaagccagtgaggagattttgaaagtagaacagaaatataacaaactccgccaaccattttttcagaagaggtcagaattgatcgccaaaatcccaaatttttgggtaacaacatttgtcaaccatccacaagtgtctgcactgcttggggaggaagatgaagaggcactgcattatttgaccagagttgaagtgacagaatttgaagatattaaatcaggttacagaatagatttttattttgatgaaaatccttactttgaaaataaagttctctccaaagaatttcatctgaatgagagtggtgatccatcttcgaagtccaccgaaatcaaatggaaatctggaaaggatttgacgaaacgttcgagtcaaacgcagaataaagccagcaggaagaggcagcatgaggaaccagagagcttctttacctggtttactgaccattctgatgcaggtgctgatgagttaggagaggtcatcaaagatgatatttggccaaacccattacagtactacttggttcccgatatggatgatgaagaaggagaaggagaagaagatgatgatgatgatgaagaggaggaaggattagaagatattgacgaagaaggggatgaggatgaaggtgaagaagatgaagatgatgatgaaggggaggaaggagaggaggatgaaggagaagatgactaaatagaacactgatggattccaaccttcctttttttaaattttctccagtccctgggagcaagttgcagtcttttttttttttttttttttttttccctcttgtgctcagtcgccctgttcttgaggtctcttttctctactccatggttctcaatttatttggggggaaataccttgagcagaatacaatgggaaaagagtctctacccctttctgttcgaagttcattt

SEQ ID NO: 87831 - DNA, 1279 bp, Artificial Sequence
  derived and/or modified sequence
atgatgcctcgctcccatcagccgccgccgccgccacatgaaaaagaacagcaagaagcgattgaacacattgatgaagtacaaaatgaaatagacagacttaatgaacaagccagtgaggagattttgaaagtagaacagaaatataacaaactccgccaaccattttttcagaagaggtcagaattgatcgccaaaatcccaaatttttgggtaacaacatttgtcaaccatccacaagtgtctgcactgcttggggaggaagatgaagaggcactgcattatttgaccagagttgaagtgacagaatttgaagatattaaatcaggttacagaatagatttttattttgatgaaaatccttactttgaaaataaagttctctccaaagaatttcatctgaatgagagtggtgatccatcttcgaagtccaccgaaatcaaatggaaatctggaaaggatttgacgaaacgttcgagtcaaacgcagaataaagccagcaggaagaggcagcatgaggaaccagagagcttctttacctggtttactgaccattctgatgcaggtgctgatgagttaggagaggtcatcaaagatgatatttggccaaacccattacagtactacttggttcccgatatggatgatgaagaaggagaaggagaagaagatgatgatgatgatgaagaggaggaaggattagaagatattgacgaagaaggggatgaggatgaaggtgaagaagatgaagatgatgatgaaggggaggaaggagaggaggatgaaggagaagatgactaaatagaacactgatggattccaaccttcctttttttaaattttctccagtccctgggagcaagttgcagtcttttttttttttttttttttttttccctcttgtgctcagtcgccctgttcttgaggtctcttttctctactccatggttctcaatttatttggggggaaataccttgagcagaatacaatgggaaaagagtctctacccctttctgttcgaagttcatttttatcccttcctgtctgaacaaaaactgtatggaatcaacaccaccgagctctgtgggaaaaaagaaaaacctgctcccttcgctctgctggaagctggagggtgctaggcccctgtgtagtagtgcatagaattctagcttttttcctcctttctctgtatattgggctcagagagtacactgtgtctctatgtgaatatggacagttagcatttaccaacatgtatctgtctactttctcttgttt

SEQ ID NO: 87832 - protein, 622 aa, Artificial Sequence
  derived and/or modified sequence
MAAEEEAAAGGKVLREENQCIAPVVSSRVSPGTRPTAMGSFSSHMTEFPRKRKGSDSDPSQSGIMTEKVVEKLSQNPLTYLLSTRIEISASSGSREAHSQTEKRRRDKMNNLIEELSAMIPQCNPMARKLDKLTVLRMAVQHLRSLKGLTNSYVGSNYRPSFLQDNELRHLILKTAEGFLFVVGCERGKILFVSKSVSKILNYDQASLTGQSLFDFLHPKDVAKVKEQLSSFDISPREKLIDAKTGLQVHSNLHAGRTRVYSGSRRSFFCRIKSCKISVKEEHGCLPNSKKKEHRKFYTIHCTGYLRSWPPNIVGMEEERNSKKDNSNFTCLVAIGRLQPYIVPQNSGEINVKPTEFITRFAVNGKFVYVDQRATAILGYLPQELLGTSCYEYFHQDDHNNLTDKHKAVLQSKEKILTDSYKFRAKDGSFVTLKSQWFSFTNPWTKELEYIVSVNTLVLGHSEPGEASFLPCSSQSSEESSRQSCMSVPGMSTGTVLGAGSIGTDIANEILDLQRLQSSSYLDDSSPTGLMKDTHTVNCRSMSNKELFPPSPSEMGELEATRQNQSTVAVHSHEPLLSDGAQLDFDALCDNDDTAMAAFMNYLEAEGGLGDPGDFSDIQWTL

SEQ ID NO: 87833 - DNA, 1869 bp, Artificial Sequence
  derived and/or modified sequence
atggccgcagaggaagaggccgcagcagggggaaaagtgctgagggaggagaaccagtgtattgcacccgtcgtgagtagtagagtctcgccaggaactcggcctaccgcgatggggtctttttctagccacatgaccgagttcccaagaaaacggaagggcagtgattccgatccaagtcagtctggaatcatgacagaaaaggtggtagagaaattatcccagaatcctcttacatatctgctctcgacgcgcattgaaatcagtgcgtcaagtgggtcccgggaagcccactctcagactgaaaagaggcggagagacaagatgaataaccttatcgaggaactaagtgccatgatcccccagtgtaatcccatggccagaaaactggataagctgaccgtccttaggatggccgtccagcacctgcgcagcctgaaaggactgaccaacagctacgttgggtccaactatcgcccaagctttctgcaggacaatgagctgagacacctgatcctcaaaactgcagaaggattcctcttcgtggtggggtgcgagagaggcaaaatcctcttcgtcagcaagtcagtcagtaaaatcctcaattatgatcaggctagcctgacgggccagtctctgtttgattttctgcatccaaaggatgtcgccaaggtcaaagaacaacttagttcctttgatattagcccaagagaaaagttaatcgacgccaagacaggtctgcaggtccatagtaacctccatgcaggccggactcgcgtgtacagtggatccagaaggagcttcttttgccgtattaaatcatgtaaaatatctgtcaaggaagagcatgggtgcctaccgaattccaagaaaaaggaacaccggaagttctataccattcactgcaccgggtacctccggtcttggcctccgaacattgtaggaatggaagaagaacgcaacagcaagaaggacaacagtaatttcacctgcctcgtggccattggaagactccaaccttacattgtcccacaaaattcaggcgaaattaacgtaaagcctaccgagttcattaccaggtttgctgtgaatggcaagtttgtgtatgttgaccagagggctaccgcaatcctggggtacttaccacaagagctgttgggaaccagttgctacgagtatttccaccaggacgatcacaataacctgactgataaacataaggccgttttgcagtctaaggagaagatcttgaccgattcatataagtttcgtgccaaggatggttccttcgtgacgctcaaatctcagtggtttagcttcaccaacccctggacaaaagagctggagtacatcgtctccgttaatactctcgtactcggtcactcggagcccggcgaagcgagctttctcccctgttcaagtcaatccagcgaagagtccagccggcagtcatgcatgagtgtgcctggcatgtccacggggactgtacttggtgcgggctctatcgggactgatatagcgaacgaaattttagacctgcagcggctgcagagctccagttatttagacgacagcagtcccaccggactgatgaaggacacacataccgtgaattgtagatcaatgtcgaataaggaactatttccaccatccccgtcggaaatgggggagttggaggctacccggcagaatcagagcactgttgcggtacactcccacgaaccgttgctgagtgacggtgcccaattggacttcgatgctttatgcgacaacgatgacacggcaatggcagcctttatgaattacctggaggctgaaggcggtctgggcgaccccggggatttttccgacatccagtggaccctatag

SEQ ID NO: 87834 - DNA, 1869 bp, Artificial Sequence
  derived and/or modified sequence
atggctgctgaggaggaggccgctgctgggggcaaggtgctgcgggaggagaaccagtgcatcgcccctgtggtgagcagccgggtgtccccaggcacccggcccacagccatgggcagcttcagcagccacatgacagagttccccaggaagaggaaaggaagtgacagcgaccccagccagagcggcatcatgacagagaaggtggtggagaagctgagccagaaccccctgacctacctgctgagcacccgcatcgagatcagcgccagcagcggcagccgggaggcccacagccagacagagaagagaagaagagacaagatgaacaacctgattgaggagctgagcgccatgatcccccagtgcaaccccatggccaggaagctggacaagctgactgtgctgaggatggctgtgcagcacctgcggagcctgaagggcctgaccaacagctatgtgggcagcaactaccggcccagcttcctgcaggacaatgagctgcggcacctgatcctgaagacagctgagggcttcctgtttgtggtgggctgtgagcggggcaagatcctgtttgtgtccaagtctgtgtccaagatcctgaactatgaccaggccagcctgaccggccagagcctgtttgacttcctgcaccccaaggatgtggccaaggtgaaggagcagctgagcagctttgacatcagcccccgggagaagctgattgatgccaagacaggcctgcaggtgcacagcaacctgcatgctggccgcaccagggtgtacagcggcagcagaagaagcttcttctgccgcatcaagagctgcaagatctctgtgaaggaggagcacggctgcctgcccaacagcaagaagaaggagcacaggaagttctacaccatccactgcaccggctacctgcgctcctggccacccaacatcgtgggcatggaggaggagaggaacagcaagaaggacaacagcaacttcacctgcctggtggccatcggccgcctgcagccctacatcgtgccccagaacagcggggagatcaacgtgaagcccacagagttcatcaccaggtttgctgtgaatggcaagtttgtgtatgtggaccagagggccacagccatcctgggctacctgccccaggagctgctgggcaccagctgctatgagtacttccaccaggatgaccacaacaacctgacagacaagcacaaggctgtgctgcagagcaaggagaagatcctgacagacagctacaagttccgggccaaggatggcagctttgtgaccctgaagagccagtggttctccttcaccaacccctggaccaaggagctggagtacatcgtgtctgtgaacaccctggtgctgggccacagcgagcccggggaggccagcttcctgccctgcagcagccagagcagcgaggagagcagccggcagagctgcatgtctgtgcccggcatgagcactggaacagtgctgggcgccggcagcatcggcacagacatcgccaatgagatcctggacctgcagaggctgcagagcagcagctacctggatgacagcagccccaccggcctgatgaaggacacccacacagtgaactgccgctccatgagcaacaaggagctgtttcctcccagccccagcgagatgggagagctggaggccacccggcagaaccagagcacagtggccgtgcacagccatgagcccctgctgagtgatggagcccagctggactttgatgccctgtgtgacaatgatgacacagccatggccgccttcatgaactacctggaggccgagggcggcctgggggaccccggggacttcagtgacatccagtggaccctgtag

SEQ ID NO: 87835 - DNA, 1869 bp, Artificial Sequence
  derived and/or modified sequence
atggccgccgaggaggaggccgccgccggcggcaaggtgctgcgggaagagaaccagtgcatcgctccagtggtgtcttcacgcgtgtcgccaggtacgcggcccacagcgatgggtagctttagctcgcacatgactgagttccctcgaaagaggaaaggtagcgactctgacccatctcagagcgggataatgacggagaaggttgtggagaagttgtcgcagaatcctctgacctacctcctgtctacaaggatcgagataagtgctagctccggtagtagggaggcccattcgcagacggaaaaacgtcgacgagataagatgaacaatctgattgaagagctgtccgccatgatcccccagtgtaacccaatggccaggaagcttgataaactgaccgttctgcggatggccgtacaacaccttcggtccttgaaaggattgactaatagctacgtgggatccaattatcgccctagtttcctgcaggacaacgagctgagacacctcatcctgaaaacagctgagggtttcctttttgtcgtcggctgcgagagggggaagattctttttgtcagtaaatcagtgagtaagattctcaactacgaccaggcatctctgacaggtcagtcactgtttgacttcttacaccccaaagacgtggccaaagtgaaggagcagttgagctcgtttgacatttctcctagggagaagctcatcgacgcaaagacagggctccaggtgcactccaacttacacgcgggaaggaccagagtgtacagcggttccagacgaagcttcttttgtcgtattaagtcttgcaagatttccgtaaaggaagagcatggatgcctgcctaattctaaaaaaaaggaacacagaaagttctatacaatccactgtacaggctacctgagaagttggccaccaaatatcgtcggaatggaagaggagagaaactctaagaaggacaactccaattttacttgcctggtagccataggccgcctccagccatacatcgtcccgcaaaattcaggtgagattaacgtaaaaccaaccgagtttattacacgcttcgcagtcaatggaaagttcgtctatgtcgatcagagggcaacagcgatactcgggtatctccctcaggagctgcttggcaccagctgctatgagtacttccatcaagacgatcacaataatctgactgataagcataaagcagttttgcaaagcaaggagaagatcttgaccgactcatataaattccgtgctaaggacggatctttcgtgaccctgaaatcccaatggtttagcttcacgaacccctggacgaaagagttagaatatatcgtgagcgttaacaccttagtgctgggccacagcgagccgggcgaagcatctttcttgccttgcagctcccagtcatccgaggaaagtagcagacagagctgtatgtctgtaccgggaatgagcacaggtactgtgctgggcgccggatcaatagggactgatattgccaacgagatcttagacctgcagaggcttcagtcctcgagctacttggacgacagttctccaacagggcttatgaaggacactcacacggtgaattgtcggtctatgagcaataaagagctgttccctccctcccccagcgagatgggagaacttgaggccacgcgacagaaccagtcaactgtcgcagtccacagtcatgaacctctgctgtcagacggggcacagttggacttcgacgccctttgtgataatgacgatactgcaatggccgctttcatgaattacctggaagctgagggaggactgggagaccccggcgacttcagcgatatccagtggactttgtag

SEQ ID NO: 87836 - DNA, 1888 bp, Artificial Sequence
  derived and/or modified sequence
gaccaagtggctcctgcgatggcggcggaagaggaggctgcggcgggaggtaaagtgttgagagaggagaaccagtgcattgctcctgtggtttccagccgcgtgagtccagggacaagaccaacagctatggggtctttcagctcacacatgacagagtttccacgaaaacgcaaaggaagtgattcagacccatcccagtcaggaatcatgacagaaaaagtggtggaaaagctttctcagaatccccttacctatcttctttcaacaaggatagaaatatcagcctccagtggcagcagagaagctcatagccaaactgaaaagcggaggagagataaaatgaataacctgattgaagaactgtctgcaatgatccctcagtgcaaccccatggcgcgtaaactggacaaacttacagttttaagaatggctgttcaacacttgagatctttaaaaggcttgacaaattcttatgtgggaagtaattatagaccatcatttcttcaggataatgagctcagacatttaatccttaagactgcagaaggcttcttatttgtggttggatgtgaaagaggaaaaattctcttcgtttctaagtcagtctccaaaatacttaattatgatcaggctagtttgactggacaaagcttatttgacttcttacatccaaaagatgttgccaaagtaaaggaacaactttcttcttttgatatttcaccaagagaaaagctaatagatgccaaaactggtttgcaagttcacagtaatctccacgctggaaggacacgtgtgtattctggctcaagacgatcttttttctgtcggataaagagttgtaaaatctctgtcaaagaagagcatggatgcttacccaactcaaagaagaaagagcacagaaaattctatactatccattgcactggttacttgagaagctggcctccaaatattgttggaatggaagaagaaaggaacagtaagaaagacaacagtaattttacctgccttgtggccattggaagattacagccatatattgttccacagaacagtggagagattaatgtgaaaccaactgaatttataacccggtttgcagtgaatggaaaatttgtctatgtagatcaaagggcaacagcgattttaggatatctgcctcaggaacttttgggaacttcttgttatgaatattttcatcaagatgaccacaataatttgactgacaagcacaaagcagttctacagagtaaggagaaaatacttacagattcctacaaattcagagcaaaagatggctcttttgtaactttaaaaagccaatggtttagtttcacaaatccttggacaaaagaactggaatatattgtatctgtcaacactttagttttgggacatagtgagcctggagaagcatcatttttaccttgtagctctcaatcatcagaagaatcctctagacagtcctgtatgagtgtacctggaatgtctactggaacagtacttggtgctggtagtattggaacagatattgcaaatgaaattctggatttacagaggttacagtcttcttcataccttgatgattcgagtccaacaggtttaatgaaagatactcatactgtaaactgcaggagtatgtcaaataaggagttgtttccaccaagtccttctgaaatgggggagctagaggctaccaggcaaaaccagagtactgttgctgtccacagccatgagccactcctcagtgatggtgcacagttggatttcgatgccctatgtgacaatgatgacacagccatggctgcatttatgaattacttagaagcagaggggggcctgggagaccctggggacttcagtgacatccagtggaccctctagc

SEQ ID NO: 87837 - DNA, 1869 bp, Artificial Sequence
  derived and/or modified sequence
atggctgccgaagaagaggcggcagcaggtggaaaggtcctccgagaagaaaaccagtgcatagcacctgtcgtgagctcaagagtgtcaccaggcacacgcccaaccgcaatgggctctttctcctcccatatgaccgagttccctcgtaaacgaaaggggtcagattcagatccgagtcaaagtggcataatgacagaaaaggtggttgagaagttgagccaaaaccctctgacttacctcctctcgacgcgcattgaaatcagtgctagctcagggagccgggaggctcactcccaaactgagaagcgcaggagggataaaatgaataacttgattgaagagttgtcagctatgatcccacagtgtaatccaatggccaggaaactagacaaactgacagtcttaagaatggcagtacagcaccttagatcgctcaaagggttgacgaattcctatgtgggatccaactacagaccgtctttcctacaagacaacgaactccggcacttgatcttaaagacagcagaggggttcttgttcgttgtggggtgtgagagaggcaaaatactgtttgtttcgaagtcagtgtccaaaattctcaactacgatcaggccagcctcacaggtcagtccctcttcgacttcctgcacccaaaagacgtcgctaaggtgaaggagcagctgtcctctttcgatatcagccccagggagaagctcatagatgccaaaaccgggcttcaagtacacagcaacctgcatgctggtcgcacgagggtgtactcgggttctcgaaggtcttttttctgccggattaaatcttgcaaaatctctgtcaaggaagagcatgggtgtctgcccaactccaaaaagaaggagcatcgtaaattctacacaattcattgtactggttacttaagaagttggcccccaaacatcgtagggatggaagaagaacgaaattccaaaaaagacaattctaacttcacctgtcttgtggccatagggagactgcagccttatatagtgccccagaatagtggcgagatcaacgtcaaacccactgaatttatcacacgcttcgccgtgaacggcaagttcgtgtacgtggatcagagagcgacggccatcctcggttatctgccccaggaactcttgggtacaagttgctatgaatatttccaccaggatgatcacaataatctgactgacaaacataaagctgtcttacagagtaaggagaagattctcaccgacagctataagttccgagcaaaagacggttcattcgtaactttgaagtcccagtggttctcatttaccaatccttggactaaagaacttgaatacatcgtgtcggtgaataccctggtgctgggccacagtgaacccggtgaagcaagctttctgccttgttctagtcagagctccgaggaatcctcccgccaatcttgcatgtcagtgcctggcatgagcaccggcacagtcctgggggcagggtctatcgggaccgacatcgcaaacgaaatactggatctgcaacgtctgcagtcgtcgtcatatctggacgacagcagtcctaccggcctgatgaaggacacccataccgtgaattgtcggagtatgtcaaacaaggagctctttccgccttccccgagtgaaatgggagagcttgaggcgacccgacagaatcagagcacggtggccgtccattctcatgaaccccttctgagcgacggcgctcagcttgacttcgatgcgctatgtgataatgacgacactgcaatggccgcttttatgaattacctggaggccgaagggggtcttggtgacccaggagacttcagtgacattcagtggaccctgtag

SEQ ID NO: 87838 - DNA, 1869 bp, Artificial Sequence
  derived and/or modified sequence
atggccgccgaggaggaggccgccgccggcggcaaggtgctgagagaggagaaccagtgcatcgcccccgtggtgagcagcagagtgagccccggcaccagacccaccgccatgggcagcttcagcagccacatgaccgagttccccagaaagagaaagggcagcgacagcgaccccagccagagcggcatcatgaccgagaaggtggtggagaagctgagccagaaccccctgacctacctgctgagcaccagaatcgagatcagcgccagcagcggcagcagagaggcccacagccagaccgagaagagaagaagagacaagatgaacaacctgatcgaggagctgagcgccatgatcccccagtgcaaccccatggccagaaagctggacaagctgaccgtgctgagaatggccgtgcagcacctgagaagcctgaagggcctgaccaacagctacgtgggcagcaactacagacccagcttcctgcaggacaacgagctgagacacctgatcctgaagaccgccgagggcttcctgttcgtggtgggctgcgagagaggcaagatcctgttcgtgagcaagagcgtgagcaagatcctgaactacgaccaggccagcctgaccggccagagcctgttcgacttcctgcaccccaaggacgtggccaaggtgaaggagcagctgagcagcttcgacatcagccccagagagaagctgatcgacgccaagaccggcctgcaggtgcacagcaacctgcacgccggcagaaccagagtgtacagcggcagcagaagaagcttcttctgcagaatcaagagctgcaagatcagcgtgaaggaggagcacggctgcctgcccaacagcaagaagaaggagcacagaaagttctacaccatccactgcaccggctacctgagaagctggccccccaacatcgtgggcatggaggaggagagaaacagcaagaaggacaacagcaacttcacctgcctggtggccatcggcagactgcagccctacatcgtgccccagaacagcggcgagatcaacgtgaagcccaccgagttcatcaccagattcgccgtgaacggcaagttcgtgtacgtggaccagagagccaccgccatcctgggctacctgccccaggagctgctgggcaccagctgctacgagtacttccaccaggacgaccacaacaacctgaccgacaagcacaaggccgtgctgcagagcaaggagaagatcctgaccgacagctacaagttcagagccaaggacggcagcttcgtgaccctgaagagccagtggttcagcttcaccaacccctggaccaaggagctggagtacatcgtgagcgtgaacaccctggtgctgggccacagcgagcccggcgaggccagcttcctgccctgcagcagccagagcagcgaggagagcagcagacagagctgcatgagcgtgcccggcatgagcaccggcaccgtgctgggcgccggcagcatcggcaccgacatcgccaacgagatcctggacctgcagagactgcagagcagcagctacctggacgacagcagccccaccggcctgatgaaggacacccacaccgtgaactgcagaagcatgagcaacaaggagctgttcccccccagccccagcgagatgggcgagctggaggccaccagacagaaccagagcaccgtggccgtgcacagccacgagcccctgctgagcgacggcgcccagctggacttcgacgccctgtgcgacaacgacgacaccgccatggccgccttcatgaactacctggaggccgagggcggcctgggcgaccccggcgacttcagcgacatccagtggaccctgtag

SEQ ID NO: 87839 - protein, 599 aa, Artificial Sequence
  derived and/or modified sequence
MAAEEEAAAGGEVAGGEATAPGKVLREENQCIAPVVSSRVSPGTRPTAMGSFSSHMTEFPRKRKGSDSDPSQEAHSQTEKRRRDKMNNLIEELSAMIPQCNPMARKLDKLTVLRMAVQHLRSLKGLTNSYVGSNYRPSFLQDNELRHLILKTAEGFLFVVGCERGKILFVSKSVSKILNYDQASLTGQSLFDFLHPKDVAKVKEQLSSFDISPREKLIDAKTGLQVHSNLHAGRTRVYSGSRRSFFCRIKSCKISVKEEHGCLPNSKKKEHRKFYTIHCTGYLRSWPPNIVGMEEERNSKKDNSNFTCLVAIGRLQPYIVPQNSGEINVKPTEFITRFAVNGKFVYVDQRATAILGYLPQELLGTSCYEYFHQDDHNNLTDKHKAVLQSKEKILTDSYKFRAKDGSFVTLKSQWFSFTNPWTKELEYIVSVNTLVLGHSEPGEASFLPCSSQSSEESSRQSCMSVPGMSTGTVLGAGSIGTDIANEILDLQRLQSSSYLDDSSPTGLMKDTHTVNCRSMSNKELFPPSPSEMGELEATRQNQSTVAVHSHEPLLSDGAQLDFDALCDNDDTAMAAFMNYLEAEGGLGDPGDFSDIQWTL

SEQ ID NO: 87840 - protein, 551 aa, Artificial Sequence
  derived and/or modified sequence
MGSFSSHMTEFPRKRKGSDSDPSQEAHSQTEKRRRDKMNNLIEELSAMIPQCNPMARKLDKLTVLRMAVQHLRSLKGLTNSYVGSNYRPSFLQDNELRHLILKTAEGFLFVVGCERGKILFVSKSVSKILNYDQASLTGQSLFDFLHPKDVAKVKEQLSSFDISPREKLIDAKTGLQVHSNLHAGRTRVYSGSRRSFFCRIKSCKISVKEEHGCLPNSKKKEHRKFYTIHCTGYLRSWPPNIVGMEEERNSKKDNSNFTCLVAIGRLQPYIVPQNSGEINVKPTEFITRFAVNGKFVYVDQRATAILGYLPQELLGTSCYEYFHQDDHNNLTDKHKAVLQSKEKILTDSYKFRAKDGSFVTLKSQWFSFTNPWTKELEYIVSVNTLVLGHSEPGEASFLPCSSQSSEESSRQSCMSVPGMSTGTVLGAGSIGTDIANEILDLQRLQSSSYLDDSSPTGLMKDTHTVNCRSMSNKELFPPSPSEMGELEATRQNQSTVAVHSHEPLLSDGAQLDFDALCDNDDTAMAAFMNYLEAEGGLGDPGDFSDIQWTL

SEQ ID NO: 87841 - protein, 588 aa, Artificial Sequence
  derived and/or modified sequence
MAAEEEAAAGGKVLREENQCIAPVVSSRVSPGTRPTAMGSFSSHMTEFPRKRKGSDSDPSQEAHSQTEKRRRDKMNNLIEELSAMIPQCNPMARKLDKLTVLRMAVQHLRSLKGLTNSYVGSNYRPSFLQDNELRHLILKTAEGFLFVVGCERGKILFVSKSVSKILNYDQASLTGQSLFDFLHPKDVAKVKEQLSSFDISPREKLIDAKTGLQVHSNLHAGRTRVYSGSRRSFFCRIKSCKISVKEEHGCLPNSKKKEHRKFYTIHCTGYLRSWPPNIVGMEEERNSKKDNSNFTCLVAIGRLQPYIVPQNSGEINVKPTEFITRFAVNGKFVYVDQRATAILGYLPQELLGTSCYEYFHQDDHNNLTDKHKAVLQSKEKILTDSYKFRAKDGSFVTLKSQWFSFTNPWTKELEYIVSVNTLVLGHSEPGEASFLPCSSQSSEESSRQSCMSVPGMSTGTVLGAGSIGTDIANEILDLQRLQSSSYLDDSSPTGLMKDTHTVNCRSMSNKELFPPSPSEMGELEATRQNQSTVAVHSHEPLLSDGAQLDFDALCDNDDTAMAAFMNYLEAEGGLGDPGDFSDIQWTL

SEQ ID NO: 87842 - DNA, 1767 bp, Artificial Sequence
  derived and/or modified sequence
atggccgctgaagaggaggcggcggccggggggaaagtgctgcgggaggaaaatcagtgtatcgcccctgtggtgagcagccgggtttcgccgggcacccggcctaccgctatgggttccttctccagccatatgaccgagtttcctcgcaagcggaaggggagtgacagtgacccatcacaggaagcacacagccagactgaaaagcggcgccgtgacaagatgaacaatctgatcgaagagttaagcgccatgatccctcaatgcaatccaatggcccgaaagcttgataagctcactgttcttagaatggctgtgcagcatcttcgctccttaaaagggttgacaaactcatacgtgggtagtaattacaggccatctttcctgcaggataatgagttgcgccacctgattttaaaaactgccgagggtttcctctttgtcgtaggttgcgagagaggaaagatactctttgtcagcaagtcagtgagcaaaatactcaattatgaccaagccagtctcaccgggcagagcctgtttgatttcttacatcctaaggacgtggccaaggtcaaggaacagctgtcttcttttgatatctctccacgcgagaagctcattgatgcgaagactgggctgcaggtccattccaacttacacgccggccggacgcgcgtgtactctggcagccggcgcagtttcttctgccgcatcaagagctgcaagatctccgtgaaggaggagcatgggtgtctacctaatagcaagaaaaaagagcaccgcaaattctacaccatccattgtacaggctacctgaggtcctggccaccaaacatcgtaggaatggaggaggaacgtaactccaaaaaggataacagtaatttcacttgtctggtggccattgggcggctgcagccatatatcgtacctcagaatagcggagaaattaacgtcaaaccaactgagtttattacgaggttcgcagtaaatggaaagtttgtgtacgtggatcagagggctacagccattttggggtacctgccgcaggaactgcttgggaccagctgttacgaatacttccatcaggatgaccataataacctgacagataagcataaggcagtgctgcagagcaaggagaagatcctgactgattcgtataagtttagggccaaagacggatcttttgtgacgctgaaatcccagtggttcagcttcaccaacccctggaccaaggagctggaatatatagttagcgtgaacacgctcgtgctggggcattcagaacctggagaagcctcctttctcccatgctcctctcagtcctctgaggaatcatccaggcaaagttgcatgtccgtgccaggcatgagcaccggtaccgtgctcggggctgggtccatcggtaccgacattgcaaatgagatcctggacctccagaggctgcagtccagtagctacctcgatgatagcagtccgactgggctgatgaaagatactcatactgtgaattgtcgcagcatgagcaacaaagagttatttcccccttcaccctctgaaatgggtgaattggaagcgactcgccagaatcagtcaactgtggccgtgcactcacatgaacccctcttatctgatggtgctcagctcgatttcgacgccctgtgtgacaacgacgacacagctatggccgcattcatgaattacctcgaggccgaaggaggtctcggagaccctggtgatttcagcgacattcagtggaccctgtag

SEQ ID NO: 87843 - DNA, 1800 bp, Artificial Sequence
  derived and/or modified sequence
atggccgctgaggaggaggctgcagctggaggcgaggtcgccgggggcgaagccacagcacccggaaaagtcttgagagaagaaaaccagtgtatcgcaccagtcgtgagcagcagggtgtctcccgggactcgcccaaccgcaatggggagtttcagttcccatatgaccgaattcccgcgcaaacgaaaaggcagcgactccgatccgtcccaggaggcccactcccagacggagaagcgcagacgggacaagatgaataacttgattgaagagctctccgccatgattccacagtgcaaccctatggcccggaagctcgataaactcaccgtcctgcgcatggcagtgcagcacctgagatccctaaaaggattgaccaactcctacgtggggtcgaactaccgtcccagtttcctacaggataatgagctgcgccacctcattctgaagactgctgaaggttttttgttcgtcgttggctgtgagaggggcaagattctcttcgtgagcaaatctgtgtcaaaaattctcaattacgatcaggcatctcttaccggccaaagcctcttcgattttctgcatcctaaggatgtggctaaagtaaaggagcagcttagcagcttcgacattagtcctcgcgaaaaattgatcgacgctaagaccggcctgcaagtccattctaacctgcatgccggaaggacacgcgtatacagtggctctcgcaggtcttttttttgtcgaattaagtcctgcaagattagcgttaaagaggagcacggatgccttcctaattcgaaaaagaaagagcacagaaagttctatacaatccactgtaccggctatttaaggagctggccgcccaatatcgtgggcatggaagaggaacggaacagcaagaaagataactctaatttcacatgccttgtcgctatcggacgactgcagccttacatcgtgccccagaattctggagagatcaatgtcaaaccaaccgaatttattacccgcttcgcagtcaacggcaagttcgtatacgtagaccagcgggccactgcaattctgggatacctgccacaggagcttctcggcacatcatgttatgagtattttcaccaggacgaccacaataacctgactgacaagcataaggcagtgctgcaaagtaaggagaagatcctgacagattcttacaaatttcgtgctaaagacggttccttcgtaactctgaagagccagtggttcagcttcacaaacccttggacaaaggaactggaatacatagtctctgttaatacgcttgtgttgggacattcagaaccaggtgaggcatcctttcttccttgttcaagtcagagctccgaagagtctagccggcagagctgtatgagtgtccccgggatgtctactggcacagttttgggagctggtagtatcggcaccgacatcgccaacgaaatcctggacctgcagcgtctgcagagcagtagctacctcgacgattcttctcctaccggattgatgaaggacactcacaccgtgaactgccgcagcatgtctaacaaggagctgttccctccatccccgtccgagatgggggagttggaagccacaaggcagaaccagtctactgttgcagtacattcccatgaacccttgctgagcgatggcgcccaactcgactttgacgctctgtgtgataacgatgatacagccatggccgccttcatgaactacctagaggccgaaggggggctgggtgacccaggagatttctcggatatacagtggacgctttag

SEQ ID NO: 87844 - DNA, 1656 bp, Artificial Sequence
  derived and/or modified sequence
atgggatccttctcctcccacatgacggaatttccccggaagcgaaaagggtccgacagtgaccctagccaggaagcccacagtcagaccgagaaacggagaagggataagatgaacaatctcatcgaagagctgtcagctatgatccctcagtgtaacccgatggcgagaaagctcgataagctgacagttctccggatggccgttcagcacctgcgctcactcaagggtttaaccaacagctacgtgggttccaactacagaccttcgttcctgcaagacaatgagctgagacatctcatactgaagacagccgaaggcttcctgttcgtcgtggggtgcgaacgtggtaagattttattcgtctccaagtccgtgtccaagatcctgaattacgaccaggcatctctcacaggacagtcattgtttgattttttacatcctaaggatgttgcaaaagtgaaagagcaattgtcaagttttgatattagccctcgcgagaagctaatagacgccaagactggattgcaggttcactccaatctccatgcgggtcgcacaagagtctactctggtagccgcagatcgtttttttgccggatcaagtcatgcaaaatctctgtcaaggaagaacacgggtgtttgcccaacagcaagaagaaggagcacagaaaattttacacaatccattgcacaggatatctgcgcagctggccccccaacatagtgggaatggaggaagaacgtaatagcaaaaaggataactccaacttcacctgcttggtagccattgggcgacttcaaccttacatcgtgcctcaaaactccggcgagattaacgttaagccaaccgaattcataacacgattcgccgtaaatgggaagtttgtctacgtggaccagagagccactgcaatcctcggatatctgccacaggaacttctgggcacatcttgttatgaatatttccatcaggacgatcacaacaacctcacagataagcataaggctgtgctgcagtctaaggagaaaatattaaccgacagctacaaattcagagctaaagacggatcctttgtcaccctgaagtcccagtggttctcatttactaatccctggaccaaggaattagagtatatcgtttccgtgaacacgctcgtgttaggacacagcgagccaggagaagcaagcttccttccttgtagttcccagtcatcagaagaatcgtctcgacagtcatgtatgtcagtgccaggaatgtccacggggacagtattaggcgctggttcgatagggactgacatcgcgaatgaaatcctggatttacagcgccttcagtcctctagttacctggacgattcgagccctactggtctgatgaaggatacacacaccgtaaattgcaggtcgatgagcaataaggaattgtttcccccctcccccagcgaaatgggggagcttgaggccacccggcagaaccagtctacagtcgccgttcactcccacgagcccttactctccgacggggctcaactggatttcgatgctctttgcgacaacgatgacacggcaatggctgcgttcatgaactacctcgaggcagagggggggctaggcgatcccggagacttctctgatatccagtggactttatag

SEQ ID NO: 87845 - DNA, 1767 bp, Artificial Sequence
  derived and/or modified sequence
atggctgctgaggaggaggccgctgctgggggcaaggtgctgcgggaggagaaccagtgcatcgcccctgtggtgagcagccgggtgtccccaggcacccggcccacagccatgggcagcttcagcagccacatgacagagttccccaggaagaggaaaggaagtgacagcgaccccagccaggaggcccacagccagacagagaagagaagaagagacaagatgaacaacctgattgaggagctgagcgccatgatcccccagtgcaaccccatggccaggaagctggacaagctgactgtgctgaggatggctgtgcagcacctgcggagcctgaagggcctgaccaacagctatgtgggcagcaactaccggcccagcttcctgcaggacaatgagctgcggcacctgatcctgaagacagctgagggcttcctgtttgtggtgggctgtgagcggggcaagatcctgtttgtgtccaagtctgtgtccaagatcctgaactatgaccaggccagcctgaccggccagagcctgtttgacttcctgcaccccaaggatgtggccaaggtgaaggagcagctgagcagctttgacatcagcccccgggagaagctgattgatgccaagacaggcctgcaggtgcacagcaacctgcatgctggccgcaccagggtgtacagcggcagcagaagaagcttcttctgccgcatcaagagctgcaagatctctgtgaaggaggagcacggctgcctgcccaacagcaagaagaaggagcacaggaagttctacaccatccactgcaccggctacctgcgctcctggccacccaacatcgtgggcatggaggaggagaggaacagcaagaaggacaacagcaacttcacctgcctggtggccatcggccgcctgcagccctacatcgtgccccagaacagcggggagatcaacgtgaagcccacagagttcatcaccaggtttgctgtgaatggcaagtttgtgtatgtggaccagagggccacagccatcctgggctacctgccccaggagctgctgggcaccagctgctatgagtacttccaccaggatgaccacaacaacctgacagacaagcacaaggctgtgctgcagagcaaggagaagatcctgacagacagctacaagttccgggccaaggatggcagctttgtgaccctgaagagccagtggttctccttcaccaacccctggaccaaggagctggagtacatcgtgtctgtgaacaccctggtgctgggccacagcgagcccggggaggccagcttcctgccctgcagcagccagagcagcgaggagagcagccggcagagctgcatgtctgtgcccggcatgagcactggaacagtgctgggcgccggcagcatcggcacagacatcgccaatgagatcctggacctgcagaggctgcagagcagcagctacctggatgacagcagccccaccggcctgatgaaggacacccacacagtgaactgccgctccatgagcaacaaggagctgtttcctcccagccccagcgagatgggagagctggaggccacccggcagaaccagagcacagtggccgtgcacagccatgagcccctgctgagtgatggagcccagctggactttgatgccctgtgtgacaatgatgacacagccatggccgccttcatgaactacctggaggccgagggcggcctgggggaccccggggacttcagtgacatccagtggaccctgtag

SEQ ID NO: 87846 - DNA, 1800 bp, Artificial Sequence
  derived and/or modified sequence
atggctgctgaggaggaggccgctgctggaggagaggtggccggcggggaggccacagcccctgggaaggtgctgcgggaggagaaccagtgcatcgcccctgtggtgagcagccgggtgtccccaggcacccggcccacagccatgggcagcttcagcagccacatgacagagttccccaggaagaggaagggcagtgacagcgaccccagccaggaggcccacagccagacagagaagagaagaagagacaagatgaacaacctgattgaggagctgagcgccatgatcccccagtgcaaccccatggccaggaagctggacaagctgactgtgctgaggatggctgtgcagcacctgcggagcctgaagggcctgaccaacagctatgtgggcagcaactaccggcccagcttcctgcaggacaatgagctgcggcacctgatcctgaagacagctgagggcttcctgtttgtggtgggctgtgagcggggcaagatcctgtttgtgtccaagtctgtgtccaagatcctgaactatgaccaggccagcctgaccggccagagcctgtttgacttcctgcaccccaaggatgtggccaaggtgaaggagcagctgagcagctttgacatcagcccccgggagaagctgattgatgccaagacaggcctgcaggtgcacagcaacctgcacgccggccgcaccagggtgtacagcggcagccgccgctccttcttctgccgcatcaagagctgcaagatctctgtgaaggaggagcacggctgcctgcccaacagcaagaagaaggagcacaggaagttctacaccatccactgcaccggctacctgcgctcctggccacccaacatcgtgggcatggaggaggagaggaacagcaagaaggacaacagcaacttcacctgcctggtggccatcggccgcctgcagccctacatcgtgccccagaacagcggggagatcaacgtgaagcccacagagttcatcaccaggtttgctgtgaatggcaagtttgtgtatgtggaccagagggccacagccatcctgggctacctgccccaggagctgctgggcaccagctgctatgagtacttccaccaggatgaccacaacaacctgacagacaagcacaaggctgtgctgcagagcaaggagaagatcctgacagacagctacaagttccgggccaaggatggcagctttgtgaccctgaagagccagtggttctccttcaccaacccctggaccaaggagctggagtacatcgtgtctgtgaacaccctggtgctgggccacagcgagcctggagaggccagcttcctgccctgcagcagccagagcagcgaggagagcagccggcagagctgcatgtctgtgcccggcatgagcacaggcaccgtgctgggcgccggcagcattggaacagacatcgccaatgagatcctggacctgcagaggctgcagagcagcagctacctggatgacagcagccccaccggcctgatgaaggacacccacacagtgaactgccgctccatgagcaacaaggagctgttcccccccagccccagcgagatgggagagctggaggccacccggcagaaccagagcacagtggccgtgcacagccatgagcccctgctgagtgatggagcccagctggactttgatgccctgtgtgacaatgatgacacagccatggccgccttcatgaactacctggaggccgagggcggcctgggggaccccggggacttcagtgacatccagtggaccctgtag

SEQ ID NO: 87847 - DNA, 1656 bp, Artificial Sequence
  derived and/or modified sequence
atgggcagcttcagcagccacatgacagagttccccaggaagaggaagggcagtgacagcgaccccagccaggaggcccacagccagacagagaagagaagaagagacaagatgaacaacctgattgaggagctgagcgccatgatcccccagtgcaaccccatggccaggaagctggacaagctgactgtgctgaggatggctgtgcagcacctgcggagcctgaagggcctgaccaacagctatgtgggcagcaactaccggcccagcttcctgcaggacaatgagctgcggcacctgatcctgaagacagctgagggcttcctgtttgtggtgggctgtgagcggggcaagatcctgtttgtgtccaagtctgtgtccaagatcctgaactatgaccaggccagcctgaccggccagagcctgtttgacttcctgcaccccaaggatgtggccaaggtgaaggagcagctgagcagctttgacatcagcccccgggagaagctgattgatgccaagacaggcctgcaggtgcacagcaacctgcacgccggccgcaccagggtgtacagcggcagccgccgctccttcttctgccgcatcaagagctgcaagatctctgtgaaggaggagcacggctgcctgcccaacagcaagaagaaggagcacaggaagttctacaccatccactgcaccggctacctgcgctcctggccacccaacatcgtgggcatggaggaggagaggaacagcaagaaggacaacagcaacttcacctgcctggtggccatcggccgcctgcagccctacatcgtgccccagaacagcggggagatcaacgtgaagcccacagagttcatcaccaggtttgctgtgaatggcaagtttgtgtatgtggaccagagggccacagccatcctgggctacctgccccaggagctgctgggcaccagctgctatgagtacttccaccaggatgaccacaacaacctgacagacaagcacaaggctgtgctgcagagcaaggagaagatcctgacagacagctacaagttccgggccaaggatggcagctttgtgaccctgaagagccagtggttctccttcaccaacccctggaccaaggagctggagtacatcgtgtctgtgaacaccctggtgctgggccacagcgagcctggagaggccagcttcctgccctgcagcagccagagcagcgaggagagcagccggcagagctgcatgtctgtgcccggcatgagcacaggcaccgtgctgggcgccggcagcattggaacagacatcgccaatgagatcctggacctgcagaggctgcagagcagcagctacctggatgacagcagccccaccggcctgatgaaggacacccacacagtgaactgccgctccatgagcaacaaggagctgttcccccccagccccagcgagatgggagagctggaggccacccggcagaaccagagcacagtggccgtgcacagccatgagcccctgctgagtgatggagcccagctggactttgatgccctgtgtgacaatgatgacacagccatggccgccttcatgaactacctggaggccgagggcggcctgggggaccccggggacttcagtgacatccagtggaccctgtag

SEQ ID NO: 87848 - DNA, 1767 bp, Artificial Sequence
  derived and/or modified sequence
atggccgccgaggaggaggccgccgccggcggcaaggtgctgcgggaagagaaccagtgcattgccccagtcgttagcagtagagtgagccccggtacacggccgacagctatgggtagtttctcttcacacatgacagagttccctcgaaagagaaaggggtctgactctgacccgtctcaggaagcgcactcacagacggaaaagaggagacgcgacaagatgaacaacctgattgaagaactgtcagctatgatccctcagtgcaacccaatggcaagaaaactggacaagttgacagtgctcaggatggccgtgcaacacctccgctccctgaaaggattaactaactcctacgtgggcagcaactaccgaccttccttcctccaggataacgagcttcgccatttaatcctgaaaacagccgagggatttctgtttgtcgttgggtgtgaaagaggcaaaatcctgtttgtgtcaaaatccgtgagcaagatcctaaactatgaccaggctagccttactggtcagtccctgttcgactttctgcaccccaaggacgtggcgaaagtgaaagagcaattgagtagttttgacattagcccacgggaaaagctcatcgatgctaagacggggctgcaggtgcacagcaatctgcatgccgggcgtacccgagtttacagcggtagtagacgaagcttcttttgccggattaagagttgtaagatttcggtgaaggaagaacatggctgtctgccaaacagtaaaaagaaagagcaccgtaagttttatacaatccattgtacgggatatctacgcagttggcctcctaacatagtcggcatggaggaggagaggaatagtaagaaagataacagcaatttcacctgcctggtcgctattggaaggttacagccatacattgtgccccagaacagtggtgagatcaacgtcaaaccaaccgaattcatcactcgttttgccgtcaacggtaagttcgtgtacgtggaccagagggccactgccatcttgggttacctgccccaggagttactggggacttcctgttatgaatacttccatcaggatgatcataacaacctgactgacaaacacaaggctgtgctgcaaagcaaggagaaaattctcacagattcttacaagtttagggctaaagacggatcttttgtaaccttgaaatcccagtggttctcctttacgaatccatggactaaggagctagagtatatagtttccgtgaacaccctggtgctgggtcactctgaaccaggggaggcaagcttcctgccatgcagcagtcaaagcagcgaggaaagctccaggcagtcttgtatgtctgtgcctggaatgtctaccgggacagttctcggggcaggatcaatcggaacggacatcgcaaatgagatactggatctgcaacggctccaatccagctcttacctggatgactccagtcccactggactgatgaaggatacccatacagtaaactgtaggtccatgtccaacaaggaattgtttcccccctcgccctctgaaatgggagagctagaagccacaaggcagaatcagtccacggtcgctgttcattcacatgaacctctcctgagcgacggggctcaattggactttgacgctctttgtgataacgatgataccgccatggccgccttcatgaactatctggaagccgaaggcggcctgggggatcctggagattttagcgatatccagtggacgctctag

SEQ ID NO: 87849 - DNA, 1800 bp, Artificial Sequence
  derived and/or modified sequence
atggccgccgaggaggaggccgccgccggcggcgaggtggccggcggcgaagcaaccgctcccggcaaggtgttgagagaagagaatcagtgtatcgctccagtggtctccagcagggtatccccaggcacccgccctacagctatgggatctttttcaagccatatgacagagttccctcgcaagcgtaaagggagtgatagcgaccccagccaggaagctcactcccagaccgagaaaaggcggcgagataagatgaataacctgattgaggaactctcagccatgatccctcagtgtaatccgatggctcgcaaactcgataagcttactgtgctgagaatggccgtgcagcatctgagatctctgaagggactgacaaatagctacgtgggatctaactacaggccatcattcctgcaggacaacgaattgcggcacctaattcttaaaaccgcagagggttttctgtttgtggtgggatgtgaaagagggaaaatcctttttgtttctaagtccgtcagcaaaattctcaactatgaccaggcctcactgacaggacagagcctgttcgattttctccacccaaaagatgtcgcgaaggttaaggagcagctgtcatcattcgacatttccccccgcgagaaattgattgatgcaaagactggtctccaggtgcattccaatctccacgctggtcggacccgcgtgtacagcggctcccggcgcagctttttctgtcgcattaagtcttgcaagatctcggtaaaggaggagcacggatgtttacctaactcaaagaaaaaggaacaccggaaattttatacaatccattgtaccggctatttgcgcagctggcctccgaacatcgtagggatggaagaagaacgtaacagcaagaaggacaattctaactttacctgcctggtggccatcggacgactgcagccttatattgtgccccagaattctggtgaaatcaacgtcaagcccacggaattcattactagattcgccgtcaacggaaagttcgtctacgttgaccagcgtgcaacagctattctaggatatcttccccaggagctgctgggcacttcttgttacgaatattttcatcaggatgatcacaataatcttactgacaagcacaaggctgtcctgcaaagcaaagaaaaaatcttgacagatagctataaattcagggctaaagacggttcttttgtcacactgaaaagtcagtggttctcctttaccaatccctggaccaaagagcttgagtacattgtttctgtgaacaccctggtgttggggcattccgagcctggagaagcctcatttctgccatgctccagtcagtcctctgaggagagcagcagacagtcctgtatgtcagtccctggcatgtcaaccggaacagtcctgggcgccgggagcataggcactgatattgcaaatgagatcctcgacctgcagcgactgcagtccagctcttatttggatgactcatcccctaccggtctgatgaaggatacacacaccgttaattgcaggtctatgagtaataaagagctgtttcccccaagcccctcagaaatgggagagttggaagccacacgccagaaccaaagtactgtggctgtccatagccacgaaccactcttatcggacggcgcccagctggattttgatgccctgtgcgataacgacgacaccgccatggccgcattcatgaattacctcgaggccgaaggtggcctaggcgaccccggggacttcagcgatatccagtggaccctgtag

SEQ ID NO: 87850 - DNA, 1656 bp, Artificial Sequence
  derived and/or modified sequence
atgggcagcttcagcagccacatgaccgagttcccccggaagcggaagggatccgattcagaccctagccaggaagctcactcacaaacggagaaacggcggagagataaaatgaataacttaattgaggagcttagcgctatgatccctcagtgcaaccctatggctagaaaacttgataaactgaccgtgttaagaatggctgtccagcacctcaggtcactgaaaggcctgacaaattcctacgtgggcagtaactatcgaccatcttttcttcaggataatgaactcagacacctgatcctgaaaactgccgagggtttcctgtttgtggtggggtgtgagcgggggaagatcctcttcgtgagcaagagtgtgagcaagatactgaattatgaccaagcttccctaaccgggcaatccttattcgacttcttgcaccctaaggatgtcgctaaggtgaaggaacagcttagcagcttcgacatctcacccagggagaagttaatcgacgctaagacaggcttacaggtgcacagcaacctgcacgctggtcgcacgagagtttacagtgggtctcgccgatctttcttttgtaggatcaagtcatgcaagatttccgttaaggaggaacatgggtgcctgcccaatagcaagaaaaaagagcatcggaaattctacaccattcactgcactggttacttgcggagttggccacctaatatcgtgggcatggaagaagaacgaaattccaagaaagacaactccaatttcacttgccttgttgccatcggacggctgcagccttacatcgtgccccagaattccggcgaaatcaatgtcaaacccaccgaatttatcactcggtttgctgtgaatggaaaatttgtctacgtggatcagagggctactgccatactcggataccttccacaggaattgctgggtaccagttgctatgagtacttccaccaggatgaccacaataacctcaccgataaacacaaggcagtgttacaatctaaggaaaagatcctgaccgactcttataagttccgtgcgaaggatggatctttcgtgactctgaagtctcagtggttctctttcactaacccatggacaaaggagctcgagtacattgtctcagtgaatacgctggtgctggggcactcagagcccggcgaggcatctttcctgccttgctccagtcagagctccgaagagagttcccgccaaagctgtatgtccgtgccaggcatgtctaccggcaccgtgctcggggctgggagcatcggaactgacatcgccaatgagatcttggatttgcaaagattgcagtctagttcctatctggacgattctagtcccacaggactgatgaaggacacccacactgttaactgccggagcatgtcgaacaaggaactgttccctccgtctcccagcgagatgggcgagctcgaggcaacacggcagaaccagagcactgttgccgtccatagccatgagcctctgctgagcgacggagcacagctggattttgatgccttatgcgacaacgacgataccgcgatggccgcatttatgaattacctggaagcagaaggcggactaggcgacccaggcgatttctccgatatccagtggacactgtag

SEQ ID NO: 87851 - DNA, 1843 bp, Artificial Sequence
  derived and/or modified sequence
gaccaagtggctcctgcgatggcggcggaagaggaggctgcggcgggaggtaaagtgttgagagaggagaaccagtgcattgctcctgtggtttccagccgcgtgagtccagggacaagaccaacagctatggggtctttcagctcacacatgacagagtttccacgaaaacgcaaaggaagtgattcagacccatcccaagaagctcatagccaaactgaaaagcggaggagagataaaatgaataacctgattgaagaactgtctgcaatgatccctcagtgcaaccccatggcgcgtaaactggacaaacttacagttttaagaatggctgttcaacacttgagatctttaaaaggcttgacaaattcttatgtgggaagtaattatagaccatcatttcttcaggataatgagctcagacatttaatccttaagactgcagaaggcttcttatttgtggttggatgtgaaagaggaaaaattctcttcgtttctaagtcagtctccaaaatacttaattatgatcaggctagtttgactggacaaagcttatttgacttcttacatccaaaagatgttgccaaagtaaaggaacaactttcttcttttgatatttcaccaagagaaaagctaatagatgccaaaactggtttgcaagttcacagtaatctccacgctggaaggacacgtgtgtattctggctcaagacgatcttttttctgtcggataaagagttgtaaaatctctgtcaaagaagagcatggatgcttacccaactcaaagaagaaagagcacagaaaattctatactatccattgcactggttacttgagaagctggcctccaaatattgttggaatggaagaagaaaggaacagtaagaaagacaacagtaattttacctgccttgtggccattggaagattacagccatatattgttccacagaacagtggagagattaatgtgaaaccaactgaatttataacccggtttgcagtgaatggaaaatttgtctatgtagatcaaagggcaacagcgattttaggatatctgcctcaggaacttttgggaacttcttgttatgaatattttcatcaagatgaccacaataatttgactgacaagcacaaagcagttctacagagtaaggagaaaatacttacagattcctacaaattcagagcaaaagatggctcttttgtaactttaaaaagccaatggtttagtttcacaaatccttggacaaaagaactggaatatattgtatctgtcaacactttagttttgggacatagtgagcctggagaagcatcatttttaccttgtagctctcaatcatcagaagaatcctctagacagtcctgtatgagtgtacctggaatgtctactggaacagtacttggtgctggtagtattggaacagatattgcaaatgaaattctggatttacagaggttacagtcttcttcataccttgatgattcgagtccaacaggtttaatgaaagatactcatactgtaaactgcaggagtatgtcaaataaggagttgtttccaccaagtccttctgaaatgggggagctagaggctaccaggcaaaaccagagtactgttgctgtccacagccatgagccactcctcagtgatggtgcacagttggatttcgatgccctatgtgacaatgatgacacagccatggctgcatttatgaattacttagaagcagaggggggcctgggagaccctggggacttcagtgacatccagtggaccctctagcctttgatttttaactccaaaaatgagaaacattttaaagcatttcatttacgaaaaa

SEQ ID NO: 87852 - DNA, 1954 bp, Artificial Sequence
  derived and/or modified sequence
gggctgcggtggcggccgccgcggcacccggcagggcccgccagtccccgcttccctgctccagagccgccgcctgggccggggcagggcgggcccggggctcctccatgctgccagccgcggggctgcggagccgaccaagtggctcctgcgatggcggcggaagaggaggctgcggcgggaggtgaggttgccggtggcgaggcgacggccccaggtaaagtgttgagagaggagaaccagtgcattgctcctgtggtttccagccgcgtgagtccagggacaagaccaacagctatggggtctttcagctcacacatgacagagtttccacgaaaacgcaaaggaagtgattcagacccatcccaagaagctcatagccaaactgaaaagcggaggagagataaaatgaataacctgattgaagaactgtctgcaatgatccctcagtgcaaccccatggcgcgtaaactggacaaacttacagttttaagaatggctgttcaacacttgagatctttaaaaggcttgacaaattcttatgtgggaagtaattatagaccatcatttcttcaggataatgagctcagacatttaatccttaagactgcagaaggcttcttatttgtggttggatgtgaaagaggaaaaattctcttcgtttctaagtcagtctccaaaatacttaattatgatcaggctagtttgactggacaaagcttatttgacttcttacatccaaaagatgttgccaaagtaaaggaacaactttcttcttttgatatttcaccaagagaaaagctaatagatgccaaaactggtttgcaagttcacagtaatctccacgctggaaggacacgtgtgtattctggctcaagacgatcttttttctgtcggataaagagttgtaaaatctctgtcaaagaagagcatggatgcttacccaactcaaagaagaaagagcacagaaaattctatactatccattgcactggttacttgagaagctggcctccaaatattgttggaatggaagaagaaaggaacagtaagaaagacaacagtaattttacctgccttgtggccattggaagattacagccatatattgttccacagaacagtggagagattaatgtgaaaccaactgaatttataacccggtttgcagtgaatggaaaatttgtctatgtagatcaaagggcaacagcgattttaggatatctgcctcaggaacttttgggaacttcttgttatgaatattttcatcaagatgaccacaataatttgactgacaagcacaaagcagttctacagagtaaggagaaaatacttacagattcctacaaattcagagcaaaagatggctcttttgtaactttaaaaagccaatggtttagtttcacaaatccttggacaaaagaactggaatatattgtatctgtcaacactttagttttgggacatagtgagcctggagaagcatcatttttaccttgtagctctcaatcatcagaagaatcctctagacagtcctgtatgagtgtacctggaatgtctactggaacagtacttggtgctggtagtattggaacagatattgcaaatgaaattctggatttacagaggttacagtcttcttcataccttgatgattcgagtccaacaggtttaatgaaagatactcatactgtaaactgcaggagtatgtcaaataaggagttgtttccaccaagtccttctgaaatgggggagctagaggctaccaggcaaaaccagagtactgttgctgtccacagccatgagccactcctcagtgatggtgcacagttggatttcgatgccctatgtgacaatgatgacacagccatggctgcatttatgaattacttagaagcagaggggggcctgggagaccctggggacttcagtgacatccagtggaccctctagc

SEQ ID NO: 87853 - DNA, 1720 bp, Artificial Sequence
  derived and/or modified sequence
acagctatggggtctttcagctcacacatgacagagtttccacgaaaacgcaaaggaagtgattcagacccatcccaagaagctcatagccaaactgaaaagcggaggagagataaaatgaataacctgattgaagaactgtctgcaatgatccctcagtgcaaccccatggcgcgtaaactggacaaacttacagttttaagaatggctgttcaacacttgagatctttaaaaggcttgacaaattcttatgtgggaagtaattatagaccatcatttcttcaggataatgagctcagacatttaatccttaagactgcagaaggcttcttatttgtggttggatgtgaaagaggaaaaattctcttcgtttctaagtcagtctccaaaatacttaattatgatcaggctagtttgactggacaaagcttatttgacttcttacatccaaaagatgttgccaaagtaaaggaacaactttcttcttttgatatttcaccaagagaaaagctaatagatgccaaaactggtttgcaagttcacagtaatctccacgctggaaggacacgtgtgtattctggctcaagacgatcttttttctgtcggataaagagttgtaaaatctctgtcaaagaagagcatggatgcttacccaactcaaagaagaaagagcacagaaaattctatactatccattgcactggttacttgagaagctggcctccaaatattgttggaatggaagaagaaaggaacagtaagaaagacaacagtaattttacctgccttgtggccattggaagattacagccatatattgttccacagaacagtggagagattaatgtgaaaccaactgaatttataacccggtttgcagtgaatggaaaatttgtctatgtagatcaaagggcaacagcgattttaggatatctgcctcaggaacttttgggaacttcttgttatgaatattttcatcaagatgaccacaataatttgactgacaagcacaaagcagttctacagagtaaggagaaaatacttacagattcctacaaattcagagcaaaagatggctcttttgtaactttaaaaagccaatggtttagtttcacaaatccttggacaaaagaactggaatatattgtatctgtcaacactttagttttgggacatagtgagcctggagaagcatcatttttaccttgtagctctcaatcatcagaagaatcctctagacagtcctgtatgagtgtacctggaatgtctactggaacagtacttggtgctggtagtattggaacagatattgcaaatgaaattctggatttacagaggttacagtcttcttcataccttgatgattcgagtccaacaggtttaatgaaagatactcatactgtaaactgcaggagtatgtcaaataaggagttgtttccaccaagtccttctgaaatgggggagctagaggctaccaggcaaaaccagagtactgttgctgtccacagccatgagccactcctcagtgatggtgcacagttggatttcgatgccctatgtgacaatgatgacacagccatggctgcatttatgaattacttagaagcagaggggggcctgggagaccctggggacttcagtgacatccagtggaccctctagcctttgatttttaactccaaaaatgagaaacattttaaagcatttcatttacgaaaaa

SEQ ID NO: 87854 - DNA, 1767 bp, Artificial Sequence
  derived and/or modified sequence
atggccgcagaagaggaggctgccgctggcggaaaggtgctgcgagaagagaaccaatgtattgcccctgtcgtgtctagccgggtcagcccgggtacccgaccaaccgctatggggtctttcagttcacatatgaccgagtttccgagaaagagaaaaggaagcgacagtgacccttcccaagaagcacacagccagactgaaaagagacgtcgggacaagatgaacaacctgatagaggagctctctgcaatgattccccagtgcaatcccatggcacggaagttggacaagctaacagtattaaggatggccgtacagcacctccgctcactgaaaggactcacaaatagttatgtgggatccaattaccgcccttcatttctgcaggacaacgagctacggcacctgatactgaaaactgccgagggcttcctgttcgttgtcggttgcgaaagaggcaaaatcctgtttgtaagcaaatcagtctccaagatactaaactacgatcaggcatcactaaccggccagtccctcttcgacttcctgcacccaaaggatgtcgccaaagtgaaggagcagttaagttctttcgacatcagtccccgagagaaactaatcgatgccaagacaggtctccaggtgcattcaaacctacatgccggaagaacccgcgtgtatagtggcagtcggaggagcttcttttgcaggatcaagtcctgtaaaatctctgtaaaagaggaacatggatgccttccgaactctaagaagaaggaacaccgcaaattttataccatccattgcaccgggtatctgcgctcttggcctcccaacatcgtcggtatggaagaggagagaaactcaaaaaaggacaatagtaactttacctgcctggtggccatcggtcgcctgcagccatatattgtgccacagaattctggtgaaattaatgtgaagccaacagagttcataacaagatttgcagttaatgggaagtttgtgtatgttgaccagcgagcaacagccatcctgggatacctaccacaggaacttctgggcacctcctgctacgagtacttccaccaagacgatcataataatctgacagataaacacaaagctgtactccagagtaaggaaaagatactgaccgattcctacaagttccgtgccaaggatgggagttttgtcactctgaagagtcagtggttcagcttcactaatccctggactaaggagttggagtacatcgtgtctgtcaataccctggtgcttggccactccgaacccggtgaagcttccttcctcccctgttcttcacaatcctcagaggaatcctctcgacagtcctgtatgtccgtgccaggaatgtccaccggcaccgtcctcggagccggaagcattggcaccgacattgccaatgagattctggatcttcaaaggctgcagtcttcatcctatttggacgattcaagtcccacaggactgatgaaggatacccatacggtcaattgccggtcgatgtcgaataaggaactcttcccaccttccccgtctgagatgggcgaactggaggctacgcgtcagaaccagtccaccgtcgctgtccattcccatgagcctctgttgtctgacggagcacagctggattttgatgctctgtgtgacaacgatgacaccgctatggctgcttttatgaactatcttgaggcggaggggggactgggggatccaggggacttctccgacattcagtggaccctgtag

SEQ ID NO: 87855 - DNA, 1800 bp, Artificial Sequence
  derived and/or modified sequence
atggctgccgaggaagaagccgctgccggtggcgaggtcgccggaggggaggccaccgcacctggtaaggtattgagggaggaaaatcaatgtatagcacccgttgtgtcgagcagggtcagcccaggcactagaccaaccgcaatgggttcctttagttcgcacatgacagagtttccgagaaaacgcaagggatccgacagcgatcccagccaggaggcccatagccagacagagaagcggcgacgcgataagatgaataacttgattgaagaactcagtgccatgataccccagtgtaatcctatggcgaggaagcttgacaaactgacagtattacgcatggctgtccaacacttgcgctctcttaaaggtctcaccaatagttatgtgggctccaactacaggccttccttcttgcaagacaacgaattacgtcaccttattcttaaaaccgcagagggcttcctttttgtggtgggatgtgaacgcggtaaaattcttttcgtgtccaaatctgtgtcaaaaattcttaactacgaccaagcgtcattaactggccagagtctatttgactttctccacccgaaggacgtcgcaaaggtcaaagagcagctctcttctttcgacattagccctagagagaaactgatcgacgccaagaccggactccaggtgcacagcaaccttcacgctggccgaacccgtgtttattcaggctctaggcgctctttcttttgtcggattaagagttgcaaaatttccgtgaaagaggagcacggctgccttcctaactctaagaagaaagagcatcgcaaattctacaccatacactgcactgggtacctgcggtcgtggccgccaaacatcgtgggcatggaggaagaaagaaactcgaaaaaggacaacagcaacttcacatgcctggttgctatcggaagacttcagccttacattgtgccacagaattccggtgagataaacgtcaagcctacagagtttattacaagattcgccgtcaatggcaagttcgtatacgtcgaccagcgggctaccgccattctgggttatttgccacaggaactgctcgggactagctgttatgagtatttccaccaagatgaccacaacaatctgacggacaaacacaaagccgtcctgcagtctaaagagaagatactcactgatagctacaagttccgggcaaaagatggctcatttgtgacacttaaaagccagtggttttctttcaccaacccctggacaaaggagttggagtacattgtcagtgttaacacactcgttcttgggcatagcgagcccggtgaagcttcctttcttccgtgctcatcccagtcaagcgaagagagcagtaggcagagctgcatgagcgttcctggcatgagcactggaacagtactgggagctggatctattggaacagacattgccaacgaaatcctcgacctgcagcgtctgcagtcatcatcttacctagacgactcctcacccactgggttgatgaaagatacacatactgtgaattgccggtcaatgtctaataaggagttattccctccgagcccaagcgagatgggcgaactcgaagccacgcgacagaaccagtccaccgtcgcggtgcactcccatgagccccttctcagtgacggtgcccagctcgacttcgatgccctgtgcgacaatgacgataccgccatggcggcttttatgaactatctggaggccgagggaggcctaggcgatcccggagactttagcgacattcagtggaccttgtag

SEQ ID NO: 87856 - DNA, 1656 bp, Artificial Sequence
  derived and/or modified sequence
atggggtcgttttcgtcacacatgaccgagttcccccgtaagcgcaaagggtccgatagtgacccaagccaggaggctcacagtcagacagaaaaacggcgacgcgataagatgaacaatcttattgaagagttgtccgctatgatcccacagtgcaacccaatggcacgtaagctcgataagctcaccgtactcagaatggcagtgcagcaccttcgttctcttaagggcctcaccaactcatacgtcggcagcaactaccggccatcatttctgcaggacaacgagcttcgtcatttgatcctgaagaccgccgagggattcctctttgtggtgggctgcgagcggggtaaaatcctcttcgtaagcaaatccgtgagtaaaatcttaaactatgaccaggctagcttgaccgggcagagtctgttcgactttctgcacccaaaagacgttgccaaggttaaggagcagctctccagctttgatatcagtcctcgcgagaagttaatcgatgcaaagactggcctacaggtccactcaaacttacatgcaggcaggacaagggtctatagcggctcccgcaggtccttcttttgccgcataaaatcttgcaaaatcagtgtgaaggaagagcatggttgtctgcctaatagtaaaaaaaaggagcaccggaaattttatacaatccactgcacgggctacttgagaagttggcctcctaatatagtcgggatggaagaggaaaggaattcgaagaaggataattcgaactttacctgcttggttgctattggcaggttgcagccttatattgtgcctcagaatagtggtgagattaacgttaaaccaacagagttcatcaccaggttcgccgtaaacggaaagtttgtctatgtagatcaacgagcaaccgctatcctaggctacctgcctcaagaactcctgggtacatcttgctacgagtactttcatcaggacgaccataacaacctcacagataagcacaaggccgtgctgcaaagcaaggagaagattctgacagactcatacaagttccgagcgaaagacggatcttttgttacgctaaagtcccagtggttctccttcactaatccatggaccaaggagttggagtacatagtgagtgttaacacgctggtgctgggccatagtgagccaggggaagcgagtttcttgccctgctcgtcacagtcttccgaggagagctcccggcagagttgcatgagcgtgcccggtatgagcaccgggacagtcctcggcgctggcagcattgggaccgatatcgcgaatgagatactggatctccagagactgcagagctctagttatttagatgattcctctccaactggcctcatgaaggatacgcacacggtgaattgtcggtccatgagcaacaaagaactgttccccccatccccaagcgaaatgggagaacttgaggccactcggcagaaccaaagcaccgttgcagtgcacagtcatgagcccttgctgagcgatggagcccagctggatttcgatgctctgtgcgacaatgatgacaccgccatggcagcattcatgaattaccttgaggccgaaggcggtcttggtgatccaggcgacttcagcgacattcagtggacgttgtag

SEQ ID NO: 87857 - DNA, 1767 bp, Artificial Sequence
  derived and/or modified sequence
atggccgccgaggaggaggccgccgccggcggcaaggtgctgagagaggagaaccagtgcatcgcccccgtggtgagcagcagagtgagccccggcaccagacccaccgccatgggcagcttcagcagccacatgaccgagttccccagaaagagaaagggcagcgacagcgaccccagccaggaggcccacagccagaccgagaagagaagaagagacaagatgaacaacctgatcgaggagctgagcgccatgatcccccagtgcaaccccatggccagaaagctggacaagctgaccgtgctgagaatggccgtgcagcacctgagaagcctgaagggcctgaccaacagctacgtgggcagcaactacagacccagcttcctgcaggacaacgagctgagacacctgatcctgaagaccgccgagggcttcctgttcgtggtgggctgcgagagaggcaagatcctgttcgtgagcaagagcgtgagcaagatcctgaactacgaccaggccagcctgaccggccagagcctgttcgacttcctgcaccccaaggacgtggccaaggtgaaggagcagctgagcagcttcgacatcagccccagagagaagctgatcgacgccaagaccggcctgcaggtgcacagcaacctgcacgccggcagaaccagagtgtacagcggcagcagaagaagcttcttctgcagaatcaagagctgcaagatcagcgtgaaggaggagcacggctgcctgcccaacagcaagaagaaggagcacagaaagttctacaccatccactgcaccggctacctgagaagctggccccccaacatcgtgggcatggaggaggagagaaacagcaagaaggacaacagcaacttcacctgcctggtggccatcggcagactgcagccctacatcgtgccccagaacagcggcgagatcaacgtgaagcccaccgagttcatcaccagattcgccgtgaacggcaagttcgtgtacgtggaccagagagccaccgccatcctgggctacctgccccaggagctgctgggcaccagctgctacgagtacttccaccaggacgaccacaacaacctgaccgacaagcacaaggccgtgctgcagagcaaggagaagatcctgaccgacagctacaagttcagagccaaggacggcagcttcgtgaccctgaagagccagtggttcagcttcaccaacccctggaccaaggagctggagtacatcgtgagcgtgaacaccctggtgctgggccacagcgagcccggcgaggccagcttcctgccctgcagcagccagagcagcgaggagagcagcagacagagctgcatgagcgtgcccggcatgagcaccggcaccgtgctgggcgccggcagcatcggcaccgacatcgccaacgagatcctggacctgcagagactgcagagcagcagctacctggacgacagcagccccaccggcctgatgaaggacacccacaccgtgaactgcagaagcatgagcaacaaggagctgttcccccccagccccagcgagatgggcgagctggaggccaccagacagaaccagagcaccgtggccgtgcacagccacgagcccctgctgagcgacggcgcccagctggacttcgacgccctgtgcgacaacgacgacaccgccatggccgccttcatgaactacctggaggccgagggcggcctgggcgaccccggcgacttcagcgacatccagtggaccctgtag

SEQ ID NO: 87858 - DNA, 1800 bp, Artificial Sequence
  derived and/or modified sequence
atggccgccgaggaggaggccgccgccggcggcgaggtggccggcggcgaggccaccgcccccggcaaggtgctgagagaggagaaccagtgcatcgcccccgtggtgagcagcagagtgagccccggcaccagacccaccgccatgggcagcttcagcagccacatgaccgagttccccagaaagagaaagggcagcgacagcgaccccagccaggaggcccacagccagaccgagaagagaagaagagacaagatgaacaacctgatcgaggagctgagcgccatgatcccccagtgcaaccccatggccagaaagctggacaagctgaccgtgctgagaatggccgtgcagcacctgagaagcctgaagggcctgaccaacagctacgtgggcagcaactacagacccagcttcctgcaggacaacgagctgagacacctgatcctgaagaccgccgagggcttcctgttcgtggtgggctgcgagagaggcaagatcctgttcgtgagcaagagcgtgagcaagatcctgaactacgaccaggccagcctgaccggccagagcctgttcgacttcctgcaccccaaggacgtggccaaggtgaaggagcagctgagcagcttcgacatcagccccagagagaagctgatcgacgccaagaccggcctgcaggtgcacagcaacctgcacgccggcagaaccagagtgtacagcggcagcagaagaagcttcttctgcagaatcaagagctgcaagatcagcgtgaaggaggagcacggctgcctgcccaacagcaagaagaaggagcacagaaagttctacaccatccactgcaccggctacctgagaagctggccccccaacatcgtgggcatggaggaggagagaaacagcaagaaggacaacagcaacttcacctgcctggtggccatcggcagactgcagccctacatcgtgccccagaacagcggcgagatcaacgtgaagcccaccgagttcatcaccagattcgccgtgaacggcaagttcgtgtacgtggaccagagagccaccgccatcctgggctacctgccccaggagctgctgggcaccagctgctacgagtacttccaccaggacgaccacaacaacctgaccgacaagcacaaggccgtgctgcagagcaaggagaagatcctgaccgacagctacaagttcagagccaaggacggcagcttcgtgaccctgaagagccagtggttcagcttcaccaacccctggaccaaggagctggagtacatcgtgagcgtgaacaccctggtgctgggccacagcgagcccggcgaggccagcttcctgccctgcagcagccagagcagcgaggagagcagcagacagagctgcatgagcgtgcccggcatgagcaccggcaccgtgctgggcgccggcagcatcggcaccgacatcgccaacgagatcctggacctgcagagactgcagagcagcagctacctggacgacagcagccccaccggcctgatgaaggacacccacaccgtgaactgcagaagcatgagcaacaaggagctgttcccccccagccccagcgagatgggcgagctggaggccaccagacagaaccagagcaccgtggccgtgcacagccacgagcccctgctgagcgacggcgcccagctggacttcgacgccctgtgcgacaacgacgacaccgccatggccgccttcatgaactacctggaggccgagggcggcctgggcgaccccggcgacttcagcgacatccagtggaccctgtag

SEQ ID NO: 87859 - DNA, 1656 bp, Artificial Sequence
  derived and/or modified sequence
atgggcagcttcagcagccacatgaccgagttccccagaaagagaaagggcagcgacagcgaccccagccaggaggcccacagccagaccgagaagagaagaagagacaagatgaacaacctgatcgaggagctgagcgccatgatcccccagtgcaaccccatggccagaaagctggacaagctgaccgtgctgagaatggccgtgcagcacctgagaagcctgaagggcctgaccaacagctacgtgggcagcaactacagacccagcttcctgcaggacaacgagctgagacacctgatcctgaagaccgccgagggcttcctgttcgtggtgggctgcgagagaggcaagatcctgttcgtgagcaagagcgtgagcaagatcctgaactacgaccaggccagcctgaccggccagagcctgttcgacttcctgcaccccaaggacgtggccaaggtgaaggagcagctgagcagcttcgacatcagccccagagagaagctgatcgacgccaagaccggcctgcaggtgcacagcaacctgcacgccggcagaaccagagtgtacagcggcagcagaagaagcttcttctgcagaatcaagagctgcaagatcagcgtgaaggaggagcacggctgcctgcccaacagcaagaagaaggagcacagaaagttctacaccatccactgcaccggctacctgagaagctggccccccaacatcgtgggcatggaggaggagagaaacagcaagaaggacaacagcaacttcacctgcctggtggccatcggcagactgcagccctacatcgtgccccagaacagcggcgagatcaacgtgaagcccaccgagttcatcaccagattcgccgtgaacggcaagttcgtgtacgtggaccagagagccaccgccatcctgggctacctgccccaggagctgctgggcaccagctgctacgagtacttccaccaggacgaccacaacaacctgaccgacaagcacaaggccgtgctgcagagcaaggagaagatcctgaccgacagctacaagttcagagccaaggacggcagcttcgtgaccctgaagagccagtggttcagcttcaccaacccctggaccaaggagctggagtacatcgtgagcgtgaacaccctggtgctgggccacagcgagcccggcgaggccagcttcctgccctgcagcagccagagcagcgaggagagcagcagacagagctgcatgagcgtgcccggcatgagcaccggcaccgtgctgggcgccggcagcatcggcaccgacatcgccaacgagatcctggacctgcagagactgcagagcagcagctacctggacgacagcagccccaccggcctgatgaaggacacccacaccgtgaactgcagaagcatgagcaacaaggagctgttcccccccagccccagcgagatgggcgagctggaggccaccagacagaaccagagcaccgtggccgtgcacagccacgagcccctgctgagcgacggcgcccagctggacttcgacgccctgtgcgacaacgacgacaccgccatggccgccttcatgaactacctggaggccgagggcggcctgggcgaccccggcgacttcagcgacatccagtggaccctgtag

SEQ ID NO: 87860 - protein, 684 aa, Artificial Sequence
  derived and/or modified sequence
MENLQTNFSLVQGSTKKLNGMGDDGSPPAKKMITDIHANGKTINKVPTVKKEHLDDYGEAPVETDGEHVKRTCTSVPETLHLNPSLKHTLAQFHLSSQSSLGGPAAFSARHSQESMSPTVFLPLPSPQVLPGPLLIPSDSSTELTQTVLEGESISCFQVGGEKRLCLPQVLNSVLREFTLQQINTVCDELYIYCSRCTSDQLHILKVLGILPFNAPSCGLITLTDAQRLCNALLRPRTFPQNGSVLPAKSSLAQLKETGSAFEVEHECLGKCQGLFAPQFYVQPDAPCIQCLECCGMFAPQTFVMHSHRSPDKRTCHWGFESAKWHCYLHVNQKYLGTPEEKKLKIILEEMKEKFSMRSGKRNQSKTDAPSGMELQSWYPVIKQEGDHVSQTHSFLHPSYYLYMCDKVVAPNVSLTSAVSQSKELTKTEASKSISRQSEKAHSSGKLQKTVSYPDVSLEEQEKMDLKTSRELCSRLDASISNNSTSKRKSESATCNLVRDINKVGIGLVAAASSPLLVKDVICEDDKGKIMEEVMRTYLKQQEKLNLILQKKQQLQMEVKMLSSSKSMKELTEEQQNLQKELESLQNEHAQRMEEFYVEQKDLEKKLEQIMKQKCTCDSNLEKDKEAEYAGQLAELRQRLDHAEADRQELQDELRQEREARQKLEMMIKELKLQILKSSKTAKE

SEQ ID NO: 87861 - protein, 664 aa, Artificial Sequence
  derived and/or modified sequence
MGDDGSPPAKKMITDIHANGKTINKVPTVKKEHLDDYGEAPVETDGEHVKRTCTSVPETLHLNPSLKHTLAQFHLSSQSSLGGPAAFSARHSQESMSPTVFLPLPSPQVLPGPLLIPSDSSTELTQTVLEGESISCFQVGGEKRLCLPQVLNSVLREFTLQQINTVCDELYIYCSRCTSDQLHILKVLGILPFNAPSCGLITLTDAQRLCNALLRPRTFPQNGSVLPAKSSLAQLKETGSAFEVEHECLGKCQGLFAPQFYVQPDAPCIQCLECCGMFAPQTFVMHSHRSPDKRTCHWGFESAKWHCYLHVNQKYLGTPEEKKLKIILEEMKEKFSMRSGKRNQSKTDAPSGMELQSWYPVIKQEGDHVSQTHSFLHPSYYLYMCDKVVAPNVSLTSAVSQSKELTKTEASKSISRQSEKAHSSGKLQKTVSYPDVSLEEQEKMDLKTSRELCSRLDASISNNSTSKRKSESATCNLVRDINKVGIGLVAAASSPLLVKDVICEDDKGKIMEEVMRTYLKQQEKLNLILQKKQQLQMEVKMLSSSKSMKELTEEQQNLQKELESLQNEHAQRMEEFYVEQKDLEKKLEQIMKQKCTCDSNLEKDKEAEYAGQLAELRQRLDHAEADRQELQDELRQEREARQKLEMMIKELKLQILKSSKTAKE

SEQ ID NO: 87862 - protein, 123 aa, Artificial Sequence
  derived and/or modified sequence
MENLQTNFSLVQGSTKKLNGMGDDGSPPAKKMITDIHANGKTINKVPTVKKEHLDDYGEAPVETDGEHVKRTCTSVPETLHLNPSLKHTLAQFHLSSQSSLGGPAAFSARHSQESMSPTVFLP

SEQ ID NO: 87863 - DNA, 1995 bp, Artificial Sequence
  derived and/or modified sequence
atgggcgacgacggcagcccccccgccaagaagatgatcaccgacatccacgccaacggcaagaccatcaacaaggtgcccaccgtgaagaaggagcacctggacgactacggcgaggcccccgtggagaccgacggcgagcacgtgaagagaacctgcaccagcgtgcccgagaccctgcacctgaaccccagcctgaagcacaccctggcccagttccacctgagcagccagagcagcctgggcggccccgccgccttcagcgccagacacagccaggagagcatgagccccaccgtgttcctgcccctgcccagcccccaggtgctgcccggccccctgctgatccccagcgacagcagcaccgagctgacccagaccgtgctggagggcgagagcatcagctgcttccaggtgggcggcgagaagagactgtgcctgccccaggtgctgaacagcgtgctgagagagttcaccctgcagcagatcaacaccgtgtgcgacgagctgtacatctactgcagcagatgcaccagcgaccagctgcacatcctgaaggtgctgggcatcctgcccttcaacgcccccagctgcggcctgatcaccctgaccgacgcccagagactgtgcaacgccctgctgagacccagaaccttcccccagaacggcagcgtgctgcccgccaagagcagcctggcccagctgaaggagaccggcagcgccttcgaggtggagcacgagtgcctgggcaagtgccagggcctgttcgccccccagttctacgtgcagcccgacgccccctgcatccagtgcctggagtgctgcggcatgttcgccccccagaccttcgtgatgcacagccacagaagccccgacaagagaacctgccactggggcttcgagagcgccaagtggcactgctacctgcacgtgaaccagaagtacctgggcacccccgaggagaagaagctgaagatcatcctggaggagatgaaggagaagttcagcatgagaagcggcaagagaaaccagagcaagaccgacgcccccagcggcatggagctgcagagctggtaccccgtgatcaagcaggagggcgaccacgtgagccagacccacagcttcctgcaccccagctactacctgtacatgtgcgacaaggtggtggcccccaacgtgagcctgaccagcgccgtgagccagagcaaggagctgaccaagaccgaggccagcaagagcatcagcagacagagcgagaaggcccacagcagcggcaagctgcagaagaccgtgagctaccccgacgtgagcctggaggagcaggagaagatggacctgaagaccagcagagagctgtgcagcagactggacgccagcatcagcaacaacagcaccagcaagagaaagagcgagagcgccacctgcaacctggtgagagacatcaacaaggtgggcatcggcctggtggccgccgccagcagccccctgctggtgaaggacgtgatctgcgaggacgacaagggcaagatcatggaggaggtgatgagaacctacctgaagcagcaggagaagctgaacctgatcctgcagaagaagcagcagctgcagatggaggtgaagatgctgagcagcagcaagagcatgaaggagctgaccgaggagcagcagaacctgcagaaggagctggagagcctgcagaacgagcacgcccagagaatggaggagttctacgtggagcagaaggacctggagaagaagctggagcagatcatgaagcagaagtgcacctgcgacagcaacctggagaaggacaaggaggccgagtacgccggccagctggccgagctgagacagagactggaccacgccgaggccgacagacaggagctgcaggacgagctgagacaggagagagaggccagacagaagctggagatgatgatcaaggagctgaagctgcagatcctgaagagcagcaagaccgccaaggagtag

SEQ ID NO: 87864 - DNA, 2055 bp, Artificial Sequence
  derived and/or modified sequence
atggaaaacctgcagacaaacttcagccttgtgcaaggatccaccaagaagctaaatgggatgggggatgacggatccccaccagccaagaagatgatcacggacattcacgctaatggcaaaactattaataaagtgcccacagtcaaaaaagagcacttggacgattatggcgaggctcccgtggagactgacggagagcatgttaagcgcacctgcaccagtgttcctgagactctgcacctgaaccccagtctgaaacacaccctcgcccaattccacctgtcctctcagtccagtttaggcgggccagcggcatttagcgctcgccactcccaagagtcaatgagccccaccgtgtttctgccactgccttcaccccaggtgctgccaggaccccttctaatcccatctgactcatccacagagctcacacagacagtactggagggggagtccatcagttgctttcaggttggcggcgagaaacggctgtgcttgccacaagtgctaaattccgtgctacgggagttcaccctgcaacagataaataccgtctgcgatgagctttacatatattgtagtcgatgtacttcagatcagttacacattcttaaagtactgggcatcctgcctttcaacgccccctcttgcggcctgatcacgctcaccgacgcccagcggctttgtaacgcactgctgcgccccaggaccttcccacagaacggttccgttctgcctgccaagtcaagcctggctcagcttaaggagaccggctccgctttcgaagtcgagcatgaatgtcttggcaagtgccaaggtttatttgcaccccaattttacgtgcagcctgatgccccctgcatacaatgcctcgagtgctgcggaatgttcgcgcctcagacattcgtgatgcatagtcatcgtagcccagataagcgaacgtgtcattggggcttcgaatcagccaaatggcattgctacctgcacgtgaatcaaaaatatctcggcacaccggaggagaagaaattgaagataatactcgaggaaatgaaggagaagtttagtatgagaagcgggaagcgcaatcagtctaagactgacgctccgtccggaatggaacttcagtcatggtaccccgtcatcaagcaggaaggggaccacgtatcccagacacactcatttttgcatccctcctattacctttacatgtgtgataaagtcgtcgctccaaatgttagtctaacaagtgccgtctcccagtcaaaggaattgacaaagactgaggcctccaaatctatttcgagacagtctgagaaggcccattccagcggaaagttacagaagaccgtgagttatccagacgtaagcctggaagaacaggaaaaaatggatcttaaaacttcgcgcgaattgtgctctcgcctggacgccagtatttcgaacaactccactagcaaaagaaaaagtgaaagtgccacctgcaatctggtcagggacatcaataaggttggaatcggcctagtagcggccgccagttcacctctcttagtgaaagacgtcatttgcgaggacgataagggcaagattatggaggaggtcatgaggacatatcttaaacagcaggagaagctaaatttaatccttcaaaaaaagcaacaactgcagatggaagtgaagatgctatcctcttccaagagtatgaaggagctcacagaagagcaacagaacttgcagaaggaactggaatcactgcagaacgagcacgctcagcgcatggaggaattttacgtagaacagaaagatttagagaaaaagctggagcagatcatgaagcagaaatgtacctgcgacagcaacctcgaaaaggataaagaagctgagtatgcagggcagctggccgagttaagacagcggctcgaccatgccgaggcagaccgacaggaattgcaggatgagttgaggcaggagagggaggcacgccaaaaactcgagatgatgatcaaggaactcaaactccaaattctcaagagcagtaagactgcgaaagagtag

SEQ ID NO: 87865 - DNA, 1995 bp, Artificial Sequence
  derived and/or modified sequence
atgggtgatgatggctcccctccagcgaaaaaaatgattaccgacattcacgcaaatggaaagaccattaacaaggtgccaacagttaaaaaagagcaccttgatgactacggggaggctcccgtggagactgacggcgagcatgtgaagaggacttgcacatccgttcccgaaacactgcacttaaatcccagcctgaaacatactctcgctcaatttcacctgtccagccagagctcactggggggccccgccgcgtttagcgctcgccacagccaggagagtatgagcccgacagtattcttacccctaccgagcccccaagttctgccaggacctctccttatcccttccgactctagtactgagctgactcagaccgtgctggagggcgagagcataagctgctttcaggtgggaggtgaaaaacgactttgcctacctcaagtgctgaacagtgtgctccgcgagttcacgttgcagcagatcaatactgtgtgtgacgagttatatatctattgctcccggtgtacttcggatcagcttcacattctgaaggtccttggaatcctgcccttcaacgctccatcttgcggactaatcacacttacggatgcccaacgactgtgtaacgccctgctgcgcccacgcacgttcccgcagaacgggtctgtgctgcccgctaagtcctccttggcgcagctgaaagaaacgggctctgcttttgaagtcgagcatgagtgtctggggaagtgtcaagggcttttcgcgccccaattctacgtgcagcctgacgccccttgcattcagtgcttggagtgctgtggaatgttcgccccccaaacattcgtgatgcattcacacaggtccccagacaaaaggacttgccactggggcttcgaatccgctaagtggcattgttatctgcatgttaatcagaagtatctcggtacccctgaggagaagaagctaaaaattatccttgaagagatgaaggaaaagttttccatgcgatctggaaaacggaatcaatctaaaaccgacgcccctagtggtatggagctgcagtcatggtatcctgtaatcaaacaggagggcgaccacgtgtcccaaacccacagctttctgcacccctcgtactacttatacatgtgcgataaggtcgtggcccccaacgtgagcctgacttctgcagttagccagagtaaagagctcacgaagacggaagctagtaaaagcatttcccggcagtccgaaaaagctcactccagtgggaaactccagaagacagtcagctatccggatgtgtctttggaggagcaggagaagatggacctgaaaactagtagagagttgtgcagccgtcttgatgcaagtatctccaataactccacaagcaaaaggaagagcgagtccgctacttgcaatctcgtgcgcgacattaataaagtggggataggcctagttgccgctgcctcctctccactacttgtgaaggacgtgatctgcgaggacgacaaagggaaaatcatggaagaagtgatgcggacttacttgaaacaacaagagaagctcaatctgatcctgcagaagaaacagcagctgcaaatggaggtcaaaatgttatcctctagcaaatctatgaaagagttaacagaagaacaacagaaccttcagaaggagctggaatccctgcagaatgagcacgcccaacgcatggaagagttctacgtggaacagaaagatttggagaagaaactggagcaaattatgaagcaaaagtgcacctgtgattcaaacctggagaaagataaagaagctgagtacgcagggcagctcgctgagctgcgccagcgactcgaccatgctgaggcagatcggcaggaacttcaggacgagctgcggcaagagagagaagcaaggcagaaattagagatgatgataaaggaactgaaattgcaaattttgaagagctccaagactgcaaaggagtag

SEQ ID NO: 87866 - DNA, 2055 bp, Artificial Sequence
  derived and/or modified sequence
atggagaatttacagactaatttttccctggtacagggaagtactaaaaagctaaacggcatgggcgacgacggcagtcctccagccaaaaagatgattactgatatacatgcgaatggaaaaacaatcaataaggttcccacggttaagaaagaacacctggacgactatggggaggccccagtcgagaccgatggagaacacgtcaagcgaacctgtaccagcgtgccagaaacactccatctgaatccttctttgaagcatactttagcccagtttcacctatccagtcagtcctccctggggggacctgccgccttttcagctaggcacagtcaggagagcatgagcccaactgtattcctcccactgccctccccacaggtccttccgggtcctcttctgattccaagcgactcctctacagagctgacgcagacagtcctggagggagagtcaatctcctgcttccaggtgggcggagagaagaggctatgcctgccacaggtgctgaattcagtgctgcgggaatttacgctgcaacagataaatactgtctgcgacgaactctacatttactgcagcaggtgtacctctgaccagttgcatattctcaaggtattgggcattcttccgttcaatgccccctcttgcgggctaattaccctaacagatgcccaacggctgtgcaacgctttactgcggccccgtactttccctcaaaatggctctgtgctgccagccaagtcaagcctcgctcagcttaaggaaacgggatctgcgttcgaagttgaacacgagtgtttaggtaaatgtcagggactcttcgctccccagttttacgtacagcctgacgccccatgcatccagtgtctggagtgctgtgggatgttcgctccacagacctttgtgatgcactctcataggtcaccggacaaacggacttgtcactggggcttcgagtctgccaaatggcactgctatctccatgtgaatcagaagtacttgggcacgcctgaagagaagaaacttaagatcatcctggaagaaatgaaggagaaattctctatgcgatctggcaagcggaaccaatccaagacagatgctcctagcggcatggagttgcaatcctggtatccagtgataaaacaggaaggcgaccacgtgagccagacgcatagtttcctgcatccttcgtactacctttatatgtgtgacaaagttgtcgccccaaacgtctccctcactagtgctgtttctcaaagtaaagagcttacaaaaacggaggcttccaagagcattagtcggcaaagcgagaaagcccacagcagcggaaaactacaaaaaaccgtgtcctacccagatgtgagcctggaggagcaggaaaagatggatcttaagacatccagggaactctgcagccgactggatgcttcaattagcaacaacagcacctcgaagagaaagagtgagtctgccacatgcaatttggtccgagatataaacaaagtgggcatcggattggtggctgcggccagttccccacttctcgtgaaggacgtaatctgtgaggacgacaagggaaaaattatggaggaggtcatgcggacatacttaaaacagcaggaaaagcttaacctgattttacagaaaaaacagcagctgcaaatggaagtgaagatgttgagctcttcgaagagcatgaaagaactcaccgaggaacagcagaacctacagaaggagctcgaaagtctgcagaacgaacatgcacagcggatggaggagttctacgtcgaacagaaagacctggagaagaagctagaacagataatgaagcagaaatgcacctgtgattctaacctcgaaaaggacaaagaggccgaatacgccggacagttggcagagctcaggcagagactggatcacgctgaggccgaccgccaagaattacaggacgaactgagacaggagagagaggccaggcagaagttagagatgatgatcaaggagctgaaactacagattctgaagtcttctaagacagccaaagagtag

SEQ ID NO: 87867 - DNA, 2055 bp, Artificial Sequence
  derived and/or modified sequence
atggagaacctgcagaccaacttcagcctggtgcagggcagcaccaagaagctgaatggcatgggagatgatggcagccccccagccaagaagatgatcacagacatccacgccaacgggaagaccatcaacaaggtgcccaccgtgaagaaggagcacctggatgattatggagaggcccctgtggagacagatggagagcacgtgaagaggacctgcacctctgtgcctgagaccctgcacctgaaccccagcctgaagcacaccctggcccagttccacctgagcagccagagcagcctgggcggccctgctgccttcagcgcccggcacagccaggagagcatgagccccaccgtcttcctgcccctgcccagcccccaggtgctgcccggccccctgctgatccccagcgacagcagcacagagctgacccagacagtgctggagggggagagcatcagctgcttccaggtgggcggggagaagaggctgtgcctgccccaggtgctgaacagcgtgctgcgggagttcaccctgcagcagatcaacacagtgtgtgatgagctgtacatctactgcagccgctgcaccagtgaccagctgcacatcctgaaggtgctgggcatcctgcccttcaatgcccccagctgtggcctcatcaccctgacagatgcccagaggctgtgcaatgccctgctgcggcccaggaccttcccccagaatggatctgtgctgcctgccaagagcagcctggcccagctgaaggagaccggcagcgcctttgaggtggagcatgaatgtctgggcaagtgccagggcctgtttgccccccagttctacgtgcagccagatgccccctgcatccagtgcctggagtgctgcggcatgtttgccccccagacctttgtgatgcacagccacaggagcccagacaagaggacctgccactggggctttgagagcgccaagtggcactgctacctgcacgtgaaccagaagtacctgggcaccccagaggagaagaagctgaagatcatcctggaggagatgaaggagaagttctccatgaggtctgggaagaggaaccagagcaagacagatgcccccagcggcatggagctgcagagctggtaccctgtgatcaagcaggagggggaccacgtgtcccagacccacagcttcctgcaccccagctactacctgtacatgtgtgacaaggtggtggcccccaacgtgtccctgaccagcgctgtgtcccagagcaaggagctgaccaagacagaggccagcaagagcatcagccggcagagcgagaaggcccacagcagcggcaagctgcagaagacagtgtcctacccagatgtgtccctggaggagcaggagaagatggacctgaagaccagccgggagctgtgcagccggctggatgccagcatcagcaacaacagcaccagcaagaggaagtctgagagcgccacctgcaacctggtgcgggacatcaacaaggtgggcatcggcctggtggccgccgccagcagccccctgctggtgaaggatgtgatctgtgaagatgacaagggcaagatcatggaggaggtgatgaggacctacctgaagcagcaggagaagctgaacctgatcctgcagaagaagcagcagctgcagatggaggtgaagatgctgagcagcagcaagtccatgaaggagctgacagaggagcagcagaacctgcagaaggagctggagagcctgcagaatgaacatgcccagaggatggaggagttctacgtggagcagaaggacctggagaagaagctggagcagatcatgaagcagaagtgcacctgtgacagcaacctggagaaggacaaggaggccgagtatgccggccagctggccgagctgcggcagaggctggaccatgctgaggccgaccggcaggagctgcaggatgagctgcggcaggagcgggaggcccggcagaagctggagatgatgatcaaggagctgaagctgcagatcctgaagagcagcaagacagccaaggagtag

SEQ ID NO: 87868 - DNA, 1995 bp, Artificial Sequence
  derived and/or modified sequence
atgggagatgatggcagccccccagccaagaagatgatcacagacatccacgccaacgggaagaccatcaacaaggtgcccaccgtgaagaaggagcacctggatgattatggagaggcccctgtggagacagatggagagcacgtgaagaggacctgcacctctgtgcctgagaccctgcacctgaaccccagcctgaagcacaccctggcccagttccacctgagcagccagagcagcctgggcggccctgctgccttcagcgcccggcacagccaggagagcatgagccccaccgtcttcctgcccctgcccagcccccaggtgctgcccggccccctgctgatccccagcgacagcagcacagagctgacccagacagtgctggagggggagagcatcagctgcttccaggtgggcggggagaagaggctgtgcctgccccaggtgctgaacagcgtgctgcgggagttcaccctgcagcagatcaacacagtgtgtgatgagctgtacatctactgcagccgctgcaccagtgaccagctgcacatcctgaaggtgctgggcatcctgcccttcaatgcccccagctgtggcctcatcaccctgacagatgcccagaggctgtgcaatgccctgctgcggcccaggaccttcccccagaatggatctgtgctgcctgccaagagcagcctggcccagctgaaggagaccggcagcgcctttgaggtggagcatgaatgtctgggcaagtgccagggcctgtttgccccccagttctacgtgcagccagatgccccctgcatccagtgcctggagtgctgcggcatgtttgccccccagacctttgtgatgcacagccacaggagcccagacaagaggacctgccactggggctttgagagcgccaagtggcactgctacctgcacgtgaaccagaagtacctgggcaccccagaggagaagaagctgaagatcatcctggaggagatgaaggagaagttctccatgaggtctgggaagaggaaccagagcaagacagatgcccccagcggcatggagctgcagagctggtaccctgtgatcaagcaggagggggaccacgtgtcccagacccacagcttcctgcaccccagctactacctgtacatgtgtgacaaggtggtggcccccaacgtgtccctgaccagcgctgtgtcccagagcaaggagctgaccaagacagaggccagcaagagcatcagccggcagagcgagaaggcccacagcagcggcaagctgcagaagacagtgtcctacccagatgtgtccctggaggagcaggagaagatggacctgaagaccagccgggagctgtgcagccggctggatgccagcatcagcaacaacagcaccagcaagaggaagtctgagagcgccacctgcaacctggtgcgggacatcaacaaggtgggcatcggcctggtggccgccgccagcagccccctgctggtgaaggatgtgatctgtgaagatgacaagggcaagatcatggaggaggtgatgaggacctacctgaagcagcaggagaagctgaacctgatcctgcagaagaagcagcagctgcagatggaggtgaagatgctgagcagcagcaagtccatgaaggagctgacagaggagcagcagaacctgcagaaggagctggagagcctgcagaatgaacatgcccagaggatggaggagttctacgtggagcagaaggacctggagaagaagctggagcagatcatgaagcagaagtgcacctgtgacagcaacctggagaaggacaaggaggccgagtatgccggccagctggccgagctgcggcagaggctggaccatgctgaggccgaccggcaggagctgcaggatgagctgcggcaggagcgggaggcccggcagaagctggagatgatgatcaaggagctgaagctgcagatcctgaagagcagcaagacagccaaggagtag

SEQ ID NO: 87869 - DNA, 2055 bp, Artificial Sequence
  derived and/or modified sequence
atggagaacctgcagaccaacttcagcctggtgcagggcagcaccaagaagctcaacggaatgggggatgatggtagccctcccgcgaagaagatgattacagatattcatgctaatggcaaaactattaataaggtgccgacagttaaaaaggagcacctagacgattatggcgaagctccagtggagactgatggggaacacgtgaagcgcacctgtacctccgtgccagagacactgcatctaaacccttctctgaagcatacgttggcccaattccacctgtcgagtcagtcatctctgggcggaccagcggccttttctgcccgacattcgcaggaatctatgtcacccaccgtgtttctgcccttaccatcaccacaggtgctgccaggacccctgctgatcccctccgatagctctactgagctgacacaaactgtcttggagggggagagcatcagctgtttccaagttggaggggagaagcgcttatgcctgcctcaggtgttgaattcagtgcttcgagagtttacacttcaacaaattaacactgtgtgcgacgagctgtacatatattgttccagatgtacctcggatcagttgcacatcttgaaggtccttgggatactgccgttcaacgcaccgtcatgtggactgatcaccctgaccgatgctcaaaggctttgtaacgcccttctcaggcctcggacatttccgcagaacggtagcgtccttccagccaagagttcgcttgcccaattgaaagagaccggctccgcttttgaggtggaacacgaatgcctgggaaagtgccaaggcctttttgctccccaattctatgtccagcctgacgctccctgtatccagtgcctggagtgctgtggcatgttcgcccctcagacctttgtgatgcactcacatagaagtccagataagagaacttgtcattggggatttgaatccgccaagtggcactgctatctgcatgtcaatcagaaatacctaggcacccccgaagaaaagaaactgaaaattattctggaggaaatgaaggaaaagttctctatgcgttccgggaagaggaaccagtctaagactgacgcccctagtggtatggaactacagtcctggtaccctgtgattaaacaggagggtgatcacgtgtcccagacccattctttccttcacccgtcttactacctgtatatgtgtgacaaggtcgtagcccctaacgtttccctcacgtccgctgtgtcccagtcgaaagaactcacaaagactgaggcttctaagtctatatcccgacaatctgagaaagcacatagcagcggaaagctgcaaaaaactgtgtcataccccgacgtgagtttggaggagcaggaaaaaatggatctcaagaccagccgggagctgtgctctcgtctggatgcctcgatttctaacaattcaacgtctaagcgaaaatcggagagtgcgacatgtaacctcgtgagagatatcaacaaagtggggataggcctcgtggccgcagcctcctcccccctgcttgttaaggacgtgatatgcgaggatgacaagggaaaaatcatggaagaagtcatgagaacctacctgaaacaacaggaaaagctcaatcttatccttcagaagaagcaacaattgcagatggaggtcaaaatgctgtcctcttccaagtccatgaaggaattgacagaagaacagcagaacctccagaaagaacttgaaagcttgcagaacgagcatgcccagcggatggaggagttttatgtggaacaaaaagaccttgagaaaaaactcgagcagataatgaagcagaaatgtacgtgtgactcaaatttggaaaaggataaagaggctgagtacgcagggcaactcgccgaactacggcagcggctggatcatgcggaggcagatcgtcaggagctacaggatgagctcaggcaagagagggaggccaggcagaagctcgagatgatgataaaggaactcaagctgcaaatcctgaagtcctccaaaaccgctaaggagtag

SEQ ID NO: 87870 - DNA, 1995 bp, Artificial Sequence
  derived and/or modified sequence
atgggcgacgacggcagcccccccgccaagaagatgatcaccgacatacatgccaatggcaaaaccataaacaaggtcccaactgtgaaaaaagaacacctggacgactacggcgaggcccctgtcgagacagatggtgagcacgttaagaggacttgtacttccgtaccggaaacactacatcttaatccatcactgaaacatacactggctcaatttcatcttagttcacaatcaagtctgggcggtccggcggcctttagtgccaggcacagccaggagtccatgagcccaaccgtcttccttccccttccatcccctcaggtgctgcctggccccctactcatcccctctgattctagtaccgaactaacacagactgtgttagaaggggaaagcatttcatgcttccaggtggggggcgagaaaaggctgtgtctgccccaagtcctgaatagcgtgctgcgagagtttactctacagcagatcaacactgtttgcgacgagttgtacatatattgctcaagatgtactagcgaccagctgcatattctgaaggtgctgggaatcttaccatttaatgctccatcttgtgggttgattaccctcacagatgctcagcgactatgcaatgctctgcttagaccacgcacattcccacaaaacggaagcgtgctgcctgccaagtcctctttggcacagttgaaagagaccggctcagcatttgaggtggaacacgaatgtctcggtaagtgtcaaggtttatttgccccccaattttacgttcagccagatgccccctgtatccagtgcttggaatgctgtggcatgttcgcaccccaaaccttcgtgatgcatagccaccgttcacccgacaagaggacttgccattggggatttgagtccgctaagtggcattgctatcttcatgttaatcaaaagtacctaggaaccccagaggagaaaaagctcaagatcatactggaagaaatgaaggaaaaattctctatgagatcgggtaaacgtaaccagagcaagacagatgcgccttccggaatggagttgcagagctggtaccctgtcataaaacaggaaggcgaccatgtgtcccagacacactcattcctccatcccagctattatctgtatatgtgtgacaaggtggtggcgcccaacgttagtttgacatccgctgtgagccagtcaaaagagcttacgaagacggaggccagcaagtccatctcgcgccaatcggagaaggctcactcctctggcaaacttcagaaaacagtgtcctacccagatgtcagcttggaagagcaggaaaagatggatttgaagacatcaagggagctttgcagcagactagatgctagcatttctaataacagcactagtaagcgcaaaagcgagagtgcaacatgtaatttggtccgagacatcaacaaagtcggaattgggctggtggccgcagcctcttctccactcttggttaaagacgttatatgcgaagatgataaaggtaaaattatggaagaggtgatgaggacatatctcaaacagcaggagaaactcaatctcatcctacagaaaaagcaacaattgcagatggaagttaagatgctgtcttcttcaaaatcaatgaaggagcttacagaggagcaacagaacctacagaaggagctcgagagtctccagaatgaacacgcccagaggatggaggaattctatgtagagcagaaggatcttgagaaaaagctcgagcagatcatgaagcagaagtgcacctgtgattcaaacctggagaaagacaaagaagcagagtatgccggccaactggcagaactcagacaacggttagatcacgccgaagctgaccgtcaggaactgcaagatgagctgaggcaggagagggaagcccgacaaaaactggaaatgatgatcaaggagctaaagctccagatcctcaagtctagtaagactgcgaaagaatag

SEQ ID NO: 87871 - DNA, 2055 bp, Artificial Sequence
  derived and/or modified sequence
atggagaacctgcagaccaacttcagcctggtgcagggcagcaccaaaaaactcaatggcatgggagatgatggaagcccaccagcaaagaaaatgattacagacatccacgcaaatggaaaaactatcaataaagttcctaccgtgaagaaggagcatctagacgattatggggaagcaccagtcgaaactgatggagagcatgttaaacgaacctgcacatcggttccagagacactccacctgaacccttccctgaagcacaccctagctcagttccatctcagctcccagagttctttaggcggcccagccgctttttctgcacggcacagccaagagtcgatgtcacccaccgtcttcctgcccctgccgagcccacaagttctcccaggcccactgctaatccccagcgacagttctaccgaactcactcagacggtgctggaaggggaatccattagctgcttccaagtcggtggtgagaagcgtctctgtctgccccaggtgctcaactctgtgttgcgggagtttacattacagcagattaatacagtgtgcgatgaactttacatctactgttctcgctgtactagcgatcagcttcatattctgaaagtcctcggcatactaccgttcaatgcaccgtcctgcggcctgatcacactgacggacgcccagagattatgtaacgcgcttctgaggccaaggaccttcccacaaaacggatctgtgttacctgccaagtccagtctggcccagctgaaggagaccggctcagcctttgaagtcgagcatgaatgtctgggtaagtgccagggactttttgcgccccagttttacgttcagcccgacgccccctgtattcagtgtttagagtgctgcgggatgttcgctccccaaaccttcgtgatgcactcccatcgatccccggataagaggacttgccattgggggttcgagtctgccaagtggcactgctacctccacgtcaatcaaaagtatctcggtactcctgaagaaaagaagctgaaaatcatactagaggagatgaaagagaaattcagcatgcgtagcggaaagcggaatcaaagcaagaccgacgctcctagtgggatggagctgcaaagctggtacccagtcataaaacaggaaggtgatcacgtgagtcaaactcatagcttcctgcacccgtcctactacctgtacatgtgtgacaaagtggtcgcccctaatgtgtctctgacctctgctgtgtcccagagcaaggaacttacaaagactgaagcatctaaatccatctcccgtcaatctgagaaagcacactcatctggcaagttgcagaagacggtgtcatacccggacgtgagccttgaggagcaggagaagatggaccttaaaacttccagagagttgtgtagtcgtttagacgcatccatcagcaataacagcacatccaagaggaagtcagaatctgcaacttgcaacctggtgcgtgacatcaataaggtcgggatcggcttggtagcagccgccagctcaccactgttagtaaaagatgtgatctgcgaggacgacaaaggaaagatcatggaggaggttatgcgcacttatctgaagcagcaggaaaagctgaaccttatcctgcaaaaaaagcaacaactccaaatggaagtcaagatgctgagtagttctaagagcatgaaagagctgacagaggaacagcaaaacttgcaaaaggagctggagtctctacagaacgaacacgcccagaggatggaagagttctatgtggagcagaaggacctggaaaagaaattggagcaaataatgaagcagaagtgcacctgtgattctaatttggagaaggacaaggaggccgaatatgctggtcagctggcagaacttaggcaacgcctggatcacgccgaggctgatcgtcaggagcttcaggacgagttaagacaggagcgtgaagcacgtcagaagctagagatgatgatcaaggaactgaaactgcaaatactgaaatcttccaaaaccgccaaggagtag

SEQ ID NO: 87872 - DNA, 2055 bp, Artificial Sequence
  derived and/or modified sequence
atggagaatcttcagacaaacttctctttagtccaggggagtaccaagaaactgaacggcatgggagacgacggctcccctcccgctaagaaaatgatcacagacatccatgcgaacggtaagacaatcaacaaagtgccgactgtcaagaaagagcacctcgatgattacggagaggcccctgtcgagaccgatggagaacatgtgaaacgtacatgtacatccgtgccagaaacccttcatctaaatccctctctgaagcatacccttgcacagtttcacctcagttcccagagctcactgggcggtcctgcagccttctccgccagacactcccaggagtccatgtccccgacagtgttcctgcctcttccatctccacaggtgcttcctggccctctactgattcccagtgacagcagtaccgagctgacccagacagtgctagagggcgagtccatttcttgtttccaggttggcggagagaagagactgtgcctacctcaggtcctgaattctgtgctgcgcgagtttaccctacagcagatcaataccgtgtgcgacgaactttacatctactgttcaaggtgcacaagcgaccagcttcacattttaaaggtgctcggaattctgccattcaacgccccatcctgtggtctgataaccctgacagacgcccagcggttatgcaatgccctcctccgaccacggactttccctcagaacggctcagtcctgcccgcaaaatcatcactggcacaacttaaggagacgggcagtgcattcgaagtggaacacgagtgccttggaaaatgtcagggtctcttcgccccacagttttatgtacagcccgatgccccatgcattcagtgtctcgagtgctgtggcatgttcgcccctcagactttcgtaatgcacagccatagatcccccgacaagcggacttgccattggggattcgaatcagctaagtggcactgctacctgcacgtaaaccagaaatacctcggcactcctgaagaaaaaaaactcaagattattcttgaggaaatgaaagagaagtttagtatgcgcagcgggaaaaggaaccagtctaagactgacgcaccctcagggatggaactgcagtcttggtacccggtaataaagcaggaaggtgaccatgtgtcccagacacattcttttctccacccctcttactatctctacatgtgcgataaggtagtggctcctaatgtctcactgacatctgcggtgtctcagtctaaagaactaaccaaaaccgaggcctcaaaatccatctcacgccagtcggagaaagcccacagttcaggtaagttgcagaaaaccgtttcctacccagacgtgtcactggaggaacaggaaaagatggacctcaaaacttcccgagaactgtgttcaaggctggacgcgtcgatcagcaacaacagcactagcaaacgcaaatccgagtctgcgacttgcaatttggtcagggacatcaataaggtgggaatagggttagtggctgccgcaagctctcctttgctggtgaaggatgtaatctgcgaggatgataaaggtaaaatcatggaggaggttatgcgcacatatttgaagcagcaggaaaagctgaaccttatcttgcagaagaaacagcagctacagatggaggtgaagatgctgtcatcttcaaaaagcatgaaggagctgaccgaagaacagcaaaatctccagaaggagctggaatctctacagaacgaacacgcccaacggatggaggagttctacgtggagcagaaggaccttgagaagaagctggagcagatcatgaaacaaaaatgtacctgcgacagcaatcttgagaaggataaagaggctgaatatgccggacaactggcggagctaagacagcggctggatcatgctgaagcggatcgacaggaattacaggatgagctccggcaggagcgcgaggctcgccagaaattggagatgatgattaaggaattaaaactccaaatcttaaaatcctccaagacagcaaaggaatag

SEQ ID NO: 87873 - DNA, 1995 bp, Artificial Sequence
  derived and/or modified sequence
atgggtgatgatggctctcctccagccaagaagatgatcaccgacatacatgctaacggcaagaccattaacaaagtgcccaccgtgaaaaaagagcatttggatgactatggcgaggctcccgtggagacggacggggagcatgtaaagagaacctgcacttctgttccagaaacacttcacttgaatcccagcctgaaacatacgctagcacagtttcacttgtcatcccagtcgtctctaggaggaccagccgctttctcagcgaggcactcccaagaaagcatgtccccaacagtcttcttgcccctcccgtcaccacaggtactgccgggacctctcctgatccctagcgactcctccacagagctcacacagaccgtgctggagggcgagtccattagctgctttcaagtgggcggtgaaaagcgcctatgtcttcctcaggtactcaatagcgtcctgcgagaatttacactccagcaaattaacaccgtctgcgatgagctgtacatttattgcagcaggtgtaccagcgatcaacttcacatccttaaggtgctgggcatcctgcctttcaacgccccttcatgtggcctaattacccttactgacgcccagagactttgtaacgccctcctgcgacctcggacctttccacagaacggctcagttctgcccgcaaagtccagccttgctcagttgaaagagactggatctgcctttgaagtggaacacgagtgcctgggaaaatgtcaggggctttttgcaccccaattttacgtgcagcccgatgccccttgcatccagtgtctggaatgctgcggcatgttcgccccacagacctttgtgatgcatagccatcgctccccagacaagcgtacctgtcactggggttttgaatccgcgaaatggcactgttaccttcatgtgaatcagaagtacctgggcacgccagaggaaaagaagctaaagatcattctagaagaaatgaaagagaagtttagcatgcgtagtgggaagagaaaccagagcaagactgacgcgccaagcggcatggaactgcagtcctggtacccggttatcaaacaagagggggaccatgtttcccagactcacagttttttgcacccctcttactatctgtatatgtgcgataaagtggtggctcccaatgtgagtttaacatcagccgtctctcagtccaaggagctgacaaaaacagaagccagcaagtctataagccgccagtctgagaaagcacactccagcgggaaactgcagaaaacggtctcataccccgacgtgagtctggaggagcaagaaaagatggatctaaaaacctcacgcgagctgtgctccagactggacgcatcaattagcaataactctacctccaaacgtaaatccgagtcagccacctgcaacctcgtgagggacatcaataaagtgggaatcggactggttgccgcagcttcctcccctctgctcgtgaaggacgtgatttgcgaggacgacaagggaaagattatggaagaagtcatgaggacttatctcaaacagcaagagaagctgaacctcatattacagaaaaagcagcaactccagatggaggttaagatgctgagctcgagtaaaagcatgaaggaactgacggaagagcagcagaatctccagaaagagctagaatcacttcagaatgaacacgcccagagaatggaagagttttacgtagagcagaaagatctcgaaaaaaagctcgaacaaattatgaagcagaagtgcacatgcgactcaaacctcgagaaagacaaggaggcagagtacgcaggccaattggccgagctcaggcaacgtctggaccacgcagaggctgatagacaggagctccaggatgaactacgccaggaacgagaagctagacagaaactggaaatgatgattaaagagctcaagctgcagatacttaaaagttccaagaccgctaaagagtag

SEQ ID NO: 87874 - DNA, 2757 bp, Artificial Sequence
  derived and/or modified sequence
gagcggcgacggcggcggcggcgggcacagattaattaaaagaagaatgaactataatccttgaagataactgggcaattttttaagtcggaggctgttcttactggtgtgaggatttacacacgtcttcagtttttcagcacagaccagcagaccatcatttttagaggaaatactccctctgccctcctttttggtttccttggtgggctcaactaaaaaactgaatgggatgggagatgatggcagccccccagcgaaaaaaatgataacggacattcatgcaaatggaaaaacgataaacaaggtgccaacagttaagaaggaacacttggatgactatggagaagcaccagtggaaactgatggagagcatgttaagcgaacctgtacttctgttcctgaaactttgcatttaaatcccagtttgaaacacacattggcacaattccatttaagtagtcagagctcgctgggtggaccagcagcattttctgctcggcattcccaagaaagcatgtcgcctactgtatttctgcctcttccatcacctcaggttcttcctggcccattgctcatcccttcagatagctccacagaactcactcagactgtgttggaaggggaatctatttcttgttttcaagttggaggagaaaagagactctgtttgccccaagtcttaaattctgttctccgagaatttacactccagcaaataaatacagtgtgtgatgaactgtacatatattgttcaaggtgtacttcagaccagcttcatatcttaaaggtactgggcatacttccattcaatgccccatcctgtgggctgattacattaactgatgcacaaagattatgtaatgctttattgcggccacgaacttttcctcaaaatggtagcgtacttcctgctaaaagctcattggcccagttaaaggaaactggcagtgcctttgaagtggagcatgaatgcctaggcaaatgtcagggtttatttgcaccccagttttatgttcagcctgatgctccgtgtattcaatgtctggagtgttgtggaatgtttgcaccccagacgtttgtgatgcattctcacagatcacctgacaaaagaacttgccactggggctttgaatcagctaaatggcattgctatcttcatgtgaaccaaaaatacttaggaacacctgaagaaaagaaactgaagataattttagaagaaatgaaggagaagtttagcatgagaagtggaaagagaaatcaatccaagacagatgcaccatcaggaatggaattacagtcatggtatcctgttataaagcaggaaggtgaccatgtttctcagacacattcatttttacaccccagctactacttatacatgtgtgataaagtggttgccccaaatgtgtcacttacttctgctgtatcccagtctaaagagctcacaaagacagaggcaagtaagtccatatcaagacagtcagagaaggctcacagtagtggtaaacttcaaaaaacagtgtcttatccagatgtctcacttgaggaacaggagaaaatggatttaaaaacaagtagagaattatgtagccgtttagatgcatcaatctcaaataattctacaagtaaaaggaaatctgagtctgccacttgcaacttagtcagagacataaacaaagtgggaattggccttgttgctgccgcttcatctccgcttcttgtgaaagatgtcatttgtgaggatgataagggaaaaatcatggaagaagtaatgagaacttatttaaaacaacaggaaaaactaaacttgattttgcaaaagaagcaacaacttcagatggaagtaaaaatgttgagtagttcaaaatctatgaaggaactcactgaagaacagcagaatttacagaaagagcttgaatctttgcagaatgaacatgctcaaagaatggaagaattttatgttgaacagaaagacttagagaaaaaattggagcagataatgaagcaaaaatgtacctgtgactcaaatttagaaaaagacaaagaggctgaatatgcaggacagttggcagaactgaggcagagattggaccatgctgaggccgataggcaagaactccaagatgaactcagacaggaacgggaagcaagacagaagttagagatgatgataaaagagctaaagctgcaaattctgaaatcatcaaagactgctaaagaatagaaactgttaaagagattcatctgtgtattactgacaaggttttttttgtttgttgcttgctttggtaattgaattctgaagaatttatctgcatgacgataactaggcattctatccatttgtagatcagagaaagtgaagagattatatattagtacttaaatttttacattttccaaatgaatgaaaatgtatgtttctttgtacttttttaaaaaaatcagcttagtaacaatactatatggtttcaactagtaggtaatctgcttatatttctaatgcaaacttaacaattgtgtactttttaaaagctgcaatatgtgttggaaaatagctgtggtcaattttgttatccatatttcagactcaattttagatacaatggtggctttatattttaagtatatagagctactcaaggagttgaatctccccttttctcattaacacaatttttctaagttgatatggtgtactcattaacatacaccaaatttacttttactttgttcagattgtggaatgaattt

SEQ ID NO: 87875 - DNA, 2055 bp, Artificial Sequence
  derived and/or modified sequence
atggagaacctgcaaactaatttttcactcgtgcagggatcgacaaaaaagctgaatgggatgggggacgatggctcgccacctgccaaaaaaatgatcaccgacattcacgccaacgggaaaactatcaacaaggtgcctactgtaaagaaagagcacttggacgattacggagaagcgccagtggaaactgatggggagcacgtaaagcggacctgcacatccgtccccgaaactctacacctgaaccccagtctgaagcacactctcgcccagtttcacctgtcgagccagtcttccctggggggtccagctgcattttccgcacgtcactcccaggaaagcatgtcacctacagtattcctaccgctgccaagcccacaggttctacctggacctctgctgatcccaagcgatagctcaacagaactgactcagacagtgctggagggagaatcaataagctgcttccaggtgggtggcgaaaaacgtttgtgtctaccacaggttcttaacagcgtcctcagggagtttactctgcagcagatcaacactgtgtgtgacgagctgtacatttattgcagcagatgcacctctgatcaactacacatcctgaaggttctagggatactacctttcaacgcaccttcttgtggactgataacacttacagacgcacaaagactgtgcaatgccctccttagaccccgtacatttccccaaaatggctccgtgctccctgcaaaatcttctctcgcccagcttaaagagacaggctccgcattcgaagtggagcatgaatgcctcggtaagtgtcagggactgtttgcccctcagttctacgtgcagcccgatgccccatgcatccaatgccttgagtgttgcggcatgtttgcacctcagacattcgtcatgcacagccatcgcagcccggataaacgtacatgtcattggggattcgaaagtgcaaaatggcactgttacctgcatgtgaaccagaaatatctcggcactcctgaagaaaaaaagctgaagattatcctggaagagatgaaagagaagttctctatgcggagcggaaagagaaaccagagtaagaccgacgccccatcaggcatggagctccaatcctggtacccagtaataaagcaggagggggatcacgtatcccaaacacatagcttcctccacccctcttattacctctatatgtgcgataaggtagtcgccccaaacgtctctctgacgtcagcggtttcacagagtaaagagctcacgaagaccgaggctagtaaaagtatctctcgccagtcagagaaagcccattcctcaggcaaactgcagaaaacagtgagttaccccgatgtctccctggaggaacaagaaaaaatggacttgaagacgtcacgtgaactgtgtagcagacttgacgcaagtatttccaacaattctactagcaagcggaagtccgagagcgccacatgcaatctggtgagggacataaacaaagttggcattggcttggttgccgcagccagctccccactcctcgttaaagatgtcatctgcgaggacgacaaaggtaagatcatggaagaggtgatgaggacatacctgaaacagcaggagaagctgaatctcattttgcagaaaaaacagcaactgcagatggaagtcaagatgctatcctcttcaaaatcgatgaaggagttgactgaagaacagcagaacctgcaaaaggagctagagagtctgcagaatgagcatgcgcaaaggatggaggagttttacgtagagcaaaaagacctggaaaaaaaactcgagcagatcatgaagcaaaaatgcacctgtgattccaacctcgaaaaagacaaggaggcagagtacgccggacagctggccgaacttagacagaggttagaccacgctgaagccgaccggcaagagcttcaggatgagctgcgccaggaacgtgaggcccgacagaaattggagatgatgatcaaggagctaaagctccagattctgaagtcatctaaaaccgcaaaggaatag

SEQ ID NO: 87876 - DNA, 3057 bp, Artificial Sequence
  derived and/or modified sequence
gagcgggcgagcggcgacggcggcggcggcgggcacagattaattaaaagaagaatgaactataatccttgaagataactgggcaattttttaagtcggaggctgttcttactggtgtgaggatttacacacgtcttcagtttttcagcacagaccagcagaccatcatttttagaggaaatactccctctgccctcctttttggtttccttggtggtaaagattaaatttggttgcatcattttgacttgtgtttgagtctagattttatggcacaaggaatggcataaacttttcatgtgttttggttaaaacaaaccagaccattgcattgaccctggacatctttaattgagaaattggtaactttattttaatatgtatatctgaagaattcaagaaaacaaaggcatcctcagaggtgtgcctcttttctttattattagaggcaaaacgaacaattttataggatttgtagtgaaattataccagattataaggagaaccaaaactaagtcgcaaaatttattaatttaaggggctctcgctttgaaagtttgagagtaagttacgataggcatttgtatccattcattactttcctcttttcaaataagcaactaaatagaaatgctaatctcagacttaattatttaacagaagagtgtaccatggaaaacctccagacaaatttctccttggttcagggctcaactaaaaaactgaatgggatgggagatgatggcagccccccagcgaaaaaaatgataacggacattcatgcaaatggaaaaacgataaacaaggtgccaacagttaagaaggaacacttggatgactatggagaagcaccagtggaaactgatggagagcatgttaagcgaacctgtacttctgttcctgaaactttgcatttaaatcccagtttgaaacacacattggcacaattccatttaagtagtcagagctcgctgggtggaccagcagcattttctgctcggcattcccaagaaagcatgtcgcctactgtatttctgcctcttccatcacctcaggttcttcctggcccattgctcatcccttcagatagctccacagaactcactcagactgtgttggaaggggaatctatttcttgttttcaagttggaggagaaaagagactctgtttgccccaagtcttaaattctgttctccgagaatttacactccagcaaataaatacagtgtgtgatgaactgtacatatattgttcaaggtgtacttcagaccagcttcatatcttaaaggtactgggcatacttccattcaatgccccatcctgtgggctgattacattaactgatgcacaaagattatgtaatgctttattgcggccacgaacttttcctcaaaatggtagcgtacttcctgctaaaagctcattggcccagttaaaggaaactggcagtgcctttgaagtggagcatgaatgcctaggcaaatgtcagggtttatttgcaccccagttttatgttcagcctgatgctccgtgtattcaatgtctggagtgttgtggaatgtttgcaccccagacgtttgtgatgcattctcacagatcacctgacaaaagaacttgccactggggctttgaatcagctaaatggcattgctatcttcatgtgaaccaaaaatacttaggaacacctgaagaaaagaaactgaagataattttagaagaaatgaaggagaagtttagcatgagaagtggaaagagaaatcaatccaagacagatgcaccatcaggaatggaattacagtcatggtatcctgttataaagcaggaaggtgaccatgtttctcagacacattcatttttacaccccagctactacttatacatgtgtgataaagtggttgccccaaatgtgtcacttacttctgctgtatcccagtctaaagagctcacaaagacagaggcaagtaagtccatatcaagacagtcagagaaggctcacagtagtggtaaacttcaaaaaacagtgtcttatccagatgtctcacttgaggaacaggagaaaatggatttaaaaacaagtagagaattatgtagccgtttagatgcatcaatctcaaataattctacaagtaaaaggaaatctgagtctgccacttgcaacttagtcagagacataaacaaagtgggaattggccttgttgctgccgcttcatctccgcttcttgtgaaagatgtcatttgtgaggatgataagggaaaaatcatggaagaagtaatgagaacttatttaaaacaacaggaaaaactaaacttgattttgcaaaagaagcaacaacttcagatggaagtaaaaatgttgagtagttcaaaatctatgaaggaactcactgaagaacagcagaatttacagaaagagcttgaatctttgcagaatgaacatgctcaaagaatggaagaattttatgttgaacagaaagacttagagaaaaaattggagcagataatgaagcaaaaatgtacctgtgactcaaatttagaaaaagacaaagaggctgaatatgcaggacagttggcagaactgaggcagagattggaccatgctgaggccgataggcaagaactccaagatgaactcagacaggaacgggaagcaagacagaagttagagatgatgataaaagagctaaagctgcaaattctgaaatcatcaaagactgctaaagaatagaaactgttaaagagattcatctgtgtattactgacaaggttttttttgtttgttgcttgctttggtaattgaattctgaagaatttatctgcatgacgataactaggcattctatccatttgtagatcagagaaagtgaagagattatatattagtacttaaatttttacattttccaaatgaatgaaaatgtatgtttctttgtacttttttaaaaaaatcagcttagtaacaatactatatggtttcaactagtaggtaatctgcttatatttctaatgcaaacttaacaattgtgtactttttaaaagctgcaatatgtgttggaaaa

SEQ ID NO: 87877 - DNA, 4210 bp, Artificial Sequence
  derived and/or modified sequence
ggtttcaaattggccctttggcctctggagcaaattcaaatgtaactcttccccaaccccccttctcttcttccagattaattaaaagaagaatgaactataatccttgaagataactgggcaattttttaagtcggaggctgttcttactggtgtgaggatttacacacgtcttcagtttttcagcacagaccagcagaccatcatttttagaggaaatactccctctgccctcctttttggtttccttggtggtaaagattaaatttggttgcatcattttgacttgtgtttgagtctagattttatggcacaaggaatggcataaacttttcatgtgttttggttaaaacaaaccagaccattgcattgaccctggacatctttaattgagaaattggtaactttattttaatatgtatatctgaagaattcaagaaaacaaaggcatcctcagaggtgtgcctcttttctttattattagaggcaaaacgaacaattttataggatttgtagtgaaattataccagattataaggagaaccaaaactaagtcgcaaaatttattaatttaaggggctctcgctttgaaagtttgagagtaagttacgataggcatttgtatccattcattactttcctcttttcaaataagcaactaaatagaaatgctaatctcagacttaattatttaacagaagagtgtaccatggaaaacctccagacaaatttctccttggttcagggctcaactaaaaaactgaatgggatgggagatgatggcagccccccagcgaaaaaaatgataacggacattcatgcaaatggaaaaacgataaacaaggtgccaacagttaagaaggaacacttggatgactatggagaagcaccagtggaaactgatggagagcatgttaagcgaacctgtacttctgttcctgaaactttgcatttaaatcccagtttgaaacacacattggcacaattccatttaagtagtcagagctcgctgggtggaccagcagcattttctgctcggcattcccaagaaagcatgtcgcctactgtatttctgcctcttccatcacctcaggttcttcctggcccattgctcatcccttcagatagctccacagaactcactcagactgtgttggaaggggaatctatttcttgttttcaagttggaggagaaaagagactctgtttgccccaagtcttaaattctgttctccgagaatttacactccagcaaataaatacagtgtgtgatgaactgtacatatattgttcaaggtgtacttcagaccagcttcatatcttaaaggtactgggcatacttccattcaatgccccatcctgtgggctgattacattaactgatgcacaaagattatgtaatgctttattgcggccacgaacttttcctcaaaatggtagcgtacttcctgctaaaagctcattggcccagttaaaggaaactggcagtgcctttgaagtggagcatgaatgcctaggcaaatgtcagggtttatttgcaccccagttttatgttcagcctgatgctccgtgtattcaatgtctggagtgttgtggaatgtttgcaccccagacgtttgtgatgcattctcacagatcacctgacaaaagaacttgccactggggctttgaatcagctaaatggcattgctatcttcatgtgaaccaaaaatacttaggaacacctgaagaaaagaaactgaagataattttagaagaaatgaaggagaagtttagcatgagaagtggaaagagaaatcaatccaagacagatgcaccatcaggaatggaattacagtcatggtatcctgttataaagcaggaaggtgaccatgtttctcagacacattcatttttacaccccagctactacttatacatgtgtgataaagtggttgccccaaatgtgtcacttacttctgctgtatcccagtctaaagagctcacaaagacagaggcaagtaagtccatatcaagacagtcagagaaggctcacagtagtggtaaacttcaaaaaacagtgtcttatccagatgtctcacttgaggaacaggagaaaatggatttaaaaacaagtagagaattatgtagccgtttagatgcatcaatctcaaataattctacaagtaaaaggaaatctgagtctgccacttgcaacttagtcagagacataaacaaagtgggaattggccttgttgctgccgcttcatctccgcttcttgtgaaagatgtcatttgtgaggatgataagggaaaaatcatggaagaagtaatgagaacttatttaaaacaacaggaaaaactaaacttgattttgcaaaagaagcaacaacttcagatggaagtaaaaatgttgagtagttcaaaatctatgaaggaactcactgaagaacagcagaatttacagaaagagcttgaatctttgcagaatgaacatgctcaaagaatggaagaattttatgttgaacagaaagacttagagaaaaaattggagcagataatgaagcaaaaatgtacctgtgactcaaatttagaaaaagacaaagaggctgaatatgcaggacagttggcagaactgaggcagagattggaccatgctgaggccgataggcaagaactccaagatgaactcagacaggaacgggaagcaagacagaagttagagatgatgataaaagagctaaagctgcaaattctgaaatcatcaaagactgctaaagaatagaaactgttaaagagattcatctgtgtattactgacaaggttttttttgtttgttgcttgctttggtaattgaattctgaagaatttatctgcatgacgataactaggcattctatccatttgtagatcagagaaagtgaagagattatatattagtacttaaatttttacattttccaaatgaatgaaaatgtatgtttctttgtacttttttaaaaaaatcagcttagtaacaatactatatggtttcaactagtaggtaatctgcttatatttctaatgcaaacttaacaattgtgtactttttaaaagctgcaatatgtgttggaaaatagctgtggtcaattttgttatccatatttcagactcaattttagatacaatggtggctttatattttaagtatatagagctactcaaggagttgaatctccccttttctcattaacacaatttttctaagttgatatggtgtactcattaacatacaccaaatttacttttactttgttcagattgtggaatgaatttccaccagttctcttctttttaatgtgtaccctaggaggaattttactgaggttatagcataccccatgagcacagtggggaagaagaatgtgttgttatgtgctgctgctaaacagaagcagcagttgtaatttgtttttcagtttaaatgtggttatagttagatttttttttaagcagcaacttttcaaaaataaaatgtgataatttctgaacttttgtttgtgttgttaatagtggtgtgaaaatattaacgttcttgagaaaaactgataccactgttgtgtatcagtttctatacaatccataatcctcctgtacagtttttacatgtagttatgagtcttactaaaatttatataatggacttgttttcctttaagttgtaaaatgttaaacaccttgaaggttattttggacttctgtatgtttaaatgttgtcttaccaaaatttgcacgaatggaccattttcatttactacttaatatcaaaatcaggaatttacagtcaactgatagtacatgataggtgcatataggacagtttagttacctgctactaaaagatttttagataagttttagaagataaaggaattccatagtttcaggagggacaacatcttctgcactttttttttgcacagaaaagtctgtcattctctaatggcaaatttcatatttgttaattcttggctcaaaatatattaggtaaaattcttagatctgtttttaaagggagtttcctgaaactatcattaattgacattattaccccatggattttatgggataataaatgtttttcatgttctcttataagatactatgtatgaaattacttcagagagctatatttattttaaaataaattagctagggttaaggttatattctatttccagcatagaaggta

SEQ ID NO: 87878 - DNA, 2055 bp, Artificial Sequence
  derived and/or modified sequence
atggagaacctgcagaccaacttcagcctggtgcagggcagcaccaagaagctgaacggcatgggcgacgacggcagcccccccgccaagaagatgatcaccgacatccacgccaacggcaagaccatcaacaaggtgcccaccgtgaagaaggagcacctggacgactacggcgaggcccccgtggagaccgacggcgagcacgtgaagagaacctgcaccagcgtgcccgagaccctgcacctgaaccccagcctgaagcacaccctggcccagttccacctgagcagccagagcagcctgggcggccccgccgccttcagcgccagacacagccaggagagcatgagccccaccgtgttcctgcccctgcccagcccccaggtgctgcccggccccctgctgatccccagcgacagcagcaccgagctgacccagaccgtgctggagggcgagagcatcagctgcttccaggtgggcggcgagaagagactgtgcctgccccaggtgctgaacagcgtgctgagagagttcaccctgcagcagatcaacaccgtgtgcgacgagctgtacatctactgcagcagatgcaccagcgaccagctgcacatcctgaaggtgctgggcatcctgcccttcaacgcccccagctgcggcctgatcaccctgaccgacgcccagagactgtgcaacgccctgctgagacccagaaccttcccccagaacggcagcgtgctgcccgccaagagcagcctggcccagctgaaggagaccggcagcgccttcgaggtggagcacgagtgcctgggcaagtgccagggcctgttcgccccccagttctacgtgcagcccgacgccccctgcatccagtgcctggagtgctgcggcatgttcgccccccagaccttcgtgatgcacagccacagaagccccgacaagagaacctgccactggggcttcgagagcgccaagtggcactgctacctgcacgtgaaccagaagtacctgggcacccccgaggagaagaagctgaagatcatcctggaggagatgaaggagaagttcagcatgagaagcggcaagagaaaccagagcaagaccgacgcccccagcggcatggagctgcagagctggtaccccgtgatcaagcaggagggcgaccacgtgagccagacccacagcttcctgcaccccagctactacctgtacatgtgcgacaaggtggtggcccccaacgtgagcctgaccagcgccgtgagccagagcaaggagctgaccaagaccgaggccagcaagagcatcagcagacagagcgagaaggcccacagcagcggcaagctgcagaagaccgtgagctaccccgacgtgagcctggaggagcaggagaagatggacctgaagaccagcagagagctgtgcagcagactggacgccagcatcagcaacaacagcaccagcaagagaaagagcgagagcgccacctgcaacctggtgagagacatcaacaaggtgggcatcggcctggtggccgccgccagcagccccctgctggtgaaggacgtgatctgcgaggacgacaagggcaagatcatggaggaggtgatgagaacctacctgaagcagcaggagaagctgaacctgatcctgcagaagaagcagcagctgcagatggaggtgaagatgctgagcagcagcaagagcatgaaggagctgaccgaggagcagcagaacctgcagaaggagctggagagcctgcagaacgagcacgcccagagaatggaggagttctacgtggagcagaaggacctggagaagaagctggagcagatcatgaagcagaagtgcacctgcgacagcaacctggagaaggacaaggaggccgagtacgccggccagctggccgagctgagacagagactggaccacgccgaggccgacagacaggagctgcaggacgagctgagacaggagagagaggccagacagaagctggagatgatgatcaaggagctgaagctgcagatcctgaagagcagcaagaccgccaaggagtag

SEQ ID NO: 87879 - protein, 234 aa, Artificial Sequence
  derived and/or modified sequence
MDPGLQQALNGMAPPGDTAMHVPAGSVASHLGTTSRSYFYLTTATLALCLVFTVATIMVLVVQRTDSIPNSPDNVPLKGGNCSEDLLCILKRAPFKKSWAYLQVAKHLNKTKLSWNKDGILHGVRYQDGNLVIQFPGLYFIICQLQFLVQCPNNSVDLKLELLINKHIKKQALVTVCESGMQTKHVYQNLSQFLLDYLQVNTTISVNVDTFQYIDTSTFPLENVLSIFLYSNSD

SEQ ID NO: 87880 - DNA, 1906 bp, Artificial Sequence
  derived and/or modified sequence
ccaagtcacatgattcaggattcagggggagaatccttcttggaacagagatgggcccagaactgaatcagatgaagagagataaggtgtgatgtggggaagactatataaagaatggacccagggctgcagcaagcactcaacggaatggcccctcctggagacacagccatgcatgtgccggcgggctccgtggccagccacctggggaccacgagccgcagctatttctatttgaccacagccactctggctctgtgccttgtcttcacggtggccactattatggtgttggtcgttcagaggacggactccattcccaactcacctgacaacgtccccctcaaaggaggaaattgctcagaagacctcttatgtatcctgaaaagggctccattcaagaagtcatgggcctacctccaagtggcaaagcatctaaacaaaaccaagttgtcttggaacaaagatggcattctccatggagtcagatatcaggatgggaatctggtgatccaattccctggtttgtacttcatcatttgccaactgcagtttcttgtacaatgcccaaataattctgtcgatctgaagttggagcttctcatcaacaagcatatcaaaaaacaggccctggtgacagtgtgtgagtctggaatgcaaacgaaacacgtataccagaatctctctcaattcttgctggattacctgcaggtcaacaccaccatatcagtcaatgtggatacattccagtacatagatacaagcacctttcctcttgagaatgtgttgtccatcttcttatacagtaattcagactgaacagtttctcttggccttcaggaagaaagcgcctctctaccatacagtatttcatccctccaaacacttgggcaaaaagaaaactttagaccaagacaaactacacagggtattaaatagtatacttctccttctgtctcttggaaagatacagctccagggttaaaaagagagtttttagtgaagtatctttcagatagcaggcagggaagcaatgtagtgtggtgggcagagccccacacagaatcagaagggatgaatggatgtcccagcccaacctctaattcactgtatggtcttgatctatttcttctgttttgagagcctccagttaaaatggggctccagtaccagagcagctagcaactctgccctaatgggaaatgaaggggagctgggtgtgagtgtttacactgtgcccttcacgggatacttcttttatctgcagatggcctaatacttagttgtccaagtcgcgatcaaggactctctcacacaggaaacttccctatactggcagatacacttgtgactgaaccatgcccagtttatgcctgtctgactgtcactctggcactaggaggctgatcttgtactccatatgaccccacccctaggaacccccagggaaaaccaggctgggacagccccctgttcctgagatggaaagcacaaatttaatacaccaccacaatggaaaacaagttcaaagacttttacttacagatcctggacagaaagggcataatgagtctgaagggcagtcctccttctctaggttacatgaggcaggaataagaagtcagacagagacagcaagacagttaacaatgtaggtaaagaaatagggtgtggtcactctcaattcactggcaaatgcctgaatggtctgtctgaaggaagcaacagagaagtggggaatccagtctgctaggcaggaaagatgcctctaagttcttgtctctggccagaggtgtggtatagaaccagaaacccatatcaagggtgactaagcccggcttctggtatgagaaattaaacttgtatacaaaatggttgccaaggcaacataaaattataagaattc

SEQ ID NO: 87881 - DNA, 705 bp, Artificial Sequence
  derived and/or modified sequence
atggatcccggactgcagcaggctctcaacgggatggcccccccgggtgatactgcaatgcacgtgcccgctggcagcgtggcttcccacctggggaccacctccaggtcttatttctatttaacgacagccacgttagcgctctgcctggtgtttactgttgcgacgattatggtacttgtagtccagcgtacagatagtataccgaacagtccggacaatgtccccctgaagggaggcaactgttcagaggatctactctgtattctgaaaagggccccctttaaaaagagttgggcatatctgcaggtggctaaacacctgaacaagacaaagctgtcatggaataaagatggcatactgcacggcgtgaggtatcaagacggcaacctggtaatccagtttccaggcctgtattttattatctgccagctgcaattcctcgttcaatgcccaaacaactccgttgacttaaagctggagcttctgatcaacaaacacattaagaagcaggccctggtgaccgtgtgtgagtcgggcatgcagactaagcacgtctatcagaacctgtcccaatttcttctcgactatctccaggtgaatacgaccattagcgtgaatgttgacacgtttcagtacattgacacgagtacatttccattagaaaatgtgctgtcaatctttctgtactccaacagcgattag

SEQ ID NO: 87882 - DNA, 705 bp, Artificial Sequence
  derived and/or modified sequence
atggaccccggcctgcagcaggccctgaatggcatggcccctcctggggacacagccatgcacgtgcctgctggctctgtggccagccacctgggcaccaccagccgcagctacttctacctgaccacagccaccctggccctgtgcctggtgttcaccgtggccaccatcatggtgctggtggtgcagaggacagacagcatccccaacagcccagacaacgtgcccctgaagggcggcaactgcagcgaggacctgctgtgcatcctgaagagggcccccttcaagaagtcctgggcctacctgcaggtggccaagcacctgaacaagaccaagctgtcctggaacaaggatggcatcctgcacggcgtgcgctaccaggacggcaacctggtgatccagtttcctggcctgtacttcatcatctgccagctgcagttcctggtgcagtgccccaacaacagcgtggacctgaagctggagctgctgatcaacaagcacatcaagaagcaggccctggtgacagtgtgtgagagcggcatgcagaccaagcacgtgtaccagaacctgagccagttcctgctggactacctgcaggtgaacaccaccatctctgtgaatgtggacaccttccagtacatcgacaccagcaccttccccctggagaatgtgctgagcatcttcctgtacagcaacagcgactag

SEQ ID NO: 87883 - DNA, 705 bp, Artificial Sequence
  derived and/or modified sequence
atggaccccggcctgcagcaggccctgaacggcatggccccccccggcgataccgccatgcatgttcctgcaggctctgtggcctctcatctagggacaacctctcgtagttacttctatctcaccacggccacacttgctctgtgtctggttttcaccgtggccacgataatggtcttggttgttcagcggactgatagcattccaaattccccggataacgttccgctaaagggtgggaactgttctgaagatctgctgtgcattctgaagcgggctccctttaagaaaagctgggcttatctgcaggttgctaaacatttgaataaaacaaagctgtcatggaacaaagacggaatcttgcacggggtcagatatcaagacggtaacttagttatccagttcccaggtttatactttataatctgtcagctgcagttcctcgtccaatgtcctaacaacagcgtagacctcaaactcgaactattaattaacaagcacattaaaaaacaggcactggtcaccgtctgcgagtccgggatgcaaaccaaacatgtttaccagaatctcagccagttcctgctggactacctgcaggtcaataccaccatcagcgttaatgtggacacatttcaatatattgacacatctactttccccttggagaatgtcctgagcatcttcttgtacagtaacagtgattag

SEQ ID NO: 87884 - DNA, 705 bp, Artificial Sequence
  derived and/or modified sequence
atggaccccggactgcagcaggctttgaatggcatggctcctcctggggacactgcaatgcacgttccagccggatccgtggcctcacatctgggaaccactagccggtcatacttttatctgacaacagctactctggctctctgcctcgtgtttaccgttgccacaatcatggtcctcgtcgtacagaggaccgatagtatccccaatagccctgacaacgtgccgctaaaaggcggaaattgtagtgaagacttgctctgcatattgaagcgggcaccctttaagaaatcctgggcctatctgcaggtagccaaacacttgaataagacaaaactgagctggaataaagacggcatcctgcacggggtccggtatcaggatggaaatctggtgatacagtttccgggactatatttcatcatttgccagctgcagttcttggttcagtgtcccaataatagcgtggatcttaaactcgagctgctaattaacaagcacatcaagaaacaggccctagtgactgtatgcgagtctgggatgcagacaaaacatgtgtaccaaaatctgtctcagttcctgctcgattatctccaggtgaacactaccatctccgtcaatgttgatacatttcagtacattgacacgagcaccttcccactagaaaatgtgttgagtatttttttatatagtaattccgattag

SEQ ID NO: 87885 - DNA, 705 bp, Artificial Sequence
  derived and/or modified sequence
atggaccccggcctgcagcaggccctgaacggcatggccccccccggcgacaccgccatgcacgtgcccgccggcagcgtggccagccacctgggcaccaccagcagaagctacttctacctgaccaccgccaccctggccctgtgcctggtgttcaccgtggccaccatcatggtgctggtggtgcagagaaccgacagcatccccaacagccccgacaacgtgcccctgaagggcggcaactgcagcgaggacctgctgtgcatcctgaagagagcccccttcaagaagagctgggcctacctgcaggtggccaagcacctgaacaagaccaagctgagctggaacaaggacggcatcctgcacggcgtgagataccaggacggcaacctggtgatccagttccccggcctgtacttcatcatctgccagctgcagttcctggtgcagtgccccaacaacagcgtggacctgaagctggagctgctgatcaacaagcacatcaagaagcaggccctggtgaccgtgtgcgagagcggcatgcagaccaagcacgtgtaccagaacctgagccagttcctgctggactacctgcaggtgaacaccaccatcagcgtgaacgtggacaccttccagtacatcgacaccagcaccttccccctggagaacgtgctgagcatcttcctgtacagcaacagcgactag

SEQ ID NO: 87886 - protein, 472 aa, Artificial Sequence
  derived and/or modified sequence
MAGKVRSLLPPLLLAAAGLAGLLLLCVPTRDVREPPALKYGIVLDAGSSHTSMFIYKWPADKENDTGIVGQHSSCDVPGGGISSYADNPSGASQSLVGCLEQALQDVPKERHAGTPLYLGATAGMRLLNLTNPEASTSVLMAVTHTLTQYPFDFRGARILSGQEEGVFGWVTANYLLENFIKYGWVGRWFRPRKGTLGAMDLGGASTQITFETTSPAEDRASEVQLHLYGQHYRVYTHSFLCYGRDQVLQRLLASALQTHGFHPCWPRGFSTQVLLGDVYQSPCTMAQRPQNFNSSARVSLSGSSDPHLCRDLVSGLFSFSSCPFSRCSFNGVFQPPVAGNFVAFSAFFYTVDFLRTSMGLPVATLQQLEAAAVNVCNQTWAQQLLSRGYGFDERAFGGVIFQKKAADTAVGWALGYMLNLTNLIPADPPGLRKGTDFSSWVVLLLLFASALLAALVLLLRQVHSAKLPSTI

SEQ ID NO: 87887 - DNA, 1419 bp, Artificial Sequence
  derived and/or modified sequence
atggccggcaaagtgcgatctctcctgcctccactactgttggcagcggccgggcttgcagggcttcttctgttatgcgttcccactagagacgtgcgggagccacctgctctcaaatatggtatcgtactggatgcaggctcgtcacatacaagcatgtttatatacaagtggccagctgacaaggagaacgatacagggatcgtgggccaacactcttcctgcgacgtcccaggcgggggcatatcgagctacgctgataacccaagtggcgcatcccaatcattagtgggttgcctcgaacaggcccttcaagacgtaccaaaggagagacacgcggggacgcccctctacttgggcgcgactgcaggtatgaggctgctgaatctcacaaacccggaggccagcactagcgtgctgatggccgtgacccatacactgactcagtaccccttcgattttaggggagcacgaatattaagcggacaagaggagggagtcttcggctgggtgaccgccaactatcttttagagaattttattaagtatggttgggtaggacgctggtttcggcctcgtaaaggaaccctcggcgccatggacctaggaggcgcttcaacccagattacatttgaaacaacaagcccagcagaagatcgggcttccgaagtgcagctacatctgtacggtcagcactaccgggtgtatacacattcctttttatgttacggacgggaccaggtgctccagcggctgttagcctctgccctgcagactcacggatttcatccgtgttggcccaggggattctctacccaagtgctcctgggagacgtttaccaaagtccttgcacgatggcccagcgccctcaaaacttcaatagcagtgcaagggtctccctgtccggctcttctgacccccatctctgccgggacttggtgtcggggctcttctctttcagttcttgtcctttctccagatgtagttttaatggagtgtttcagcccccagtggccggaaattttgtggcgttctcggcattcttttataccgtggactttctgcgcacatcaatgggtctacctgtcgcaactctgcaacagctggaagcagcagctgtgaatgtgtgcaaccagacttgggcccagcagctgctctcacgggggtatggctttgacgaacgcgcgttcggcggagtgatatttcagaaaaaagctgcggacaccgccgttggatgggcgctgggctacatgctgaacttgacgaatctgatccccgccgaccctcccggcctccgaaagggcaccgatttctcttcttgggttgtgctactcctcctgttcgccagtgccctcctggctgccctcgttctcctacttcggcaggtgcattcagcaaagctgccctcaactatatag

SEQ ID NO: 87888 - DNA, 1419 bp, Artificial Sequence
  derived and/or modified sequence
atggccggcaaggtgcgcagcctgctgccccccctgctgctggccgctgctggcctggccggcctgctgctgctgtgtgtgcccaccagagatgtgcgggagcccccagccctgaagtatggcatcgtgctggatgctggcagcagccacacctccatgttcatctacaagtggccagctgacaaggaaaatgacaccggcatcgtgggccagcacagcagctgtgatgtgcctgggggcggcatcagcagctatgctgacaaccccagcggggccagccagagcctggtgggctgcctggagcaggccctgcaggatgtgcccaaggagagacatgctggcacccccctgtacctgggcgccacagctggcatgaggctgctgaacctgaccaaccctgaggccagcacctctgtgctgatggctgtgacccacaccctgacccagtacccctttgacttccggggggcccgcatcctgagcggccaggaggagggcgtgtttggctgggtgacagccaactacctgctggagaacttcatcaagtatggctgggtgggccgctggttccggcccaggaagggcaccctgggcgccatggacctgggcggggccagcacccagatcacctttgagaccaccagccctgctgaggaccgggccagcgaggtgcagctgcacctgtatggccagcactacagagtgtacacccacagcttcctgtgctacggccgggaccaggtgctgcagaggctgctggccagcgccctgcagacccacggcttccacccctgctggccccggggcttcagcacccaggtgctgctgggagatgtgtaccagagcccctgcaccatggcccagaggccccagaacttcaacagcagcgcccgggtgtccctgagcggcagcagtgacccccacctgtgccgggacctggtgtctggcctcttctccttcagcagctgccccttcagccgctgcagcttcaatggagtcttccagccccctgtggccggcaactttgtggccttcagcgccttcttctacacagtggacttcctgcggacctccatgggcctgcctgtggccaccctgcagcagctggaggccgctgctgtgaatgtgtgcaaccagacctgggcccagcagctgctgagccggggctacggctttgatgagcgggcctttggaggagtcatcttccagaagaaggctgctgacacagctgtgggctgggccctgggctacatgctgaacctgaccaacctgatcccagctgaccccccaggcctgaggaagggcacagacttcagctcctgggtggtgctgctgctgctgtttgccagcgccctgctggccgccctggtgctgctgctgcggcaggtgcacagcgccaagctgcccagcaccatctag

SEQ ID NO: 87889 - DNA, 1419 bp, Artificial Sequence
  derived and/or modified sequence
atggccggcaaggtgcggagcctgctgccccccctgctgctggccgctgccgggctggctgggcttttgcttctgtgtgtgccaaccagagacgtgcgcgagccaccggccctcaagtatggcattgtgctagacgcaggctcctctcacacaagcatgttcatttacaaatggcccgcagataaggagaatgataccggcatagttggacaacactcaagctgcgatgttccaggaggggggatttctagctacgccgataaccctagcggcgcctctcaatcattagtcgggtgtttagaacaagcgttacaggacgtgccaaaggaacgccacgccggcacccccctctacctaggggccactgccgggatgaggctacttaacctgacaaacccagaagctagtacctccgtgctcatggcggtgacccacacactgacccagtacccttttgactttagaggggctaggattctgtcaggacaggaggaaggggtgttcgggtgggtgacagcgaattatcttttggagaattttattaaatatggatgggtgggccgctggttcaggccgagaaaagggactctgggtgctatggatctggggggcgcatcgacccagattactttcgaaactacctctcccgccgaagatcgcgcgtccgaagtgcagcttcatctgtatggacagcactatcgggtttacacacattcgttcctatgttatggccgggaccaggtcctccagcggttgttagccagcgccctgcagacgcatggcttccacccctgctggccccgcgggttctctacacaggtgctgctcggcgacgtttaccaatccccatgcactatggctcagagaccacaaaacttcaatagttcagctagggtcagtctaagtgggtcctcagacccccacctttgccgggacttggttagcggtctgttctctttttccagttgtccattctcaagatgttccttcaacggcgtctttcagccacccgtggccggaaatttcgtcgccttctccgcttttttctacactgtggactttttaaggaccagtatgggactgcctgtggctacgttgcagcagcttgaggcggctgccgtaaatgtctgtaaccagacttgggctcagcaactcctgagccggggttatgggttcgatgaaagggccttcggcggagtcatttttcagaagaaagccgccgacaccgcagtggggtgggcactaggctatatgctgaatctgaccaacttgatcccggcagatccccctgggcttagaaagggcacagattttagctcatgggtcgttctgctcctcttgtttgcatcggccttgctggccgcactggtgctgctgctgcgacaggtgcacagcgcaaagctgcctagcaccatatag

SEQ ID NO: 87890 - DNA, 1419 bp, Artificial Sequence
  derived and/or modified sequence
atggccggtaaggtcaggtctctcctccctccgctcttacttgcagccgctgggcttgctggcctactgctgctatgtgttcccacccgcgatgtgagagagcctcctgcccttaagtacggtattgtgctcgacgcaggctcttcccacacctctatgtttatttataagtggccagccgacaaggagaacgacaccgggatcgttgggcaacatagctcctgtgacgtgccagggggtggtatttcgagctacgcagacaacccgtccggtgctagccagtcactggttggttgtctggagcaggctctgcaggacgtacccaaggagaggcatgcaggcacaccactctacttaggagccactgcaggcatgagactgctgaatctgacaaatcccgaggcaagcaccagtgtactgatggcagtgacacatactctgacgcagtaccccttcgattttagaggcgctcgtatcttgagcgggcaagaggagggcgttttcggttgggtgaccgcgaactatctcttggaaaatttcattaaatatggttgggtgggtagatggtttagaccaagaaagggaaccctgggagccatggacttgggaggcgctagcacccagattacgtttgagacaaccagtcccgctgaggatcgggcatctgaggtgcaactgcacctgtacgggcaacactaccgagtgtatacacactcatttctatgctatggcagggatcaggttttacagcgcctcctggccagcgccctgcagacccatggattccacccatgttggccacggggattctccacacaagtgctgctgggcgatgtgtatcagtccccttgtactatggcccaacggcctcagaacttcaactctagtgccagagtttctctgagtggatcctcagatccccatctatgccgggatctagtgagcgggctgttcagtttctcaagctgtcccttctctcggtgttccttcaatggggtgtttcagcctccagtggccggaaactttgttgccttctctgcttttttctatacagtggacttcctgaggacctctatgggtcttcctgtggccacattgcagcagctcgaggcagccgcagtgaatgtgtgtaaccagacttgggctcagcagctcctgtcaagaggatacggattcgacgaacgggcatttggaggtgtgatctttcagaagaaggccgcagacacggcagtcggttgggcccttgggtatatgttgaacctgaccaacctcatcccagctgaccccccaggcctgagaaaaggtactgacttcagttcctgggttgtcttgctcctcttatttgcctccgcgctgttggcagctttggttcttttgttaaggcaggtgcacagcgctaagctgccgagtactatttag

SEQ ID NO: 87891 - DNA, 1419 bp, Artificial Sequence
  derived and/or modified sequence
atggccggcaaggtgagaagcctgctgccccccctgctgctggccgccgccggcctggccggcctgctgctgctgtgcgtgcccaccagagacgtgagagagccccccgccctgaagtacggcatcgtgctggacgccggcagcagccacaccagcatgttcatctacaagtggcccgccgacaaggagaacgacaccggcatcgtgggccagcacagcagctgcgacgtgcccggcggcggcatcagcagctacgccgacaaccccagcggcgccagccagagcctggtgggctgcctggagcaggccctgcaggacgtgcccaaggagagacacgccggcacccccctgtacctgggcgccaccgccggcatgagactgctgaacctgaccaaccccgaggccagcaccagcgtgctgatggccgtgacccacaccctgacccagtaccccttcgacttcagaggcgccagaatcctgagcggccaggaggagggcgtgttcggctgggtgaccgccaactacctgctggagaacttcatcaagtacggctgggtgggcagatggttcagacccagaaagggcaccctgggcgccatggacctgggcggcgccagcacccagatcaccttcgagaccaccagccccgccgaggacagagccagcgaggtgcagctgcacctgtacggccagcactacagagtgtacacccacagcttcctgtgctacggcagagaccaggtgctgcagagactgctggccagcgccctgcagacccacggcttccacccctgctggcccagaggcttcagcacccaggtgctgctgggcgacgtgtaccagagcccctgcaccatggcccagagaccccagaacttcaacagcagcgccagagtgagcctgagcggcagcagcgacccccacctgtgcagagacctggtgagcggcctgttcagcttcagcagctgccccttcagcagatgcagcttcaacggcgtgttccagccccccgtggccggcaacttcgtggccttcagcgccttcttctacaccgtggacttcctgagaaccagcatgggcctgcccgtggccaccctgcagcagctggaggccgccgccgtgaacgtgtgcaaccagacctgggcccagcagctgctgagcagaggctacggcttcgacgagagagccttcggcggcgtgatcttccagaagaaggccgccgacaccgccgtgggctgggccctgggctacatgctgaacctgaccaacctgatccccgccgacccccccggcctgagaaagggcaccgacttcagcagctgggtggtgctgctgctgctgttcgccagcgccctgctggccgccctggtgctgctgctgagacaggtgcacagcgccaagctgcccagcaccatctag

SEQ ID NO: 87892 - DNA, 1500 bp, Artificial Sequence
  derived and/or modified sequence
ctcccgcgcgcccgcccgcccatggccgggaaggtgcggtcactgctgccgccgctgctgctggccgccgcgggcctcgccggcctcctactgctgtgcgtccccacccgcgacgtccgggagccgcccgccctcaagtatggcatcgtcctggacgctggttcttcacacacgtccatgtttatctacaagtggccggcagacaaggagaacgacacaggcattgtgggccagcacagctcctgtgatgttccaggtgggggcatctccagctatgcagacaacccttctggggccagccagagtcttgttggatgcctcgaacaggcgcttcaggatgtgcccaaagagagacacgcgggcacacccctctacctgggagccacagcgggtatgcgcctgctcaacctgaccaatccagaggcctcgaccagtgtgctcatggcagtgactcacacactgacccagtacccctttgacttccggggtgcacgcatcctctcgggccaggaagagggggtgtttggctgggtgactgccaactacctgctggagaacttcatcaagtacggctgggtgggccggtggttccggccacggaaggggacactgggggccatggacctggggggtgcctctacccagatcacttttgagacaaccagtccagctgaggacagagccagcgaggtccagctgcatctctacggccagcactaccgagtctacacccacagcttcctctgctatggccgtgaccaggtcctccagaggctgctggccagcgccctccagacccacggcttccacccctgctggccgaggggcttttccacccaagtgctgctcggggatgtgtaccagtcaccatgcaccatggcccagcggccccagaacttcaacagcagtgccagggtcagcctgtcagggagcagtgacccccacctctgccgagatctggtttctgggctcttcagcttctcctcctgccccttctcccgatgctctttcaatggggtcttccagcccccagtggctgggaactttgtggccttctctgccttcttctacactgtggactttttgcggacttcgatggggctgcccgtggccaccctgcagcagctggaggcagccgcagtgaatgtctgcaaccagacctgggctcagcagctgctgagtcgcggctacggcttcgacgagcgcgccttcggcggcgtgatcttccagaagaaggccgcggacactgcagtgggctgggcgctcggctacatgctgaacctgaccaacctgatccccgccgacccgccggggctgcgcaagggcacagacttcagctcctgggtcgtcctcctgctgctcttcgcctccgcgctcctggctgcgcttgtcctgctgctgcgtcaggtgcactccgccaagctgccaagcaccatttaggggccgacgggggcagctgccccatccctcccccaacccctgtatccccaccccgtactc

SEQ ID NO: 87893 - protein, 273 aa, Artificial Sequence
  derived and/or modified sequence
MRIAVICFCLLGITCAIPVKQADSGSSEEKQTLPSKSNESHDHMDDMDDEDDDDHVDSQDSIDSNDSDDVDDTDDSHQSDESHHSDESDELVTDFPTDLPATEVFTPVVPTVDTYDGRGDSVVYGLRSKSKKFRRPDIQYPDATDEDITSHMESEELNGAYKAIPVAQDLNAPSDWDSRGKDSYETSQLDDQSAETHSHKQSRLYKRKANDESNEHSDVIDSQELSKVSREFHSHEFHSHEDMLVVDPKSKEEDKHLKFRISHELDSASSEVN

SEQ ID NO: 87894 - DNA, 822 bp, Artificial Sequence
  derived and/or modified sequence
atgagaatcgccgtgatctgcttctgcctgctgggcatcacctgcgccatccccgtgaagcaggccgacagcggcagcagcgaggagaagcagaccctgcccagcaagagcaacgagagccacgaccacatggacgacatggacgacgaggacgacgacgaccacgtggacagccaggacagcatcgacagcaacgacagcgacgacgtggacgacaccgacgacagccaccagagcgacgagagccaccacagcgacgagagcgacgagctggtgaccgacttccccaccgacctgcccgccaccgaggtgttcacccccgtggtgcccaccgtggacacctacgacggcagaggcgacagcgtggtgtacggcctgagaagcaagagcaagaagttcagaagacccgacatccagtaccccgacgccaccgacgaggacatcaccagccacatggagagcgaggagctgaacggcgcctacaaggccatccccgtggcccaggacctgaacgcccccagcgactgggacagcagaggcaaggacagctacgagaccagccagctggacgaccagagcgccgagacccacagccacaagcagagcagactgtacaagagaaaggccaacgacgagagcaacgagcacagcgacgtgatcgacagccaggagctgagcaaggtgagcagagagttccacagccacgagttccacagccacgaggacatgctggtggtggaccccaagagcaaggaggaggacaagcacctgaagttcagaatcagccacgagctggacagcgccagcagcgaggtgaactag

SEQ ID NO: 87895 - DNA, 822 bp, Artificial Sequence
  derived and/or modified sequence
atgaggatcgcggttatctgtttttgcctgttggggattacctgcgccatccctgtgaagcaggctgattccggctcgagcgaggaaaagcagaccctgcccagtaagagcaacgagtcccacgaccatatggatgacatggacgatgaggacgatgacgaccatgttgattcgcaggacagcatagactcaaacgatagcgacgatgtcgacgacaccgacgactcacatcaatcggatgagtcccatcactcagacgaatcagacgagctggtgacagacttccccacagacctgccagcgacggaggtcttcactcccgtggtccccacagttgatacctacgatggacgcggcgactcagttgtgtatgggctgcgcagtaaatcaaaaaaattcagaaggcctgacatccagtacccagacgctactgatgaggatatcacatcccacatggaaagcgaggagctgaacggagcctataaggccattccggttgcccaggacctcaatgccccaagtgattgggattccaggggcaaggactcttacgagaccagtcagctcgatgaccaatccgccgaaacccacagccacaagcaaagtcggttatataaaaggaaggccaatgacgagagcaacgaacacagcgacgtgatcgactcacaggaactgagtaaagtgtcaagggagtttcatagccatgagttccatagtcacgaagatatgctggttgtagacccaaagtctaaagaggaagataagcaccttaaattcaggatctcccatgagctagactcagcctctagtgaggtaaattag

SEQ ID NO: 87896 - DNA, 822 bp, Artificial Sequence
  derived and/or modified sequence
atgagaattgctgtgatctgcttctgcctgctgggcatcacctgtgccatccctgtgaagcaggccgacagcggcagcagcgaggagaagcagaccctgcccagcaagagcaatgaaagccatgaccacatggatgacatggatgatgaagatgatgatgaccacgtggacagccaggacagcattgacagcaatgacagtgatgatgtggatgacacagatgacagccaccagagtgatgagagccaccacagtgatgaaagtgatgagctggtgacagacttccccacagacctgcctgccacagaggtgttcacccctgtggtgcccaccgtggacacctatgatggccgcggggacagcgtggtgtatggcctgcggagcaagagcaagaagttccggcggccagacatccagtacccagatgccacagatgaggacatcaccagccacatggagagcgaggagctgaatggagcctacaaggccatccctgtggcccaggacctgaatgcccccagcgactgggacagccggggcaaggacagctatgagaccagccagctggatgaccagagcgctgagacccacagccacaagcagagccggctgtacaagaggaaggccaatgatgagagcaatgagcacagtgatgtgattgacagccaggagctgagcaaggtgtcccgggagttccacagccatgagttccacagccatgaggacatgctggtggtggaccccaagagcaaggaggaggacaagcacctgaagttccgcatcagccatgagctggacagcgccagcagcgaggtgaactag

SEQ ID NO: 87897 - DNA, 822 bp, Artificial Sequence
  derived and/or modified sequence
atgcggatcgccgtgatctgcttctgcctgctgggcatcacctgcgccatacccgtgaaacaggctgactccggcagctctgaagaaaaacagaccttgccttcaaagtctaatgagtcccatgaccacatggacgatatggacgatgaagatgacgatgatcacgtcgattcccaagactcgatcgatagtaatgacagcgacgatgtggatgatactgacgacagccatcagagcgacgaatcacatcactcagacgagtcagatgagctggttacagactttccaaccgacctgcctgccaccgaagtgttcacacctgtagtccctaccgtcgatacctatgatggccggggagactctgtggtctatggcctgaggtcgaagagtaagaagttccggcgacctgacatacaatacccagatgcaaccgacgaggacataacgtcgcacatggagagtgaggaactgaacggagcctataaagcaattccagttgctcaggacctaaacgccccatccgactgggacagcagaggcaaagatagctatgaaacctcccagttagatgatcagagcgccgaaactcattcacacaagcagtctcgcctgtataaacggaaagctaatgacgaatcaaatgagcacagcgacgtgatcgattcccaggaattgagcaaggtctccagggaattccacagtcatgagtttcattcccacgaagatatgctggtggttgatcccaagtccaaagaagaagacaagcatttgaagtttcgtatttcccacgagctggatagcgcaagcagtgaagtcaattag

SEQ ID NO: 87898 - DNA, 822 bp, Artificial Sequence
  derived and/or modified sequence
atgagaatcgccgtgatttgtttttgcctcctcgggatcacatgcgctatcccagtgaaacaggccgattccggttctagcgaggagaagcagacccttccaagcaaatccaacgagtcccacgaccacatggacgatatggatgatgaggacgacgacgatcatgtcgattcccaagattctattgacagcaatgattcagacgatgtcgacgacaccgatgactcccaccagtccgacgagtctcaccacagtgatgaaagcgatgagctcgtcaccgactttcctaccgatctgccggcaactgaagtatttacccctgtggtgccgacagtcgacacctatgacgggcgtggtgatagtgtggtgtacggcctgcgttccaagtctaagaagtttcggaggcccgatatacagtacccggatgccactgatgaagacatcacaagccacatggagtccgaggaattaaacggtgcatataaggcgatcccggtggctcaggatctgaatgcacctagcgactgggattctcgcggaaaagactcatacgagacttcccaactggatgaccaatctgctgagacccactcccataaacagagcaggctttataaacggaaggccaacgacgagtccaacgaacacagtgatgtcatcgacagccaggagctgtccaaagtgtcccgggaatttcatagccacgagtttcattcacatgaagacatgttggtagtagatccaaagagcaaagaggaggacaagcacctgaaatttcgtatttcacatgaattggatagcgcctcatcggaggtcaattag

SEQ ID NO: 87899 - DNA, 1501 bp, Artificial Sequence
  derived and/or modified sequence
ctccctgtgttggtggaggatgtctgcagcagcatttaaattctgggagggcttggttgtcagcagcagcaggaggaggcagagcacagcatcgtcgggaccagactcgtctcaggccagttgcagccttctcagccaaacgccgaccaaggaaaactcactaccatgagaattgcagtgatttgcttttgcctcctaggcatcacctgtgccataccagttaaacaggctgattctggaagttctgaggaaaagcagacccttccaagtaagtccaacgaaagccatgaccacatggatgatatggatgatgaagatgatgatgaccatgtggacagccaggactccattgactcgaacgactctgatgatgtagatgacactgatgattctcaccagtctgatgagtctcaccattctgatgaatctgatgaactggtcactgattttcccacggacctgccagcaaccgaagttttcactccagttgtccccacagtagacacatatgatggccgaggtgatagtgtggtttatggactgaggtcaaaatctaagaagtttcgcagacctgacatccagtaccctgatgctacagacgaggacatcacctcacacatggaaagcgaggagttgaatggtgcatacaaggccatccccgttgcccaggacctgaacgcgccttctgattgggacagccgtgggaaggacagttatgaaacgagtcagctggatgaccagagtgctgaaacccacagccacaagcagtccagattatataagcggaaagccaatgatgagagcaatgagcattccgatgtgattgatagtcaggaactttccaaagtcagccgtgaattccacagccatgaatttcacagccatgaagatatgctggttgtagaccccaaaagtaaggaagaagataaacacctgaaatttcgtatttctcatgaattagatagtgcatcttctgaggtcaattaaaaggagaaaaaatacaatttctcactttgcatttagtcaaaagaaaaaatgctttatagcaaaatgaaagagaacatgaaatgcttctttctcagtttattggttgaatgtgtatctatttgagtctggaaataactaatgtgtttgataattagtttagtttgtggcttcatggaaactccctgtaaactaaaagcttcagggttatgtctatgttcattctatagaagaaatgcaaactatcactgtattttaatatttgttattctctcatgaatagaaatttatgtagaagcaaacaaaatacttttacccacttaaaaagagaatataacattttatgtcactataatcttttgttttttaagttagtgtatattttgttgtgattatctttttgtggtgtgaataaatcttttatcttgaatgtaataagaatttggtggtgtcaattgcttatttgttttcccacggttgtccagcaattaataaaacataaccttttttactgcct

SEQ ID NO: 87900 - protein, 144 aa, Artificial Sequence
  derived and/or modified sequence
MIWSDIKRLWYEGLEDFLEESRNQLSFVMNSLYLATFALKVVAHNKISMGQMLQDFGKFLGMFLLVLFSFTIGLTQLYDKGYTSKEQKDCVGIFCEQQSNDTFHSFIGTCFALFWYIFSLAHVAIFVTRFSYGEELQSFVGAVI

SEQ ID NO: 87901 - protein, 793 aa, Artificial Sequence
  derived and/or modified sequence
MMAALYPSTDLSGASSSSLPSSPSSSSPNEVMALKDVREVKEENTLNEKLFLLACDKGDYYMVKKILEENSSGDLNINCVDVLGRNAVTITIENENLDILQLLLDYGCQSADALLVAIDSEVVGAVDILLNHRPKRSSRPTIVKLMERIQNPEYSTTMDVAPVILAAHRNNYEILTMLLKQDVSLPKPHAVGCECTLCSAKNKKDSLRHSRFRLDIYRCLASPALIMLTEEDPILRAFELSADLKELSLVEVEFRNDYEELARQCKMFAKDLLAQARNSRELEVILNHTSSDEPLDKRGLLEERMNLSRLKLAIKYNQKEFVSQSNCQQFLNTVWFGQMSGYRRKPTCKKIMTVLTVGIFWPVLSLCYLIAPKSQFGRIIHTPFMKFIIHGASYFTFLLLLNLYSLVYNEDKKNTMGPALERIDYLLILWIIGMIWSDIKRLWYEGLEDFLEESRNQLSFVMNSLYLATFALKVVAHNKFHDFADRKDWDAFHPTLVAEGLFAFANVLSYLRLFFMYTTSSILGPLQISMGQMLQDFGKFLGMFLLVLFSFTIGLTQLYDKGYTSKEQKDCVGIFCEQQSNDTFHSFIGTCFALFWYIFSLAHVAIFVTRFSYGEELQSFVGAVIVGTYNVVVVIVLTKLLVAMLHKSFQLIANHEDKEWKFARAKLWLSYFDDKCTLPPPFNIIPSPKTICYMISSLSKWICSHTSKGKVKRQNSLKEWRNLKQKRDENYQKVMCCLVHRYLTSMRQKMQSTDQATVENLNELRQDLSKFRNEIRDLLGFRTSKYAMFYPRN

SEQ ID NO: 87902 - DNA, 2382 bp, Artificial Sequence
  derived and/or modified sequence
atgatggccgccctgtaccccagcaccgacctgagcggcgccagcagcagcagcctgcccagcagccccagcagcagcagccccaacgaggtgatggccctgaaggacgtgagagaggtgaaggaggagaacaccctgaacgagaagctgttcctgctggcctgcgacaagggcgactactacatggtgaagaagatcctggaggagaacagcagcggcgacctgaacatcaactgcgtggacgtgctgggcagaaacgccgtgaccatcaccatcgagaacgagaacctggacatcctgcagctgctgctggactacggctgccagagcgccgacgccctgctggtggccatcgacagcgaggtggtgggcgccgtggacatcctgctgaaccacagacccaagagaagcagcagacccaccatcgtgaagctgatggagagaatccagaaccccgagtacagcaccaccatggacgtggcccccgtgatcctggccgcccacagaaacaactacgagatcctgaccatgctgctgaagcaggacgtgagcctgcccaagccccacgccgtgggctgcgagtgcaccctgtgcagcgccaagaacaagaaggacagcctgagacacagcagattcagactggacatctacagatgcctggccagccccgccctgatcatgctgaccgaggaggaccccatcctgagagccttcgagctgagcgccgacctgaaggagctgagcctggtggaggtggagttcagaaacgactacgaggagctggccagacagtgcaagatgttcgccaaggacctgctggcccaggccagaaacagcagagagctggaggtgatcctgaaccacaccagcagcgacgagcccctggacaagagaggcctgctggaggagagaatgaacctgagcagactgaagctggccatcaagtacaaccagaaggagttcgtgagccagagcaactgccagcagttcctgaacaccgtgtggttcggccagatgagcggctacagaagaaagcccacctgcaagaagatcatgaccgtgctgaccgtgggcatcttctggcccgtgctgagcctgtgctacctgatcgcccccaagagccagttcggcagaatcatccacacccccttcatgaagttcatcatccacggcgccagctacttcaccttcctgctgctgctgaacctgtacagcctggtgtacaacgaggacaagaagaacaccatgggccccgccctggagagaatcgactacctgctgatcctgtggatcatcggcatgatctggagcgacatcaagagactgtggtacgagggcctggaggacttcctggaggagagcagaaaccagctgagcttcgtgatgaacagcctgtacctggccaccttcgccctgaaggtggtggcccacaacaagttccacgacttcgccgacagaaaggactgggacgccttccaccccaccctggtggccgagggcctgttcgccttcgccaacgtgctgagctacctgagactgttcttcatgtacaccaccagcagcatcctgggccccctgcagatcagcatgggccagatgctgcaggacttcggcaagttcctgggcatgttcctgctggtgctgttcagcttcaccatcggcctgacccagctgtacgacaagggctacaccagcaaggagcagaaggactgcgtgggcatcttctgcgagcagcagagcaacgacaccttccacagcttcatcggcacctgcttcgccctgttctggtacatcttcagcctggcccacgtggccatcttcgtgaccagattcagctacggcgaggagctgcagagcttcgtgggcgccgtgatcgtgggcacctacaacgtggtggtggtgatcgtgctgaccaagctgctggtggccatgctgcacaagagcttccagctgatcgccaaccacgaggacaaggagtggaagttcgccagagccaagctgtggctgagctacttcgacgacaagtgcaccctgcccccccccttcaacatcatccccagccccaagaccatctgctacatgatcagcagcctgagcaagtggatctgcagccacaccagcaagggcaaggtgaagagacagaacagcctgaaggagtggagaaacctgaagcagaagagagacgagaactaccagaaggtgatgtgctgcctggtgcacagatacctgaccagcatgagacagaagatgcagagcaccgaccaggccaccgtggagaacctgaacgagctgagacaggacctgagcaagttcagaaacgagatcagagacctgctgggcttcagaaccagcaagtacgccatgttctaccccagaaactag

SEQ ID NO: 87903 - DNA, 2382 bp, Artificial Sequence
  derived and/or modified sequence
atgatggctgcgctgtatccctctaccgacttatcaggcgcttcttcgagctctttgccctcatcccccagcagtagttccccaaacgaagttatggctcttaaagatgtgagggaggtgaaagaagagaatacactcaacgagaaactctttctcctggcttgcgacaaaggcgattattatatggtaaagaaaatcctcgaagagaactcctccggtgacctgaatataaactgtgttgacgtgcttgggcgcaacgccgtcacaatcacgatcgaaaacgagaacctcgatattctgcagttactgttggattacggttgccagtctgctgacgcactgctcgtcgccattgactcagaggtggttggagctgttgatatcctgctgaatcaccggcccaagcgcagctccaggcccacaatcgtaaagctgatggagcggatacaaaaccctgagtacagtacgactatggacgtcgctcccgtgatcctggcggcacatcgcaacaattacgagattctcacaatgctgttgaagcaggacgtctctctgcctaagcctcatgcggtgggatgcgaatgtaccctctgttcggcaaagaacaaaaaagattctctgcgacattctaggttcaggctcgacatttaccgctgcctcgccagtcccgcactcattatgctgacagaggaggaccccattctgcgcgctttcgaattgagcgccgatctgaaagagctcagcctcgtcgaagtggagttccggaacgactacgaggaactcgctaggcagtgcaagatgttcgcaaaagatttattggcacaggcccggaatagtagggaactcgaggtgattctgaaccacacctcttccgatgagccgttggacaagagaggtctgctcgaggaaaggatgaatctgagcagattgaagcttgccatcaaatacaaccagaaagagttcgtgtcacaaagcaattgccagcaattcctgaatacggtgtggttcgggcagatgagtggttatcggaggaaacccacttgtaagaaaataatgaccgtgcttaccgttgggattttctggcccgtcttatcgctgtgttacctgatagctccgaagagccagtttggacgaatcatccacacaccctttatgaagtttataattcacggagccagttattttacctttctcttgcttctcaacctgtacagcctggtctacaacgaggacaaaaagaacacaatgggcccagcgctggaacggattgattatctgctcattctgtggataattggcatgatttggtctgatattaaacggctgtggtacgaaggcctggaagactttctggaggaaagtaggaaccagctgtctttcgtgatgaatagcctgtatctggctaccttcgccctaaaagtcgtggctcacaacaagtttcatgacttcgccgatagaaaagattgggatgctttccacccaacccttgtcgccgaaggcctgtttgcttttgcaaatgtactgagttatcttcggctgttcttcatgtacaccacctcaagtattctgggccccttacagataagtatgggacagatgctccaggatttcggcaagttccttgggatgttcttgctcgtgctgttttcgttcactattggactgacccagctttatgataagggctacaccagcaaagaacaaaaggattgtgttggtatattctgcgagcagcagtcgaacgacacttttcacagcttcatcggcacctgtttcgccttgttttggtacatcttctccctggcccatgttgccatatttgtgacccggttcagttacggagaggagctgcagagttttgtgggagcagttattgtaggtacttacaacgtcgtggtggtaatagtacttactaaattgctggtggccatgctccacaaaagctttcagctcatagcaaaccacgaagacaaagagtggaaatttgcgcgagccaagctgtggctgtcatactttgacgataaatgcacgttgcccccccccttcaatatcatcccatcaccaaagactatatgttacatgatctccagcctgtccaaatggatatgttcccacacaagcaaagggaaagtgaagcgacagaactcactgaaagagtggagaaacctgaaacaaaagcgtgatgagaactaccagaaagtcatgtgttgcctcgtacaccgctacttaacaagtatgcggcagaagatgcagtcgacagaccaggccactgtggagaacttgaacgagttgaggcaggacctgagcaaattccggaacgagattcgagacctcttgggctttcggactagcaagtacgccatgttttatccgcgaaattag

SEQ ID NO: 87904 - DNA, 2382 bp, Artificial Sequence
  derived and/or modified sequence
atgatggccgccctgtaccccagcacagacctgagcggggccagcagcagcagcctgcccagcagccccagcagcagcagccccaatgaggtgatggccctgaaggatgtgcgggaggtgaaggaggagaacaccctgaatgagaagctgttcctgctggcctgtgacaagggggactactacatggtgaagaagatcctggaggagaacagcagcggggacctgaacatcaactgtgtggatgtgctgggcagaaatgctgtgaccatcaccattgaaaatgaaaacctggacatcctgcagctgctgctggactatggctgccagagcgcagatgccctgctggtggccatcgacagcgaggtggtgggcgctgtggacatcctgctgaaccaccggcccaagaggagcagccggcccaccatcgtgaagctgatggagcgcatccagaaccctgagtacagcaccaccatggatgtggcccctgtgatcctggccgcccacaggaacaactatgagatcctgaccatgctgctgaagcaggatgtgtccctgcccaagccccatgctgtgggctgtgagtgcaccctgtgcagcgccaagaacaagaaggacagcctgcggcacagccgcttccggctggacatctaccgctgcctggccagccctgccctgatcatgctgacagaggaggaccccatcctgcgggcctttgagctgtctgctgacctgaaggagctgagcctggtggaggtggagttcagaaatgactatgaggagctggcccggcagtgcaagatgtttgccaaggacctgctggcccaggccaggaacagccgggagctggaggtgatcctgaaccacaccagcagtgatgagcccctggacaagaggggcctgctggaggagaggatgaacctgagccggctgaagctggccatcaagtacaaccagaaggagtttgtgtcccagagcaactgccagcagttcctgaacacagtgtggtttggccagatgagcggctacagaaggaagcccacctgcaagaagatcatgacagtgctgactgtgggcatcttctggcctgtgctgagcctgtgctacctgattgcccccaagagccagtttggccgcatcatccacacccccttcatgaagttcatcatccacggggccagctacttcaccttcctgctgctgctgaacctgtacagcctggtgtacaatgaagacaagaagaacaccatgggccctgccctggagagaattgactacctgctgatcctgtggatcatcggcatgatctggagcgacatcaagaggctgtggtatgagggcctggaggacttcctggaggagagcaggaaccagctgagctttgtgatgaacagcctgtacctggccacctttgccctgaaggtggtggcccacaacaagttccatgactttgctgacaggaaggactgggatgccttccaccccaccctggtggccgagggcctgtttgcctttgccaacgtgctgagctacctgcggctcttcttcatgtacaccaccagcagcatcctgggccccctgcagatctccatgggccagatgctgcaggactttgggaagttcctgggcatgttcctgctggtgctcttctccttcaccatcggcctgacccagctgtatgacaagggctacaccagcaaggagcagaaggactgtgtgggcatcttctgtgagcagcagagcaatgacaccttccacagcttcatcggcacctgctttgccctcttctggtacatcttcagcctggcccacgtggccatctttgtgacccgcttctcctatggagaggagctgcagagctttgtgggcgctgtgattgtgggcacctacaacgtggtggtggtgattgtgctgaccaagctgctggtggccatgctgcacaagagcttccagctgattgccaaccacgaggacaaggagtggaagtttgcccgggccaagctgtggctgagctactttgatgacaagtgcaccctgcccccacccttcaacatcatccccagccccaagaccatctgctacatgatcagcagcctgagcaagtggatctgcagccacaccagcaagggcaaggtgaagaggcagaacagcctgaaggagtggaggaacctgaagcagaagagagatgagaactaccagaaggtgatgtgctgcctggtgcaccgctacctgacctccatgaggcagaagatgcagagcacagaccaggccaccgtggagaacctgaatgagctgcggcaggacctgagcaagttcagaaatgagatccgggacctgctgggcttccgcaccagcaaatatgccatgttctaccccaggaactag

SEQ ID NO: 87905 - DNA, 2382 bp, Artificial Sequence
  derived and/or modified sequence
atgatggccgccctgtaccccagcaccgacctgagcggcgccagctcatccagcttaccctcctccccctccagttcatcacctaatgaagtaatggccctgaaagacgtgagggaagtgaaagaagagaatactttgaacgaaaagctgttcctgttggcatgcgataagggtgattattatatggtgaaaaagattttggaagaaaattcttcgggagacctgaatattaattgcgtggatgttttgggccgcaacgccgtgaccattactatcgagaatgagaatttagacatacttcagcttctcctggattacggatgtcagtccgccgatgcgcttctcgtggccattgattccgaagtggtcggagccgttgacatcctgctcaaccatagacccaagagatcctcacgccccactatcgtcaaactgatggagagaatccagaacccagagtactccaccacaatggatgtggccccagtgatcctggctgcccatcgcaacaattacgagattttaacaatgttgttaaagcaggacgtatctctgcccaagccccacgcggtcggatgcgagtgtaccctgtgcagtgccaaaaacaaaaaggattccctgcgtcactcacgctttcgcctggacatttatcgatgtctggcctcccccgccctgattatgcttaccgaggaggaccctatcttgcgcgctttcgagctttccgcagacctcaaggagctgagcctggtcgaggtcgagttcaggaacgactacgaagagctagcgaggcagtgtaaaatgttcgctaaagacctgctggcacaggcccggaacagtagagaactggaagtgattctgaatcacacgagcagcgatgaacctctggacaaacgtggactgctcgaagaaaggatgaatctcagccggctgaagctagccataaagtataaccagaaggagttcgtgtcacagtcgaattgccagcagttcctgaacaccgtgtggttcggacagatgtccggctaccggagaaaacccacttgcaagaaaattatgaccgtactgactgtcggaatcttttggccggtactctccctgtgctacctgattgctcccaaatcccagtttggccgaatcatccacactccattcatgaagttcatcatccacggcgctagttattttaccttcctcctgctccttaacttgtactctcttgtgtacaatgaagacaagaagaacaccatgggacctgctctcgaacggatcgactatctcctgatcttatggattattggaatgatctggagcgatattaagcgcctatggtacgaagggcttgaggattttctggaagagagcaggaatcaacttagcttcgtgatgaactctctctatctcgcaacctttgccctcaaggtggtagctcacaacaaatttcacgatttcgctgatcgcaaggattgggatgctttccatcctaccctcgttgctgaaggcctgttcgcttttgccaacgttttgtcatacttacggctttttttcatgtacacaacaagctctatacttggaccactccagatctccatgggccagatgctgcaggacttcggtaaatttctcggcatgttcttgctggttctgttttcattcacgattggtctgactcagttatatgacaaagggtatacaagcaaggaacagaaagactgtgtcgggattttctgcgaacagcagtcaaatgataccttccatagctttatcggcacctgctttgctcttttctggtacatcttctccctcgctcacgttgctatatttgtgacgcggttcagttacggggaggagctgcagtcttttgtaggtgctgtcatcgttgggacatataatgtggttgtggttatcgttctgacaaaacttctggtggccatgctgcataagtcatttcagttgatagccaatcacgaagataaggagtggaaatttgcgcgggccaaactctggttatcatatttcgacgacaagtgcacactgccacccccctttaacattataccctcccctaagacaatctgttatatgataagttctctcagtaagtggatctgctcccacacctcaaaaggcaaggtgaaacgtcagaactctctgaaggaatggcgcaatctcaagcaaaagcgggatgaaaactaccagaaggtcatgtgttgcctggtgcacagatatttgacatctatgagacagaaaatgcaaagtactgaccaggcaactgtggagaacctaaatgagctccgtcaagacttatccaagttccgcaatgaaattcgggacctgctgggctttagaacttcaaaatatgccatgttctatccccgcaattag

SEQ ID NO: 87906 - DNA, 2382 bp, Artificial Sequence
  derived and/or modified sequence
atgatggccgctttataccctagtacggacctgtctggcgcatcaagctctagcctgccatcatccccctcctccagtagtcccaatgaagtgatggccctcaaagatgtccgggaagtgaaggaagagaatactctgaatgaaaagttgttcttactggcctgcgataaaggcgattactacatggtcaaaaaaatactcgaggaaaacagttccggggatctcaatattaattgcgtggatgtgctagggcgaaacgccgtcacaattaccatcgaaaacgagaaccttgacatcctacagttgctgctcgattacgggtgtcaatccgcagacgccttgttggtggctatcgacagtgaagttgttggcgctgtcgatattttgctgaaccatcgcccaaaacgaagtagccggccaaccattgtcaaactaatggaaaggatccagaaccctgagtactcgaccacaatggatgtagctcccgtgatcttggcagcccaccggaataattacgagattttgactatgctgctgaaacaggacgtaagcctaccgaagccacacgccgtgggctgcgagtgcacgttgtgctccgctaagaacaaaaaggatagcctgcgacacagccgctttcggctggatatatataggtgtcttgcttcgcctgccttaattatgctcacagaggaagaccccatattgcgggctttcgagttgtcagctgacttaaaagagttatccctggttgaggtggagttccgcaatgactatgaggaattagctcgacagtgtaagatgtttgccaaggacctgctggcccaggctagaaacagccgcgagttggaggtcattttgaaccacacctcatcagatgagcctttagacaaaaggggacttcttgaggaacggatgaacctgtcacggctcaaactcgctattaaatataatcaaaaagagtttgtctcacagagcaattgccagcagtttctcaacactgtctggttcgggcagatgagcggatatcgtcgaaaaccaacctgtaagaagataatgaccgtgctgacagttgggatcttctggcctgtactgtccctgtgctacttgatcgctcccaagagtcagttcgggcgaatcattcatactccttttatgaaattcatcatacacggagccagttatttcacatttctgcttctgcttaatctttattctttggtctataatgaagacaaaaagaacactatgggtccagccctcgagcgaattgattacctgcttatcctatggattatcggcatgatttggtcggacataaagcggctgtggtacgagggtctcgaggacttcctagaagagagccgcaaccagctttcttttgttatgaactccttgtatctagcaactttcgccctgaaggtcgttgcccacaataagtttcatgacttcgcggatcgcaaggattgggacgcgtttcaccccactttggttgccgaaggcctcttcgcatttgctaacgtgctctcctatctccggctgttttttatgtatactacttctagtatcctcgggccactgcagattagtatgggccagatgctgcaggacttcggcaaattcttggggatgtttctgttggttcttttctcttttaccattgggttgacccaactctatgacaagggttacacaagtaaggagcaaaaggattgcgtcggtatattctgcgaacaacagtcaaatgacaccttccattcatttataggcacctgttttgccctattctggtacatattttcactggcacatgtcgccatatttgtcactcgattttcgtatggcgaagagctgcagtcctttgtcggggcagtcatcgtaggtacctacaacgttgtagtggtgattgttctcacaaagcttctagtggcgatgctccataaaagttttcagttgatcgccaaccatgaggataaagagtggaaattcgcaagggctaaactgtggctgtcctatttcgatgataagtgtacactcccaccccctttcaacattattccatcccctaaaacaatctgctatatgatctcgtctctgtctaagtggatctgctctcacacgtctaagggtaaagtgaaaagacagaactccttgaaggagtggcgcaacttgaaacaaaagcgcgatgagaattaccaaaaagttatgtgttgtctggttcaccggtacctcaccagcatgagacagaaaatgcagagcacagaccaggctacggtcgaaaacctgaacgagcttcggcaggacctgagcaagttccgtaacgagatcagagatctcctgggtttccggacatcaaagtatgccatgttctaccctcgtaactag

SEQ ID NO: 87907 - DNA, 3061 bp, Artificial Sequence
  derived and/or modified sequence
gcgaacatctcctcggagcgcagctgggccagcggttcccacagccctggagcccaacgtgcgcagaagcgcctcttggagctcctctcccacagatctctcgtcctcttcctgggctaggccgccccaggcgcggcccctgcgactcctggcacggccccgtgctcggctgccgccctggcgcgcgccacactgtcgtccccggacgggcgcggaccggctcggccggggcgccggcggctggggaggggtcgctggccccggggccgcgcatgcgccgccaccaacttggggctgtcagtggagggcgagtgctggttctcaggggaggcgacgcccttcggggccaacgggcctcgagccgaggcagcagtgggaacgactcatcctttttccagccctggggcgtggctggggtcggggtcggggtcggggccggtgggggccccgcccccgtctcctggcctgcccccttcatgggccgcgatgatggcggccctgtacccgagcacggacctctcgggcgcctcctcctcctccctgccttcctctccatcctcttcctcgccgaacgaggtgatggcgctgaaggatgtgcgggaggtgaaggaggagaatacgctgaatgagaagcttttcttgctggcgtgcgacaagggtgactattatatggttaaaaagattttggaggaaaacagttcaggtgacttgaacataaattgcgtagatgtgcttgggagaaatgctgttaccataactattgaaaacgaaaacttggatatactgcagcttcttttggactacggttgtcagtctgcagatgcacttttggtggcaatcgactctgaagtagtgggagctgttgatatactacttaatcatcgaccaaaacgatcatcaagaccaactatagtaaaactaatggaacgaattcagaatcctgagtattcaacaactatggatgttgcacctgtcattttagctgctcatcgtaacaactatgaaattcttacaatgctcttaaaacaggatgtatctctacccaagccccatgcagttggctgtgaatgcacattgtgttctgcaaaaaacaaaaaggatagcctccggcattccaggtttcgtcttgatatatatcgatgtttggccagtccagctctaataatgttaacagaggaggatccaattctgagagcatttgaacttagtgctgatttaaaagaactaagtcttgtggaggtggaattcaggaatgattatgaggaactagcccggcaatgtaaaatgtttgctaaggatttacttgcacaagcccggaattctcgtgaattggaagttattctaaaccatacgtctagtgacgagcctcttgacaaacggggattattagaagaaagaatgaatttaagtcgtctaaaacttgctatcaaatataaccagaaagagtttgtctcccagtctaactgccagcagttcctgaacactgtttggtttggacagatgtcgggttaccgacgcaagcccacctgtaagaagataatgactgttttgacagtaggcatcttttggccagttttgtcactttgttatttgatagctcccaaatctcagtttggcagaatcattcacacaccttttatgaaatttatcattcatggagcatcatatttcacatttctgctgttgcttaatctatactctcttgtctacaatgaggataagaaaaacacaatggggccagcccttgaaagaatagactatcttcttattctgtggattattgggatgatttggtcagacattaaaagactctggtatgaagggttggaagactttttagaagaatctcgtaatcaactcagttttgtcatgaattctctttatttggcaacctttgccctcaaagtggttgctcacaacaagtttcatgattttgctgatcggaaggattgggatgcattccatcctacactggtggcagaagggctttttgcatttgcaaatgttctaagttatcttcgtctcttttttatgtatacaaccagctctatcttgggtccattacagatttcaatgggacagatgttacaagattttggaaaatttcttgggatgtttcttcttgttttgttttctttcacaattggactgacacaactgtatgataaaggatatacttcaaaggagcagaaggactgtgtaggcatcttctgtgaacagcaaagcaatgataccttccattcgttcattggcacctgctttgctttgttctggtatattttctccttagcgcatgtggcaatctttgtcacaagatttagctatggagaagaactgcagtcctttgtgggagctgtcattgttggtacatacaatgtcgtggttgtgattgtgcttaccaaactgctggtggcaatgcttcataaaagctttcagttgatagcaaatcatgaagacaaagaatggaagtttgctcgagcaaaattatggcttagctactttgatgacaaatgtacgttacctccacctttcaacatcattccctcaccaaagactatctgctatatgattagtagcctcagtaagtggatttgctctcatacatcaaaaggcaaggtcaaacggcaaaacagtttaaaggaatggaggaatttgaaacagaagagagatgaaaactatcaaaaagtgatgtgctgcctagtgcatcgttacttgacttccatgagacagaagatgcaaagtacagatcaggcaactgtggaaaatctaaacgaactgcgccaagatctgtcaaaattccgaaatgaaataagggatttacttggctttcggacttctaaatatgctatgttttatccaagaaattaaccattttctaaatcatggagcgaataattttcaataacagatccaaaagactatattgcataacttgcaatgaaattaatgagatatatattgaaataaagaattatgtaaaagccattctttaaaatatttatagcataaatatatgttatgtaaagtgtgtatatagaattagttttttaaaccttctgtt

SEQ ID NO: 87908 - protein, 313 aa, Artificial Sequence
  derived and/or modified sequence
MAEGGGCRERPDAETQKSELGPLMRTTLQRGAQWYLIDSRWFKQWKKYVGFDSWDMYNVGEHNLFPGPIDNSGLFSDPESQTLKEHLIDELDYVLVPTEAWNKLLNWYGCVEGQQPIVRKVVEHGLFVKHCKVEVYLLELKLCENSDPTNVLSCHFSKADTIATIEKEMRKLFNIPAERETRLWNKYMSNTYEQLSKLDNTVQDAGLYQGQVLVIEPQNEDGTWPRQTLQSKVSFFLPRLECNGAILAHCNFCLPGSSNSPASASRVAPSHLANFFFFEMESHSVTKLECGGAVSAYSRVQVMLLPQPPEWLG

SEQ ID NO: 87909 - DNA, 942 bp, Artificial Sequence
  derived and/or modified sequence
atggccgagggcggcggctgcagagagagacccgacgccgagacccagaagagcgagctgggccccctgatgagaaccaccctgcagagaggcgcccagtggtacctgatcgacagcagatggttcaagcagtggaagaagtacgtgggcttcgacagctgggacatgtacaacgtgggcgagcacaacctgttccccggccccatcgacaacagcggcctgttcagcgaccccgagagccagaccctgaaggagcacctgatcgacgagctggactacgtgctggtgcccaccgaggcctggaacaagctgctgaactggtacggctgcgtggagggccagcagcccatcgtgagaaaggtggtggagcacggcctgttcgtgaagcactgcaaggtggaggtgtacctgctggagctgaagctgtgcgagaacagcgaccccaccaacgtgctgagctgccacttcagcaaggccgacaccatcgccaccatcgagaaggagatgagaaagctgttcaacatccccgccgagagagagaccagactgtggaacaagtacatgagcaacacctacgagcagctgagcaagctggacaacaccgtgcaggacgccggcctgtaccagggccaggtgctggtgatcgagccccagaacgaggacggcacctggcccagacagaccctgcagagcaaggtgagcttcttcctgcccagactggagtgcaacggcgccatcctggcccactgcaacttctgcctgcccggcagcagcaacagccccgccagcgccagcagagtggcccccagccacctggccaacttcttcttcttcgagatggagagccacagcgtgaccaagctggagtgcggcggcgccgtgagcgcctacagcagagtgcaggtgatgctgctgccccagccccccgagtggctgggctag

SEQ ID NO: 87910 - DNA, 942 bp, Artificial Sequence
  derived and/or modified sequence
atggccgagggggggggctgccgggagcgacccgacgccgagacacagaagagtgaacttggtcctctgatgagaacgacactacagcggggtgcacagtggtacctaatcgactcacgctggtttaagcagtggaagaaatatgtggggtttgatagctgggatatgtacaatgttggggaacataacctttttcccggtcctatagataattccggactttttagtgatcccgagtcccagacattaaaagaacacttaattgatgagcttgactacgtcttggtgccaacagaggcgtggaacaagctgctgaattggtacgggtgtgtggaggggcagcagcccattgtgagaaaagtagttgagcacggactgttcgtgaaacactgtaaagtggaggtctacctcctggagctgaaactatgcgagaatagcgatcctaccaatgtgctttcttgccattttagcaaggccgacaccatagccactatcgagaaggagatgcgaaagctctttaatatccccgcggaacgcgagacaagactgtggaacaaatacatgtctaacacgtacgagcagttatccaagctggacaacaccgtgcaggacgccggactgtaccaggggcaggtattggtgatcgaaccacagaatgaggatggcacctggccacgacagacacttcagagcaaagttagtttcttcctccctagattggagtgtaacggggcgatcctggcccactgcaacttctgtcttcctgggtcctcaaatagtccagcaagcgcatcaagagtggccccaagccacctcgccaatttcttcttctttgagatggagagtcattccgtgacaaagcttgagtgtggcggagcagttagcgcgtattctcgggtgcaggtcatgctactgccccagccaccggagtggctagggtag

SEQ ID NO: 87911 - DNA, 942 bp, Artificial Sequence
  derived and/or modified sequence
atggccgagggcggcggctgccgggagaggccagatgctgagacccagaagtctgagctgggccccctgatgaggaccaccctgcagagaggagcccagtggtacctgattgacagccgctggttcaagcagtggaagaagtatgtgggctttgacagctgggacatgtacaacgtgggggagcacaacctcttccctggccccatcgacaacagcggcctcttcagtgaccctgagagccagaccctgaaggagcacctgattgatgagctggactatgtgctggtgcccacagaggcctggaacaagctgctgaactggtacggctgtgtggagggccagcagcccatcgtgaggaaggtggtggagcacggcctgtttgtgaagcactgcaaggtggaggtgtacctgctggagctgaagctgtgtgagaacagcgaccccaccaacgtgctgagctgccacttcagcaaggctgacaccatcgccaccatcgagaaggagatgaggaagctgttcaacatcccagctgagcgggagacccggctgtggaacaagtacatgagcaacacctatgagcagctgagcaagctggacaacacagtgcaggatgctggcctgtaccagggccaggtgctggtgattgagccccagaatgaagatggcacctggccccggcagaccctgcagagcaaggtgtccttcttcctgccccggctggagtgcaatggagccatcctggcccactgcaacttctgcctgcccggcagcagcaacagccctgccagcgccagccgggtggcccccagccacctggccaacttcttcttctttgagatggagagccacagcgtgaccaagctggagtgtggcggcgctgtgtctgcctacagccgggtgcaggtgatgctgctgccccagcccccagagtggctgggctag

SEQ ID NO: 87912 - DNA, 942 bp, Artificial Sequence
  derived and/or modified sequence
atggccgagggcggcggctgccgggagcggcccgacgccgagacccaaaagagtgagctgggacccttaatgcggacaacactccagcgcggcgcccagtggtatcttatagactcaaggtggtttaagcagtggaagaaatacgttggattcgactcatgggatatgtacaatgtaggggagcacaatctgtttcccggcccaatcgataacagcgggctcttcagcgatcctgagtcacagaccctgaaggagcatctaatcgacgaactggattacgtcctggtgcctactgaggcctggaataaacttctgaactggtacggttgtgtcgaggggcagcagccaatcgtcaggaaagttgtggagcatggtcttttcgtgaaacattgtaaagtcgaagtctacctactggaattaaagttgtgcgagaactctgatccgacgaacgtgctcagttgccacttcagcaaggctgacaccatagctacaattgaaaaagagatgaggaaacttttcaatatacccgccgagagggagaccagactttggaataaatacatgagtaacacctacgagcagctgtcaaagttggacaataccgtccaggatgccggcctttatcaggggcaggtactggttatcgaaccgcagaacgaggacggaacctggccaagacaaacactccagtcaaaggtgtcctttttcctcccacggctggaatgcaatggagcaatactggctcattgcaacttctgtctgcctggatcgagcaatagccccgcgtctgcatcacgtgtggctccatctcacctagccaatttcttcttctttgagatggagtcccatagcgttactaagctggaatgcggaggcgcagtttcagcgtactcaagggtgcaggtcatgttgttaccgcagcctcctgagtggctgggttag

SEQ ID NO: 87913 - DNA, 942 bp, Artificial Sequence
  derived and/or modified sequence
atggcggagggcggtgggtgtcgcgaacgtccagatgcagaaacccagaagtccgagctgggacctttaatgaggacaaccttacagagaggcgcacagtggtacctgattgacagtcgttggttcaagcagtggaaaaagtacgttggctttgactcctgggatatgtacaacgtaggcgaacacaacctttttccaggcccaatcgacaattctggccttttctctgaccccgagtcccagacactgaaagagcacttaatagacgagttggactacgtactggtgccaaccgaagcttggaataaacttctgaattggtatggctgcgtggaaggccagcagccaatcgtcaggaaggtagtcgaacatggtctattcgtcaaacactgcaaagtagaagtttacttactcgaacttaagctctgtgaaaatagtgatccaactaatgtcctgtcttgccacttctcaaaagcggataccatcgccactatcgagaaagagatgaggaagcttttcaacatcccagctgaaagagaaacccgcttgtggaacaagtacatgagcaacacttacgaacagctctccaaactggataatacagtccaggacgccggactgtatcaagggcaggtactagtcatagaacctcagaacgaagatggaacatggcccagacagactcttcagtctaaggtgagctttttcttgcccagactggagtgtaatggagcgatactggcacattgtaatttctgcctacctggaagcagtaattcgcctgcatctgcttctagggtcgccccatcccatttggcaaactttttcttcttcgaaatggagtcacacagcgtcactaagctggagtgtgggggagcagtctccgcttactctcgcgtgcaagtcatgctactccctcagcccccagagtggttggggtag

SEQ ID NO: 87914 - DNA, 1536 bp, Artificial Sequence
  derived and/or modified sequence
gccgcggaggagatggcggaaggtggaggctgccgtgagcgaccggatgcggagactcagaagtccgagcttggacccttaatgaggaccacactccaacgcggggcgcagtggtatcttattgacagccggtggttcaagcagtggaagaagtatgtgggctttgacagctgggacatgtacaatgtgggtgaacataacctatttcctggcccaatagacaactctgggctattttcagatcctgagagtcagaccttgaaagaacacttaattgatgaattggactatgtattggtccctaccgaggcgtggaataaactactaaactggtacggctgtgtagaaggccagcaacccatcgtcagaaaagttgtggagcatggcctgtttgtcaagcactgcaaagtcgaggtgtatttgctggaactgaagctctgtgagaacagtgaccccaccaatgtgctgagttgccatttcagcaaggcagacaccattgcaaccatcgagaaagagatgcggaagctattcaacatccctgcggagcgtgaaacacggctctggaacaaatacatgagcaacacctacgagcagttgagcaagctagacaacactgtccaggatgctgggctataccagggtcaggtgctagtaattgagcctcaaaatgaagatggcacatggcccaggcagaccttgcagtcaaaagtttcgttctttttgcccaggctggagtgcaatggcgcgatcttggctcactgcaacttctgcctcccgggttcaagcaattctcctgcctcagcttcccgagtagcgccatcacatctggctaatttttttttttttgagatggagtctcactctgtcaccaagctggagtgcggtggtgcagtctcggcttactcccgggttcaagtgatgcttctgccccagcctcccgagtggctgggatgacaggcgcccgccaccatgtccagataatttttgtatttttagtagagatgtggtttcactgtgtcttgaactcctgacctcatggccaggctggtcttgaattcctgaccttgtgatcgtgacctcatgatccgccagcctcggcctcccaaagtgctgggattacaagggtgagccacctcacccagcctaattttgtatttttagtagtgacggggtttctccatgttggtcaggctggtctcaaactcctgacctcaggtgatccgtctgcctcggcctcccaaagtgctgagattacaggcatgagccaccacgcgcgacctggctaatttcttttgcattttagtagagacagggtttcactgtgttgcccaggctggtctcgaactcctgagctcaggcaatctgcctgcctcagcctcccaaagtactaggattacaggcacgagccactgcgcctggtcagccttgtggtttttcacactgaaagggtatgtggtggtgtggactgatgtgacaggaagaccagttaatttgtggactctcacttaaataaagtttaccttgaagtagtatgaa

SEQ ID NO: 87915 - DNA, 1251 bp, Artificial Sequence
  derived and/or modified sequence
atgatcgaggtgcagcacaagcagtgcctggaggaggcccagctggagaacgagaccatcggctgcagcaagatgtgggacaacctgacctgctggcccgccacccccagaggccaggtggtggtgctggcctgccccctgatcttcaagctgttcagcagcatccagggcagaaacgtgagcagaagctgcaccgacgagggctggacccacctggagcccggcccctaccccatcgcctgcggcctggacgacaaggccgccagcctggacgagcagcagaccatgttctacggcagcgtgaagaccggctacaccatcggctacggcctgagcctggccaccctgctggtggccaccgccatcctgagcctgttcagaaagctgcactgcaccagaaactacatccacatgcacctgttcatcagcttcatcctgagagccgccgccgtgttcatcaaggacctggccctgttcgacagcggcgagagcgaccagtgcagcgagggcagcgtgggctgcaaggccgccatggtgttcttccagtactgcgtgatggccaacttcttctggctgctggtggagggcctgtacctgtacaccctgctggccgtgagcttcttcagcgagagaaagtacttctggggctacatcctgatcggctggggcgtgcccagcaccttcaccatggtgtggaccatcgccagaatccacttcgaggactacggctgctgggacaccatcaacagcagcctgtggtggatcatcaagggccccatcctgaccagcatcctggtgaacttcatcctgttcatctgcatcatcagaatcctgctgcagaagctgagaccccccgacatcagaaagagcgacagcagcccctacagcagactggccagaagcaccctgctgctgatccccctgttcggcgtgcactacatcatgttcgccttcttccccgacaacttcaagcccgaggtgaagatggtgttcgagctggtggtgggcagcttccagggcttcgtggtggccatcctgtactgcttcctgaacggcgaggtgcaggccgagctgagaagaaagtggagaagatggcacctgcagggcgtgctgggctggaaccccaagtacagacaccccagcggcggcagcaacggcgccacctgcagcacccaggtgagcatgctgaccagagtgagccccggcgccagaagaagcagcagcttccaggccgaggtgagcctggtgtag

SEQ ID NO: 87916 - DNA, 1251 bp, Artificial Sequence
  derived and/or modified sequence
atgatagaggtgcaacataaacaatgcctggaagaggcccaactcgagaatgaaactattggctgctccaaaatgtgggacaatcttacctgttggcctgcaactccaagagggcaggttgttgtgttggcatgccctctgatcttcaaactcttcagctctattcagggcagaaatgtgagccgcagctgtaccgacgaaggatggacacatctggagcctggaccataccctattgcctgtgggctcgacgataaggccgcatcactggatgagcagcaaactatgttctacggctctgttaaaacagggtacaccattggatatggcttgagccttgcgacgcttctggtagccactgcaatcctgtccttgttcagaaaactgcattgcaccagaaattacatccacatgcacctgttcatctccttcatcctgagagctgccgccgtgtttatcaaagacttggccctgttcgactcaggagagagcgatcagtgcagcgagggctccgtgggatgtaaagccgccatggtgttcttccagtactgtgtgatggccaacttcttctggctgttagttgagggcctctatctgtacaccctgctggccgtctcattttttagtgaacggaagtacttttggggttacatactgattgggtggggagtaccgtcaactttcactatggtctggaccatagcccgcatccatttcgaagactatgggtgctgggacaccatcaacagctcattgtggtggatcattaaaggtccaatcctgactagtatcctcgttaattttatactttttatttgcataatccggatcctgctgcagaaactccggccacctgacatacgtaagtctgactcaagtccttactccaggctggcgcgatctactttactgttaattcccctgttcggtgtgcactacataatgtttgccttctttcccgataactttaagccagaggtgaagatggtgtttgagctagtggtcggttcattccaggggttcgtggtcgccattctgtattgtttcttgaacggagaggtgcaggccgagctccgacgaaagtggagaagatggcacttgcagggagtgctcggctggaatccaaaataccgacaccccagtgggggatccaatggagcaacctgctctacacaggtgagtatgctgacgcgcgtgtccccaggagccaggaggtcaagctcctttcaggcagaggtgtctctggtatag

SEQ ID NO: 87917 - DNA, 1251 bp, Artificial Sequence
  derived and/or modified sequence
atgattgaggtgcagcacaagcagtgcctggaggaggcccagctggagaatgagaccatcggctgcagcaagatgtgggacaacctgacctgctggccagccaccccccggggccaggtggtggtgctggcctgccccctcatcttcaagctgttcagcagcatccagggcagaaatgtgagccgcagctgcacagatgagggctggacccacctggagcccggcccctaccccatcgcctgtggcctggatgacaaggccgccagcctggatgagcagcagaccatgttctacggctctgtgaagacaggctacaccatcggctacggcctgagcctggccaccctgctggtggccacagccatcctgagcctcttcaggaagctgcactgcaccaggaactacatccacatgcacctgttcatctccttcatcctgcgggctgctgctgtgttcatcaaggacctggccctgtttgattctggagagagtgaccagtgcagcgagggctctgtgggctgcaaggccgccatggtgttcttccagtactgtgtgatggccaacttcttctggctgctggtggagggcctgtacctgtacaccctgctggccgtgtccttcttcagcgagaggaagtacttctggggctacatcctgattggctggggcgtgcccagcaccttcaccatggtgtggaccatcgcccgcatccactttgaggactatggctgctgggacaccatcaacagcagcctgtggtggatcatcaagggccccatcctgaccagcatcctggtgaacttcatcctcttcatctgcatcatccgcatcctgctgcagaagctgcggcccccagacatcaggaagagtgacagcagcccctacagccggctggcccggagcaccctgctgctgatccccctgtttggagtgcactacatcatgtttgccttcttcccagacaacttcaagccagaggtgaagatggtgtttgagctggtggtgggcagcttccagggctttgtggtggccatcctgtactgcttcctgaatggagaggtgcaggccgagctgcggaggaagtggaggcgctggcacctgcagggcgtgctgggctggaaccccaagtaccgccaccccagcggcggcagcaatggagccacctgcagcacccaggtgtccatgctgaccagggtgtcccctggggcccggcgcagcagcagcttccaggccgaggtgtccctggtgtag

SEQ ID NO: 87918 - DNA, 1251 bp, Artificial Sequence
  derived and/or modified sequence
atgatcgaggtgcagcacaagcagtgcctggaggaggcccagctggaaaatgagaccatcggatgttcgaagatgtgggataatcttacctgttggcccgccaccccgcgaggacaggtggtggtactcgcttgccccttgatctttaagcttttctcatccatccaaggtcgtaacgtcagtaggagctgcaccgacgaggggtggacccatcttgagccagggccctatcccatcgcttgcggactggacgataaagcggcttcactggatgaacagcagactatgttttatgggagcgtaaagacggggtacactatcggctatggactgagtttggcgaccttgctggttgctacagctattctgtctctcttccgaaaactacattgcactcggaactacatccatatgcatctcttcatcagtttcattctgagagccgcagcagttttcataaaggacctcgcgttatttgattccggagaatctgatcaatgttctgaagggagtgtgggctgcaaggctgccatggtcttttttcagtattgcgtgatggctaacttcttttggttgctcgtggagggcttgtatctctacacacttctcgctgtctccttttttagcgaaaggaaatacttttgggggtatatacttattgggtggggcgttccttctaccttcacaatggtctggaccatagcgagaatacactttgaggattacggctgttgggacaccattaattcaagtctctggtggatcattaaagggccaattctcaccagcatcctggttaatttcatcctctttatctgcattatccgaattctacttcaaaagctgcgcccacccgacatccggaagtccgatagcagcccatacagtagacttgcacgatctaccctgcttctcattcctcttttcggtgtgcattatatcatgtttgctttctttccagataatttcaagcccgaggtgaaaatggtgttcgaactggttgttggtagtttccagggcttcgtggtggccattctatactgcttcctgaacggagaggtccaggcagaactgcgacgaaaatggcgaagatggcatctgcagggagtcttgggctggaatcccaagtaccgtcacccttctggcgggtctaatggagcaacctgttccacccaggtgtccatgctgactcgggtgtctcccggtgcaaggcggtccagctccttccaggcggaagtgtctctggtgtag

SEQ ID NO: 87919 - DNA, 1251 bp, Artificial Sequence
  derived and/or modified sequence
atgatcgaggtccaacataaacagtgccttgaggaggcccagttggaaaacgaaaccatcggatgctcaaaaatgtgggataacttaacatgttggcctgccacacctcgtggacaagttgtggtccttgcttgtcccctgatatttaaattattctctagcattcagggacgtaatgtgtcccgatcctgtaccgatgaaggttggacccacctggaacctgggccttacccaatcgcatgtgggctcgatgataaagcagctagcctggatgagcagcagacaatgttctatggctcggtgaagacagggtataccatcggttacggcctctccttggccactttgctggtcgccaccgccattctgtccctcttcaggaaactgcattgtactagaaattatatccatatgcatcttttcatctcattcattctaagagccgcagcagtgtttattaaagatctggccctattcgattcaggggaaagtgatcagtgctccgagggttccgtggggtgcaaggctgccatggtgttcttccagtattgcgtaatggctaactttttctggttgctggtggagggcctgtacctgtataccctgcttgccgtcagcttttttagtgaacgtaagtacttctgggggtatatcctgattggttggggggtgccatccactttcaccatggtgtggactatcgccaggatccacttcgaggactacggctgctgggatacgattaattccagtctgtggtggatcattaagggtccaattttaacatccatcttggtcaacttcatcctgttcatttgtatcattaggattttattacagaaactgcggcctcctgatatccgaaagtctgatagttcgccatacagtcgcctggctcgctctacgctgctgctcattcctctgtttggcgtgcactatattatgtttgcatttttccctgacaattttaaaccagaggtgaagatggtctttgagctggtcgtcggctcttttcaagggttcgtggtggccattctgtactgttttcttaatggggaagtacaggcagagctgcgcaggaaatggcgacggtggcacctccagggcgtgttaggttggaacccgaagtatcggcatccgagcggcggatccaatggagctacatgttctactcaggtctctatgctgactcgagtgagccccggagccagaagaagctccagctttcaggctgaagtgagcctggtatag

SEQ ID NO: 87920 - protein, 247 aa, Artificial Sequence
  derived and/or modified sequence
MTRQRVWMRWAVRQPWSFSNIVSWLTSSGCWWRASTCTPCLPSPSSLSGSTSGGVPSTFTMVWTIARIHFEDYGCWDTINSSLWWIIKGPILTSILVNFILFICIIRILLQKLRPPDIRKSDSSPYSRLARSTLLLIPLFGVHYIMFAFFPDNFKPEVKMVFELVVGSFQGFVVAILYCFLNGEVQAELRRKWRRWHLQGVLGWNPKYRHPSGGSNGATCSTQVSMLTRVSPGARRSSSFQAEVSLV

SEQ ID NO: 87921 - DNA, 744 bp, Artificial Sequence
  derived and/or modified sequence
atgaccagacagagagtgtggatgagatgggccgtgagacagccctggagcttcagcaacatcgtgagctggctgaccagcagcggctgctggtggagagccagcacctgcaccccctgcctgcccagccccagcagcctgagcggcagcaccagcggcggcgtgcccagcaccttcaccatggtgtggaccatcgccagaatccacttcgaggactacggctgctgggacaccatcaacagcagcctgtggtggatcatcaagggccccatcctgaccagcatcctggtgaacttcatcctgttcatctgcatcatcagaatcctgctgcagaagctgagaccccccgacatcagaaagagcgacagcagcccctacagcagactggccagaagcaccctgctgctgatccccctgttcggcgtgcactacatcatgttcgccttcttccccgacaacttcaagcccgaggtgaagatggtgttcgagctggtggtgggcagcttccagggcttcgtggtggccatcctgtactgcttcctgaacggcgaggtgcaggccgagctgagaagaaagtggagaagatggcacctgcagggcgtgctgggctggaaccccaagtacagacaccccagcggcggcagcaacggcgccacctgcagcacccaggtgagcatgctgaccagagtgagccccggcgccagaagaagcagcagcttccaggccgaggtgagcctggtgtag

SEQ ID NO: 87922 - DNA, 744 bp, Artificial Sequence
  derived and/or modified sequence
atgacaagacagcgggtatggatgcggtgggctgtgcgacagccatggagctttagcaacattgtgagctggttgacaagctccggctgctggtggcgtgctagtacatgcacaccgtgcttgccctcaccatcttcactgtcaggatctacctcagggggagtgccaagcacatttacaatggtgtggaccattgccaggatccactttgaagattacgggtgctgggacacgatcaatagcagtctttggtggatcataaagggccccattctgacctctatcctggtcaacttcatcttattcatttgcattattcgaatcctcctccagaagctccgaccccctgacattaggaagtccgattcctcaccatattcccggctggctagaagtacactgctgctgattcccctttttggcgtacactatatcatgtttgccttcttccctgataactttaagccggaggtgaaaatggtgttcgaacttgtcgttgggtcattccagggatttgttgttgcaattctgtattgttttttaaatggtgaggtgcaagcagaattgagacgcaaatggcggcgttggcatttgcagggtgtcctgggatggaatccaaaatatcgacatccatccggcggctcgaacggagccacctgctcaacccaggtgtcaatgctaacccgcgtgtctccgggcgcccggaggtcatcctcttttcaggccgaggtgtcactggtgtag

SEQ ID NO: 87923 - DNA, 744 bp, Artificial Sequence
  derived and/or modified sequence
atgacccggcagagggtgtggatgcgctgggccgtgcggcagccctggagcttcagcaacatcgtgtcctggctgaccagcagcggctgctggtggagggccagcacctgcaccccctgcctgcccagccccagcagcctgagcggcagcaccagcggcggcgtgcccagcaccttcaccatggtgtggaccatcgcccgcatccactttgaagattatggctgctgggacaccatcaacagcagcctgtggtggatcatcaagggccccatcctgaccagcatcctggtgaacttcatcctcttcatctgcatcatccgcatcctgctgcagaagctgcggcccccagacatcaggaagagtgacagcagcccctacagccggctggcccggagcaccctgctgctgatccccctgtttggagtgcactacatcatgtttgccttcttcccagacaacttcaagccagaggtgaagatggtgtttgagctggtggtgggcagcttccagggctttgtggtggccatcctgtactgcttcctgaatggagaggtgcaggccgagctgcggaggaagtggaggcgctggcacctgcagggcgtgctgggctggaaccccaagtaccgccaccccagcggcggcagcaatggagccacctgcagcacccaggtgtccatgctgaccagggtgtcccctggggcccggcgcagcagcagcttccaggccgaggtgtccctggtgtag

SEQ ID NO: 87924 - DNA, 744 bp, Artificial Sequence
  derived and/or modified sequence
atgacccggcagcgggtgtggatgcggtgggccgtgcggcagccctggtcatttagtaacatcgtttcttggctaacaagttcaggttgttggtggcgcgccagtacatgtacaccctgtctcccttcaccctcttctctgagcgggtccaccagtggcggtgtgcctagcacattcaccatggtctggaccatcgctaggatacactttgaagactacggttgctgggatactatcaactcatctttatggtggattattaaaggccccatcttgacctctatcttggttaacttcattctgtttatttgtataatccggatcttgttacagaaacttcgcccgcctgatatccgtaagagcgactcctcgccctattcccgcctcgccagatccacacttctgttgatacctctattcggcgtccactatatcatgttcgctttctttcctgacaattttaagcccgaagtgaaaatggttttcgagttggtggtagggtccttccaggggttcgtcgtggcaatcctgtactgctttcttaatggcgaggttcaagccgagctgcgcaggaagtggcgcagatggcacctccagggtgtgctagggtggaaccctaagtatagacatccaagtggcggcagcaatggcgccacttgctccacccaggtgtcgatgctgactagggtgtcccctggggcccgaagatcttcctcatttcaggcagaggtgtcactggtgtag

SEQ ID NO: 87925 - DNA, 744 bp, Artificial Sequence
  derived and/or modified sequence
atgactcgacagagggtctggatgcgatgggctgtgaggcagccatggtcattctctaacatcgtgagctggctcacttcatccggctgctggtggagggcaagcacttgcacaccttgtctgccttctccaagttccttgtctggctctacaagcggtggcgtgccgtcaactttcaccatggtatggaccatcgctcgaattcacttcgaagattacggatgctgggacaccattaatagctcgctatggtggattatcaaaggaccaatcctgacaagtatcctggtgaatttcatcctcttcatttgtattatccgcatcctcctccagaaactgcgtcccccagacattcgaaaatctgattcatctccatactctcggctggcaagatctactcttctgctgatcccattgttcggtgtccactatattatgtttgcgtttttcccggacaactttaaaccagaggtgaaaatggtgtttgagctcgtggttggctcctttcaggggttcgtggtggcaattctgtactgcttcttgaacggcgaagtgcaagccgaactgcgccgtaagtggaggagatggcacctacagggagttctcggctggaacccaaagtatagacatccatctgggggttctaatggagctacctgcagtacacaggtctcaatgttgacgcgcgtgtcccccggtgctcgtcgatcaagttcattccaggctgaagtgagcctggtttag

SEQ ID NO: 87926 - DNA, 1393 bp, Artificial Sequence
  derived and/or modified sequence
agctctggggccacagcgccagcgccactctgccaggctcccggccatcgcccgcctggtgcgccgcccgccagctctttgcccgcgcggggccgcccgccgcgggctcagggcagaccatgcgcccgccaagtccgctgcccgcccgctggctatgcgtgctggcaggcgccctcgcctgggcccttgggccggcggctgcagcaagatgtgggacaacctcacctgctggccagccacccctcggggccaggtagttgtcttggcctgtcccctcatcttcaagctcttctcctccattcaaggccgcaatgtaagccgcagctgcaccgacgaaggctggacgcacctggagcctggcccgtaccccattgcctgtggtttggatgacaaggcagcgagtttggatgaggtgggctgtaaggcagccatggtctttttccaatattgtgtcatggctaacttcttctggctgctggtggagggcctctacctgtacaccctgcttgccgtctccttcttctctgagcggaagtacttctgggggggtacccagcacattcaccatggtgtggaccatcgccaggatccattttgaggattatgggtgctgggacaccatcaactcctcactgtggtggatcataaagggccccatcctcacctccatcttggtaaacttcatcctgtttatttgcatcatccgaatcctgcttcagaaactgcggcccccagatatcaggaagagtgacagcagtccatactcaaggctagccaggtccacactcctgctgatccccctgtttggagtacactacatcatgttcgccttctttccggacaattttaagcctgaagtgaagatggtctttgagctcgtcgtggggtctttccagggttttgtggtggctatcctctactgcttcctcaatggtgaggtgcaggcggagctgaggcggaagtggcggcgctggcacctgcagggcgtcctgggctggaaccccaaataccggcacccgtcgggaggcagcaacggcgccacgtgcagcacgcaggtttccatgctgacccgcgtcagcccaggtgcccgccgctcctccagcttccaagccgaagtctccctggtctgaccaccaggatcccaggggcccaaggcggcccctcccgccccttcccactcaccccggcagacgccggggacagaggcctgcccgggcgcggccagccccggccctgggctcggaggctgcccccggccccctggtctctggtccggacactcctagagaacgcagccctagagcctgcctggagcgtttctagcaagtgagagagatgggagctcctctcctggaggattgcaggtggaactcagtcattagactcctcctcc

SEQ ID NO: 87927 - protein, 409 aa, Artificial Sequence
  derived and/or modified sequence
MRAGRRPRLGPWAGGCSKMWDNLTCWPATPRGQVVVLACPLIFKLFSSIQGRNVSRSCTDEGWTHLEPGPYPIACGLDDKAASLDEQTMFYGSVKTGYTIGYGLSLATLLVATAILSLFRKLHCTRNYIHMHLFISFILRAAAVFIKDLALFDSGESDQCSEGSVGCKAAMVFFQYCVMANFFWLLVEGLYLYTLLAVSFFSERKYFWGYILIGWGVPSTFTMVWTIARIHFEDYGCWDTINSSLWWIIKGPILTSILVNFILFICIIRILLQKLRPPDIRKSDSSPYSRLARSTLLLIPLFGVHYIMFAFFPDNFKPEVKMVFELVVGSFQGFVVAILYCFLNGEVQAELRRKWRRWHLQGVLGWNPKYRHPSGGSNGATCSTQVSMLTRVSPGARRSSSFQAEVSLV

SEQ ID NO: 87928 - DNA, 1230 bp, Artificial Sequence
  derived and/or modified sequence
atgagagccggcagaagacccagactgggcccctgggccggcggctgcagcaagatgtgggacaacctgacctgctggcccgccacccccagaggccaggtggtggtgctggcctgccccctgatcttcaagctgttcagcagcatccagggcagaaacgtgagcagaagctgcaccgacgagggctggacccacctggagcccggcccctaccccatcgcctgcggcctggacgacaaggccgccagcctggacgagcagaccatgttctacggcagcgtgaagaccggctacaccatcggctacggcctgagcctggccaccctgctggtggccaccgccatcctgagcctgttcagaaagctgcactgcaccagaaactacatccacatgcacctgttcatcagcttcatcctgagagccgccgccgtgttcatcaaggacctggccctgttcgacagcggcgagagcgaccagtgcagcgagggcagcgtgggctgcaaggccgccatggtgttcttccagtactgcgtgatggccaacttcttctggctgctggtggagggcctgtacctgtacaccctgctggccgtgagcttcttcagcgagagaaagtacttctggggctacatcctgatcggctggggcgtgcccagcaccttcaccatggtgtggaccatcgccagaatccacttcgaggactacggctgctgggacaccatcaacagcagcctgtggtggatcatcaagggccccatcctgaccagcatcctggtgaacttcatcctgttcatctgcatcatcagaatcctgctgcagaagctgagaccccccgacatcagaaagagcgacagcagcccctacagcagactggccagaagcaccctgctgctgatccccctgttcggcgtgcactacatcatgttcgccttcttccccgacaacttcaagcccgaggtgaagatggtgttcgagctggtggtgggcagcttccagggcttcgtggtggccatcctgtactgcttcctgaacggcgaggtgcaggccgagctgagaagaaagtggagaagatggcacctgcagggcgtgctgggctggaaccccaagtacagacaccccagcggcggcagcaacggcgccacctgcagcacccaggtgagcatgctgaccagagtgagccccggcgccagaagaagcagcagcttccaggccgaggtgagcctggtgtag

SEQ ID NO: 87929 - DNA, 1230 bp, Artificial Sequence
  derived and/or modified sequence
atgcgtgccggtagacggccaagactggggccgtgggccggcgggtgctcgaagatgtgggacaacctcacgtgctggcctgccacgccccgggggcaggtggtggtactcgcctgccccttgatcttcaagctcttcagtagtatccaaggaaggaacgtctcaagatcgtgtacagatgaaggctggacgcaccttgaaccaggtccttaccccattgcctgcggattggacgacaaggccgcctccctggacgagcaaacaatgttttacggcagtgtcaaaacgggatacaccatcggatatggtctctcactggctaccttactggtggcgactgccatattatccctgtttaggaagctgcattgtacaagaaattatatccacatgcacctgtttatttcttttatcctgagggccgccgccgtgtttatcaaggatctcgcactgttcgactccggtgaaagcgaccagtgcagcgaaggatcggtgggatgtaaggccgctatggtttttttccagtactgtgttatggcgaactttttttggcttttggttgagggtttatatctgtacactctcttggctgtctcctttttttccgagaggaagtacttctggggctatatcctgatcggctggggggtgccttctacgtttacgatggtatggaccatcgccagaatacacttcgaagactatggctgttgggatacaataaatagtagcctgtggtggattatcaagggtccaatccttacaagcatactggtcaatttcatcttgtttatctgcataatcagaattctcttgcagaagttgcggccccccgacatcagaaaatcggactccagtccttattcgcggctggcacgttcaacgctcctgctgattcctctgtttggcgtacattatatcatgttcgccttctttcctgataactttaaacccgaagtaaaaatggtatttgagttggtggttggttccttccagggcttcgtggtcgccattctctactgcttcctcaacggtgaagtgcaggctgaactccgacgtaagtggcgccggtggcacctccagggcgtgctgggctggaatccaaagtatcgtcatccgagcggaggcagtaacggggccacttgctcaacccaagtttctatgttaacccgcgtatcacctggtgccagaagatcatccagtttccaggccgaggtgagcttggtttag

SEQ ID NO: 87930 - DNA, 1230 bp, Artificial Sequence
  derived and/or modified sequence
atgagagctggaagaagaccccggctgggcccctgggccggcggctgcagcaagatgtgggacaacctgacctgctggccagccaccccccggggccaggtggtggtgctggcctgccccctcatcttcaagctgttcagcagcatccagggcagaaatgtgagccgcagctgcacagatgagggctggacccacctggagcccggcccctaccccatcgcctgtggcctggatgacaaggccgccagcctggatgagcagaccatgttttatggctctgtgaagacaggctacaccatcggctacggcctgagcctggccaccctgctggtggccacagccatcctgagcctcttcaggaagctgcactgcaccaggaactacatccacatgcacctgttcatctccttcatcctgcgggctgctgctgtgttcatcaaggacctggccctgtttgacagcggggagagtgaccagtgcagcgagggctctgtgggctgcaaggccgccatggtgttcttccagtactgtgtgatggccaacttcttctggctgctggtggagggcctgtacctgtacaccctgctggccgtgtccttcttcagcgagaggaagtacttctggggctacatcctgattggctggggcgtgcccagcaccttcaccatggtgtggaccatcgcccgcatccactttgaagattatggctgctgggacaccatcaacagcagcctgtggtggatcatcaagggccccatcctgaccagcatcctggtgaacttcatcctcttcatctgcatcatccgcatcctgctgcagaagctgcggcccccagacatcaggaagagtgacagcagcccctacagccggctggcccggagcaccctgctgctgatccccctgtttggagtgcactacatcatgtttgccttcttcccagacaacttcaagccagaggtgaagatggtgtttgagctggtggtgggcagcttccagggctttgtggtggccatcctgtactgcttcctgaatggagaggtgcaggccgagctgcggaggaagtggaggcgctggcacctgcagggcgtgctgggctggaaccccaagtaccgccaccccagcggcggcagcaatggagccacctgcagcacccaggtgtccatgctgaccagggtgtcccctggggcccggcgcagcagcagcttccaggccgaggtgtccctggtgtag

SEQ ID NO: 87931 - DNA, 1230 bp, Artificial Sequence
  derived and/or modified sequence
atgcgggccggccggcggccccggctgggcccctgggccggcggctgctccaaaatgtgggataatctcacgtgctggcccgctacgccccgtggccaggtggtcgtgctggcctgccctctcatatttaagcttttcagctcaattcagggaaggaacgtgtctagaagttgcaccgatgaggggtggactcatttggaaccaggcccctacccgatcgcttgcggactcgacgacaaggccgcaagcctggatgaacagactatgttttacggaagcgtcaaaacaggttatactatcgggtatgggctgtcactcgcgactctactcgttgccacagcgatcttgtctctcttccggaaactgcattgcactagaaattatatacacatgcacctgtttatcagttttatactaagggccgctgctgtcttcattaaagatcttgccctcttcgacagcggcgaatcagatcaatgctctgaagggagtgttgggtgcaaggcagcaatggtgttttttcagtattgtgtgatggccaacttcttttggttgttagtggaagggctgtatctgtataccctgttggctgtcagttttttcagtgaacgcaagtatttctggggttacatcttaatcggctggggggttccctcgaccttcacaatggtgtggaccatagcccgcatacattttgaggactatggctgctgggataccataaacagcagtctgtggtggatcatcaaaggtccgatccttacttctatcctggtgaacttcatcttatttatttgtattatcagaattctgttgcagaagctccgaccaccagatatccggaagtctgatagctccccatactctagacttgcacgatccacattgctgcttatccctttgttcggcgtgcactatattatgtttgcgttcttccctgataatttcaagcccgaagtaaagatggtttttgagttggttgtgggttcttttcaggggttcgtcgtggcaattttatattgtttcctaaacggagaagtgcaggcagaattacgaaggaaatggcgacggtggcacctccagggagtgctcggctggaatcctaaatatcgccatccgtccggcgggtctaatggcgccacatgctccacgcaggtatctatgctgacgcgcgtgagtcccggagcccgccggagctcttcttttcaggccgaagtgtcacttgtgtag

SEQ ID NO: 87932 - DNA, 1230 bp, Artificial Sequence
  derived and/or modified sequence
atgcgtgctggacggaggcctcggctgggcccatgggcaggtggctgctctaaaatgtgggacaatctgacttgttggccggcaacacccagggggcaggtggttgtcctagcctgccccctcatttttaaattgttttcctcgattcagggccgaaatgtgtctcggtcatgcacagatgagggctggacgcacttggaaccagggccttatcccattgcttgcggacttgacgacaaagcagcatccctggatgaacagacgatgttctatggctctgtgaaaacagggtataccatcggctacggcttgtcattggctaccctcctggtggccacggctattttgagcctcttcaggaagctccactgtacacgcaactacatccacatgcatttatttatcagcttcattttgcgcgcagcggctgtatttatcaaagatctggcgctttttgactcaggcgaatccgatcagtgtagcgaaggctccgtaggttgcaaggccgcaatggtcttttttcagtattgcgttatggcaaattttttttggctgctcgtggaaggtctgtacctatatacactgttagccgtttctttcttctctgagcgtaaatatttttggggttatatcctgatcgggtggggagtgccctcaacttttactatggtgtggactatcgccaggattcatttcgaggattacggttgttgggacacaattaatagtagcctgtggtggattatcaagggtcccatactgacaagcattctcgtgaattttatactcttcatctgtataatcagaatcctgcttcagaaactccgcccaccagatatccgaaagtccgactcttctccatactccagactcgcgagatccacccttctgctgatacctctgtttggcgttcactatatcatgtttgccttctttccggacaattttaagccggaggtcaagatggtatttgagctcgtcgtcggctcctttcagggattcgtggttgcaattctctattgcttcctgaatggcgaggttcaggcagagctgaggagaaagtggcggcgatggcatctccagggcgtcctgggatggaatccaaagtacagacacccaagtggcggtagcaatggggcaacctgctctacgcaggtgtcaatgctaactcgcgttagccccggagcccgtaggagctcctcctttcaggccgaagtgagcctggtgtag

SEQ ID NO: 87933 - DNA, 1502 bp, Artificial Sequence
  derived and/or modified sequence
ctcttagctctggggccacagcgccagcgccactctgccaggctcccggccatcgcccgcctggtgcgccgcccgccagctctttgcccgcgcggggccgcccgccgcgggctcagggcagaccatgcgcccgccaagtccgctgcccgcccgctggctatgcgtgctggcaggcgccctcgcctgggcccttgggccggcggctgcagcaagatgtgggacaacctcacctgctggccagccacccctcggggccaggtagttgtcttggcctgtcccctcatcttcaagctcttctcctccattcaaggccgcaatgtaagccgcagctgcaccgacgaaggctggacgcacctggagcctggcccgtaccccattgcctgtggtttggatgacaaggcagcgagtttggatgagcagaccatgttctacggttctgtgaagaccggctacaccattggctacggcctgtccctcgccacccttctggtcgccacagctatcctgagcctgttcaggaagctccactgcacgcggaactacatccacatgcacctcttcatatccttcatcctgagggctgccgctgtcttcatcaaagacttggccctcttcgacagcggggagtcggaccagtgctccgagggctcggtgggctgtaaggcagccatggtctttttccaatattgtgtcatggctaacttcttctggctgctggtggagggcctctacctgtacaccctgcttgccgtctccttcttctctgagcggaagtacttctgggggtacatactcatcggctggggggtacccagcacattcaccatggtgtggaccatcgccaggatccattttgaggattatgggtgctgggacaccatcaactcctcactgtggtggatcataaagggccccatcctcacctccatcttggtaaacttcatcctgtttatttgcatcatccgaatcctgcttcagaaactgcggcccccagatatcaggaagagtgacagcagtccatactcaaggctagccaggtccacactcctgctgatccccctgtttggagtacactacatcatgttcgccttctttccggacaattttaagcctgaagtgaagatggtctttgagctcgtcgtggggtctttccagggttttgtggtggctatcctctactgcttcctcaatggtgaggtgcaggcggagctgaggcggaagtggcggcgctggcacctgcagggcgtcctgggctggaaccccaaataccggcacccgtcgggaggcagcaacggcgccacgtgcagcacgcaggtttccatgctgacccgcgtcagcccaggtgcccgccgctcctccagcttccaagccgaagtctccctggtctgaccaccaggatcccaggggcccaaggcggcccctcccgccccttcccactcaccccggcagacgccggggacagaggcctgcccgggcgcggccagccccggccctgggctcgg

SEQ ID NO: 87934 - protein, 416 aa, Artificial Sequence
  derived and/or modified sequence
MIEVQHKQCLEEAQLENETIGCSKMWDNLTCWPATPRGQVVVLACPLIFKLFSSIQGRNVSRSCTDEGWTHLEPGPYPIACGLDDKAASLDEQQTMFYGSVKTGYTIGYGLSLATLLVATAILSLFRKLHCTRNYIHMHLFISFILRAAAVFIKDLALFDSGESDQCSEGSVGCKAAMVFFQYCVMANFFWLLVEGLYLYTLLAVSFFSERKYFWGYILIGWGVPSTFTMVWTIARIHFEDYGCWDTINSSLWWIIKGPILTSILVNFILFICIIRILLQKLRPPDIRKSDSSPYSRLARSTLLLIPLFGVHYIMFAFFPDNFKPEVKMVFELVVGSFQGFVVAILYCFLNGEVQAELRRKWRRWHLQGVLGWNPKYRHPSGGSNGATCSTQVSMLTRVSPGARRSSSFQAEVSLV

SEQ ID NO: 87935 - protein, 647 aa, Artificial Sequence
  derived and/or modified sequence
MAAPAGGGGSAVSVLAPNGRRHTVKVTPSTVLLQVLEDTCRRQDFNPCEYDLKFQRSVLDLSLQWRFANLPNNAKLEMVPASRSREGPENMVRIALQLDDGSRLQDSFCSGQTLWELLSHFPQIRECLQHPGGATPVCVYTRDEVTGEAALRGTTLQSLGLTGGSATIRFVMKCYDPVGKTPGSLGSSASAGQAAASAPLPLESGELSRGDLSRPEDADTSGPCCEHTQEKQSTRAPAAAPFVPFSGGGQRLGGPPGPTRPLTSSSAKLPKSLSSPGGPSKPKKSKSGQDPQQEQEQERERDPQQEQERERPVDREPVDREPVVCHPDLEERLQAWPAELPDEFFELTVDDVRRRLAQLKSERKRLEEAPLVTKAFREAQIKEKLERYPKVALRVLFPDRYVLQGFFRPSETVGDLRDFVRSHLGNPELSFYLFITPPKTVLDDHTQTLFQPQLGDRVAPFTLGPSLKRCLGPEQRTRLPVVGDGGDVDSGRLLFWGPSRGRASPSTGQPPCHPVCRPSSPPSPRPSSGDPSRVKAGHKHVGTGRANLFPAALVHLGAEEPAGVYLEPGLLEHAISPSAADVLVARYMSRAAGSPSPLPAPDPAPKSEPAAEEGALVPPEPIPGTAQPVKRSLGKVPKWLKLPASKR

SEQ ID NO: 87936 - DNA, 1944 bp, Artificial Sequence
  derived and/or modified sequence
atggctgcacccgccggtggtggtggtagcgcagtctctgttttggcccccaatggcaggcgccatacagttaaggtgacgcctagcactgtcctgctccaagtccttgaagatacgtgtcgacggcaggacttcaacccttgcgagtacgacttgaaattccaacgaagcgtcctggacctctctctgcagtggcggtttgcaaacctgccgaacaatgccaagttggagatggtgcccgccagccgcagtagggagggccctgaaaacatggtgagaattgccctgcaactcgacgacggttctcggctccaggacagcttttgttcgggtcagactttatgggagttgttatcacatttccctcagattcgcgagtgtctacaacatcctgggggggcaacccccgtctgcgtctatactagggacgaggtcaccggagaagccgcgttgcgcggaacaacccttcagtcattggggcttaccggcgggtctgccaccattaggttcgtcatgaaatgctatgaccccgtgggtaaaacacccggaagcctgggtagctctgctagtgccgggcaggccgcggccagcgccccattgcctctggaaagcggcgagctcagccgcggtgacctgtcaaggcccgaggacgcggacacgtccggaccttgctgcgagcatactcaagagaagcagtctacccgcgctcccgctgccgccccctttgtgcctttctccggggggggacagaggctggggggaccacccggacctacccggcctctcacaagctcctccgccaaactgcctaagtcactgtcctcgccgggcgggcccagcaagcctaaaaaaagtaagagtgggcaagatcctcagcaggagcaggagcaagaaagagaaagagatccacagcaagagcaagaaagggaaaggcccgtcgatcgggaacccgtggacagagagcctgtcgtctgccatcctgatctggaggagaggctgcaggcctggccagccgagctccctgacgaatttttcgaacttacggtggacgacgtcaggcgtaggttggctcagctcaagagcgagcgcaagcgacttgaggaagcccctttggtcacaaaagcttttcgtgaagcccagattaaagaaaaattggagcgataccccaaggtagccctgcgagttttgttccccgacagatacgtattgcagggttttttccggccctcagagacagtgggcgacttaagagactttgtgcggagtcacctgggtaatcctgaactgagcttctatttgttcattaccccacctaagaccgttctggatgaccatacacaaaccctcttccagccacagcttggggatagagttgcacctttcactctgggaccttcattaaagagatgcctgggaccggaacaaagaacaaggcttcccgtggttggcgacggcggcgacgtagattccggcaggctattattctggggtccttcacggggacgggcttcacctagcactgggcagcctccgtgccaccccgtgtgccgacctagttccccgcctagccccaggccctcatctggcgatccgtctcgtgtgaaggccggtcataagcatgtcggcacaggcagggctaacctctttcccgccgctctcgtccacctcggtgcagaggaaccagcgggtgtgtacctcgagccaggattactggaacacgctatcagtccttccgccgcagatgtgttagtagccaggtacatgtctcgagccgccgggtctccctccccactccccgctcccgatcccgcccccaaatctgaacctgctgccgaagaaggcgccttagtcccccctgagccaatcccaggtaccgcccagcccgtcaaaaggagcctgggcaaggtgccaaaatggctcaagctgccagcatcgaagcggtag

SEQ ID NO: 87937 - DNA, 1944 bp, Artificial Sequence
  derived and/or modified sequence
atggccgccccagctgggggcggcggcagcgctgtgtctgtgctggcccccaacggccgccgccacacagtgaaggtgacccccagcacagtgctgctgcaggtgctggaggacacctgccggcggcaggacttcaacccctgtgaatatgacctgaagttccagaggtctgtgctggacctgagcctgcagtggaggtttgccaacctgcccaacaatgccaagctggagatggtgcctgccagccgcagccgggagggccctgagaacatggtgcgcatcgccctgcagctggatgatggcagccggctgcaggacagcttctgcagcggccagaccctgtgggagctgctgagccacttcccccagatccgggagtgcctgcagcaccctggaggagccacccctgtgtgtgtgtacaccagagatgaggtgactggagaggccgccctgcggggcaccaccctgcagagcctgggcctgaccggcggcagcgccaccatccgctttgtgatgaagtgctatgaccctgtgggcaagaccccaggcagcctgggcagcagcgccagcgctggccaggccgccgccagcgcccccctgcccctggagagcggggagctgagcagaggagacctgagcaggccagaagatgctgacaccagcggcccctgctgtgagcacacccaggagaagcagagcacccgggccccagctgctgccccctttgtgcccttcagcggcggcggccagaggctgggcggccccccaggccccacccggcccctgaccagcagcagcgccaagctgcccaagagcctgagcagccctgggggccccagcaagcccaagaagagcaagagcggccaggacccccagcaggagcaggagcaggagcgggagcgggacccccagcaggagcaggagcgggagaggcctgtggaccgggagcctgtggaccgggagcctgtggtgtgccacccagacctggaggagcggctgcaggcctggccagctgagctgcctgatgagttctttgagctgactgtggatgatgtgagaagaaggctggcccagctgaagtctgagaggaagaggctggaggaggcccccctggtgaccaaggccttccgggaggcccagatcaaggagaagctggagcgctaccccaaggtggccctgcgggtgctcttcccagacagatatgtgctgcagggcttcttccggcccagcgagaccgtgggggacctgcgggactttgtgcgcagccacctgggcaaccctgagctgtccttctacctgttcatcaccccacccaagacagtgctggatgaccacacccagaccctcttccagccccagctgggggacagagtggcccccttcaccctgggccccagcctgaagcgctgcctgggccctgagcagaggacccggctgcctgtggtgggagatggaggagatgtggacagcggccgcctgctcttctggggccccagccggggccgggccagccccagcacaggccagcccccctgccaccctgtgtgccggcccagcagcccccccagcccccggcccagcagcggggaccccagccgggtgaaggccggccacaagcacgtgggcaccggccgggccaacctcttccctgctgccctggtgcacctgggcgctgaggagcctgctggggtgtacctggagcccggcctgctggagcacgccatcagccccagcgctgctgatgtgctggtggcccgctacatgagcagagctgctggcagccccagccccctgcctgccccagaccctgcccccaagtctgagcctgctgctgaggagggcgccctggtgcccccagagcccatccctggaacagcccagcctgtgaagaggagcctgggcaaggtgcccaagtggctgaagctgcctgccagcaagaggtag

SEQ ID NO: 87938 - DNA, 2028 bp, Artificial Sequence
  derived and/or modified sequence
aaatggcggccccggcaggcggcggaggctccgcggtgtcggtgctggccccgaacggccggcgccacacggtgaaggtgacgccgagcaccgtgctgcttcaggttctggaggacacgtgccggcggcaggacttcaacccctgtgaatatgatctgaagtttcagaggagcgtgctcgacctttctctccagtggagatttgccaacctgcccaacaatgccaagctggagatggtgcccgcttcccggagccgtgaggggcctgagaacatggttcgcatcgctttgcagctggacgatggctcgaggttgcaggactctttctgttcaggccagaccctctgggagcttctcagccattttccacagatcagggagtgcctgcagcaccccggcggggccaccccagtctgcgtgtacacgagggatgaggtgacgggtgaagctgccctgcggggcacgacgctgcagtcgctgggcctgaccgggggcagcgccaccatcaggtttgtcatgaagtgctacgaccccgtgggcaagaccccaggaagcctgggctcgtcagcgtcggctggccaggcagccgccagcgctccacttcccttggaatctggggagctcagccgcggcgacttgagccgtccggaggacgcggacacctcagggccctgctgcgagcacactcaggagaagcagagcacaagggcacccgcagctgccccctttgttcctttctcgggtgggggacagagactggggggccctcctgggcccacgaggcctctgacatcatcttcagctaagttgccgaagtccctctccagccctggaggcccctccaagccaaagaagtccaagtcgggccaggatccccagcaggagcaggagcaggagcgggagcgggatccccagcaggagcaggagcgggagcggcccgtggaccgggagcccgtggaccgggagccggtggtgtgccaccccgacctggaggagcggctgcaggcctggccagcggagctgcctgatgagttctttgagctgacggtggacgacgtgagaagacgcttggcccagctcaagagtgagcggaagcgcctggaagaagcccccttggtgaccaaggccttcagggaggcgcagataaaggagaagctggagcgctacccaaaggtggctctgagggtcctgttccccgaccgctacgtcctacagggcttcttccgccccagcgagacagtgggggacttgcgagacttcgtgaggagccacctggggaaccccgagctgtcattttacctgttcatcacccctccaaaaacagtcctggacgaccacacgcagaccctctttcagccccagcttggtgaccgggtggctccattcaccctgggtccctcgctgaaacggtgcctgggaccagagcagagaacacgcttgccagtggtaggagatggaggcgacgtggactctgggaggcttcttttttggggtccatccagaggccgagcctctccaagcactggtcagcctccatgccacccagtctgccgaccctcctctccaccatcccctcgtccgagcagtggcgatccctcccgagtcaaggctgggcacaagcacgtggggacaggccgggcgaacctcttcccggccgctctggtgcacttgggagccgaggagccggcaggtgtctacctggagcctggcctgctggagcatgccatctccccatctgcggccgatgtgctggtggccaggtacatgtccagggccgccgggtccccttccccattgccagcccctgaccctgcacctaagtctgagccagctgctgaggagggggcgctggtcccccctgagcccatcccagggacggcccagcccgtgaagaggagcctgggcaaggtgcccaagtggctgaagctgccggccagcaagaggtgagagctgccagcctgaggtgcccactccgccagccacaggaccacctcctctgccagcaggaataaagacttgtgcatccctc

SEQ ID NO: 87939 - DNA, 1944 bp, Artificial Sequence
  derived and/or modified sequence
atggccgcccccgccggcggcggcggcagcgccgtgagcgtgctggcccccaacggtcggagacacactgtcaaggtgaccccctccacggtactcctccaggtcttagaggacacttgtcggagacaggattttaacccgtgcgagtatgacctgaagttccaacggagtgtgctcgatttatccctccaatggcggttcgccaaccttcctaataacgcgaaactggagatggttcctgccagtcgctccagagaaggaccagaaaatatggtaaggatcgctctgcaacttgacgatggtagccgccttcaggattccttctgtagcggacagacattatgggagctgctctcccatttccctcagatccgtgagtgcctccagcatccggggggggctacccctgtctgcgtgtataccagagatgaggtcacgggcgaggcggccctgagaggcaccaccctccagtcccttggactcacaggaggaagtgcaactatccggttcgtgatgaagtgctacgatcccgtgggcaaaacgcctggttccctaggttcgtctgccagtgcaggccaggcagccgcatccgcacctctgccattggagagcggagagctctctagaggtgacctgtccaggcccgaggacgctgatactagcgggccctgttgtgaacatacccaggagaaacaatctaccagggccccagccgcggctccatttgtccccttcagtggggggggtcagcggctcggaggtccccccggcccaacaaggcccctgacgagctcgagtgcgaaactgcctaaaagtctcagctctccaggtggcccatcaaagcccaagaaatccaagtccgggcaagaccctcagcaagaacaagagcaagaacgcgaacgcgatccacagcaggagcaggaacgggagaggcccgtcgacagagaaccggtggacagggaaccggtggtgtgccatcctgatctggaagagcggctccaagcctggcctgccgaactccccgatgaattctttgagctgactgtggacgatgtgagacgtagactcgctcagctcaaaagcgaacgtaagcgcctagaggaagcccccctcgtcactaaagccttccgagaagctcaaattaaagagaagttggagagataccctaaggtagcccttcgggttttatttccagaccgttacgtccttcaaggcttctttagaccatccgagacagtgggggatcttagggactttgtgagatcccacctgggcaaccctgagctatcattctacctgtttattacaccgccaaaaactgttctggacgatcatacccagaccctgtttcagcctcaacttggcgaccgagttgcaccatttacgctgggcccaagcctgaaaagatgcctgggaccagagcagagaacaagattaccggtcgttggagacgggggtgatgtcgactccggccggctgctattctggggaccgagcagaggaagagctagcccatccaccggccagccgccatgtcatcccgtttgtcgaccatcctcccccccatctccaaggccatcctctggagatccatcccgggtaaaggccggtcacaaacatgtgggcacaggccgagcaaacctcttccccgccgcgctcgtgcacctcggagctgaggagccagccggggtctatcttgagcctggattacttgagcacgctatctcgccttcagcggccgacgtactggtcgctcggtacatgagcagggcggcaggctccccaagtcctctccctgctcccgatcccgccccaaaatcggagcctgccgctgaggaaggggctctcgtgcctccggaaccgattcctggcaccgctcagccggtcaagagatcgttgggcaaggttccaaagtggctgaaactgcctgcgtccaagcgatag

SEQ ID NO: 87940 - DNA, 1944 bp, Artificial Sequence
  derived and/or modified sequence
atggctgcgcctgccggagggggaggaagcgcggtcagcgtgctggcacctaatgggagacgacacacggtgaaagttactccttcaaccgttttgctccaggtactcgaggatacatgtcgaaggcaggacttcaatccctgtgagtatgacctcaagttccaacggtctgtgttggacttgagcctgcagtggcggtttgctaacctgcctaataatgcaaagctagagatggtgccagcgtcacgctccagagagggtcctgagaacatggtccgtatcgcccttcaactggacgatgggtctcgtctgcaggatagtttctgcagcgggcagacgctgtgggagctcctcagtcattttccacaaattagagagtgccttcagcacccaggtggcgcaacccctgtgtgcgtgtatacgcgtgatgaggtcactggcgaagctgctctgcgcggaactaccctacagtcacttggcctgacaggaggcagtgccaccatccggtttgttatgaagtgctacgacccagtggggaagactccaggttctttagggtctagtgcctctgctggtcaggcagcggcttcagctcccctgccattagagtcgggcgaattgtccagaggagacctctcgagacccgaagatgctgacacctcaggaccatgttgtgagcacactcaggaaaagcagtcaactcgcgctcctgctgcagcacctttcgtgccattctccggagggggtcaacgtctgggcggaccccctgggccaacccggccattgacatcctcaagcgctaagctgcctaagagtctgagctcccccggtggcccatctaagcctaaaaagtctaagtctggacaggatcctcagcaggagcaagagcaagaaagagagagagatccgcagcaggagcaagagagagagcgacccgtggatcgggagccagtggacagggagccagtcgtgtgccacccagatctagaggaacgcttacaggcctggcctgccgagttgcccgacgaattctttgagcttactgttgacgacgtgagacgaagactcgctcagctaaaaagcgagaggaaaaggctggaagaagccccactcgtaaccaaggcttttcgcgaagcccagatcaaggaaaagctcgagcgttatccaaaagtcgcattgcgcgtcctgttccctgatcgatacgtgcttcaaggcttttttcgcccttctgaaacggttggtgatctccgcgacttcgtccgcagccacctgggcaacccagaactgtctttctatctcttcattactcccccaaaaacagtgctcgatgatcacacccaaacactcttccagccccaactcggtgacagggtggcaccttttacacttggtcccagtctgaagcgctgcttggggcctgaacaacgtacacggctccctgttgtcggggatggaggggacgtggatagcggcaggttgctgttctggggcccttcaagaggccgagcttccccctctaccggccagccaccctgccaccctgtgtgccggcctagctcccctccctctccaaggccctccagtggtgatccgtcccgcgtcaaggcgggtcacaagcacgtgggcactggtagagccaatcttttccctgccgctcttgtacaccttggggctgaggagccagcaggggtgtacctagaacccggtctgctagagcacgcaatatcaccgagcgcagccgatgttctggtggccaggtacatgagccgggcagctgggtcacctagtccgttacccgctccagaccccgctcctaagtccgaacccgcagctgaagagggcgcactagtgcccccagaaccaatcccagggaccgctcaaccagtgaagcgctctcttggaaaggtgcctaaatggctgaaactccctgcctcaaagcgatag

SEQ ID NO: 87941 - DNA, 1944 bp, Artificial Sequence
  derived and/or modified sequence
atggccgcccccgccggcggcggcggcagcgccgtgagcgtgctggcccccaacggcagaagacacaccgtgaaggtgacccccagcaccgtgctgctgcaggtgctggaggacacctgcagaagacaggacttcaacccctgcgagtacgacctgaagttccagagaagcgtgctggacctgagcctgcagtggagattcgccaacctgcccaacaacgccaagctggagatggtgcccgccagcagaagcagagagggccccgagaacatggtgagaatcgccctgcagctggacgacggcagcagactgcaggacagcttctgcagcggccagaccctgtgggagctgctgagccacttcccccagatcagagagtgcctgcagcaccccggcggcgccacccccgtgtgcgtgtacaccagagacgaggtgaccggcgaggccgccctgagaggcaccaccctgcagagcctgggcctgaccggcggcagcgccaccatcagattcgtgatgaagtgctacgaccccgtgggcaagacccccggcagcctgggcagcagcgccagcgccggccaggccgccgccagcgcccccctgcccctggagagcggcgagctgagcagaggcgacctgagcagacccgaggacgccgacaccagcggcccctgctgcgagcacacccaggagaagcagagcaccagagcccccgccgccgcccccttcgtgcccttcagcggcggcggccagagactgggcggcccccccggccccaccagacccctgaccagcagcagcgccaagctgcccaagagcctgagcagccccggcggccccagcaagcccaagaagagcaagagcggccaggacccccagcaggagcaggagcaggagagagagagagacccccagcaggagcaggagagagagagacccgtggacagagagcccgtggacagagagcccgtggtgtgccaccccgacctggaggagagactgcaggcctggcccgccgagctgcccgacgagttcttcgagctgaccgtggacgacgtgagaagaagactggcccagctgaagagcgagagaaagagactggaggaggcccccctggtgaccaaggccttcagagaggcccagatcaaggagaagctggagagataccccaaggtggccctgagagtgctgttccccgacagatacgtgctgcagggcttcttcagacccagcgagaccgtgggcgacctgagagacttcgtgagaagccacctgggcaaccccgagctgagcttctacctgttcatcaccccccccaagaccgtgctggacgaccacacccagaccctgttccagccccagctgggcgacagagtggcccccttcaccctgggccccagcctgaagagatgcctgggccccgagcagagaaccagactgcccgtggtgggcgacggcggcgacgtggacagcggcagactgctgttctggggccccagcagaggcagagccagccccagcaccggccagcccccctgccaccccgtgtgcagacccagcagcccccccagccccagacccagcagcggcgaccccagcagagtgaaggccggccacaagcacgtgggcaccggcagagccaacctgttccccgccgccctggtgcacctgggcgccgaggagcccgccggcgtgtacctggagcccggcctgctggagcacgccatcagccccagcgccgccgacgtgctggtggccagatacatgagcagagccgccggcagccccagccccctgcccgcccccgaccccgcccccaagagcgagcccgccgccgaggagggcgccctggtgccccccgagcccatccccggcaccgcccagcccgtgaagagaagcctgggcaaggtgcccaagtggctgaagctgcccgccagcaagagatag

SEQ ID NO: 87942 - protein, 670 aa, Artificial Sequence
  derived and/or modified sequence
MPAVDKLLLEEALQDSPQTRSLLSVFEEDAGTLTDYTNQLLQAMQRVYGAQNEMCLATQQLSKQLLAYEKQNFALGKGDEEVISTLHYFSKVVDELNLLHTELAKQLADTMVLPIIQFREKDLTEVSTLKDLFGLASNDVCLFLEHDLSMAKYSRLPKKKENEKVKTEVGKEVAAARRKQHLSSLQYYCALNALQYRKQMAMMEPMIGFAHGQINFFKKGAEMFSKRMDSFLSSVADMVQSIQVELEAEAEKMRVSQQELLSVDESVYTPDSDVAAPQINRNLIQKAGYLNLRNKTGLVTTTWERLYFFTQGGNLMCQPRGAVAGGLIQDLDNCSVMAVDCEDRRYCFQITTPNGKSGIILQAESRKENEEWICAINNISRQIYLTDNPEAVAIKLNQTALQAVTPITSFGKKQESSCPSQNLKNSEMENENDKIVPKATASLPEAEELIAPGTPIQFDIVLPATEFLDQNRGSRRTNPFGETEDESFPEAEDSLLQQMFIVRFLGSMAVKTDSTTEVIYEAMRQVLAARAIHNIFRMTESHLMVTSQSLRLIDPQTQVSRANFELTSVTQFAAHQENKRLVGFVIRVPESTGEESLSTYIFESNSEGEKICYAINLGKEIIEVQKDPEALAQLMLSIPLTNDGKYVLLNDQPDDDDGNPNEHRGAESEA

SEQ ID NO: 87943 - DNA, 2190 bp, Artificial Sequence
  derived and/or modified sequence
agtgctctcggccgccgcgtctcctgccctctgtccttccaacccagccctcggctgagccgcgccgcaccatgcccgccgtggacaagctcctgctagaggaggcgttgcaggacagcccccagactcgctctttactgagcgtgtttgaagaagatgctggcaccctcacagactataccaaccagctgctccaggcaatgcagcgcgtctatggagcccagaatgagatgtgcctggccacacaacagctttctaagcaactgctggcatatgaaaaacagaactttgctcttggcaaaggtgatgaagaagtaatttcaacactccactatttttccaaagtggtggatgagcttaatcttctccatacagagctggctaaacagttggcagacacaatggttctacctatcatacaattccgagaaaaggatctcacagaagtaagcactttaaaggatctatttggactcgctagcaatgatgtctgtttatttttagagcatgacctctcaatggcaaaatacagcaggctgcctaagaaaaaggagaatgagaaggtgaagaccgaagtcggaaaagaggtggccgcggcccggcggaagcagcacctctcctcccttcagtactactgtgccctcaacgcgctgcagtacagaaagcaaatggccatgatggagcccatgataggctttgcccatggacagattaacttttttaagaagggagcagagatgttttccaaacgtatggacagctttttatcctccgttgcagacatggttcaaagcattcaggtagaactggaagccgaggcggaaaagatgcgggtgtcccagcaagaattactttctgttgatgaatctgtttacactccagactctgatgtggccgcaccacagatcaacaggaacctcatccagaaggctggttaccttaatcttagaaacaaaacagggctggtcaccaccacctgggagaggctttatttcttcacccaaggcgggaatctcatgtgtcagcccaggggagccgtggctggaggtttgatccaggacctggacaactgctcagtgatggccgtggattgcgaagaccggcgctactgcttccagatcaccacgcccaatggaaaatcgggaataatcctccaggctgagagcagaaaggaaaatgaagagtggatatgtgcaataaacaacatctccagacagatctacctgaccgacaaccctgaggcagtcgcgatcaagttgaatcagaccgctctgcaagcagtgactcccattacaagttttggaaaaaaacaagaaagctcatgccccagccagaacctgaaaaattcagagatggaaaatgaaaatgacaagattgttcccaaagcaacagccagtctacctgaagcagaggagctgatcgcgcctggaacgccgattcaattcgatattgtgcttcctgctacagaattccttgatcagaacagagggagcaggcgtaccaacccttttggtgaaactgaggatgaatcatttccagaagcagaagattctcttttgcagcagatgtttatagttcggtttttgggatcaatggcagttaaaacagacagcactactgaagtgatttatgaagcgatgagacaagtattggctgctcgggctattcataacatcttccgcatgacagaatcccatctgatggtcaccagtcaatctttgaggttgatagatccacagactcaagtatcaagggccaattttgaacttaccagtgtcacacaatttgctgctcatcaagaaaacaagagactggttggttttgtcatccgtgttcctgaatccactggagaagaatctctgagtacatacatttttgaaagcaactcagaaggcgaaaagatatgttatgctattaatttgggaaaagaaattattgaggttcagaaggatccagaagcactggctcaattaatgctgtccataccactaaccaatgacggaaaatatgtactgttaaacgatcaaccagatgacgatgatggaaatccaaacgaacatagaggcgcagaatccgaagcataactcacttgcgcctgtgggggaagagcaaacaggaaggagagctacctcctaagggttttaacgtctctgacatacaggcacactgacctgatttccgaaggctgac

SEQ ID NO: 87944 - DNA, 2013 bp, Artificial Sequence
  derived and/or modified sequence
atgcctgccgtcgataaactgctactggaagaggcattacaagactccccccaaacccggagcctcctcagcgttttcgaggaggatgccggcacacttactgactatactaaccagcttctgcaagctatgcaacgtgtctacggagcacagaatgaaatgtgtctcgcaacacagcagctaagcaaacagctcctagcttacgaaaaacagaatttcgccctgggcaagggagatgaagaagtgattagtacactccactattttagtaaagtcgtggatgaattgaacttactgcatactgagcttgctaagcagctggctgatactatggtgctgcccatcatccagttccgggagaaggacctgaccgaggtatcaacacttaaggacctgttcggactcgcctctaacgatgtgtgtttgttccttgagcacgatttgtcgatggcaaagtacagcaggttgccaaagaaaaaagaaaatgagaaggtgaaaactgaggtaggaaaggaggtcgccgccgcgcgccgaaagcagcacctgtctagtctacagtattactgtgccttaaacgccttacagtatagaaaacagatggcgatgatggagccgatgataggattcgcccatggccaaattaacttcttcaaaaagggggccgagatgttcagcaaaaggatggacagcttcctttcatcagtagccgatatggtgcagtcaattcaggtcgagcttgaggccgaagctgaaaagatgcgagtgtcacaacaggaacttttatcagtggacgaaagcgtttataccccagatagcgatgtggctgctccacagatcaatcgtaatctgatacagaaggcaggatacctaaacttgcgcaataagaccggtctggtgacgacaacctgggaaaggctgtatttctttacacaaggcggcaacctgatgtgccagcctcgaggcgctgtggccgggggcttaatccaggacctggataactgctcggtaatggctgtcgattgcgaggaccggcggtactgtttccaaattactactccgaatgggaaatccggcattatcctccaagcggagagccgaaaggaaaatgaggagtggatttgcgctattaataatataagtcgtcagatttacctaaccgacaacccggaagctgtggcgatcaagctcaatcagaccgccttgcaagcagtgacacccatcaccagtttcggcaagaaacaggaaagcagctgtcctagtcagaacctcaaaaactcggaaatggagaatgagaatgataaaatagtgcccaaggcgacagcatcacttccagaggcagaggaattaatcgctccgggcacccctatccagttcgacatcgtgctgcctgcaacggagtttctggatcagaataggggttctaggcgcacaaaccctttcggggaaactgaggatgaatcctttcctgaagcagaggacagcctacttcagcagatgtttattgtgcgcttcctggggtcaatggctgttaagacagactcaactactgaggtgatctacgaggcaatgcggcaggtactcgccgcgagagcaattcataacatttttaggatgacagagagtcaccttatggtgacctcccagagcttgcggctcatcgaccctcagactcaggtcagcagagccaattttgagctgacatctgtaactcaattcgccgcccaccaggagaataagcgcctggtcggttttgtaatccgggtgcccgaaagtaccggagaggagtctcttagtacatacatcttcgagagcaattctgaaggagagaaaatatgttatgccataaacctggggaaagagatcattgaagtgcagaaggatcctgaggctctggcccaactcatgctgtccattcctctcactaacgacggtaagtatgtcctgctcaatgaccagcccgacgacgacgacggtaatcctaacgaacatcggggcgccgagtctgaagcgtag

SEQ ID NO: 87945 - DNA, 2013 bp, Artificial Sequence
  derived and/or modified sequence
atgcctgctgtggacaagctgctgctggaggaggccctgcaggacagcccccagaccaggagcctgctgtctgtgtttgaggaggatgctggcaccctgacagactacaccaaccagctgctgcaggccatgcagagggtgtatggagcccagaatgagatgtgcctggccacccagcagctgagcaagcagctgctggcctatgagaagcagaactttgccctgggcaaaggagatgaggaggtgatcagcaccctgcactacttcagcaaggtggtggatgagctgaacctgctgcacacagagctggccaagcagctggccgacaccatggtgctgcccatcatccagttccgggagaaggacctgacagaggtgtccaccctgaaggacctgtttggcctggccagcaatgatgtgtgcctcttcctggagcatgacctgtccatggccaagtacagccggctgcccaagaagaaggaaaatgagaaggtgaagacagaggtgggcaaggaggtggccgccgcccggaggaagcagcacctgagcagcctgcagtactactgtgccctgaatgccctgcagtacaggaagcagatggccatgatggagcccatgattggatttgcccacggccagatcaacttcttcaagaagggagctgagatgttcagcaagaggatggacagcttcctgagctctgtggccgacatggtgcagagcatccaggtggagctggaggccgaggccgagaagatgagggtgtcccagcaggagctgctgtctgtggatgagagcgtgtacaccccagacagtgatgtggccgccccccagatcaacagaaacctgatccagaaggccggctacctgaacctgaggaacaagacaggcctggtgaccaccacctgggagcggctgtacttcttcacccagggcggcaacctgatgtgccagcccagaggagctgtggccggcggcctcatccaggacctggacaactgcagcgtgatggctgtggactgtgaggaccggcgctactgcttccagatcaccacccccaacgggaagagcggcatcatcctgcaggccgagagcaggaaagaaaatgaggagtggatctgtgccatcaacaacatcagccggcagatctacctgacagacaaccctgaggccgtggccatcaagctgaaccagacagccctgcaggccgtgacccccatcaccagctttgggaagaagcaggagagcagctgccccagccagaacctgaagaacagcgagatggagaatgaaaatgacaagatcgtgcccaaggccacagccagcctgcctgaggccgaggagctgattgcccctggcacccccatccagtttgacatcgtgctgcctgccacagagttcctggaccagaacagaggcagcaggaggaccaacccctttggagaaacagaagatgagagcttccctgaggccgaggacagcctgctgcagcagatgtttattgtgcgcttcctgggctccatggctgtgaagacagacagcaccacagaggtgatctatgaggccatgaggcaggtgctggccgcccgggccatccacaacatcttcaggatgacagagagccacctgatggtgaccagccagagcctgcggctgattgacccccagacccaggtgtcccgggccaactttgagctgacctctgtgacccagtttgctgcccaccaggagaacaagaggctggtgggcttcgtcatccgggtgcctgagagcactggagaggagagcctgagcacctacatctttgagagcaacagcgagggggagaagatctgctacgccatcaacctgggcaaggagatcatcgaggtgcagaaggaccctgaggccctggcccagctgatgctgagcatccccctgaccaatgatggcaagtatgtgctgctgaatgaccagccagatgatgatgatggcaaccccaatgagcacagaggagctgagagcgaggcctag

SEQ ID NO: 87946 - DNA, 2013 bp, Artificial Sequence
  derived and/or modified sequence
atgcccgccgtggacaagctgctgctggaggaggccctgcaggactctccacagacacggtccctgctgagcgtctttgaagaagatgccgggacactgacagactacacgaaccaacttctgcaagcaatgcaacgggtatacggtgcccaaaacgagatgtgtctggctacacagcaactgtccaagcagttgcttgcctacgagaagcagaacttcgccctgggcaagggggatgaagaggtcatcagcacattgcattacttcagcaaagtggtggatgagctgaacttgctgcacaccgaattggcgaaacagcttgcagataccatggtcctgcctatcattcagttcagggaaaaagatcttaccgaggtctccaccctgaaggatctgttcggtttagcgtctaacgacgtgtgcctgtttcttgagcatgatctgagtatggctaaatactcccgcttgcctaagaaaaaagaaaacgaaaaggtgaaaaccgaggtaggaaaagaggtcgcagctgccaggagaaaacagcacctatcaagtctacagtattattgtgctttaaatgctctgcagtatagaaaacaaatggccatgatggagccaatgatcggcttcgcacacgggcagatcaatttcttcaagaaaggtgccgaaatgttttctaaaaggatggattccttcttgtcatctgtggccgatatggtgcagtctatccaggtggagctagaggccgaggcagaaaaaatgagggtgtctcagcaggaacttctctcagtggacgaaagtgtgtacactcctgattcggatgtggccgctcctcagatcaaccgaaatcttattcaaaaagccggttatcttaatttgcgcaataaaactggacttgtgactaccacatgggaaaggctgtatttttttacccagggcggaaatctcatgtgccagcctaggggggccgtggccggaggattgatacaggacctggataattgttctgtcatggctgtggattgcgaggaccgtaggtattgttttcagatcacaacccccaacggcaaaagcggcattattctgcaggccgaatctcggaaggagaacgaggagtggatttgtgcaatcaacaacatatcgcggcagatttacctgacagacaatccagaggctgtggcaataaagttgaaccagaccgcactccaagccgtgacacccattactagtttcggtaagaagcaagaatcctcatgtcccagccaaaacttaaaaaactcagaaatggagaatgagaatgacaagatcgtccctaaggctacagcctctttgcctgaggcagaagaactgatcgccccaggaactccaatccaattcgatattgtactgcctgctacagagtttctggaccagaataggggctcgagaaggactaatcctttcggtgaaactgaagacgagagtttcccagaggccgaagacagtttgttacagcaaatgttcattgtgcgcttcctggggtctatggccgttaaaacagacagcaccacagaggtgatatacgaggctatgaggcaggtgctggccgccagggcgattcacaacatcttccggatgactgagtcccacctgatggtcacctctcagtcattgcggttgatcgaccctcagacacaagtcagcagagccaactttgagctgacgtctgtgacacagttcgccgcacaccaggaaaacaaaaggcttgtcggttttgttatccgcgtgccggagagcacaggcgaagagagcctgtccacctatatctttgagtccaactctgagggagaaaagatctgttatgctatcaacctgggtaaagagattatcgaggtgcagaaagatccagaagcgcttgctcaattaatgctatccatccctctaacgaatgatgggaaatacgtgctcctcaacgatcaaccggatgatgacgacggaaatcctaacgagcacagaggcgcggagtccgaggcttag

SEQ ID NO: 87947 - DNA, 2013 bp, Artificial Sequence
  derived and/or modified sequence
atgcccgctgtggacaagctgctccttgaggaggctttgcaggacagcccccaaactagatctctcctttcagttttcgaggaggatgctggtaccctgacagactacaccaatcaactgctccaggcaatgcaaagggtgtatggagcccagaatgaaatgtgtctagcaacccaacagctctcaaaacagttgcttgcgtacgagaaacagaactttgcgctcggtaagggcgatgaggaagtgatctctacactgcactacttctctaaggtcgtagacgaactaaaccttctccacacagagctagccaagcagctggccgacaccatggttctgccaattatccaattcagagaaaaagacctaaccgaggtcagcactctcaaggacctctttgggctggcatctaatgacgtatgcctcttcttagaacacgatctgtccatggctaagtatagtcgtctgcccaaaaaaaaggagaacgaaaaagtgaaaaccgaggtaggcaaagaggtggctgcggctcggaggaagcaacatctctcttcattgcagtattactgtgccctcaatgcccttcagtatcggaagcagatggcaatgatggagcctatgatcggattcgcgcatggtcagattaacttctttaaaaagggagcggaaatgttctctaagcggatggatagttttctgtcaagtgtcgccgacatggtccagtccattcaagttgagctggaggccgaggcagaaaaaatgagagtgagccaacaagaacttctgagcgtggatgaatcagtatacaccccggacagcgacgtagccgcaccacagatcaataggaacctgatacaaaaggctgggtacttgaatttgaggaacaaaactggcctcgttacaaccacctgggagaggctctatttctttacgcaggggggtaatctaatgtgccagccacgaggcgctgttgcaggagggctcatccaagatctggacaattgctcagtgatggccgtagattgcgaggacagacggtattgttttcagataaccactcccaacggaaaaagcggaattatcctgcaggcagagtcccgcaaggagaacgaagaatggatttgcgccatcaacaatattagcaggcagatctacttaacagataatcctgaggctgtggctatcaaactgaaccagacggccctccaggccgttaccccaatcacctcttttggaaaaaagcaagagtcttcatgtccgtctcaaaaccttaagaactcggagatggaaaatgagaatgataaaattgtgccaaaagcaaccgcctccctcccagaggccgaggagttgatagcgcctggcacgccaattcaattcgatattgtccttccggctactgaattcctggaccagaatagagggtcccgcaggacaaatcctttcggagagacggaggacgagagcttcccagaggctgaagacagccttctccagcagatgttcatagtgaggttcctgggctcgatggcagtgaagacagactctacgacagaagtaatctatgaggctatgagacaggtgctggccgcacgcgctattcacaatatctttagaatgacagaaagccatctcatggtgactagccaatccctgaggctgattgatccccagactcaggtgagccgggctaattttgagctcacctctgttacccagttcgccgctcaccaggaaaataaacgtctggtaggtttcgtgatccgtgttccagagagtacaggcgaggaatctctaagcacatacatatttgaatctaattcggagggggaaaagatctgctacgctattaatctgggtaaagagattattgaggtgcagaaggacccagaggctttagcgcagttgatgctgagtatccctctgacaaatgacgggaagtatgttctgttgaacgaccagccagatgatgatgatggcaatccaaacgagcataggggtgctgagtcagaggcctag

SEQ ID NO: 87948 - DNA, 2013 bp, Artificial Sequence
  derived and/or modified sequence
atgcccgccgtggacaagctgctgctggaggaggccctgcaggacagcccccagaccagaagcctgctgagcgtgttcgaggaggacgccggcaccctgaccgactacaccaaccagctgctgcaggccatgcagagagtgtacggcgcccagaacgagatgtgcctggccacccagcagctgagcaagcagctgctggcctacgagaagcagaacttcgccctgggcaagggcgacgaggaggtgatcagcaccctgcactacttcagcaaggtggtggacgagctgaacctgctgcacaccgagctggccaagcagctggccgacaccatggtgctgcccatcatccagttcagagagaaggacctgaccgaggtgagcaccctgaaggacctgttcggcctggccagcaacgacgtgtgcctgttcctggagcacgacctgagcatggccaagtacagcagactgcccaagaagaaggagaacgagaaggtgaagaccgaggtgggcaaggaggtggccgccgccagaagaaagcagcacctgagcagcctgcagtactactgcgccctgaacgccctgcagtacagaaagcagatggccatgatggagcccatgatcggcttcgcccacggccagatcaacttcttcaagaagggcgccgagatgttcagcaagagaatggacagcttcctgagcagcgtggccgacatggtgcagagcatccaggtggagctggaggccgaggccgagaagatgagagtgagccagcaggagctgctgagcgtggacgagagcgtgtacacccccgacagcgacgtggccgccccccagatcaacagaaacctgatccagaaggccggctacctgaacctgagaaacaagaccggcctggtgaccaccacctgggagagactgtacttcttcacccagggcggcaacctgatgtgccagcccagaggcgccgtggccggcggcctgatccaggacctggacaactgcagcgtgatggccgtggactgcgaggacagaagatactgcttccagatcaccacccccaacggcaagagcggcatcatcctgcaggccgagagcagaaaggagaacgaggagtggatctgcgccatcaacaacatcagcagacagatctacctgaccgacaaccccgaggccgtggccatcaagctgaaccagaccgccctgcaggccgtgacccccatcaccagcttcggcaagaagcaggagagcagctgccccagccagaacctgaagaacagcgagatggagaacgagaacgacaagatcgtgcccaaggccaccgccagcctgcccgaggccgaggagctgatcgcccccggcacccccatccagttcgacatcgtgctgcccgccaccgagttcctggaccagaacagaggcagcagaagaaccaaccccttcggcgagaccgaggacgagagcttccccgaggccgaggacagcctgctgcagcagatgttcatcgtgagattcctgggcagcatggccgtgaagaccgacagcaccaccgaggtgatctacgaggccatgagacaggtgctggccgccagagccatccacaacatcttcagaatgaccgagagccacctgatggtgaccagccagagcctgagactgatcgacccccagacccaggtgagcagagccaacttcgagctgaccagcgtgacccagttcgccgcccaccaggagaacaagagactggtgggcttcgtgatcagagtgcccgagagcaccggcgaggagagcctgagcacctacatcttcgagagcaacagcgagggcgagaagatctgctacgccatcaacctgggcaaggagatcatcgaggtgcagaaggaccccgaggccctggcccagctgatgctgagcatccccctgaccaacgacggcaagtacgtgctgctgaacgaccagcccgacgacgacgacggcaaccccaacgagcacagaggcgccgagagcgaggcctag

SEQ ID NO: 87949 - protein, 142 aa, Artificial Sequence
  derived and/or modified sequence
MREYKLVVLGSGGVGKSALEQFTAMRDLYMKNGQGFALVYSITAQSTFNDLQDLREQILRVKDTDDVPMILVGNKCDLEDERVVGKEQGQNLARQWNNCAFLESSAKSKINVNEIFYDLVRQINRKTPVPGKARKKSSCQLL

SEQ ID NO: 87950 - DNA, 357 bp, Artificial Sequence
  derived and/or modified sequence
atgcgagacctatatatgaagaacggtcagggcttcgctttggtatattctatcactgcacagagcactttcaatgatttgcaggatctacgcgagcagatcctgcgggtgaaagacacggacgacgtaccaatgatactcgtgggcaataagtgtgacctggaggacgagcgcgtcgtgggaaaagagcagggacagaacctggctcgtcagtggaacaattgcgccttcctagagtcctccgccaagagcaagattaatgttaatgaaatattctacgacctggtgaggcagatcaaccgcaaaacgcccgtacctggcaaggcccgcaagaagtcctcctgccaactcctctag

SEQ ID NO: 87951 - DNA, 429 bp, Artificial Sequence
  derived and/or modified sequence
atgcgcgaatataaactggttgtcttggggtccggcggagtggggaagagcgccctcgaacagttcaccgcaatgcgggacctttacatgaaaaacgggcagggcttcgcactcgtgtatagtatcacagcacagagtacgtttaacgatctgcaggatctgagagaacaaatcctgagggttaaagacactgacgacgtgcccatgattctggtgggcaataaatgcgatttagaagacgaacgggtcgtgggcaaggagcagggtcagaatctggctcgtcagtggaacaactgcgcgtttctcgagtctagcgcaaaaagcaagatcaacgtgaacgagatattctatgatcttgtccgccagatcaaccggaaaactccagtcccaggcaaggctcgtaaaaaatcttcttgccagctgttgtag

SEQ ID NO: 87952 - DNA, 429 bp, Artificial Sequence
  derived and/or modified sequence
atgagggaatacaaattggtcgtgttaggaagtggcggagtgggaaagagtgccctcgaacagttcacggcgatgcgcgacttgtacatgaaaaacgggcagggctttgcattggtgtactcgatcacagcgcaaagcaccttcaacgatttgcaggacctccgggagcagatcctgcgggttaaagatactgatgatgttccgatgatcttggtcggcaacaagtgtgaccttgaagacgagagggttgtcggaaaagaacagggccagaatctggctagacagtggaataattgcgcctttttagaatcttctgcaaagtctaagatcaatgttaacgagatcttttacgatctcgttaggcaaatcaaccgcaaaacccccgtacctggaaaggcgagaaagaagtctagttgtcaactgctatag

SEQ ID NO: 87953 - DNA, 357 bp, Artificial Sequence
  derived and/or modified sequence
atgcgagacttgtacatgaaaaacggtcagggcttcgccctggtctatagcattacagctcagtcaacctttaacgatctccaggacctcagagagcagatcctgcgggtgaaggatacagatgacgtaccaatgattttggtcggcaacaagtgtgatctggaggacgaacgcgtcgtgggaaaagagcaaggacaaaacctagcgaggcaatggaataattgcgccttcctggaatcctctgctaagagcaagattaacgttaatgaaattttctacgacctggtgcgccagattaaccgcaaaaccccggtgccagggaaagctaggaaaaaaagtagctgccaattgctttag

SEQ ID NO: 87954 - DNA, 357 bp, Artificial Sequence
  derived and/or modified sequence
atgagggacctgtacatgaagaatggccagggctttgccctggtgtacagcatcacagcccagagcaccttcaatgacctgcaggacctgcgggagcagatcctgcgggtgaaggacacagatgatgtgcccatgatcctggtgggcaacaagtgtgacctggaggatgagcgggtggtgggcaaggagcagggccagaacctggcccggcagtggaacaactgtgccttcctggagagcagcgccaagagcaagatcaacgtgaatgagatcttctatgacctggtgcggcagatcaacaggaagacccctgtgcctgggaaggccaggaagaagagcagctgccagctgctgtag

SEQ ID NO: 87955 - DNA, 429 bp, Artificial Sequence
  derived and/or modified sequence
atgagggagtacaagctggtggtgctgggcagcggaggagtgggcaagagcgccctggagcagttcaccgccatgagggacctgtacatgaagaatggccagggctttgccctggtgtacagcatcacagcccagagcaccttcaatgacctgcaggacctgcgggagcagatcctgcgggtgaaggacacagatgatgtgcccatgatcctggtgggcaacaagtgtgacctggaggatgagcgggtggtgggcaaggagcagggccagaacctggcccggcagtggaacaactgtgccttcctggagagcagcgccaagagcaagatcaacgtgaatgagatcttctatgacctggtgcggcagatcaacaggaagacccctgtgcctgggaaggccaggaagaagagcagctgccagctgctgtag

SEQ ID NO: 87956 - DNA, 357 bp, Artificial Sequence
  derived and/or modified sequence
atgcgggacctgtacatgaagaacggccagggcttcgccctggtgtactcaatcaccgcccagtccacattcaacgatctgcaggaccttcgagaacagatccttagggtaaaagacacggatgacgttcccatgatactcgtgggtaacaagtgcgaccttgaagacgagcgtgttgttggtaaggagcagggacagaacctggctaggcaatggaataattgtgccttcctggaatcatcggcaaagtctaagattaacgtgaatgagatcttttacgatctcgtgagacagatcaacaggaaaacccccgttcctggcaaggccagaaagaaatctagctgccagcttctgtag

SEQ ID NO: 87957 - DNA, 429 bp, Artificial Sequence
  derived and/or modified sequence
atgcgggagtacaagctggtggtgctgggcagcggcggcgtgggcaagtcagccctggaacaattcactgccatgcgggacctatacatgaagaacgggcagggctttgcactggtgtatagcatcacggcccagtccactttcaacgacctacaagatctgagggaacagatattaagagtgaaggatacagacgatgttccaatgattctcgtggggaataagtgtgatttagaggatgaacgggtggtggggaaggagcagggtcagaacctggccaggcagtggaacaactgcgccttcctcgagagcagtgcaaaatctaaaataaatgtgaatgagattttctatgatctggtgcgacagataaatagaaagactccagtgcccggaaaggcccggaagaaatcatcttgccaactgctgtag

SEQ ID NO: 87958 - DNA, 429 bp, Artificial Sequence
  derived and/or modified sequence
atgcgggagtacaagctggtggtgctgggcagcggcggcgtgggcaagtccgcgttggagcaattcacagcaatgcgagacctgtacatgaaaaacgggcaggggttcgcgctggtttatagtatcacagcgcagtcgactttcaacgacctccaagacctaagggagcagatactccgggttaaggacaccgacgatgtacctatgattttagtgggaaataagtgcgatctggaggacgagcgggtggttggcaaagagcagggccagaatctggctcgccagtggaacaactgcgcctttctcgagtccagcgcgaagtccaaaattaatgtaaacgaaatcttttacgacctagtgcggcagataaacaggaaaacacctgtgcccggtaaggctcggaagaaaagttcctgtcaactcctgtag

SEQ ID NO: 87959 - DNA, 357 bp, Artificial Sequence
  derived and/or modified sequence
atgcgggacctgtacatgaagaacggccagggcttcgccctggtgtactccatcacagcacagagtactttcaacgaccttcaagatctccgcgaacagatcctgcgagtgaaagacacagacgacgtgccgatgattcttgtcgggaataagtgcgacctagaagacgagagggtcgtaggcaaagagcaagggcagaatcttgctcgacaatggaacaactgcgcgttcttggagagcagtgccaagtcaaagattaatgtgaatgagatcttctacgatctggtccgacaaatcaatcggaagacacctgtacctggcaaggccaggaagaaaagcagctgtcaactgctatag

SEQ ID NO: 87960 - DNA, 357 bp, Artificial Sequence
  derived and/or modified sequence
atgagggatctctacatgaaaaacggacagggatttgccctggtgtactccatcacagcccagagcacattcaatgacttacaggacctgagggaacagattctgcgcgtcaaagatacggatgatgtccccatgatcttagtgggaaacaaatgcgaccttgaggacgagagggttgttggtaaggaacagggccagaatcttgcgagacagtggaacaactgtgcctttttggaatcatcagcaaagtcaaaaattaatgtcaacgagatcttttatgatctcgtccgccagatcaacaggaagacccctgtccccggaaaggcacgtaaaaaaagctcttgccagcttttatag

SEQ ID NO: 87961 - DNA, 429 bp, Artificial Sequence
  derived and/or modified sequence
atgcgggaatacaagctggtggtgctcggctctgggggagtcggtaaatcagcactggaacagttcaccgctatgagagacctgtatatgaagaacggtcaagggtttgctttggtatacagcatcaccgcccagtcaactttcaacgacctgcaggatctgagggagcaaatactgcgcgtgaaagacaccgacgacgtacctatgatcctcgtggggaacaagtgcgacctcgaggatgagagagtggtcggcaaggaacagggccagaatctcgcccgtcagtggaataactgtgcctttctggaaagctctgccaagagcaagatcaacgttaacgagatcttctacgaccttgttagacagattaatagaaagactcctgtgcctgggaaggctcgcaaaaagagttcctgtcaattattgtag

SEQ ID NO: 87962 - DNA, 429 bp, Artificial Sequence
  derived and/or modified sequence
atgcgggaatacaaactcgttgtccttggctctgggggtgtcgggaagtcagccttggagcagttcacagccatgcgggacctgtatatgaagaacgggcagggcttcgcactggtctattccatcactgctcagtcaacattcaatgacctgcaggacctgcgggagcagattttacgggtgaaagacaccgacgatgtgcccatgattcttgtcggcaacaaatgcgacctggaagacgagcgggtggtcggcaaagagcagggccagaatttggctcgtcagtggaacaattgtgctttcctcgaatcttcagcaaaaagtaagatcaacgttaatgagattttctacgaccttgtaagacagataaaccggaaaacacctgtcccaggcaaggccaggaagaaatcatcatgtcagctgctgtag

SEQ ID NO: 87963 - DNA, 357 bp, Artificial Sequence
  derived and/or modified sequence
atgagggacctgtatatgaagaatggccaaggcttcgccctggtctattcaatcacagcccagtccactttcaacgacctgcaggatctgcgagagcaaattcttcgtgttaaggacacggatgacgtccctatgatcttagtgggtaataagtgcgacctcgaagatgagcgtgtggtggggaaggaacaaggccaaaatctggcgcgacaatggaataactgtgcgtttctggagagtagcgctaagagcaagatcaacgtgaacgagatattttacgacctggtgcgccaaatcaaccgcaagacaccggtcccaggaaaggccaggaaaaagtcctcctgccagctgctttag

SEQ ID NO: 87964 - DNA, 1017 bp, Artificial Sequence
  derived and/or modified sequence
aggcgtgtaaaccagccggagcggcgcggcagcggcaggaccgccgtggcgcctagagtagcgacccggggggagcgcggggcgacgctggctgcagggacccggtgacagcgtgagaggagcaatttacagcaatgagggatttatacatgaaaaatggacaaggatttgcattagtttattccatcacagcacagtccacatttaacgatttacaagacctgagagaacagattcttcgagttaaagacactgatgatgttccaatgattcttgttggtaataagtgtgacttggaagatgaaagagttgtagggaaggaacaaggtcaaaatctagcaagacaatggaacaactgtgcattcttagaatcttctgcaaaatcaaaaataaatgttaatgagatcttttatgacctagtgcggcaaattaacagaaaaactccagtgcctgggaaggctcgcaaaaagtcatcatgtcagctgctttaatatactaaatgcattgtagctctgagccaggtatgttcacttatctttcctctaacttttaatcactcaaccttattaagggcactctgtcatgaaagcaagtatagacttctttttgttggttctgaaaaataaatggtttatttttataagatatccatgagttagtatgctatcttattaattatttacttatcatcatgagtaaagtatttcacataagtattctttttttgagatggagtttcactctgtcacccaggctggagtgcagtggcgcaatatcagctccctgcaacctccgcctcccaggttcaagcaatgcttctgcctcagcctcccgagtagctgggattacaggcacgtgccaccacgcccggctagtttttttgtatttttagtagagatggtgtttcaccattgttggccaggatggtctcaatctcttgacctcgtgatctgcccacctcggcctcccaaagtgctgagattacaggcgtgagccaccactcccagccaaccccgt

SEQ ID NO: 87965 - DNA, 1466 bp, Artificial Sequence
  derived and/or modified sequence
aaacctcgcccagattcaggcgtgtaaaccagccggagcggcgcggcagcggcaggaccgccgtggcgcctagagtagcgacccggggggagcgcggggcgacgctggctgcagggacccggtgacagcgtgagaggtactaggttttgacaagcttgcatcatgcgtgagtataagctagtcgttcttggctcaggaggcgttggaaagtctgctttggagcaatttacagcaatgagggatttatacatgaaaaatggacaaggatttgcattagtttattccatcacagcacagtccacatttaacgatttacaagacctgagagaacagattcttcgagttaaagacactgatgatgttccaatgattcttgttggtaataagtgtgacttggaagatgaaagagttgtagggaaggaacaaggtcaaaatctagcaagacaatggaacaactgtgcattcttagaatcttctgcaaaatcaaaaataaatgttaatgagatcttttatgacctagtgcggcaaattaacagaaaaactccagtgcctgggaaggctcgcaaaaagtcatcatgtcagctgctttaatatactaaatgcattgtagctctgagccaggtctgaagaactgttgcccaattcaacagtgccagcattccaactttgttaaacctaccaacatcttaaatggactttcctgtggtggtaccctttaagaggcggatgaaagctactatatcagtttgcacattctaatcactttccagtatcacaagagagatttttacttatataatagtcctagagtttgcagctggtaaaaccagaggctacatccagtattactgctaagagacattcttcatccaccaatgttgtacatgtatgaaaatggtgtactgtatactttaacatgccccatactttgtattggagagtacaataatgtaaatcctaaaagcaccactattttagcataataaaagaaagtccaaagagctcctatatagactactccagataacttcgcttctttgatacttgtagcttattgtaattttttttaagaaattcaaggtcattattattgtacaaaataagcgctttgattaacacagctatatagtttttttaatttttaaaaaacctgtggagacggtgatcttgtctttaaaacatgatagtcctttcagtataatgtcttagattaaagacgttgcctttaatatctgttgggaaggaaatgtccagacttttcaaatctcttattatatgtttcctttttttgtttacatagggaacaatgtttatagtcgtgtgtacagtgggggtctacaacaagaagtgtatattttcaaacaattttttaatgatttaacaatttttgtaaatcattttcaggcttctgcagctgtagattctcactgtgaatcccttgcttgctcatgcataagtgtatttgc

SEQ ID NO: 87966 - DNA, 977 bp, Artificial Sequence
  derived and/or modified sequence
gtgtaaaccagccggagcggcgcggcagcggcaggaccgccgtggcgcctagagtagcgacccggggggagcgcggggcgacgctggctgcagggacccggtgacagcgtgagaggttcgcagagtactaggttttgacaagcttgcatcatgcgtgagtataagctagtcgttcttggctcaggaggcgttggaaagtctgctttggagcaatttacagcaatgagggatttatacatgaaaaatggacaaggatttgcattagtttattccatcacagcacagtccacatttaacgatttacaagacctgagagaacagattcttcgagttaaagacactgatgatgttccaatgattcttgttggtaataagtgtgacttggaagatgaaagagttgtagggaaggaacaaggtcaaaatctagcaagacaatggaacaactgtgcattcttagaatcttctgcaaaatcaaaaataaatgttaatgagatcttttatgacctagtgcggcaaattaacagaaaaactccagtgcctgggaaggctcgcaaaaagtcatcatgtcagctgctttaatatactaaatgcattgtagctctgagccaggtctgaagaactgttgcccaattcaacagtgccagcattccaactttgttaaacctaccaacatcttaaatggactttcctgtggtggtaccctttaagaggcggatgaaagctactatatcagtttgcacattctaatcactttccagtatcacaagagagatttttacttatataatagtcctagagtttgcagctggtaaaaccagaggctacatccagtattactgctaagagacattcttcatccaccaatgttgtacatgtatgaaaatggtgtactgtatactttaacatgccccatactttgtattggagagtacaataatgtaaatcctaaaagcaccactattttagcataataaaag

SEQ ID NO: 87967 - DNA, 874 bp, Artificial Sequence
  derived and/or modified sequence
agattcaggcgtgtaaaccagccggagcggcgcggcagcggcaggaccgccgtggcgcctagagtagcgacccggggggagcgcggggcgacgctggctgcagggacccggtgacagcgtgagaggagcaatttacagcaatgagggatttatacatgaaaaatggacaaggatttgcattagtttattccatcacagcacagtccacatttaacgatttacaagacctgagagaacagattcttcgagttaaagacactgatgatgttccaatgattcttgttggtaataagtgtgacttggaagatgaaagagttgtagggaaggaacaaggtcaaaatctagcaagacaatggaacaactgtgcattcttagaatcttctgcaaaatcaaaaataaatgttaatgagatcttttatgacctagtgcggcaaattaacagaaaaactccagtgcctgggaaggctcgcaaaaagtcatcatgtcagctgctttaatatactaaatgcattgtagctctgagccaggtctgaagaactgttgcccaattcaacagtgccagcattccaactttgttaaacctaccaacatcttaaatggactttcctgtggtggtaccctttaagaggcggatgaaagctactatatcagtttgcacattctaatcactttccagtatcacaagagagatttttacttatataatagtcctagagtttgcagctggtaaaaccagaggctacatccagtattactgctaagagacattcttcatccaccaatgttgtacatgtatgaaaatggtgtactgtatactttaacatgccccatactttgtattggagagtacaataatgtaaatcctaaaagcacc

SEQ ID NO: 87968 - DNA, 357 bp, Artificial Sequence
  derived and/or modified sequence
atgagagacctgtacatgaagaacggccagggcttcgccctggtgtacagcatcaccgcccagagcaccttcaacgacctgcaggacctgagagagcagatcctgagagtgaaggacaccgacgacgtgcccatgatcctggtgggcaacaagtgcgacctggaggacgagagagtggtgggcaaggagcagggccagaacctggccagacagtggaacaactgcgccttcctggagagcagcgccaagagcaagatcaacgtgaacgagatcttctacgacctggtgagacagatcaacagaaagacccccgtgcccggcaaggccagaaagaagagcagctgccagctgctgtag

SEQ ID NO: 87969 - DNA, 429 bp, Artificial Sequence
  derived and/or modified sequence
atgagagagtacaagctggtggtgctgggcagcggcggcgtgggcaagagcgccctggagcagttcaccgccatgagagacctgtacatgaagaacggccagggcttcgccctggtgtacagcatcaccgcccagagcaccttcaacgacctgcaggacctgagagagcagatcctgagagtgaaggacaccgacgacgtgcccatgatcctggtgggcaacaagtgcgacctggaggacgagagagtggtgggcaaggagcagggccagaacctggccagacagtggaacaactgcgccttcctggagagcagcgccaagagcaagatcaacgtgaacgagatcttctacgacctggtgagacagatcaacagaaagacccccgtgcccggcaaggccagaaagaagagcagctgccagctgctgtag

SEQ ID NO: 87970 - protein, 75 aa, Artificial Sequence
  derived and/or modified sequence
MTEYKLVVVGAGGVGKSALTIQLIQNHFVDEYDPTIEGVDDAFYTLVREIRKHKEKMSKDGKKKKKKSKTKCVIM

SEQ ID NO: 87971 - protein, 165 aa, Artificial Sequence
  derived and/or modified sequence
MREYKLVVLGSGGVGKSALTVQFVQGIFVEKYDPTIEDSYRKEQFTAMRDLYMKNGQGFALVYSITAQSTFNDLQDLREQILRVKDTDDVPMILVGNKCDLEDERVVGKEQGQNLARQWNNCAFLESSAKSKINVNEIFYDLVRQINRKTPVPGKARKKSSCQLL

SEQ ID NO: 87972 - DNA, 498 bp, Artificial Sequence
  derived and/or modified sequence
atgcgggagtacaagctggtggtcctgggtagcggtggtgtgggcaagtctgcactgaccgtgcaatttgtgcagggaatttttgtcgaaaagtatgatcctactattgaagatagctaccgtaaagagcaatttaccgcaatgagggacctgtatatgaaaaacggacagggatttgccctcgtttactccatcaccgcccagtccacattcaacgatctgcaagacctccgcgagcagatactaagggtgaaggacaccgacgatgtaccgatgatcctggtgggcaacaagtgcgacctggaagacgagcgagttgtgggcaaagaacaaggacagaatctcgcgaggcaatggaataattgcgccttcctcgaatcctcagctaagagcaaaatcaacgtaaatgagatcttttatgatttggtgcgacagatcaatagaaagacccccgtgcctggaaaagcacgcaagaagtcgagctgtcaactcctgtag

SEQ ID NO: 87973 - DNA, 498 bp, Artificial Sequence
  derived and/or modified sequence
atgagggagtacaagctggtggtgctgggcagcggaggagtgggcaagagcgccctgactgtgcagtttgtgcagggcatctttgtggagaagtatgaccccaccattgaagattcctacaggaaggagcagttcaccgccatgagggacctgtacatgaagaatggccagggctttgccctggtgtacagcatcacagcccagagcaccttcaatgacctgcaggacctgcgggagcagatcctgcgggtgaaggacacagatgatgtgcccatgatcctggtgggcaacaagtgtgacctggaggatgagcgggtggtgggcaaggagcagggccagaacctggcccggcagtggaacaactgtgccttcctggagagcagcgccaagagcaagatcaacgtgaatgagatcttctatgacctggtgcggcagatcaacaggaagacccctgtgcctgggaaggccaggaagaagagcagctgccagctgctgtag

SEQ ID NO: 87974 - DNA, 498 bp, Artificial Sequence
  derived and/or modified sequence
atgcgggagtacaagctggtggtgctgggcagcggcggcgtgggcaagtctgccctaacagtccagtttgtgcaaggcatttttgtggaaaagtacgaccctaccatagaagactcctatcggaaggagcagttcacagccatgcgggacctttatatgaagaacggtcagggattcgcgttggtctattcgattacagcccagtcgacattcaacgaccttcaagacctcagagagcaaatcttgagagtgaaagatactgatgacgtccctatgattctggttggtaacaagtgtgatctcgaagacgagagagtggtgggcaaagaacaaggtcagaatctggcccggcagtggaataactgtgccttcctggagtcgtctgctaaaagtaagatcaacgttaatgagatcttttacgacctggtacggcagataaatcgcaaaacccctgtcccaggcaaggccagaaagaaatctagctgccagctcctctag

SEQ ID NO: 87975 - DNA, 498 bp, Artificial Sequence
  derived and/or modified sequence
atgagggagtataagctagtggtactcggctccggtggagtgggaaaatcagccctgaccgtgcagttcgttcaggggatcttcgttgagaagtatgatccgactattgaagattcctaccgaaaggaacagtttaccgctatgcgcgatctgtatatgaagaacgggcagggctttgcccttgtctatagcattaccgcacagagcacattcaacgatctgcaggatctaagggaacagatcctccgtgttaaggacaccgacgatgtgcccatgattctggttggaaataagtgcgatctcgaagatgagagagtggtagggaaagagcagggacagaacttggctcgacagtggaataattgtgcttttctggagtcatcagctaaatctaagattaatgtcaacgaaatattctatgatctggttcgtcaaatcaaccgcaagacaccggtgcctggtaaggctcggaaaaagtcttcctgtcaactactctag

SEQ ID NO: 87976 - DNA, 1264 bp, Artificial Sequence
  derived and/or modified sequence
aggcgtgtaaaccagccggagcggcgcggcagcggcaggaccgccgtggcgcctagagtagcgacccggggggagcgcggggcgacgctggctgcagggacccggtgacagcgtgagaggtactaggttttgacaagcttgcatcatgcgtgagtataagctagtcgttcttggctcaggaggcgttggaaagtctgctttgactgtacaatttgttcaaggaatttttgtagaaaaatacgatcctacgatagaagattcttatagaaaggagcaatttacagcaatgagggatttatacatgaaaaatggacaaggatttgcattagtttattccatcacagcacagtccacatttaacgatttacaagacctgagagaacagattcttcgagttaaagacactgatgatgttccaatgattcttgttggtaataagtgtgacttggaagatgaaagagttgtagggaaggaacaaggtcaaaatctagcaagacaatggaacaactgtgcattcttagaatcttctgcaaaatcaaaaataaatgttaatgagatcttttatgacctagtgcggcaaattaacagaaaaactccagtgcctgggaaggctcgcaaaaagtcatcatgtcagctgctttaatatactaaatgcattgtagctctgagccaggtctgaagaactgttgcccaattcaacagtgccagcattccaactttgttaaacctaccaacatcttaaatggactttcctgtggtggtaccctttaagaggcggatgaaagctactatatcagtttgcacattctaatcactttccagtatcacaagagagatttttacttatataatagtcctagagtttgcagctggtaaaaccagaggctacatccagtattactgctaagagacattcttcatccaccaatgttgtacatgtatgaaaatggtgtactgtatactttaacatgccccatactttgtattggagagtacaataatgtaaatcctaaaagcaccactattttagcataataaaagaaagtccaaagagctcctatatagactactccagataacttcgcttctttgatacttgtagcttattgtaattttttttaagaaattcaaggtcattattattgtacaaaataagcgctttgattaacacagctatatagtttttttaatttttaaaaaacctgtggagacggtgatcttgtctttaaaacatgatagtcctttcagtataatgtcttagatt

SEQ ID NO: 87977 - DNA, 498 bp, Artificial Sequence
  derived and/or modified sequence
atgagagagtacaagctggtggtgctgggcagcggcggcgtgggcaagagcgccctgaccgtgcagttcgtgcagggcatcttcgtggagaagtacgaccccaccatcgaggacagctacagaaaggagcagttcaccgccatgagagacctgtacatgaagaacggccagggcttcgccctggtgtacagcatcaccgcccagagcaccttcaacgacctgcaggacctgagagagcagatcctgagagtgaaggacaccgacgacgtgcccatgatcctggtgggcaacaagtgcgacctggaggacgagagagtggtgggcaaggagcagggccagaacctggccagacagtggaacaactgcgccttcctggagagcagcgccaagagcaagatcaacgtgaacgagatcttctacgacctggtgagacagatcaacagaaagacccccgtgcccggcaaggccagaaagaagagcagctgccagctgctgtag

SEQ ID NO: 87978 - protein, 137 aa, Artificial Sequence
  derived and/or modified sequence
MREYKLVVLGSGGVGKSALTVQFVQGIFVEKYDPTIEDSYRKQVEVDAQQCMLEILDTAGTVPMILVGNKCDLEDERVVGKEQGQNLARQWNNCAFLESSAKSKINVNEIFYDLVRQINRKTPVPGKARKKSSCQLL

SEQ ID NO: 87979 - DNA, 99 bp, Artificial Sequence
  derived and/or modified sequence
atgagagaatataagttagtggtcttaggaagcggcggggtgggcaaatccgccctgaccgtgcagttcgtgcaggggatctttgttgagaagtactag

SEQ ID NO: 87980 - DNA, 147 bp, Artificial Sequence
  derived and/or modified sequence
atgagagagtacaagctggtcgtgctgggcagtggtggagtagggaaatctgccttgacagtccagttcgtgcagggcatctttgtcgagaagtacgaccccaccatagaggatagctatagaaaacaggtggaagtcgatgcttag

SEQ ID NO: 87981 - DNA, 162 bp, Artificial Sequence
  derived and/or modified sequence
atgcgagaatacaagttggtagtgcttggttcgggcggagtggggaagtctgcattaaccgtgcagttcgtgcaggggatcttcgttgagaaatatgacccaacaattgaggatagctatcgcaaacaagtggaggtggacgcccagcaatgtatgctgtag

SEQ ID NO: 87982 - DNA, 414 bp, Artificial Sequence
  derived and/or modified sequence
atgagggagtataaactcgttgtacttggcagcggaggcgttggaaagtcggccctgacagtgcagttcgttcagggtattttcgtcgaaaaatacgacccaacaattgaagactcctaccgcaaacaggtagaggtggacgcacagcaatgtatgctggagattcttgataccgctggaacagttcccatgatccttgtaggaaataagtgtgatctggaggacgagagagttgtgggcaaggaacaggggcagaacttagcccggcaatggaacaattgcgccttcctcgaatccagtgccaagtctaagataaacgtgaacgagatattttatgacctggtccggcagataaatcggaagacccccgtccctgggaaagccagaaaaaagagctcttgtcagctcctttag

SEQ ID NO: 87983 - DNA, 99 bp, Artificial Sequence
  derived and/or modified sequence
atgagggagtacaagctggtggtgctgggcagcggaggagtgggcaagagcgccctgactgtgcagtttgtgcagggcatctttgtggagaagtactag

SEQ ID NO: 87984 - DNA, 147 bp, Artificial Sequence
  derived and/or modified sequence
atgagggagtacaagctggtggtgctgggcagcggaggagtgggcaagagcgccctgactgtgcagtttgtgcagggcatctttgtggagaagtatgaccccaccattgaagattcctacaggaagcaggtggaggtggatgcctag

SEQ ID NO: 87985 - DNA, 162 bp, Artificial Sequence
  derived and/or modified sequence
atgagggagtacaagctggtggtgctgggcagcggaggagtgggcaagagcgccctgactgtgcagtttgtgcagggcatctttgtggagaagtatgaccccaccattgaagattcctacaggaagcaggtggaggtggatgcccagcagtgcatgctgtag

SEQ ID NO: 87986 - DNA, 414 bp, Artificial Sequence
  derived and/or modified sequence
atgagggagtacaagctggtggtgctgggcagcggaggagtgggcaagagcgccctgactgtgcagtttgtgcagggcatctttgtggagaagtatgaccccaccattgaagattcctacaggaagcaggtggaggtggatgcccagcagtgcatgctggagatcctggacacagctggcaccgtgcccatgatcctggtgggcaacaagtgtgacctggaggatgagcgggtggtgggcaaggagcagggccagaacctggcccggcagtggaacaactgtgccttcctggagagcagcgccaagagcaagatcaacgtgaatgagatcttctatgacctggtgcggcagatcaacaggaagacccctgtgcctgggaaggccaggaagaagagcagctgccagctgctgtag

SEQ ID NO: 87987 - DNA, 99 bp, Artificial Sequence
  derived and/or modified sequence
atgcgggagtacaagctggtggtgctgggcagcggcggcgtgggcaaatccgccctgaccgtgcagtttgtgcagggtatcttcgtggagaaatactag

SEQ ID NO: 87988 - DNA, 147 bp, Artificial Sequence
  derived and/or modified sequence
atgcgggagtacaagctggtggtgctgggcagcggcggcgtgggcaaaagtgcattgaccgtccagtttgttcaaggcatcttcgtggagaagtatgacccgactatcgaagacagctacagaaagcaggtggaagtggatgcatag

SEQ ID NO: 87989 - DNA, 162 bp, Artificial Sequence
  derived and/or modified sequence
atgcgggagtacaagctggtggtgctgggcagcggcggcgtgggcaagagtgccctgaccgtccagtttgtgcaagggatcttcgtcgagaaatacgacccgaccattgaggactcttacaggaagcaagtcgaggtcgacgcacagcagtgcatgctgtag

SEQ ID NO: 87990 - DNA, 414 bp, Artificial Sequence
  derived and/or modified sequence
atgcgggagtacaagctggtggtgctgggcagcggcggcgtgggcaagagcgcactgaccgtacagttcgtgcaggggatcttcgtggagaagtacgaccccaccatcgaagatagctacaggaaacaggtggaagtggacgcccaacaatgtatgctggagatcttagataccgctggcactgtacccatgatcctggtgggcaataaatgcgacctagaggacgaacgtgtggtgggtaaggagcagggtcagaatctcgccaggcaatggaataattgtgcattccttgagtcttcggctaagtccaagattaatgtcaatgagatcttttatgatctggtgcggcagatcaatcgcaagacgcctgtgcctgggaaggcacggaaaaagtcatcgtgtcagcttttgtag

SEQ ID NO: 87991 - DNA, 99 bp, Artificial Sequence
  derived and/or modified sequence
atgagggaatacaaacttgtggttttaggctctggcggtgtgggaaagtccgccctgacagtgcaattcgtacaggggatcttcgtcgaaaagtactag

SEQ ID NO: 87992 - DNA, 147 bp, Artificial Sequence
  derived and/or modified sequence
atgcgagagtataagctcgtggtcttgggaagtggaggggtgggcaaatccgctctgaccgtgcagttcgtgcaggggatcttcgtcgagaagtatgatccaacaatagaagatagctaccgaaagcaggtcgaggtggacgcttag

SEQ ID NO: 87993 - DNA, 162 bp, Artificial Sequence
  derived and/or modified sequence
atgagagagtacaaacttgtggtactgggaagcggcggtgtggggaagtctgcactcaccgtgcagtttgtccagggcatctttgtggagaagtacgacccaactattgaggactcttaccggaaacaggtggaggtcgatgcacaacagtgtatgctctag

SEQ ID NO: 87994 - DNA, 414 bp, Artificial Sequence
  derived and/or modified sequence
atgcgcgagtacaaactcgttgttcttgggtctggcggagttgggaagtcagctcttacagtgcaatttgtgcagggtatttttgtggaaaagtacgaccctactattgaggattcctaccgcaaacaggttgaggtagatgcacagcagtgtatgctggagattctcgacaccgcaggcactgtgcccatgatcttggtggggaacaagtgcgacctggaggacgagagggtggtgggaaaagaacagggtcaaaacctcgcacgtcagtggaataactgtgcttttttggagtcatctgccaaatcaaaaattaacgtgaacgagatcttctacgaccttgtgcggcaaatcaataggaagacacctgttcccggtaaggccaggaaaaaaagctcatgccagctgctctag

SEQ ID NO: 87995 - DNA, 312 bp, Artificial Sequence
  derived and/or modified sequence
aaaccagccggagcggcgcggcagcggcaggaccgccgtggcgcctagagtagcgacccggggggagcgcggggcgacgctggctgcagggacccggtgacagcgtgagagaattctttttttttttttcctttaataaggtactaggttttgacaagcttgcatcatgcgtgagtataagctagtcgttcttggctcaggaggcgttggaaagtctgctttgactgtacaatttgttcaaggaatttttgtagaaaaatacgatcctacgatagaagattcttatagaaagcaagttgaagtagatgcaca

SEQ ID NO: 87996 - DNA, 550 bp, Artificial Sequence
  derived and/or modified sequence
agccggagcggcgcggcagcggcaggaccgccgtggcgcctagagtagcgacccggggggagcgcggggcgacgctggctgcagggacccggtgacagcgtgagaggttcgcagagagctctcaacttaatcatccttcagcaaaaaagaattaagactagccaggcatggtggtgtgttcctgtagtcccagctactcgggaggctgagcaggagaatcgctggaacctggcaggcagaacttgcagtgagctgagatcgtgccactgcactccagcctaggcgacagagtgagactccgtctcaaacaacaacaacaacaaaagctcctcgatggaaccatttgatagtgacaaggattgaagtactaggttttgacaagcttgcatcatgcgtgagtataagctagtcgttcttggctcaggaggcgttggaaagtctgctttgactgtacaatttgttcaaggaatttttgtagaaaaatacgatcctacgatagaagattcttatagaaagcaagttgaagtagatgcacaacagtgtatgcttg

SEQ ID NO: 87997 - DNA, 1060 bp, Artificial Sequence
  derived and/or modified sequence
gtgtaaaccagccggagcggcgcggcagcggcaggaccgccgtggcgcctagagtagcgacccggggggagcgcggggcgacgctggctgcagggacccggtgacagcgtgagaggtactaggttttgacaagcttgcatcatgcgtgagtataagctagtcgttcttggctcaggaggcgttggaaagtctgctttgactgtacaatttgttcaaggaatttttgtagaaaaatacgatcctacgatagaagattcttatagaaagcaagttgaagtagatgcacaacagtgtatgcttgaaatcttggatactgcaggaacggttccaatgattcttgttggtaataagtgtgacttggaagatgaaagagttgtagggaaggaacaaggtcaaaatctagcaagacaatggaacaactgtgcattcttagaatcttctgcaaaatcaaaaataaatgttaatgagatcttttatgacctagtgcggcaaattaacagaaaaactccagtgcctgggaaggctcgcaaaaagtcatcatgtcagctgctttaatatactaaatgcattgtagctctgagccaggtctgaagaactgttgcccaattcaacagtgccagcattccaactttgttaaacctaccaacatcttaaatggactttcctgtggtggtaccctttaagaggcggatgaaagctactatatcagtttgcacattctaatcactttccagtatcacaagagagatttttacttatataatagtcctagagtttgcagctggtaaaaccagaggctacatccagtattactgctaagagacattcttcatccaccaatgttgtacatgtatgaaaatggtgtactgtatactttaacatgccccatactttgtattggagagtacaataatgtaaatcctaaaagcaccactattttagcataataaaagaaagtccaaagagctcctatatagactactccagataacttcgcttctttgatacttgtagcttattgtaattttttttaagaaattcaaggtcattattattgtac

SEQ ID NO: 87998 - DNA, 99 bp, Artificial Sequence
  derived and/or modified sequence
atgagagagtacaagctggtggtgctgggcagcggcggcgtgggcaagagcgccctgaccgtgcagttcgtgcagggcatcttcgtggagaagtactag

SEQ ID NO: 87999 - DNA, 147 bp, Artificial Sequence
  derived and/or modified sequence
atgagagagtacaagctggtggtgctgggcagcggcggcgtgggcaagagcgccctgaccgtgcagttcgtgcagggcatcttcgtggagaagtacgaccccaccatcgaggacagctacagaaagcaggtggaggtggacgcctag

SEQ ID NO: 88000 - DNA, 162 bp, Artificial Sequence
  derived and/or modified sequence
atgagagagtacaagctggtggtgctgggcagcggcggcgtgggcaagagcgccctgaccgtgcagttcgtgcagggcatcttcgtggagaagtacgaccccaccatcgaggacagctacagaaagcaggtggaggtggacgcccagcagtgcatgctgtag

SEQ ID NO: 88001 - DNA, 414 bp, Artificial Sequence
  derived and/or modified sequence
atgagagagtacaagctggtggtgctgggcagcggcggcgtgggcaagagcgccctgaccgtgcagttcgtgcagggcatcttcgtggagaagtacgaccccaccatcgaggacagctacagaaagcaggtggaggtggacgcccagcagtgcatgctggagatcctggacaccgccggcaccgtgcccatgatcctggtgggcaacaagtgcgacctggaggacgagagagtggtgggcaaggagcagggccagaacctggccagacagtggaacaactgcgccttcctggagagcagcgccaagagcaagatcaacgtgaacgagatcttctacgacctggtgagacagatcaacagaaagacccccgtgcccggcaaggccagaaagaagagcagctgccagctgctgtag

SEQ ID NO: 88002 - protein, 446 aa, Artificial Sequence
  derived and/or modified sequence
MDGESEVDFSSNSITPLWRRRSIPQPHQVLGRSKPRPQSYQSPNGLLITDFPVEDGGTLLAAQIPAQVPTASDSRTVHRSPLLLGAQRRAVANGGTASPEYRAASPRLRRPKSPKLPKAVPGGSPKSPANGAVTLPAPPPPPVLRPPRTPNAPAPCTPEEDLTGLTASPVPSPTANGLAANNDSPGSGSQSGRKAKDPERGLFPGPQKSSSEQKLPLQRLPSQENELLENPSVVLSTNSPAALKVGKQQIIPKSLASEIKISKSNNQNVEPHKRLLKVRSMVEGLGGPLGHAGEESEVDNDVDSPGSLRRGLRSTSYRRAVVSGFDFDSPTSSKKKNRMSQPVLKVVMEDKEKFSSLGRIKKKMLKGQGTFDGEENAVLYQNYKEKALDIDSDEESEPKEQKSDEKIVIHHKPLRSTWSQLSAVKRKVILIVGFMEMKDGRLRGGK

SEQ ID NO: 88003 - protein, 791 aa, Artificial Sequence
  derived and/or modified sequence
MDGESEVDFSSNSITPLWRRRSIPQPHQVLGRSKPRPQSYQSPNGLLITDFPVEDGGTLLAAQIPAQVPTASDSRTVHRSPLLLGAQRRAVANGGTASPEYRAASPRLRRPKSPKLPKAVPGGSPKSPANGAVTLPAPPPPPVLRPPRTPNAPAPCTPEEDLTGLTASPVPSPTANGLAANNDSPGSGSQSGRKAKDPERGLFPGPQKSSSEQKLPLQRLPSQENELLENPSVVLSTNSPAALKVGKQQIIPKSLASEIKISKSNNQNVEPHKRLLKVRSMVEGLGGPLGHAGEESEVDNDVDSPGSLRRGLRSTSYRRAVVSGFDFDSPTSSKKKNRMSQPVLKVVMEDKEKFSSLGRIKKKMLKGQGTFDGEENAVLYQNYKEKALDIDSDEESEPKEQKSDEKIVIHHKPLRSTWSQLSAVKRKGLSQTVSQEERKRQEAIFEVISSEHSYLLSLEILIRMFKNSKELSDTMTKTERHHLFSNITDVCEASKKFFIELEARHQNNIFIDDISDIVEKHTASTFDPYVKYCTNEVYQQRTLQKLLATNPSFKEVLSRIESHEDCRNLPMISFLILPMQRVTRLPLLMDTICQKTPKDSPKYEVCKRALKEVSKLVRLCNEGARKMERTEMMYTINSQLEFKIKPFPLVSSSRWLVKRGELTAYVEDTVLFSRRTSKQQVYFFLFNDVLIITKKKSEESYNVNDYSLRDQLLVESCDNEELNSSPGKNSSTMLYSRQSSASHLFTLTVLSNHANEKVEMLLGAETQSERARWITALGHSSGKPPADRTCG

SEQ ID NO: 88004 - DNA, 1341 bp, Artificial Sequence
  derived and/or modified sequence
atggacggcgagagcgaggtggacttcagcagcaacagcatcacccccctgtggagaagaagaagcatcccccagccccaccaggtgctgggcagaagcaagcccagaccccagagctaccagagccccaacggcctgctgatcaccgacttccccgtggaggacggcggcaccctgctggccgcccagatccccgcccaggtgcccaccgccagcgacagcagaaccgtgcacagaagccccctgctgctgggcgcccagagaagagccgtggccaacggcggcaccgccagccccgagtacagagccgccagccccagactgagaagacccaagagccccaagctgcccaaggccgtgcccggcggcagccccaagagccccgccaacggcgccgtgaccctgcccgcccccccccccccccccgtgctgagaccccccagaacccccaacgcccccgccccctgcacccccgaggaggacctgaccggcctgaccgccagccccgtgcccagccccaccgccaacggcctggccgccaacaacgacagccccggcagcggcagccagagcggcagaaaggccaaggaccccgagagaggcctgttccccggcccccagaagagcagcagcgagcagaagctgcccctgcagagactgcccagccaggagaacgagctgctggagaaccccagcgtggtgctgagcaccaacagccccgccgccctgaaggtgggcaagcagcagatcatccccaagagcctggccagcgagatcaagatcagcaagagcaacaaccagaacgtggagccccacaagagactgctgaaggtgagaagcatggtggagggcctgggcggccccctgggccacgccggcgaggagagcgaggtggacaacgacgtggacagccccggcagcctgagaagaggcctgagaagcaccagctacagaagagccgtggtgagcggcttcgacttcgacagccccaccagcagcaagaagaagaacagaatgagccagcccgtgctgaaggtggtgatggaggacaaggagaagttcagcagcctgggcagaatcaagaagaagatgctgaagggccagggcaccttcgacggcgaggagaacgccgtgctgtaccagaactacaaggagaaggccctggacatcgacagcgacgaggagagcgagcccaaggagcagaagagcgacgagaagatcgtgatccaccacaagcccctgagaagcacctggagccagctgagcgccgtgaagagaaaggtgatcctgatcgtgggcttcatggagatgaaggacggcagactgagaggcggcaagtag

SEQ ID NO: 88005 - DNA, 2376 bp, Artificial Sequence
  derived and/or modified sequence
atggacggcgagagcgaggtggacttcagcagcaacagcatcacccccctgtggagaagaagaagcatcccccagccccaccaggtgctgggcagaagcaagcccagaccccagagctaccagagccccaacggcctgctgatcaccgacttccccgtggaggacggcggcaccctgctggccgcccagatccccgcccaggtgcccaccgccagcgacagcagaaccgtgcacagaagccccctgctgctgggcgcccagagaagagccgtggccaacggcggcaccgccagccccgagtacagagccgccagccccagactgagaagacccaagagccccaagctgcccaaggccgtgcccggcggcagccccaagagccccgccaacggcgccgtgaccctgcccgcccccccccccccccccgtgctgagaccccccagaacccccaacgcccccgccccctgcacccccgaggaggacctgaccggcctgaccgccagccccgtgcccagccccaccgccaacggcctggccgccaacaacgacagccccggcagcggcagccagagcggcagaaaggccaaggaccccgagagaggcctgttccccggcccccagaagagcagcagcgagcagaagctgcccctgcagagactgcccagccaggagaacgagctgctggagaaccccagcgtggtgctgagcaccaacagccccgccgccctgaaggtgggcaagcagcagatcatccccaagagcctggccagcgagatcaagatcagcaagagcaacaaccagaacgtggagccccacaagagactgctgaaggtgagaagcatggtggagggcctgggcggccccctgggccacgccggcgaggagagcgaggtggacaacgacgtggacagccccggcagcctgagaagaggcctgagaagcaccagctacagaagagccgtggtgagcggcttcgacttcgacagccccaccagcagcaagaagaagaacagaatgagccagcccgtgctgaaggtggtgatggaggacaaggagaagttcagcagcctgggcagaatcaagaagaagatgctgaagggccagggcaccttcgacggcgaggagaacgccgtgctgtaccagaactacaaggagaaggccctggacatcgacagcgacgaggagagcgagcccaaggagcagaagagcgacgagaagatcgtgatccaccacaagcccctgagaagcacctggagccagctgagcgccgtgaagagaaagggcctgagccagaccgtgagccaggaggagagaaagagacaggaggccatcttcgaggtgatcagcagcgagcacagctacctgctgagcctggagatcctgatcagaatgttcaagaacagcaaggagctgagcgacaccatgaccaagaccgagagacaccacctgttcagcaacatcaccgacgtgtgcgaggccagcaagaagttcttcatcgagctggaggccagacaccagaacaacatcttcatcgacgacatcagcgacatcgtggagaagcacaccgccagcaccttcgacccctacgtgaagtactgcaccaacgaggtgtaccagcagagaaccctgcagaagctgctggccaccaaccccagcttcaaggaggtgctgagcagaatcgagagccacgaggactgcagaaacctgcccatgatcagcttcctgatcctgcccatgcagagagtgaccagactgcccctgctgatggacaccatctgccagaagacccccaaggacagccccaagtacgaggtgtgcaagagagccctgaaggaggtgagcaagctggtgagactgtgcaacgagggcgccagaaagatggagagaaccgagatgatgtacaccatcaacagccagctggagttcaagatcaagcccttccccctggtgagcagcagcagatggctggtgaagagaggcgagctgaccgcctacgtggaggacaccgtgctgttcagcagaagaaccagcaagcagcaggtgtacttcttcctgttcaacgacgtgctgatcatcaccaagaagaagagcgaggagagctacaacgtgaacgactacagcctgagagaccagctgctggtggagagctgcgacaacgaggagctgaacagcagccccggcaagaacagcagcaccatgctgtacagcagacagagcagcgccagccacctgttcaccctgaccgtgctgagcaaccacgccaacgagaaggtggagatgctgctgggcgccgagacccagagcgagagagccagatggatcaccgccctgggccacagcagcggcaagccccccgccgacagaacctgcggctag

SEQ ID NO: 88006 - DNA, 1341 bp, Artificial Sequence
  derived and/or modified sequence
atggacggggaatccgaggtggattttagttccaacagcatcactcctctctggcgaaggcgtagtatcccacagccacaccaggtattaggccgttccaaacctagaccgcaatcctaccagtcacccaatgggttgctgattactgacttccccgtagaggatggtggcactcttctggctgctcagattcccgcacaggtgcctaccgcgtctgactctcggactgtgcaccgctctcctctcctgttgggcgctcagcgtagggccgtggccaatgggggaactgcaagcccggagtaccgggctgcctcaccccggttgcgaagaccgaagtcacccaagttgccgaaagctgtcccaggcgggagtcccaagagccctgccaacggcgccgtcactcttcctgctccaccaccacccccggtgttgcgcccaccacgcacaccgaacgcaccagctccctgtacaccagaagaggacctgacaggtctcaccgcctctccagtgccatcccccacagccaatggactcgccgccaacaacgacagcccaggctctgggtcgcaatccgggagaaaggccaaagatcctgaaagaggcctattcccaggtccacagaagtctagcagtgaacagaagctaccgttacagagactgccatcccaggagaatgagctgctcgagaatcctagtgtggtgttgagtactaacagtccagcagcccttaaggtggggaaacagcagattatcccgaaatccctggcgtcagaaatcaaaatttcgaaaagcaacaatcagaatgtcgagcctcacaaaaggctgctaaaagttaggagcatggtggaaggtttaggcgggcctctgggtcacgccggagaggagagcgaggtggataacgatgttgattctccggggagcctaaggcgaggactgaggagcacctcatataggcgagccgtggtttccggattcgattttgactccccaaccagctccaaaaaaaaaaaccgcatgtcccaacccgtcctcaaagtagtgatggaagacaaggagaagttttcttccctgggcagaatcaaaaagaaaatgctcaagggacaaggcacattcgacggcgaggaaaacgcagtgttgtaccagaattacaaggaaaaagccttagacattgattccgacgaagaatctgagccaaaagaacagaaaagcgacgaaaagatcgtcatccatcacaagcctctccggagcacatggtctcaattgtctgcggtcaagaggaaggtcatccttatcgtgggattcatggagatgaaggacggtaggcttcgcggtggcaaatag

SEQ ID NO: 88007 - DNA, 2376 bp, Artificial Sequence
  derived and/or modified sequence
atggacggagagtccgaggtcgactttagctcaaattccattactcctttatggcggaggaggtcgattccccagccccatcaagtcctgggacggagcaagcctaggccgcagtcttatcagagtccaaatggactgctgatcactgattttcccgtagaggacggcggcacactgttagccgcgcagattcctgcccaggttcccaccgcctcagacagcagaactgtacatcgctcaccactactgctgggagcgcagaggcgtgctgtggctaatggcgggactgccagcccggaataccgtgctgccagccctaggctccgccgtcccaaaagtccaaaattgccaaaagccgtgcctggaggctctcccaaatccccagccaacggggcagtcacattgccggccccaccaccgccgccagtgttgcgaccaccgcgcacgcccaacgctccagcgccatgtacacctgaagaggacctgacgggtctcaccgccagcccagtgccctcccctacggctaatgggctggccgccaacaacgactcccctggatcaggatcccaatccgggcgcaaggccaaagatcctgaaagaggtctcttccctgggccccaaaaaagctcttccgagcagaaactgcccctgcaaagattgccatcccaagagaacgagctattggagaatccaagtgttgtccttagcaccaattctcctgcagctcttaaagtgggcaagcagcagatcattccaaagagtttggctagtgaaattaagattagtaaaagtaataatcagaacgtggagccacataagagactactgaaagtccgatcaatggtggagggcctgggggggcccctgggccacgcgggagaagagtctgaggtggataatgatgtggacagtccaggtagcctgcgaagaggactcagatccaccagctaccggagagccgtcgtgtcgggatttgacttcgacagcccaacaagctccaaaaaaaagaatcggatgtcgcagcccgtattgaaggtggtcatggaggacaaagaaaagttctcttccctgggccgaataaagaagaagatgttaaaaggccaagggactttcgatggggaagaaaatgctgtgttgtatcagaattataaggaaaaagcacttgatatcgacagtgacgaagagtccgagcctaaggagcagaaatcagatgagaaaattgtgattcatcataagcctttaaggtccacatggagtcagctgtctgccgtaaagagaaaggggctttcacagacagtttctcaggaggaacgcaaaagacaggaagccatctttgaggttatctcttccgagcactcctatctgttaagtcttgaaatcttgatccgcatgtttaagaatagcaaggagctgtccgacaccatgactaagaccgagcggcatcatctgttcagcaacatcaccgatgtctgtgaggccagcaagaaattcttcatagaactggaggcgcgccaccagaacaatatattcattgatgacatctctgatattgttgagaaacacacggccagcacctttgacccgtatgtgaaatattgtacaaatgaggtgtaccagcaaagaacactgcaaaaactattggcgacaaatccttccttcaaagaggttctctcacgcatagagtcgcacgaagactgccggaacctgccaatgattagctttcttattttacccatgcagcgggtgacgcggctccctttgttgatggatactatctgccagaaaacccctaaagacagccctaagtacgaggtgtgtaagcgagccctgaaggaagtgtctaagctggtgagattgtgcaacgagggggccaggaaaatggagaggacagagatgatgtacacaatcaattcccagctagaatttaagatcaaacccttccctctcgtctcctcttcacgctggctcgtgaagaggggcgaactcacagcttatgtcgaggacactgtgctgttcagtcgcaggaccagcaaacagcaggtatacttctttctgttcaacgatgtgttaatcataactaagaagaagagcgaggagagctacaatgttaacgactactctctccgcgatcagctgttggtggaatcatgcgacaacgaggaactcaattctagtcccgggaagaattcaagcacaatgctctacagtagacagtctagcgcatcccacttattcactctgacagtgctttctaaccatgccaatgaaaaggtggagatgctcctgggcgctgagacccagtcagagcgggcccggtggattacggcccttggtcactcctcaggaaaaccaccggcggatcggacctgcggctag

SEQ ID NO: 88008 - DNA, 1341 bp, Artificial Sequence
  derived and/or modified sequence
atggatggagagagcgaggtggacttcagcagcaacagcatcacccccctgtggaggcggcgcagcatcccccagccccaccaggtgctgggccgcagcaagccccggccccagagctaccagagccccaacggcctgctgatcacagacttccctgtggaggatggcggcaccctgctggccgcccagatcccagcccaggtgcccacagccagtgacagcaggacagtgcacaggagccccctgctgctgggcgcccagaggagagctgtggccaatggaggaacagccagccctgagtacagagctgccagcccccggctgcggcggcccaagagccccaagctgcccaaggctgtgcctgggggcagccccaagagccctgccaacggggctgtgaccctgcctgcccctcctcctcctcctgtgctgcggccccccaggaccccaaatgccccagccccctgcaccccagaggaggacctgaccggcctgacagccagccctgtgcccagccccacagccaacggcctggccgccaacaatgacagccctggcagcggcagccagagcggcaggaaggccaaggaccctgagcggggcctcttccctggcccccagaagagcagcagcgagcagaagctgcccctgcagaggctgcccagccaggagaatgagctgctggagaaccccagcgtggtgctgagcaccaacagccctgctgccctgaaggtgggcaagcagcagatcatccccaagagcctggccagcgagatcaagatcagcaagagcaacaaccagaatgtggagccccacaagaggctgctgaaggtgcgctccatggtggagggcctgggcggccccctgggccacgccggggaggagagcgaggtggacaatgatgtggacagccctggcagcctgcggcggggcctgcggagcaccagctaccgccgggctgtggtgtctggctttgattttgacagccccaccagcagcaagaagaagaacaggatgagccagcctgtgctgaaggtggtgatggaggacaaggagaagttcagcagcctgggccgcatcaagaagaagatgctgaagggccagggcacctttgatggagaagaaaatgctgtgctgtaccagaactacaaggagaaggccctggacatcgacagtgatgaggagagcgagcccaaggagcagaagagtgatgagaagatcgtcatccaccacaagcccctgcggagcacctggagccagctgtctgctgtgaagaggaaggtgatcctgattgtgggcttcatggagatgaaggatggccgcctgcggggcggcaagtag

SEQ ID NO: 88009 - DNA, 2376 bp, Artificial Sequence
  derived and/or modified sequence
atggatggagagagcgaggtggacttcagcagcaacagcatcacccccctgtggaggcggcgcagcatcccccagccccaccaggtgctgggccgcagcaagccccggccccagagctaccagagccccaacggcctgctgatcacagacttccctgtggaggatggcggcaccctgctggccgcccagatcccagcccaggtgcccacagccagtgacagcaggacagtgcacaggagccccctgctgctgggcgcccagaggagagctgtggccaatggaggaacagccagccctgagtacagagctgccagcccccggctgcggcggcccaagagccccaagctgcccaaggctgtgcctgggggcagccccaagagccctgccaacggggctgtgaccctgcctgcccctcctcctcctcctgtgctgcggccccccaggaccccaaatgccccagccccctgcaccccagaggaggacctgaccggcctgacagccagccctgtgcccagccccacagccaacggcctggccgccaacaatgacagccctggcagcggcagccagagcggcaggaaggccaaggaccctgagcggggcctcttccctggcccccagaagagcagcagcgagcagaagctgcccctgcagaggctgcccagccaggagaatgagctgctggagaaccccagcgtggtgctgagcaccaacagccctgctgccctgaaggtgggcaagcagcagatcatccccaagagcctggccagcgagatcaagatcagcaagagcaacaaccagaatgtggagccccacaagaggctgctgaaggtgcgctccatggtggagggcctgggcggccccctgggccacgccggggaggagagcgaggtggacaatgatgtggacagccctggcagcctgcggcggggcctgcggagcaccagctaccgccgggctgtggtgtctggctttgattttgacagccccaccagcagcaagaagaagaacaggatgagccagcctgtgctgaaggtggtgatggaggacaaggagaagttcagcagcctgggccgcatcaagaagaagatgctgaagggccagggcacctttgatggagaagaaaatgctgtgctgtaccagaactacaaggagaaggccctggacatcgacagtgatgaggagagcgagcccaaggagcagaagagtgatgagaagatcgtcatccaccacaagcccctgcggagcacctggagccagctgtctgctgtgaagaggaagggcctgagccagacagtgtcccaggaggagaggaagaggcaggaggccatctttgaagtcatcagcagcgagcacagctacctgctgagcctggagatcctgatccgcatgttcaagaacagcaaggagctgagtgacaccatgaccaagacagagcggcaccacctgttcagcaacatcacagatgtgtgtgaggccagcaagaagttcttcatcgagctggaggcccggcaccagaacaacatcttcattgatgacatcagtgacatcgtggagaagcacacagccagcacctttgacccctacgtgaagtactgcaccaatgaggtgtaccagcagaggaccctgcagaagctgctggccaccaaccccagcttcaaggaggtgctgagccgcatcgagagccatgaggactgcaggaacctgcccatgatctccttcctgatcctgcccatgcagagggtgacccggctgcccctgctgatggacaccatctgccagaagacccccaaggacagccccaagtatgaggtgtgcaagagggccctgaaggaggtgtccaagctggtgcggctgtgcaatgaaggagccaggaagatggagaggacagagatgatgtacaccatcaacagccagctggagttcaagatcaagcccttccccctggtgagcagcagccgctggctggtgaagagaggagagctgacagcctacgtggaggacacagtgctcttcagcaggaggaccagcaagcagcaggtgtacttcttcctgttcaatgatgtgctgatcatcaccaagaagaagtctgaggagagctacaacgtgaatgactacagcctgcgggaccagctgctggtggagagctgtgacaatgaggagctgaacagcagccctgggaagaacagcagcaccatgctgtacagccggcagagcagcgccagccacctgttcaccctgactgtgctgagcaaccacgccaatgagaaggtggagatgctgctgggcgctgagacccagagcgagcgggcccgctggatcacagccctgggccacagcagcggcaagcccccagctgacaggacctgtggctag

SEQ ID NO: 88010 - DNA, 1341 bp, Artificial Sequence
  derived and/or modified sequence
atggacggcgagagcgaggtggacttcagcagcaacagcatcacccccctctggaggcggcgctctattcctcagccccaccaggtgttgggcagaagtaagccaagaccccaatcataccagagtccaaatggcctactaattaccgactttcctgtagaagacggaggtaccctgctagcagcacagattccagcccaggtcccgacagcaagtgattcgcggactgtacacaggtctccactgctgctcggcgcacaacggcgcgccgttgccaatggaggaactgcttcaccggaatacagggcggcaagtcccaggcttagaaggcctaaatcgccaaaacttcctaaagccgtgcccggcggcagtcccaagtctcctgccaacggcgctgtgactctgccagctcctccacctcccccggtgctcaggccaccaaggaccccgaacgcacccgctccttgtacgcctgaagaggacctgaccggcctgacagctagtcctgtccctagccctacagctaacggtttagcagcaaacaacgactcaccagggtcgggatctcagtccggtaggaaagcgaaagaccctgagcgaggcctgttccccgggcctcagaagagcagctccgagcagaaactacccttacagaggttaccttcacaagagaatgagctgttagagaaccccagcgtggtgctgagtacaaattccccggccgcccttaaggttggcaagcagcagatcatccccaaatccctggcgtctgagatcaaaatctctaagtctaataaccaaaatgtggaaccgcacaagcggctgctgaaggtacggagtatggttgaagggttgggcggcccccttggccatgcgggggaagagtccgaagtagacaatgatgtagacagtccaggaagtctgagaaggggacttaggtctacctcttaccggcgggccgtcgtttctggcttcgactttgattctcctacgagctccaagaagaaaaatcggatgtcccaaccggttttaaaggtagtgatggaggacaaggagaagttctcatcacttggtcgaatcaagaagaagatgttaaaaggccagggcacctttgatggagaagagaacgccgtcctctatcagaattacaaagagaaagccctagatatcgacagcgacgaggaatccgaacccaaagaacagaaaagtgacgagaagattgtcatacatcacaaacctctgcggagcacttggtcgcagctcagcgccgtgaagcgtaaggtgatcttgatcgttggcttcatggagatgaaagacggacgactgcgcggcggaaaatag

SEQ ID NO: 88011 - DNA, 2376 bp, Artificial Sequence
  derived and/or modified sequence
atggacggcgagagcgaggtggacttcagcagcaacagcatcaccccactttggcgtagacgctctatcccccaaccgcatcaagtcctgggccgttctaagcctcggccccagtcctatcagagccccaacggcctgttaatcactgatttcccggtggaggatggcgggactttgctagcagcccagatccctgcacaggtgccaacagcgtctgactctagaacggtacatagatctcccctcctcctcggagctcagcgacgcgctgttgctaatggggggacagcttcccctgagtatcgagcagcatctcctcgtctgaggcgcccaaagtcccctaagttacccaaggcggttcccggcggcagtcccaaatcccctgccaatggtgcggttaccctcccagctcccccaccacctccggttctcagaccccctcggacccctaacgcgcccgcaccttgtacgccagaggaagacctcacaggtctgacggcttccccggtgccttcccctactgctaacggactcgccgcaaacaacgattcgccggggagtggcagccaatctggacggaaagccaaagatccagagagggggcttttccccggtccacagaagtcaagctctgaacagaagctgccactccagagactgcctagccaagaaaatgagctcctcgagaacccaagcgtggtcctctcaaccaattctcccgcagctctgaaggtggggaaacagcaaataattccgaagagtctggcatctgagataaagatttccaaatccaacaaccagaacgtggagcctcataaaaggctgctgaaggtgcgaagcatggttgagggacttggaggcccactcggtcatgcaggcgaagaatcagaagtagacaacgatgtggacagccctggtagcctacggcgtgggctgagatctacgtcttacagacgcgctgtggtgagcgggttcgatttcgatagcccgacatcatccaagaagaagaacagaatgtctcagcccgtgctcaaggtagtcatggaagataaagagaagttttcatctctaggacgcatcaagaagaagatgcttaaaggacagggtacctttgatggtgaggagaacgccgtgttgtaccaaaattataaggagaaagcgcttgatattgattccgacgaagagagtgaaccaaaggaacagaagtctgacgagaaaatagtcatccatcataagcccctccggagcacctggtcacagctgtcagctgtcaagcggaagggcctctctcagacggtgagccaggaggagaggaaaagacaggaggccattttcgaagttatcagcagtgaacactcttacctgttgtcgcttgaaattctgattcggatgtttaagaatagtaaagaactctcagacacaatgaccaaaacagagcggcaccacttattttctaacattaccgatgtgtgcgaagcctcaaaaaagtttttcatcgagctggaggcccgccaccagaataacatattcattgacgatatctccgacatcgttgagaaacatacggcctccaccttcgacccatatgtgaagtattgcactaacgaagtttaccaacaacgcaccctgcaaaagttattagccacgaacccttcttttaaggaagttttgtcacggatagagagtcatgaggactgccgtaatctgcccatgatttcattcttaatcttacccatgcagagagtcactcggctgcctcttcttatggatacgatatgccagaagacacctaaagattcccccaagtacgaggtatgtaagcgagccctgaaagaggtgagcaaactggttcgcctgtgcaacgagggtgctcggaagatggagcggacagaaatgatgtataccatcaactctcaactcgaattcaagatcaagcctttccctctggtcagtagctctcgatggctagtgaaaaggggcgagctgacagcttacgttgaagacaccgtcctcttctctcggaggacatccaagcagcaagtttattttttcctctttaatgacgtcctgataataacgaaaaagaagagtgaagaatcctataacgtcaatgattattccttgcgagaccagctgctggtcgagagttgcgacaatgaagagctcaactctagtccaggcaaaaacagctcaaccatgttatactctcgacagtcgtcggcatctcacctgtttaccctcactgtattatcgaatcatgcgaacgagaaggtggagatgctgcttggtgccgaaacgcaaagcgagcgagccaggtggattaccgccctggggcatagtagtgggaagcctcctgctgaccgaacctgcggatag

SEQ ID NO: 88012 - DNA, 1341 bp, Artificial Sequence
  derived and/or modified sequence
atggacggcgagagtgaggtggacttttccagtaattccataactcctctctggcgacgtagaagcattccccaaccccatcaggttctgggcaggagtaagccccgacctcagagttaccagagccctaatggactgctgattacggatttccctgtcgaggacggaggaacgctgcttgctgcgcaaatcccagcacaagtgccaaccgcaagcgactcacgaaccgttcacagatctcctctgctcctgggcgcacagcgacgcgcagttgctaatggaggaaccgctagcccagagtatcgcgctgcgtctcctcgactgcgaagacctaagagcccgaagctaccaaaggccgtccccggaggctcgcctaagtccccagctaacggagcagttaccctccctgctcccccaccccctccagtactgaggccaccaagaacgccaaatgctcccgcaccttgcacccctgaggaagaccttactgggcttacggccagtcccgttccctcacctacagctaatggattggccgcaaataatgattcacccggttcagggtctcagagcggtaggaaggccaaggatcctgagagaggccttttcccaggtccacagaaaagctcttcggagcagaaactgcccttgcagcgcctcccaagccaggaaaacgagctgcttgagaacccatctgtagttcttagcacaaatagtccggcagccctcaaggtgggtaagcagcagattatcccaaaaagtctcgcatcagaaattaaaattagcaagagcaacaaccagaatgtagagccacacaaacgtctcctaaaggtcaggtccatggtggagggcctgggaggccctctcgggcacgcgggagaagaatccgaagtcgataacgatgtggacagccccggtagcctccgcaggggtcttcgctctacctcgtacaggagggcagtcgtgtctgggttcgacttcgacagtccaacgtcaagtaagaagaagaatcgcatgtctcagccagtgctgaaggtggtgatggaagataaagagaagttcagctcccttgggaggatcaagaagaagatgctcaagggccagggtactttcgatggggaagagaacgccgtgctgtatcagaattataaagagaaagccctcgacatcgatagcgacgaggagagtgagcccaaagagcagaaaagcgatgaaaaaatagtcatacaccacaaacccttacgtagcacatggagccaactgtctgcagtcaagaggaaagtcatcctgattgtgggatttatggagatgaaagacggcaggttgcgtggtggcaaatag

SEQ ID NO: 88013 - DNA, 2376 bp, Artificial Sequence
  derived and/or modified sequence
atggacggagagtccgaggtcgatttttcctccaatagtattacccctctgtggcggagaagaagcataccacagccacaccaagtccttggtaggagcaaaccgaggccccagagctaccagagcccaaatggactcctaatcaccgattttcccgtggaagacggcggtaccttgctggcagcccagatacctgcccaggttccaaccgcttcagacagtcgaacagtccacagatcaccattgttgctaggcgcacaacgtcgcgcagtcgctaatggcggaacggcctcgcccgaatatagggcggcttctcccagactgaggcggcctaagtcccctaaacttcctaaagcggttccaggaggttctcctaaaagccccgcaaatggcgctgtaacactgcccgctcccccaccccctcccgtccttcggccaccgagaactcctaatgcgccagccccttgcactcccgaggaggatctcaccggcctgactgcatcgcctgtcccctcccccactgctaacgggctggccgctaacaatgacagcccgggatcaggttcccagagcggtaggaaggcaaaggatcccgaaagaggcctgtttccaggtcctcagaagagctcatccgagcaaaagctgcctctccagcggcttccttctcaggagaatgaactgctagagaacccatccgtggtgctctcaacaaactcacctgctgccctaaaggtagggaaacaacagattatcccaaagtccctggcttctgagatcaaaattagtaagtcgaacaaccaaaacgtcgaaccacacaagcgtttgcttaaggtccgcagtatggtggaaggcctcggcggacctctgggccatgcaggagaagaatctgaagtcgataatgacgttgacagtcctggctcactcaggcggggactcagaagcacctcgtataggcgagccgttgtgagtggcttcgacttcgactccccaactagcagcaaaaaaaagaacagaatgtcccagccagtgctaaaggtcgtcatggaagacaaggagaaattttcttctctggggaggataaaaaagaaaatgctcaagggacagggtacctttgatggagaggaaaacgcggttctataccaaaactataaggagaaagccctagatatagactccgacgaagaatccgaacctaaggagcagaagagtgacgagaaaatagttatccaccacaagcccctgagaagtacatggagtcaactatctgccgtcaaacgcaaagggctgagccagaccgtgagtcaggaggaacgaaaacgtcaggaggcgattttcgaggtaatctcaagcgagcactcttacttactgagtctggagattctgattcggatgtttaagaatagcaaggagctaagcgataccatgaccaagactgagcgacaccatcttttttccaacataaccgacgtttgtgaagccagcaaaaagttcttcatcgagttagaagctcgtcaccagaacaacatcttcattgacgacattagcgatattgtcgagaagcacactgcttcgacatttgatccatacgtcaagtactgcactaatgaggtctaccaacagaggaccctccagaagcttttggcaacgaacccgtccttcaaagaggtgctatccaggatcgaaagccacgaagactgtcgcaacctgcccatgatttccttccttattctgcctatgcagagagtgactcggctgccactcctgatggacaccatctgccaaaagacccccaaggattcccccaagtacgaagtttgcaagcgggcactgaaggaagtatctaaactggtacggctgtgcaatgagggggctcgcaaaatggagcgcaccgaaatgatgtacaccatcaattcacagctggaatttaaaatcaaaccctttcctctggtgagcagcagtcggtggttggtgaagaggggagagctgacggcatacgtggaagatacagtcctgtttagcagaagaacctcgaagcaacaagtgtatttctttctgttcaatgacgtactcataatcaccaagaagaagagcgaggagtcttacaacgtgaacgactattctttgcgagaccagctattggtggagtcctgcgacaatgaagagctgaactcgtctcctggtaagaattcttccacgatgctgtactctcggcagagttctgctagccatctctttacacttaccgtgttgagtaaccacgccaacgagaaggttgaaatgctgctgggagcagaaactcagtcagaacgggctcggtggattacagccctcgggcactcatccggtaaacctcctgctgatcgtacatgtggctag

SEQ ID NO: 88014 - DNA, 2353 bp, Artificial Sequence
  derived and/or modified sequence
ggctgcgcttcggtcccggacccgggccacccacggggtagtgggtgctcctcggccccggacattgcaagccccagaaggcaagactaactcggtgttgctcctcccggcgctgacttcgaggcccggctatggacggcgagagcgaggtggatttttctagcaacagcataacccctttgtggcggaggcggtcgattcctcagccccaccaggttctgggccggagcaagccgaggccccagtcctaccagagccccaacgggttactaattacggatttcccggtggaggacggagggacgctcctcgcagcgcagattcccgcccaggtgcccaccgcctcggacagcaggacggtacataggagccccctgcttctgggcgcccagcggagagcggtggccaatggtgggacggcatccccggagtacagggctgcctctcctcgacttcgacggcccaagtcacccaagctccccaaagcggtgcctggcggctccccgaaatccccagcaaatggcgcggtgaccttgcctgcgccgccgccgccgccggttctgcgccccccgcggactcctaacgcgcccgccccctgcacccccgaggaggaccttactgggttgactgccagcccggtgccttcgcccactgcaaatggccttgccgctaataacgactctcctgggtcaggttcgcagtccggccggaaggcaaaggaccccgaacgggggctctttcctgggccccagaaaagttcttcggaacaaaaactccccctccaaaggctgccctcccaggagaacgagctcctcgagaatccttccgtggttttgagtacaaacagccccgccgccctcaaagtggggaagcagcagatcattccgaagagtctggcctcggaaattaaaataagtaaatccaacaatcaaaatgtggagccccacaagagactcctcaaggtgcgcagcatggtggagggcctaggaggacccctgggtcacgcaggggaggagagtgaggtcgataacgacgtggatagcccagggtctctgcggagaggcttgcggtccacgtcttatcgcagggcagtggtcagtggctttgattttgacagtcctaccagctcgaagaagaagaacagaatgtcccagcctgttctgaaagtggtgatggaagacaaggagaagttttccagtctgggaaggataaagaaaaaaatgctgaaaggacaaggaacatttgatggggaagaaaatgctgtcctgtatcaaaactacaaggaaaaggcccttgacattgattctgatgaagagtcagagcccaaagaacagaagtcagatgaaaaaattgtgattcaccataagccattgagatccacatggagccaactctctgcggtgaagagaaaggttatcttaatagtcggtttcatggagatgaaggatgggagattaagaggggggaaatgatttttactggcagctatattccctctctgttctatttgctttaacaaagggataaaacctggcaaagtgtacattattggaggactcaaatctgtatgtgacatgtcccaactactgtccgctaactagttatccaaattgtaaagctacagaagcccagttgaggggtaagtgtgcctggctcacacagcctgcaccctgtcacctcggcaatgagccagtgtggggcactggggacttctaacccttggattgctctttttgacctgtgcataccttctaattgtaaaatatatttcagaccgtgagtaccttgagatctgagcaactgtgttaatgaagtaatagcaatggtccacagtgaaagatgtgttggggtttgcaaaacaagcattccgtcacctctttaataatgtcacagactttttaaaagagaggctatcaagttgtaatataatctgtcatgttttatttaggaaggaaggtaaatttgtgcttgcacggggatcattttgtattatttttgctaatacccagttgaagctaaaaagcaactatttgaatcctgtgaattaatttataagaatgttaaacagctttggaaatacatgcatcttatgaatcatagccttatttagcaagatcaatgttaaagtgttgttatatggcaagtatttaacacattcacagtgtttgtttgatttcaactgtgaattgtcttaagttttttcaaacctagttgtttctatggacacctgctctgaattgtacattgacttcattactaaagaacaaaaatgttcatttttgtcccagtaaattgagactgcttgtacactttcagaaaaatatgtgaatttataaagattttgtagatactt

SEQ ID NO: 88015 - DNA, 3781 bp, Artificial Sequence
  derived and/or modified sequence
ggcagcgctctcctaagctctcgcggctgcgcttcggtcccggacccgggccacccacggggtagtgggtgctcctcggccccggacattgcaagccccagaaggcaagactaactcggtgttgctcctcccggcgctgacttcgaggcccggctatggacggcgagagcgaggtggatttttctagcaacagcataacccctttgtggcggaggcggtcgattcctcagccccaccaggttctgggccggagcaagccgaggccccagtcctaccagagccccaacgggttactaattacggatttcccggtggaggacggagggacgctcctcgcagcgcagattcccgcccaggtgcccaccgcctcggacagcaggacggtacataggagccccctgcttctgggcgcccagcggagagcggtggccaatggtgggacggcatccccggagtacagggctgcctctcctcgacttcgacggcccaagtcacccaagctccccaaagcggtgcctggcggctccccgaaatccccagcaaatggcgcggtgaccttgcctgcgccgccgccgccgccggttctgcgccccccgcggactcctaacgcgcccgccccctgcacccccgaggaggaccttactgggttgactgccagcccggtgccttcgcccactgcaaatggccttgccgctaataacgactctcctgggtcaggttcgcagtccggccggaaggcaaaggaccccgaacgggggctctttcctgggccccagaaaagttcttcggaacaaaaactccccctccaaaggctgccctcccaggagaacgagctcctcgagaatccttccgtggttttgagtacaaacagccccgccgccctcaaagtggggaagcagcagatcattccgaagagtctggcctcggaaattaaaataagtaaatccaacaatcaaaatgtggagccccacaagagactcctcaaggtgcgcagcatggtggagggcctaggaggacccctgggtcacgcaggggaggagagtgaggtcgataacgacgtggatagcccagggtctctgcggagaggcttgcggtccacgtcttatcgcagggcagtggtcagtggctttgattttgacagtcctaccagctcgaagaagaagaacagaatgtcccagcctgttctgaaagtggtgatggaagacaaggagaagttttccagtctgggaaggataaagaaaaaaatgctgaaaggacaaggaacatttgatggggaagaaaatgctgtcctgtatcaaaactacaaggaaaaggcccttgacattgattctgatgaagagtcagagcccaaagaacagaagtcagatgaaaaaattgtgattcaccataagccattgagatccacatggagccaactctctgcggtgaaaagaaagggattatctcagacagtaagccaggaggaaagaaagagacaagaggctatctttgaagtcatatcctctgaacattcatatttactcagcttggagatcttgatacgaatgtttaaaaattctaaagaactgagtgatacaatgactaaaaccgagaggcaccatcttttctccaatattacagatgtctgtgaggcaagcaaaaagttctttatagagttggaagcaagacatcagaataatatcttcatagatgacataagtgacattgtggaaaaacacacagcatccacatttgacccatatgtgaaatactgcacaaatgaagtctaccaacaacgaacactacaaaaattgttagctaccaatccatcctttaaggaagtattgtcaaggattgagtcccatgaagactgtaggaacttacccatgatctcttttctcattctccccatgcagagggtgacccgccttcccctgctgatggatactatctgtcaaaaaacacctaaggactctccgaagtatgaagtctgcaaaagagccttgaaggaagttagcaagttggttcgactatgcaatgagggcgcccggaagatggaaaggactgagatgatgtacacaattaactcccagctggaatttaaaattaagccttttcctttagtctcctcttcccggtggttggtaaaaagaggtgaattgacagcctatgttgaagacactgtgcttttctcaagaaggacatccaaacagcaagtctacttctttctctttaacgatgtgctcattatcaccaagaagaagagtgaagaaagttacaacgtcaatgattattccttaagagatcagctattggtggaatcttgtgacaatgaagagcttaattcttctccagggaagaacagctccacaatgctctattcaagacagagctctgccagtcacctctttactctgacagtccttagtaaccacgcgaatgagaaagtggagatgctactaggagctgagacgcagagcgagcgagcccgctggataactgccctgggacacagcagcgggaagccgcctgcagaccgaacctgtggctgacgtcgtcctcatctatcaacgtgtcagcgatggctggtatgagggggaacgactacgagatggagaaagaggctggtttcctatggaatgtgccaaggagataacatgtcaagctacaattgataagaatgtggagagaatgggacgcttgctaggactggagaccaacgtgtagtctctcagatggtcttttgttactgcaagatttgcacgacacttaccgggctggttggttctgggctagttttattgttaattttgtcacagcctatttaattaaaagaacgaaaacacttgcctttaagcttgccaggttgttctgctctctcatgagaagagcttggatacagtgagtttgcacagctcagtttttacctaaccacacacttgcagacctcctgaggtacacagaatagctgagcagttcacttcagggatcaggtcatctctgctcctcctagtttcaccatgttctggcaataaaaaacacatattatatcctggttttctctatccttgcattactaaggtgactgtctctctttatacatccttgtatggttctcccagtattagcaagattgtatatctgtaaagaatgtccagttttgtaaatatttccctgcctttttttttctttttttacatctgattttaatgcttcgttaacttcaaaaggaactggtagagttcagaaggtgagctgttgtttttctaaacctcttcccaggaaggggacattgacacttgaatttttgtcacctttttcctcattagaaggaaagtagaaagccttactttaggatttttaaaaaaaaatccatctcaccccatattgttcttaaataagtatagactaattaacctaagctacctttaacaacgtagaatttagatgggttcatatatgtgagaaaaacctgaatataggacaggggtcctacttttttccccacctctgtcgcccaggctagagtatagtggtgtgatcttggcccactgcaacctctgcttcctaggttcaagtgattctcctgcctcagcctcccaagtagctgggattgtaagagtatgccaccacgcccagctactttttgtatttttagtagagacagggtttcatcatgttggccaggatggtctcttaactcctgccctcaagtgatccaccagagaggagatcctcggcctccccaagtgctgggattataggcatgagccaccgtgcccagcctactttctaattaatt

SEQ ID NO: 88016 - protein, 173 aa, Artificial Sequence [sequence omitted]

SEQ ID NO: 88017 - protein, 338 aa, Artificial Sequence
  derived and/or modified sequence
MLKVSAVLCVCAAAWCSQSLAAAAAVAAAGGRSDGGNFLDDKQWLTTISQYDKEVGQWNKFRDCKLEYQACVLGKQISVKCEGHCPCPSDKPTSTSRNVKRACSDLEFREVANRLRDWFKALHESGSQNKKTKTLLRPERSRFDTSILPICKDSLGWMFNRLDTNYDLLLDQSELRSIYLDKNEQCTKAFFNSCDTYKDSLISNNEWCYCFQRQQDPPCQTELSNIQKRQGVKKLLGQYIPLCDEDGYYKPTQCHGSVGQCWCVDRYGNEVMGSRINGVADCAIDFEISGDFASGDFHEWTDDEDDEDDIMNDEDEIEDDDEDEGDDDDGGDDHDVYI

SEQ ID NO: 88018 - DNA, 522 bp, Artificial Sequence
  derived and/or modified sequence
atgctgaaggtgagcgccgtgctgtgcgtgtgcgccgccgcctggtgcagccagagcctggccgccgccgccgccgtggccgccgccggcggcagaagcgacggcggcaacttcctggacgacaagcagtggctgaccaccatcagccagtacgacaaggaggtgggccagtggaacaagttcagagacgacgactacttcagaacctggagccccggcaagcccttcgaccaggcctgcagcgacctggagttcagagaggtggccaacagactgagagactggttcaaggccctgcacgagagcggcagccagaacaagaagaccaagaccctgctgagacccgagagaagcagattcgacaccagcatcctgcccatctgcaaggacagcctgggctggatgttcaacagactggacaccaactacgacctgctgctggaccagagcgagctgagaagcatctacctggacaagaacgagcagtgcaccaaggccttcttcaacagctgcgacacctag

SEQ ID NO: 88019 - DNA, 1017 bp, Artificial Sequence
  derived and/or modified sequence
atgctgaaggtgagcgccgtgctgtgcgtgtgcgccgccgcctggtgcagccagagcctggccgccgccgccgccgtggccgccgccggcggcagaagcgacggcggcaacttcctggacgacaagcagtggctgaccaccatcagccagtacgacaaggaggtgggccagtggaacaagttcagagactgcaagctggagtaccaggcctgcgtgctgggcaagcagatcagcgtgaagtgcgagggccactgcccctgccccagcgacaagcccaccagcaccagcagaaacgtgaagagagcctgcagcgacctggagttcagagaggtggccaacagactgagagactggttcaaggccctgcacgagagcggcagccagaacaagaagaccaagaccctgctgagacccgagagaagcagattcgacaccagcatcctgcccatctgcaaggacagcctgggctggatgttcaacagactggacaccaactacgacctgctgctggaccagagcgagctgagaagcatctacctggacaagaacgagcagtgcaccaaggccttcttcaacagctgcgacacctacaaggacagcctgatcagcaacaacgagtggtgctactgcttccagagacagcaggaccccccctgccagaccgagctgagcaacatccagaagagacagggcgtgaagaagctgctgggccagtacatccccctgtgcgacgaggacggctactacaagcccacccagtgccacggcagcgtgggccagtgctggtgcgtggacagatacggcaacgaggtgatgggcagcagaatcaacggcgtggccgactgcgccatcgacttcgagatcagcggcgacttcgccagcggcgacttccacgagtggaccgacgacgaggacgacgaggacgacatcatgaacgacgaggacgagatcgaggacgacgacgaggacgagggcgacgacgacgacggcggcgacgaccacgacgtgtacatctag

SEQ ID NO: 88020 - DNA, 522 bp, Artificial Sequence
  derived and/or modified sequence
atgctgaaagtgagcgcggtgctgtgtgtttgcgccgccgcttggtgctcgcagtctctggccgcagctgcggccgtagccgcagcaggcggtagatccgatggcggcaattttctggatgataagcagtggttaacaaccatatcccagtatgataaagaggtgggccagtggaacaaattcagggacgatgattatttccgcacctggagccctgggaaaccgttcgatcaggcttgtagtgacctggagtttagggaggtggcgaatcgcctcagggactggtttaaggcactccatgagtccggcagccagaacaagaagacaaagacgctgctgagaccagagagaagtagattcgacacatcgattttgcccatctgcaaagactccctgggatggatgttcaacagactggacactaactacgatctgcttcttgaccagtccgagctacgaagcatctacctggacaagaacgagcaatgtaccaaagcttttttcaatagctgtgacacctag

SEQ ID NO: 88021 - DNA, 1017 bp, Artificial Sequence
  derived and/or modified sequence
atgctgaaagtctcagccgtgttgtgcgtctgtgctgctgcatggtgttcccaatctcttgccgcggccgcggctgttgctgccgctggcggtaggagtgacggcggaaactttttggatgataagcagtggctgactacgatctctcagtatgacaaagaggtgggtcagtggaacaaatttcgcgattgtaagctggaataccaggcatgtgtactgggcaaacagattagtgttaaatgcgagggccattgtccttgcccctcagataagcccacatctacaagccggaacgtgaaacgggcttgctcggatctggagttccgtgaagtggccaaccggttgcgggactggttcaaggcactgcatgaatcaggctcgcaaaataaaaagaccaagaccctcttgcgccccgagcgatcaagatttgacacctctatcctcccaatttgtaaggattcactcggatggatgttcaaccgacttgataccaattatgacctgttgctcgatcagagcgaactaaggtcaatctatctcgacaaaaacgaacagtgtaccaaggctttcttcaacagttgcgacacgtataaagacagcctaatctccaacaacgagtggtgctattgcttccagcgccagcaggaccctccctgccaaactgagttgtcgaatatccagaaacgccagggcgtgaaaaaacttctgggacaatatattccattgtgtgacgaggacggttactacaagcctacccaatgtcatgggagtgttgggcagtgttggtgcgtggaccgatatggaaatgaggtgatgggctctcgtattaacggagtggccgactgcgcgatcgattttgaaatttcaggcgactttgcaagcggagattttcatgagtggacagacgatgaggatgacgaggatgacattatgaacgatgaagacgagatcgaggacgatgatgaggacgagggagatgacgacgacggcggcgacgatcacgatgtgtatatctag

SEQ ID NO: 88022 - DNA, 1017 bp, Artificial Sequence
  derived and/or modified sequence
atgctgaaggtgagcgccgtgctgtgcgtctgcgcagcggcgtggtgctcccagtctctagctgccgccgccgcagtggcagccgcaggaggacggagcgatggaggcaacttcctggacgacaagcagtggttgaccaccatctcccagtacgacaaggaggtgggtcagtggaacaagtttcgagattgcaaactggagtaccaggcgtgtgtgctgggaaaacagatctccgtgaagtgcgagggccactgtccgtgcccctccgacaaacccacctccactagtcggaacgtgaagcgggcttgctcggacttggaatttagagaagttgccaatagactgcgagactggttcaaagccctccacgagtcaggctcccagaacaaaaaaaccaaaacactgctgcggccagaacgtagtcggttcgacacctctattttgccaatatgtaaggatagccttgggtggatgttcaaccgcttggataccaattacgacctcttactggaccagagcgaattgaggagtatttaccttgataaaaatgaacagtgcacaaaggctttttttaacagctgcgatacttataaggactcactcataagcaataatgagtggtgttattgctttcaacgacagcaggatcccccctgccagaccgagctgtctaatatacaaaaaaggcaaggcgtcaagaaactgctcggccagtacattcctctgtgcgacgaggacgggtactataagcccacgcagtgccatggctcggtgggacagtgttggtgcgtggaccgctacggtaacgaggtaatgggcagtaggatcaatggcgttgcagactgtgctatagattttgagatctccggcgactttgccagcggcgactttcacgaatggacagatgatgaagacgatgaggatgacatcatgaacgacgaggatgagattgaagacgacgatgaggatgagggcgacgacgatgacggcggcgacgatcatgacgtgtatatttag

SEQ ID NO: 88023 - DNA, 522 bp, Artificial Sequence
  derived and/or modified sequence
atgctgaaggtgtctgctgtgctgtgtgtgtgtgccgccgcctggtgcagccagagcctggccgctgctgctgctgtggccgctgctgggggccgcagtgatggcggcaacttcctggatgacaagcagtggctgaccaccatcagccagtatgacaaggaggtgggccagtggaacaagttcagagatgatgactacttccgcacctggagccctgggaagccctttgaccaggcctgcagcgacctggagttccgggaggtggccaaccggctgcgggactggttcaaggccctgcacgagagcggcagccagaacaagaagaccaagaccctgctgcggcctgagaggagcagatttgacaccagcatcctgcccatctgcaaggacagcctgggctggatgttcaaccggctggacaccaactatgacctgctgctggaccagagcgagctgcggagcatctacctggacaagaatgagcagtgcaccaaggccttcttcaacagctgtgacacctag

SEQ ID NO: 88024 - DNA, 1017 bp, Artificial Sequence
  derived and/or modified sequence
atgctgaaggtgtctgctgtgctgtgtgtgtgtgccgccgcctggtgcagccagagcctggccgctgctgctgctgtggccgctgctgggggccgcagtgatggcggcaacttcctggatgacaagcagtggctgaccaccatcagccagtatgacaaggaggtgggccagtggaacaagttccgggactgcaagctggagtaccaggcctgtgtgctgggcaagcagatctctgtgaagtgtgagggccactgcccctgccccagcgacaagcccaccagcaccagcagaaatgtgaagagggcctgcagcgacctggagttccgggaggtggccaaccggctgcgggactggttcaaggccctgcatgaaagtggcagccagaacaagaagaccaagaccctgctgcggcctgagaggagcagatttgacaccagcatcctgcccatctgcaaggacagcctgggctggatgttcaaccggctggacaccaactatgacctgctgctggaccagagcgagctgcggagcatctacctggacaagaatgagcagtgcaccaaggccttcttcaacagctgtgacacctacaaggacagcctcatcagcaacaatgagtggtgctactgcttccagaggcagcaggaccccccctgccagacagagctgagcaacatccagaagaggcagggcgtgaagaagctgctgggccagtacatccccctgtgtgatgaagatggctactacaagcccacccagtgccacggctctgtgggccagtgctggtgtgtggacagatatggaaatgaggtgatgggcagccgcatcaatggagtggccgactgtgccatcgactttgagatcagcggggactttgccagcggggacttccacgagtggacagatgatgaagatgatgaagatgacatcatgaatgatgaagatgaaattgaagatgatgatgaagatgaaggagatgatgatgatggaggagatgaccatgatgtgtacatctag

SEQ ID NO: 88025 - DNA, 522 bp, Artificial Sequence
  derived and/or modified sequence
atgctgaaggtgagcgccgtgctgtgcgtgtgcgccgccgcctggtgctcccaaagcctggccgctgccgccgccgtggcggccgccggagggcggtctgacggtggcaatttcctcgacgacaaacaatggttaaccacaatctcacagtacgataaggaggttggccaatggaacaagttccgcgatgatgactacttcaggacttggagccctgggaagccgtttgaccaggcttgttccgatctggaattccgcgaagtcgccaaccgtttaagagattggttcaaggccctccatgagtccggatcccagaataagaagactaaaaccctactgagacctgaacggtcgcgctttgatacaagcatccttccaatttgcaaggacagcctgggatggatgtttaacaggttggacaccaattatgacctcctactcgaccagagtgagctccgttccatctatctggataagaacgaacagtgtactaaagctttttttaattcttgcgatacatag

SEQ ID NO: 88026 - DNA, 1017 bp, Artificial Sequence
  derived and/or modified sequence
atgctgaaggtgagcgccgtgctgtgcgtgtgcgccgccgcctggtgttcacaatctctggccgcggctgctgccgtcgctgccgccggcgggcgcagcgatggaggaaacttcctcgatgataagcagtggctcaccaccattagccaatatgataaggaagtgggacagtggaataagttcagagactgcaaacttgaatatcaggcctgtgtgctaggtaagcagatttcagtgaaatgtgaggggcattgcccatgtcctagcgacaaacctaccagcacatctagaaacgtgaagcgggcatgttcagacttggagtttagagaggttgccaatagacttagggattggtttaaagccctccatgaatcagggtcccaaaataaaaagacgaagacattactgcgaccggagcggtcaagatttgataccagtattctgcctatatgcaaagatagtctgggctggatgttcaatagactggacacgaattatgacctgctcctggatcagagcgagctgcggtccatctatctggataaaaacgagcagtgcaccaaggcctttttcaacagttgtgatacctataaggactctttaatctccaacaacgagtggtgttattgctttcagcgccagcaggatcccccctgtcagaccgagctgagtaacattcaaaaaagacagggggtgaaaaagcttttgggccagtacatcccgttgtgcgatgaggatggctattacaagcccactcagtgccatggcagcgtcgggcagtgttggtgcgtcgaccgctacggcaacgaagtcatgggaagccggataaacggggtggcagattgtgccatcgatttcgagatttcaggggatttcgcgagcggggacttccatgagtggacagacgatgaagatgacgaagatgacataatgaacgatgaagatgaaatcgaggatgacgacgaggacgagggcgatgacgatgatggaggggacgaccatgatgtctacatctag

SEQ ID NO: 88027 - DNA, 1017 bp, Artificial Sequence
  derived and/or modified sequence
atgctgaaggtgagcgccgtgctgtgcgtgtgcgccgccgcctggtgctcacagtctcttgcggccgctgccgcagtcgccgcagccggtggccgaagcgatggcgggaatttcctcgacgataagcagtggctcactacaattagccagtacgataaagaggtcggtcaatggaacaagtttcgggattgtaaactcgagtaccaggcctgcgtcctcggcaagcagatttccgtcaagtgcgaggggcattgcccgtgcccatctgataagcctacttctactagcagaaacgttaagagggcttgttctgacctagagttcagggaggtagccaataggttaagagattggttcaaggcgctgcatgaaagcggtagccagaataagaaaaccaagactctgctgaggcctgagaggtcccgattcgacacaagcatcttgccaatttgcaaagacagcctaggttggatgtttaatcggctggatacaaactatgacttgctactggatcagtccgaactacgcagtatttacctggataagaatgagcaatgcacgaaagcattcttcaactcatgcgacacctacaaagacagtctgataagcaacaacgaatggtgctattgctttcagagacagcaggatcccccatgccaaactgaattgtccaatatacagaagcgccagggtgtcaaaaagctattgggccagtacattccactgtgcgacgaggacggatactacaagcctacccagtgccacggttctgtcggccagtgctggtgtgtggaccggtacgggaatgaggtcatggggagccggattaacggagtggcagactgcgccattgactttgagatttctggtgactttgccagcggggacttccatgagtggaccgatgatgaggatgatgaggatgacataatgaacgacgaagacgagatcgaagacgacgatgaggacgaaggggatgatgacgatgggggtgatgatcacgacgtctacatttag

SEQ ID NO: 88028 - DNA, 522 bp, Artificial Sequence
  derived and/or modified sequence
atgttaaaagtgagtgcggtcttgtgtgtttgtgcggctgcttggtgttctcagtctctggcagccgcagcagccgtggcagcagccggtgggagaagtgatggtggtaactttcttgatgacaaacagtggctgacaaccattagccagtacgacaaagaggtaggccagtggaataaatttagagatgatgattacttccggacatggtccccgggaaagcctttcgaccaggcatgcagcgatttggaattccgggaggttgctaacaggctgcgcgattggttcaaggccctgcacgagtctggcagccaaaacaaaaagacaaagaccctcctcagaccagagcgatcaagatttgatacctcaattttaccaatctgcaaagactccctcggatggatgttcaatcgactggacacaaactatgacctgctcctggaccagtcggagctccggtccatttacctcgataaaaacgagcagtgcacaaaggcttttttcaacagctgtgacacctag

SEQ ID NO: 88029 - DNA, 1017 bp, Artificial Sequence
  derived and/or modified sequence
atgctgaaggtttccgcagtgctgtgcgtgtgcgcagctgcctggtgttcgcagtccctggccgctgccgctgctgtggccgcagccggaggacggagtgacggaggtaactttctggatgacaagcagtggctcaccacaattagtcaatacgacaaagaagtcggtcagtggaacaagttccgtgattgtaagctcgagtatcaagcctgcgtcctgggtaaacagatatccgtgaagtgtgagggccactgtccttgcccctctgataagcccacgtcaacctcgcgcaacgtgaaaagggcctgtagcgatctggagtttagggaagtggctaatcgcttgcgggactggttcaaggcgctgcacgagtctggctctcagaacaagaagaccaagacactcttacggcctgagagaagcagatttgatacatcaatccttccaatttgcaaagattctttaggctggatgttcaatcgattagatactaactacgacctgcttctggaccaatccgagctccgcagcatatatctcgacaagaacgaacagtgtactaaggccttcttcaactcatgtgacacctataaggattccctgatctctaataacgaatggtgctattgtttccagaggcagcaagacccaccctgtcagaccgagctttccaacatccagaagagacagggggttaaaaagctgttggggcagtacatcccactttgcgatgaggacgggtactataagccaacacaatgtcacggctctgtgggacagtgttggtgcgtggatcggtatgggaatgaagtgatgggctccaggatcaatggggttgcagattgtgcaatcgattttgagatctcaggggatttcgcttccggagactttcacgaatggacagacgatgaagacgatgaagatgatattatgaacgatgaggacgagatcgaggacgatgacgaagatgaaggtgatgacgatgacgggggagacgaccacgatgtctatatttag

SEQ ID NO: 88030 - DNA, 1017 bp, Artificial Sequence
  derived and/or modified sequence
atgctcaaagtcagcgcagttctgtgcgtgtgtgcagcagcctggtgttcccaaagtttggccgcagctgcagctgttgccgcagcaggtggcaggtcagatggcggtaacttcctggatgataaacagtggctgaccacaatttcgcaatatgacaaagaggtgggccagtggaacaaattccgggattgcaaactggagtaccaggcctgcgtgttgggcaaacaaattagcgtgaagtgcgaggggcattgtccatgtccatctgataaaccaacttccacctcaaggaacgtgaagcgcgcttgcagtgatctggagtttcgggaagttgccaatcggctccgggactggttcaaggccttgcacgagtctggcagtcaaaacaaaaagaccaagaccctccttcggccagagcgcagcagattcgatacatccatacttcctatttgcaaggattcattagggtggatgttcaacaggctggacacaaattatgacctgttgctcgaccagtcagagcttagaagtatctacttagacaaaaacgaacaatgtactaaggctttcttcaatagctgcgacacgtataaagattctttgatctcaaacaatgagtggtgctactgctttcaaagacagcaagaccctccttgccagaccgagttgtccaacatacagaagcggcagggagtaaaaaagctgcttgggcagtacattcctctttgcgatgaagacggctactataagcccacacagtgccatggctccgtgggccaatgctggtgcgttgaccgctatggcaatgaggtaatgggatctcggattaacggtgtagctgactgtgctatcgacttcgagatatccggggactttgcttccggcgattttcatgaatggaccgatgatgaggatgatgaggatgacatcatgaatgacgaagatgagattgaggatgacgacgaggacgaaggggatgacgacgatggaggggacgaccatgatgtatatatctag

SEQ ID NO: 88031 - DNA, 522 bp, Artificial Sequence
  derived and/or modified sequence
atgctgaaagttagtgcggtcctctgcgtgtgcgccgctgcgtggtgtagtcaatcccttgcagccgcagctgccgtcgccgccgccggaggaagaagcgatggtggcaacttcttagacgacaaacagtggttgaccactatttctcaatatgataaagaagtggggcagtggaataagtttcgggatgacgactattttcggacttggagccccggaaaaccttttgatcaggcgtgcagcgaccttgagttccgcgaggtcgccaataggctacgcgactggttcaaggccctccatgaatctggctcccaaaacaaaaaaactaagaccctcttgcggcctgagcgctcgcgttttgatacttctattctcccaatttgcaaagattccttgggctggatgttcaaccggctcgatacaaattatgaccttctgctcgaccaaagtgaactgcgatcaatctacctcgacaaaaatgagcagtgcaccaaagccttcttcaatagttgtgatacatag

SEQ ID NO: 88032 - DNA, 1017 bp, Artificial Sequence
  derived and/or modified sequence
atgttgaaggtttccgccgtcctatgtgtgtgcgctgcagcctggtgttctcagtccctcgccgccgccgccgctgttgccgcagccggagggagatctgatggaggcaatttcttagatgacaagcagtggctgacaaccatttcgcagtatgataaagaggtgggtcagtggaacaaattcagagactgcaagttagaataccaggcctgcgttctgggcaaacagatcagtgtgaagtgcgaaggtcactgcccctgcccatccgacaagcccaccagtacctcacgcaacgtgaagcgggcttgtagcgatttggagtttcgggaagtcgctaatcgactgcgcgactggtttaaggcactccacgagtcagggtcacagaataaaaaaaccaagacactgctcagacctgagcgatctagattcgatacctccattttaccaatctgtaaagattcactgggctggatgttcaaccgactagacactaactacgatctcctcctcgatcagtctgagctgagatccatttacctggacaagaatgaacagtgtacaaaggccttctttaacagctgcgatacttacaaggactctctaattagcaataacgagtggtgttactgtttccaacgacagcaagatccgccatgccagaccgaactttccaatatccagaagcgccagggcgtgaagaaattgctggggcagtatatccccctatgtgacgaggacggctattacaaacccactcagtgtcatggctcggtgggtcaatgctggtgtgtggatcgatacggtaacgaggttatgggatcacgaataaacggagtggcagattgcgccatcgactttgagattagcggtgatttcgctagtggcgacttccatgagtggacagatgatgaagacgatgaggatgacatcatgaatgacgaagacgaaatagaggacgacgacgaagacgagggtgacgacgacgatggaggtgatgaccacgatgtttacatttag

SEQ ID NO: 88033 - DNA, 1017 bp, Artificial Sequence
  derived and/or modified sequence
atgttaaaggtgtctgccgtgctgtgtgtgtgtgccgccgcctggtgttctcagtccctggctgctgccgctgcggtggccgccgccggtggccgatcagatggaggaaattttcttgatgacaagcagtggttaaccactatttctcagtatgataaggaagttgggcaatggaacaagtttagagattgtaagttggagtaccaggcttgcgtgctcgggaagcagatcagtgtcaagtgtgagggtcactgtccctgtccatccgataagcctactagtaccagccgtaatgtaaaacgggcatgttctgacttggaatttagagaggtggctaaccggctacgcgattggtttaaggcactgcatgagtcgggctcccagaacaaaaaaaccaagacattattaagaccagagaggagccggttcgatacatccattctgcctatttgcaaagactccctgggatggatgtttaatcggctggataccaactatgatctcttgctggaccagtcagaattaagatctatatacttagacaaaaatgaacagtgtacaaaggcgttcttcaactcctgtgatacctacaaggatagcttaatttctaacaacgaatggtgttactgctttcagcgacaacaagaccccccctgccagaccgaactgagcaatattcagaagagacagggggtcaagaagttgttaggacagtacatcccgctgtgtgacgaggacggctactataaaccaacacagtgtcatggttctgttggacagtgttggtgtgtagatcggtacgggaatgaggttatgggctctagaataaatggcgtggcggattgcgccatcgatttcgaaattagcggcgattttgcctcaggagacttccacgagtggaccgatgacgaggacgacgaagacgacatcatgaacgacgaagatgaaatcgaggatgacgacgaggatgaaggagatgacgacgatggaggggacgatcacgacgtgtatatttag

SEQ ID NO: 88034 - DNA, 522 bp, Artificial Sequence
  derived and/or modified sequence
atgctgaaagtctctgctgttctgtgtgtgtgcgcggccgcatggtgtagtcagagcttagccgccgccgccgccgttgctgccgccggcggaagatctgatgggggcaatttcctggatgacaaacagtggctgacaacgatctcacaatatgacaaagaagttggacagtggaataaatttcgagatgatgactacttccgcacctggtcccctggaaaaccctttgaccaggcctgtagtgaccttgagtttcgcgaggtagctaaccgactgagggactggtttaaggccctccacgaatctggctcccaaaacaaaaaaactaagaccctcttgcggcctgagcgctcgcgttttgatacttctattctcccaatttgcaaagattccttgggctggatgttcaaccggctcgatacaaattatgaccttctgctcgaccaaagtgaactgcgatcaatctacctcgacaaaaatgagcagtgcaccaaagccttcttcaatagttgtgatacatag

SEQ ID NO: 88035 - DNA, 1017 bp, Artificial Sequence
  derived and/or modified sequence
atgctaaaggtcagtgcggtgttgtgcgtgtgtgctgccgcttggtgcagtcaaagcctggcagccgccgccgcagtggcagcggctggaggccgttcggacggtggaaatttcttagacgataaacagtggctgaccacgatttctcagtacgataaggaagttggacagtggaacaagtttcgggattgtaagttagagtaccaggcatgcgtactcggtaagcagattagtgttaagtgcgaaggtcattgcccctgcccctccgacaagccaacgtctacatcccgtaacgtgaagcgcgcctgttcagacctggaattcagagaagttgccaacaggttgagagattggttcaaagcattacacgaatcaggttcacaaaacaaaaaaaccaaaactctactgaggcctgaaaggagcaggtttgacacgtcaatcttgcccatctgtaaagactccttggggtggatgttcaatagactcgacactaattatgacctattacttgaccagagtgagttacgtagcatctatctcgataaaaacgagcaatgtaccaaggccttctttaactcctgcgatacatataaggatagcttgattagtaacaatgagtggtgctattgttttcaaaggcagcaagacccgccctgccagaccgagctgtccaacattcagaaaagacaaggggtaaagaagctgctgggacaatacatccctttatgcgatgaagacgggtattataaacccacgcaatgccacggaagcgtcggccagtgctggtgcgtggatagatatgggaatgaagttatggggtctagaatcaatggagtggctgattgcgcaattgacttcgagatttcaggggacttcgcgagcggagatttccacgagtggacagatgacgaggacgatgaggatgatataatgaacgatgaggacgaaatagaagatgatgacgaggatgaaggcgatgatgacgatggaggggacgatcacgacgtgtacatttag

SEQ ID NO: 88036 - DNA, 1017 bp, Artificial Sequence
  derived and/or modified sequence
atgttaaaagtttctgcagtgttatgcgtgtgtgccgcagcttggtgtagtcaatctctcgccgccgccgccgccgtggctgccgctgggggacgcagcgatggcggcaactttcttgacgacaagcagtggctgaccactataagccagtacgacaaagaagtaggacagtggaataagtttagagactgtaagttagaatatcaggcctgtgtgttgggaaaacagatcagcgtaaagtgcgaaggccactgtccttgcccctcggataagccaacatcaacttctaggaatgtcaaacgcgcttgctcagacctggagttccgagaagtcgctaataggctaagagactggttcaaagcactacacgaatctgggtcgcagaataaaaaaactaaaaccctcctgagaccagaaagaagccggtttgatacttcgatccttcccatctgcaaagactctctgggctggatgtttaaccgactggatacaaattacgatctcctgttagaccagagtgagctgcgaagtatctatcttgataagaatgaacagtgcacaaaggcattttttaactcatgtgacacctacaaagacagcttgatatccaataatgaatggtgttactgcttccaaagacagcaggatccgccttgtcaaacagagcttagtaatatccagaagagacaaggcgtcaaaaagttattaggacagtacattcccctgtgcgatgaggacggctactacaagcccacacagtgtcacggctcagtaggacagtgctggtgtgtggacagatacgggaatgaagttatggggtcaaggatcaacggagtggcggattgcgctatagactttgagatatcaggagacttcgcctctggggatttccacgagtggactgatgacgaagacgacgaagacgatataatgaacgacgaggatgaaattgaagacgatgatgaagatgagggagacgacgacgacggaggtgacgatcatgacgtttacatttag

SEQ ID NO: 88037 - DNA, 563 bp, Artificial Sequence
  derived and/or modified sequence
gcatttccagcaggagctgcgagcacagtgctggctcacaacaagatgctcaaggtgtcagccgtactgtgtgtgtgtgcagccgcttggtgcagtcagtctctcgcagctgccgcggcggtggctgcagccggggggcggtcggacggcggtaattttctggatgataaacaatggctcaccacaatctctcagtatgacaaggaagtcggacagtggaacaaattccgagacgatgattatttccgcacttggagtccaggaaaacccttcgatcaggcatgcagtgacctggagttcagggaagtggcaaacagattgcgggactggttcaaggcccttcatgaaagtggaagtcaaaacaagaagacaaaaacattgctgaggcctgagagaagcagattcgataccagcatcttgccaatttgcaaggactcacttggctggatgtttaacagacttgatacaaactatgacctgctattggaccagtcagagctcagaagcatttaccttgataagaatgaacagtgtaccaaggcattcttcaattcttgtgacac

SEQ ID NO: 88038 - DNA, 1457 bp, Artificial Sequence
  derived and/or modified sequence
tttccagcaggagctgcgagcacagtgctggctcacaacaagatgctcaaggtgtcagccgtactgtgtgtgtgtgcagccgcttggtgcagtcagtctctcgcagctgccgcggcggtggctgcagccggggggcggtcggacggcggtaattttctggatgataaacaatggctcaccacaatctctcagtatgacaaggaagtcggacagtggaacaaattccgagactgcaaactagaatatcaggcatgtgtcttaggaaaacagatctcagtcaaatgtgaaggacattgcccatgtccttcagataagcccaccagtacaagcagaaatgttaagagagcatgcagtgacctggagttcagggaagtggcaaacagattgcgggactggttcaaggcccttcatgaaagtggaagtcaaaacaagaagacaaaaacattgctgaggcctgagagaagcagattcgataccagcatcttgccaatttgcaaggactcacttggctggatgtttaacagacttgatacaaactatgacctgctattggaccagtcagagctcagaagcatttaccttgataagaatgaacagtgtaccaaggcattcttcaattcttgtgacacatacaaggacagtttaatatctaataatgagtggtgctactgcttccagagacagcaagacccaccttgccagactgagctcagcaatattcagaagcggcaaggggtaaagaagctcctaggacagtatatccccctgtgtgatgaagatggttactacaagccaacacaatgtcatggcagtgttggacagtgctggtgtgttgacagatatggaaatgaagtcatgggatccagaataaatggtgttgcagattgtgctatagattttgagatctccggagattttgctagtggcgattttcatgaatggactgatgatgaggatgatgaagacgatattatgaatgatgaagatgaaattgaagatgatgatgaagatgaaggggatgatgatgatggtggtgatgaccatgatgtatacatttgattgatgacagttgaaatcaataaattctacatttctaatatttacaaaaatgatagcctatttaaaattatcttcttccccaataacaaaatgattctaaacctcacatatattttgtataattatttgaaaaattgcagctaaagttatagaactttatgtttaaataagaatcatttgctttgagtttttatattccttacacaaaaagaaaatacatatgcagtctagtcagacaaaataaagttttgaagtgctactataataagtttttcacgagaacaaactttgtaaatcttccataagcaaaatgacagctagtgcttgggatcgtacatgttaattttctgaaagataattctaagtgaaatttaaaataaataaatttttaatgacct

SEQ ID NO: 88039 - DNA, 1017 bp, Artificial Sequence
  derived and/or modified sequence
atgctcaaggtgtcagccgtactgtgtgtgtgtgcagccgcttggtgcagtcagtctctcgcagctgccgcggcggtggctgcagccggggggcggtcggacggcggtaattttctggatgataaacaatggctcaccacaatctctcagtatgacaaggaagtcggacagtggaacaaattccgagactgcaaactagaatatcaggcatgtgtcttaggaaaacagatctcagtcaaatgtgaaggacattgcccatgtccttcagataagcccaccagtacaagcagaaatgttaagagagcatgcagtgacctggagttcagggaagtggcaaacagattgcgggactggttcaaggcccttcatgaaagtggaagtcaaaacaagaagacaaaaacattgctgaggcctgagagaagcagattcgataccagcatcttgccaatttgcaaggactcacttggctggatgtttaacagacttgatacaaactatgacctgctattggaccagtcagagctcagaagcatttaccttgataagaatgaacagtgtaccaaggcattcttcaattcttgtgacacatacaaggacagtttaatatctaataatgagtggtgctactgcttccagagacagcaagacccaccttgccagactgagctcagcaatattcagaagcggcaaggggtaaagaagctcctaggacagtatatccccctgtgtgatgaagatggttactacaagccaacacaatgtcatggcagtgttggacagtgctggtgtgttgacagatatggaaatgaagtcatgggatccagaataaatggtgttgcagattgtgctatagattttgagatctccggagattttgctagtggcgattttcatgaatggactgatgatgaggatgatgaagacgatattatgaatgatgaagatgaaattgaagatgatgatgaagatgaaggggatgatgatgatggtggtgatgaccatgatgtatacatttga

SEQ ID NO: 88040 - protein, 1177 aa, Artificial Sequence
  derived and/or modified sequence
MSPGCMLLFVFGFVGGAVVINSAILVSLSVLLLVHFSISTGVPALTQNLPRILRKERPISLGIFPLPAGDGLLTPDAQKGGETPGSEQWKFQELSQPRSHTSLKDELSDVSQGGSKATTPASTANSDVATIPTDTPLKEENEGFVKVTDAPNKSEISKHIEVQVAQETRNVSTGSAENEEKSEVQAIIESTPELDMDKDLSGYKGSSTPTKGIENKAFDRNTESLFEELSSAGSGLIGDVDEGADLLGMGREVENLILENTQLLETKNALNIVKNDLIAKVDELTCEKDVLQGELEAVKQAKLKLEEKNRELEEELRKARAEAEDARQKAKDDDDSDIPTAQRKRFTRVEMARVLMERNQYKERLMELQEAVRWTEMIRASRENPAMQEKKRSSIWQFFSRLFSSSSNTTKKPEPPVNLKYNAPTSHVTPSVKKRSSTLSQLPGDKSKAFDFLSEETEASLASRREQKREQYRQVKAHVQKEDGRVQAFGWSLPQKYKQVTNGQGENKMKNLPVPVYLRPLDEKDTSMKLWCAVGVNLSGGKTRDGGSVVGASVFYKDVAGLDTEGSKQRSASQSSLDKLDQELKEQQKELKNQEELSSLVWICTSTHSATKVLIIDAVQPGNILDSFTVCNSHVLCIASVPGARETDYPAGEDLSESGQVDKASLCGSMTSNSSAETDSLLGGITVVGCSAEGVTGAATSPSTNGASPVMDKPPEMEAENSEVDENVPTAEEATEATEGNAGSAEDTVDISQTGVYTEHVFTDPLGVQIPEDLSPVYQSSNDSDAYKDQISVLPNEQDLVREEAQKMSSLLPTMWLGAQNGCLYVHSSVAQWRKCLHSIKLKDSILSIVHVKGIVLVALADGTLAIFHRGVDGQWDLSNYHLLDLGRPHHSIRCMTVVHDKVWCGYRNKIYVVQPKAMKIEKSFDAHPRKESQVRQLAWVGDGVWVSIRLDSTLRLYHAHTYQHLQDVDIEPYVSKMLGTGKLGFSFVRITALMVSCNRLWVGTGNGVIISIPLTETVILHQGRLLGLRANKTSGVPGNRPGSVIRVYGDENSDKVTPGTFIPYCSMAHAQLCFHGHRDAVKFFVAVPGQVISPQSSSSGTDLTGDKAGPSAQEPGSQTPLKSMLVISGGEGYIDFRMGDEGGESELLGEDLPLEPSVTKAERSHLIVWQVMYGNE

SEQ ID NO: 88041 - DNA, 3534 bp, Artificial Sequence
  derived and/or modified sequence
atgagccccggctgcatgctgctgttcgtgttcggcttcgtgggcggcgccgtggtgatcaacagcgccatcctggtgagcctgagcgtgctgctgctggtgcacttcagcatcagcaccggcgtgcccgccctgacccagaacctgcccagaatcctgagaaaggagagacccatcagcctgggcatcttccccctgcccgccggcgacggcctgctgacccccgacgcccagaagggcggcgagacccccggcagcgagcagtggaagttccaggagctgagccagcccagaagccacaccagcctgaaggacgagctgagcgacgtgagccagggcggcagcaaggccaccacccccgccagcaccgccaacagcgacgtggccaccatccccaccgacacccccctgaaggaggagaacgagggcttcgtgaaggtgaccgacgcccccaacaagagcgagatcagcaagcacatcgaggtgcaggtggcccaggagaccagaaacgtgagcaccggcagcgccgagaacgaggagaagagcgaggtgcaggccatcatcgagagcacccccgagctggacatggacaaggacctgagcggctacaagggcagcagcacccccaccaagggcatcgagaacaaggccttcgacagaaacaccgagagcctgttcgaggagctgagcagcgccggcagcggcctgatcggcgacgtggacgagggcgccgacctgctgggcatgggcagagaggtggagaacctgatcctggagaacacccagctgctggagaccaagaacgccctgaacatcgtgaagaacgacctgatcgccaaggtggacgagctgacctgcgagaaggacgtgctgcagggcgagctggaggccgtgaagcaggccaagctgaagctggaggagaagaacagagagctggaggaggagctgagaaaggccagagccgaggccgaggacgccagacagaaggccaaggacgacgacgacagcgacatccccaccgcccagagaaagagattcaccagagtggagatggccagagtgctgatggagagaaaccagtacaaggagagactgatggagctgcaggaggccgtgagatggaccgagatgatcagagccagcagagagaaccccgccatgcaggagaagaagagaagcagcatctggcagttcttcagcagactgttcagcagcagcagcaacaccaccaagaagcccgagccccccgtgaacctgaagtacaacgcccccaccagccacgtgacccccagcgtgaagaagagaagcagcaccctgagccagctgcccggcgacaagagcaaggccttcgacttcctgagcgaggagaccgaggccagcctggccagcagaagagagcagaagagagagcagtacagacaggtgaaggcccacgtgcagaaggaggacggcagagtgcaggccttcggctggagcctgccccagaagtacaagcaggtgaccaacggccagggcgagaacaagatgaagaacctgcccgtgcccgtgtacctgagacccctggacgagaaggacaccagcatgaagctgtggtgcgccgtgggcgtgaacctgagcggcggcaagaccagagacggcggcagcgtggtgggcgccagcgtgttctacaaggacgtggccggcctggacaccgagggcagcaagcagagaagcgccagccagagcagcctggacaagctggaccaggagctgaaggagcagcagaaggagctgaagaaccaggaggagctgagcagcctggtgtggatctgcaccagcacccacagcgccaccaaggtgctgatcatcgacgccgtgcagcccggcaacatcctggacagcttcaccgtgtgcaacagccacgtgctgtgcatcgccagcgtgcccggcgccagagagaccgactaccccgccggcgaggacctgagcgagagcggccaggtggacaaggccagcctgtgcggcagcatgaccagcaacagcagcgccgagaccgacagcctgctgggcggcatcaccgtggtgggctgcagcgccgagggcgtgaccggcgccgccaccagccccagcaccaacggcgccagccccgtgatggacaagccccccgagatggaggccgagaacagcgaggtggacgagaacgtgcccaccgccgaggaggccaccgaggccaccgagggcaacgccggcagcgccgaggacaccgtggacatcagccagaccggcgtgtacaccgagcacgtgttcaccgaccccctgggcgtgcagatccccgaggacctgagccccgtgtaccagagcagcaacgacagcgacgcctacaaggaccagatcagcgtgctgcccaacgagcaggacctggtgagagaggaggcccagaagatgagcagcctgctgcccaccatgtggctgggcgcccagaacggctgcctgtacgtgcacagcagcgtggcccagtggagaaagtgcctgcacagcatcaagctgaaggacagcatcctgagcatcgtgcacgtgaagggcatcgtgctggtggccctggccgacggcaccctggccatcttccacagaggcgtggacggccagtgggacctgagcaactaccacctgctggacctgggcagaccccaccacagcatcagatgcatgaccgtggtgcacgacaaggtgtggtgcggctacagaaacaagatctacgtggtgcagcccaaggccatgaagatcgagaagagcttcgacgcccaccccagaaaggagagccaggtgagacagctggcctgggtgggcgacggcgtgtgggtgagcatcagactggacagcaccctgagactgtaccacgcccacacctaccagcacctgcaggacgtggacatcgagccctacgtgagcaagatgctgggcaccggcaagctgggcttcagcttcgtgagaatcaccgccctgatggtgagctgcaacagactgtgggtgggcaccggcaacggcgtgatcatcagcatccccctgaccgagaccgtgatcctgcaccagggcagactgctgggcctgagagccaacaagaccagcggcgtgcccggcaacagacccggcagcgtgatcagagtgtacggcgacgagaacagcgacaaggtgacccccggcaccttcatcccctactgcagcatggcccacgcccagctgtgcttccacggccacagagacgccgtgaagttcttcgtggccgtgcccggccaggtgatcagcccccagagcagcagcagcggcaccgacctgaccggcgacaaggccggccccagcgcccaggagcccggcagccagacccccctgaagagcatgctggtgatcagcggcggcgagggctacatcgacttcagaatgggcgacgagggcggcgagagcgagctgctgggcgaggacctgcccctggagcccagcgtgaccaaggccgagagaagccacctgatcgtgtggcaggtgatgtacggcaacgagtag

SEQ ID NO: 88042 - DNA, 3534 bp, Artificial Sequence
  derived and/or modified sequence
atgtcccccggctgcatgctcctgttcgtcttcggcttcgtggggggcgccgtggtcatcaactcagccattctagtgtcgctttctgtgctgctactggtccacttcagtatctccactggcgtgcctgccctgacccagaacttacctcgtattctcaggaaggagcggcctatctctttggggatatttcctctgccagcaggggacggactcttgactccggacgcacagaaggggggcgagacaccggggtcagagcaatggaagttccaggagctctctcagcctcgctctcacacgagcctgaaggatgagctgtctgacgtgtctcagggggggagtaaagcgaccacacccgcctccactgccaatagcgacgtggctactatcccaactgatacacccctgaaggaggagaacgagggattcgtgaaagtgactgacgcccccaataagtctgagatcagcaaacacattgaggtccaggtggctcaggaaactcgcaatgtcagtactggttcggccgagaacgaagaaaaatctgaggtgcaggctatcatcgagtccacacccgaactcgatatggacaaggatttgtcaggttacaaaggaagctcaactcctaccaagggtattgagaataaagcatttgaccggaatacagaaagtctctttgaagagctgtcgtccgctggatctggcttgattggggacgtggatgagggcgccgacctcctggggatggggcgtgaagtcgagaatctcatcctggaaaacacgcagctgcttgaaacaaagaacgcactcaacatcgtgaaaaatgacctcatcgccaaagttgacgagctgacatgtgaaaaagacgtcctccagggcgagctcgaggcagtaaagcaagctaagcttaagctggaagaaaagaacagggagctcgaagaggagctgaggaaagcaagagccgaggcagaggatgctagacagaaagctaaggatgacgacgatagtgatattcccacagcacagagaaagcggtttaccagagtcgagatggcacgcgtgctgatggaaagaaatcaatacaaggaacgcctgatggaactacaagaagccgtgagatggactgagatgatccgtgcttcccgtgagaaccctgccatgcaggaaaaaaagcgctcttctatctggcagttcttctctagactgttctcttccagctctaacaccaccaaaaaacctgaaccaccagtgaacctcaagtataacgcccccaccagtcatgtaacaccatctgtcaagaaaaggagcagcacgctcagtcaactacctggtgacaagtctaaagcatttgattttttgagtgaagagacggaagcctccttggcatcccgtagagaacaaaagagagagcagtatcggcaggtaaaggcgcacgtgcagaaagaggatgggcgcgtacaagcgttcggttggagcctcccgcagaagtacaaacaggtcacaaacggtcaaggcgagaacaagatgaagaacctccccgtcccggtctacctgcggcccctggatgaaaaggatacatcaatgaagttatggtgtgccgttggggtcaatctgagcggcggaaaaactagagacggaggttccgtagttggagccagtgttttctacaaggatgtggcaggcctggacactgaggggtcaaagcagaggtccgcatcccagtcctctctggacaaactggatcaagagttgaaggagcagcagaaggagcttaagaaccaagaggaactgtccagcttggtttggatttgcacttcaacccatagtgccaccaaggtcttgatcattgatgcagtccaacccggcaacatcttggatagcttcactgtgtgtaatagtcacgtgttgtgtattgccagtgtcccgggtgcacgggagacggattaccccgcaggggaggatctctctgaatctggccaagtcgacaaggcatctctttgcggcagcatgacttcaaatagttctgctgagacagactcgctgctcgggggtataacagtcgttggctgcagcgcagagggcgtcacaggagctgcaacatccccctccacgaacggagcaagtccagtgatggacaagccccccgaaatggaagctgagaacagcgaagttgatgagaatgtcccgacagccgaagaggctaccgaggcaacagagggcaacgctgggagtgccgaggacaccgtcgacatctctcaaactggcgtttacaccgagcatgtgttcaccgatcctctgggtgtgcagataccggaggatttaagccctgtctaccagtcaagtaatgacagcgacgcctacaaagaccagataagcgtgctgcccaacgagcaggatttggtgagggaagaggcacaaaagatgagctcgctcctgcctacaatgtggctcggtgctcagaatgggtgtttgtacgtacattcttcggttgcccagtggcgaaaatgtttgcattctattaagctgaaagactccatcctgtccatagtgcatgtcaaggggattgtgctcgtggctctggcagatggaactctggcaatatttcatcgtggtgtcgatggccagtgggacctctccaactatcacctgctggacctgggtagaccccaccacagcatcagatgtatgaccgtggtgcatgataaggtgtggtgtggctatcggaataagatttatgtcgtgcaacctaaggcaatgaaaattgagaaatctttcgacgctcatccccgaaaagaatcccaagtaagacagctggcatgggtcggggatggcgtgtgggtcagcatcaggctggattcaacgctgaggctgtaccatgcccatacttaccagcatctgcaggatgtcgacattgagccatacgtgagtaagatgctgggcaccggtaagctcggttttagcttcgtccgtataactgcactgatggtcagctgcaaccgactttgggttggcaccggcaatggcgtgattatttcgatccctcttaccgagactgtaatattgcaccagggccggctcctggggctgagggcaaacaagacttctggcgtacccggcaaccgcccgggatcagtaatcagggtgtatggggatgagaacagtgataaggtcacaccggggactttcattccttattgttcaatggcacacgcccagttatgcttccacgggcacagggacgctgtcaagttttttgtggcagtgccgggacaagttatctcccctcaaagctcgtctagtgggactgatctgactggtgataaagccgggccttccgcccaggagcccgggtcacagacaccactaaagtccatgctggtgataagtgggggagagggctatatcgactttagaatgggagacgagggtggggaaagtgaactcctgggtgaggacctccccctcgagccatcagtcaccaaggcagagagatcacatctcatcgtctggcaggtgatgtatggcaatgagtag

SEQ ID NO: 88043 - DNA, 3534 bp, Artificial Sequence
  derived and/or modified sequence
atgagccctggctgcatgctgctgtttgtgtttggatttgtgggcggcgctgtggtgatcaacagcgccatcctggtgtccctgtctgtgctgctgctggtgcacttcagcatcagcactggagtgcctgccctgacccagaacctgccccgcatcctgaggaaggagcggcccatcagcctgggcatcttccccctgcctgctggagatggcctgctgaccccagatgcccagaagggcggggagaccccaggcagcgagcagtggaagttccaggagctgagccagcccaggagccacaccagcctgaaggatgagctgagtgatgtgtcccagggcggcagcaaggccaccaccccagccagcacagccaacagtgatgtggccaccatccccacagacacccccctgaaggaggagaatgaaggatttgtgaaggtgacagatgcccccaacaagtctgagatcagcaagcacatcgaggtgcaggtggcccaggagaccagaaatgtgtccactggatctgcagaaaatgaggagaagtctgaggtgcaggccatcatcgagagcaccccagagctggacatggacaaggacctgagcggctacaagggcagcagcacccccaccaagggcatcgagaacaaggcctttgacaggaacacagagagcctgtttgaggagctgagcagcgctggcagcggcctgattggagatgtggatgaaggagctgacctgctgggcatgggccgggaggtggagaacctgatcctggagaacacccagctgctggagaccaagaatgccctgaacatcgtgaagaatgacctgattgccaaggtggatgagctgacctgtgagaaggatgtgctgcagggcgagctggaggccgtgaagcaggccaagctgaagctggaggagaagaaccgggagctggaggaggagctgaggaaggcccgggcagaggccgaggatgcccggcagaaggccaaggatgatgatgacagcgacatccccacagcccagaggaagcgcttcaccagggtggagatggcccgggtgctgatggagaggaaccagtacaaggagcggctgatggagctgcaggaggccgtgcgctggacagagatgatccgggccagcagagaaaatcctgccatgcaggagaagaagaggagcagcatctggcagttcttcagccgcctcttcagcagcagcagcaacaccaccaagaagccagagccccctgtgaacctgaagtacaatgcccccaccagccacgtgaccccatctgtgaagaagaggagcagcaccctgagccagctgcccggggacaagagcaaggcctttgacttcctgtctgaggagacagaggccagcctggccagccggcgggagcagaagcgggagcagtaccggcaggtgaaggcccacgtgcagaaggaggatggccgggtgcaggccttcggctggagcctgccccagaagtacaagcaggtgaccaacggccagggcgagaacaagatgaagaacctgcctgtgcctgtgtacctgcggcccctggatgagaaggacacctccatgaagctgtggtgtgctgtgggcgtgaacctgagcggcggcaagaccagagatggcggctctgtggtgggcgcctctgtgttctacaaggatgtggccggcctggacacagagggcagcaagcagaggtctgccagccagagcagcctggacaagctggaccaggagctgaaggagcagcagaaggagctgaagaaccaggaggagctgagcagcctggtgtggatctgcaccagcacccacagcgccaccaaggtgctgatcattgatgctgtgcagcccggcaacatcctggacagcttcaccgtgtgcaacagccacgtgctgtgcatcgcctctgtgcctggggcccgggagacagactacccagctggggaggacctgtctgagagcggccaggtggacaaggccagcctgtgtggctccatgaccagcaacagcagcgctgagacagacagcctgctgggcggcatcaccgtggtgggctgcagcgctgagggcgtgactggagctgccaccagccccagcaccaatggagccagccctgtgatggacaagcccccagagatggaggccgagaacagcgaggtggatgaaaatgtgcccacagctgaggaggccacagaggccacagagggcaatgccggcagcgctgaggacacagtggacatcagccagacaggagtgtacacagagcacgtgttcacagaccccctgggcgtgcagatccctgaggacctgagccctgtgtaccagagcagcaatgacagtgatgcctacaaggaccagatctctgtgctgcccaatgagcaggacctggtgcgggaggaggcccagaagatgagcagcctgctgcccaccatgtggctgggcgcccagaatggctgcctgtatgtgcacagctctgtggcccagtggaggaagtgcctgcacagcatcaagctgaaggacagcatcctgagcatcgtgcacgtgaagggcatcgtgctggtggccctggctgatggcaccctggccatcttccacagaggagtggatggccagtgggacctgagcaactaccacctgctggacctgggccggccccaccacagcatccgctgcatgacagtggtgcatgacaaggtgtggtgtggctacagaaacaagatctacgtggtgcagcccaaggccatgaagattgagaagagctttgatgcccaccccaggaaggagagccaggtgcggcagctggcctgggtgggagatggagtgtgggtgtccatccggctggacagcaccctgcggctgtaccacgcccacacctaccagcacctgcaggatgtggacatcgagccctacgtgtccaagatgctgggcaccgggaagctgggcttctcctttgtgcgcatcacagccctgatggtgtcctgcaaccggctgtgggtgggcactggaaatggagtcatcatcagcatccccctgacagagaccgtcatcctgcaccagggccgcctgctgggcctgcgggccaacaagaccagcggcgtgcccggcaaccggcccggcagcgtcatccgggtgtatggagatgagaacagcgacaaggtgaccccaggcaccttcatcccctactgcagcatggcccacgcccagctgtgcttccacggccacagagatgctgtgaagttctttgtggccgtgcccggccaggtgatcagcccccagagcagcagcagcggcacagacctgactggagacaaggccggccccagcgcccaggagcccggcagccagacccccctgaagtccatgctggtgatctctggaggagagggctacatcgacttcaggatgggagatgaaggaggagagagcgagctgctgggggaggacctgcccctggagcccagcgtgaccaaggccgagaggagccacctgattgtgtggcaggtgatgtatggaaatgaatag

SEQ ID NO: 88044 - DNA, 3534 bp, Artificial Sequence
  derived and/or modified sequence
atgagccccggctgcatgctgctgttcgtgttcggcttcgtgggcggcgccgtggtgatcaacagcgccatcctcgttagtctaagcgttctcctgctggtgcatttcagcatcagcacgggagtgcccgcgctgacccagaacttgcctcgcattttgagaaaggagaggccgatttccctgggcatattccctctgccggcaggagacgggctgctcactcctgacgcccaaaagggtggggagactccgggtagcgagcagtggaaattccaggagctcagccaacctcgcagccacacctcactcaaagacgaactgtctgatgtgagccagggcggcagcaaggcaacaactcccgcctcgacagctaattcagacgtagcaacaatacctacggacaccccacttaaagaggaaaacgagggcttcgtgaaggtcaccgatgcccctaacaagagtgagatttcaaagcacatagaagtgcaggtggctcaggagaccaggaatgtgagcacgggtagcgctgagaacgaggagaagagcgaggtgcaggccatcatcgagagtacacctgagttagacatggacaaggatctgtccggatataaggggtcatcaactcccacgaaagggatcgagaataaggccttcgatcgaaataccgagtctctgtttgaggaattgtcatcggcgggcagtggtctgataggtgatgtggatgaaggtgccgacctgctgggcatgggcagggaggtggaaaatctaatcttggagaacactcaactgctagagacaaaaaacgcattgaatatagtgaaaaatgatctaatcgctaaggtcgacgagctcacgtgcgagaaagatgtcctccagggagagctcgaggcagtcaaacaggcaaaacttaaactggaggagaaaaatagggaactggaggaggagctccggaaggcccgtgccgaagcagaggacgcacgccagaaagctaaagacgacgacgatagcgacattcctaccgcgcaacggaaaagatttacacgagtggagatggctcgtgtcttaatggaacgcaaccagtataaagaacgccttatggaattacaggaggctgtaaggtggacggaaatgataagagcctcaagggagaatcccgcaatgcaggagaaaaagagaagtagcatctggcaattcttttcccggctgttctccagctcttccaatactacaaagaagcctgagcctcccgtcaacctgaagtacaacgcgcccacgtcacatgtaaccccaagtgtgaagaagagaagctcaactctgtctcagctgccaggggataagtccaaagcttttgactttctgagcgaagagaccgaggcctctcttgctagcaggagagagcaaaaaagggaacaatatcggcaggtcaaagcacatgtgcaaaaggaagatggaagagtgcaggcctttggctggtcactgccacagaaatacaaacaggtcaccaatgggcaaggtgagaataagatgaagaatctcccagttcccgtgtacttaaggccactggatgaaaaagatacctccatgaagctctggtgcgcagttggagtgaacctgtcaggaggcaaaacccgggatggggggtcagtggttggcgcctctgtgttttacaaagacgtcgcaggactggataccgaaggtagcaagcagaggagcgctagtcaaagctcgcttgacaagctagaccaggagctgaaagaacagcaaaaggagctgaagaaccaggaggaactgagcagtcttgtgtggatatgtacctcgactcattcagcaaccaaagtacttatcatcgatgctgtccagcctggcaatattctcgattcattcaccgtctgcaattcccacgtgctctgtattgcttccgtgcccggtgcaagagaaaccgactaccccgcaggcgaggatctgtccgaatctggccaggttgacaaggccagtttgtgtgggagtatgactagtaattcaagtgctgaaacagactccctgctcggcggcattactgtggtaggttgctcggccgagggcgtgaccggggctgctacaagccctagcacaaatggcgcaagtccagtgatggataagccgcccgaaatggaagccgagaacagcgaggtggatgaaaacgtgcctaccgccgaggaagcaactgaagctacggagggcaatgctggaagcgccgaggacactgtagatattagtcaaacaggcgtgtatacggaacacgtgtttaccgacccactcggagtgcaaattcccgaagaccttagtcctgtataccagagcagtaacgactccgacgcttacaaagaccagatcagcgttttaccaaacgagcaagacttagtgagggaagaagctcagaaaatgagtagcctgcttcccactatgtggctcggcgcccagaatgggtgcctgtatgtacacagctcagtggctcagtggcgcaaatgtctgcattctattaagctgaaagatagtatactgagtattgttcatgtaaaggggattgtcctcgtcgcattggctgatgggaccctggctatttttcataggggcgtcgatggacagtgggacttatctaattatcacctactggacctgggccggccgcatcactctataagatgtatgacagtggtccatgataaagtctggtgcgggtatcgaaataagatttatgtagttcagccaaaggctatgaagatcgaaaaaagttttgatgcccacccgagaaaggaatctcaggtaaggcagctggcctgggtgggagatggtgtgtgggtgagtatccgtcttgatagtaccctgaggctgtaccatgcccacacatatcagcacctgcaagacgtggatatcgaaccttacgtaagtaaaatgctaggcacaggcaagttaggttttagttttgtgcggatcactgcgctgatggtaagctgcaaccggctgtgggtgggcacgggaaacggtgttattatcagcatacccttgactgagaccgtgatcttacaccagggcagattgctcggattaagagctaacaaaactagcggcgttcctggaaataggcccggaagcgtgattcgcgtttatggcgacgagaatagcgataaggtcactcccggaaccttcatcccctactgctccatggcccacgcacaattgtgcttccatggccatcgcgacgccgtgaagttcttcgtagccgttccaggacaggtcatctctcctcagtcttcctcatcaggaacggacttgactggcgacaaggccgggccgagtgcacaggagcctggcagccagacgcctctaaaatctatgctggtcatttctggaggagagggctatatagatttccgcatgggcgatgagggtggtgagtcggaacttctgggagaggatctccccctggagccgtcggtgaccaaggctgaacggtcccatctgatcgtgtggcaggtcatgtacggcaacgagtag

SEQ ID NO: 88045 - DNA, 3534 bp, Artificial Sequence
  derived and/or modified sequence
atgagcccaggctgcatgcttctgttcgtgtttggatttgtaggaggagcagtagtgatcaactcagcaatcctggtgtctctctctgtgctcctactagtgcattttagtatatcaacaggtgtcccagcactgactcagaacctgccacgcatcttgaggaaggagcgtccaattagtcttggcatcttccctctccccgctggtgatgggttgctgacaccagatgcccagaaggggggtgagactcctgggtcggagcaatggaagtttcaggagttgtcacagccaaggtcacatacaagtttgaaggatgagctgtcagatgtatcccaaggagggagcaaggccactaccccggcaagtaccgcgaacagcgatgtcgccacaatcccaacagatacaccacttaaagaggagaacgaagggttcgttaaagtaactgacgccccaaacaagtccgaaataagcaagcatatcgaagtacaggtcgcccaggagacccgcaacgtcagcaccgggtcagccgagaatgaggagaagagcgaggttcaggcaattattgaatccaccccggagctggacatggataaggatctatctggatacaagggctcgagcaccccgaccaaggggatagagaataaggctttcgacagaaacaccgagtcacttttcgaggagctgagttcagctggatctggcctgatcggggacgtggatgaaggagccgatttactgggcatgggaagggaagtggagaacttgatcctcgagaacacccagttgcttgaaaccaaaaatgcactgaatattgtgaagaacgacttgatcgccaaggtggatgaactcacttgcgagaaggacgtactgcagggcgagttggaagccgtgaagcaggctaagcttaaacttgaagaaaagaaccgagaattggaagaagagctgcgaaaagcacgcgcagaggccgaggatgctcgtcaaaaggcaaaggacgatgatgactccgacataccgacagcccaacggaagcggttcacgcgtgtggaaatggcacgagttctgatggaacgcaaccaatataaagaaagactgatggaactccaagaggcagtccgctggaccgagatgatccgcgcttcacgagagaatccggcaatgcaggagaagaagcgaagcagcatctggcaattctttagcaggctgttctcctcctcctccaatacgacaaagaagccagagcccccagtgaatctgaagtacaatgcaccgacatcccacgtgacaccatcggtcaaaaagagaagcagcaccctcagccagctcccaggcgataaatccaaggctttcgacttcctgagtgaggaaacggaggcatcgctcgccagccgcagagagcaaaagcgggagcagtaccgacaggtgaaggcacacgtccaaaaagaagacgggagggtgcaggctttcggctggtctctgccccagaagtataaacaagtgactaacgggcaaggcgagaacaagatgaaaaatctgcccgtgcctgtgtacctccgcccactcgacgagaaagatacctcaatgaagttatggtgtgctgttggggtgaatctgagtggcggtaagacccgcgacgggggaagcgtagtaggggctagtgtattctataaggatgttgcaggattggataccgaggggtccaaacaaagaagtgctagccagagcagcctggacaagcttgatcaggagttgaaggaacagcagaaagaactgaaaaaccaagaagagctgagttccctggtctggatatgtacatccacccactcggctacgaaagtgcttatcatcgacgccgtgcaacctggaaacatattagattcatttactgtatgtaattcccacgttctctgtattgcgtccgttccaggtgccagggagactgattacccagccggagaggacctgagtgagagtgggcaggttgataaagccagcttatgtggaagcatgacttcgaattcaagcgccgaaactgactcattgctgggtggcataactgtcgtggggtgtagcgcggagggagtcaccggggcagccaccagcccaagtaccaacggtgcatcgcccgtgatggataaaccgcctgagatggaagccgagaatagcgaagttgatgagaatgtaccaactgctgaggaagcaactgaagcaaccgaaggaaacgccggaagcgccgaggacacggtcgatatcagccaaaccggcgtgtataccgaacatgtttttacagatccgctgggagtccagattcccgaagatttgtctcctgtataccagtctagcaatgattcagacgcttataaagaccagatttctgtgttgccaaacgagcaggacctggtgcgggaagaagctcagaaaatgtctagccttctcccaaccatgtggctgggagctcagaatggctgtttatacgtgcactctagcgtggcccagtggcgcaaatgtctgcatagtattaagctgaaagatagcatactgtccattgttcatgtgaagggtattgttctggtggcgctggctgatggaaccttggccatcttccacaggggggttgacgggcaatgggacctgtctaactaccacctgctggacctgggacggccacaccatagcatccgctgtatgactgtggtgcatgataaggtgtggtgcggatatcgaaataagatatacgtcgtgcagccaaaggcgatgaaaatagaaaagtctttcgacgctcacccgaggaaagagtcccaggttagacagctggcctgggtgggtgacggcgtgtgggtatccattcgcctggatagtacgctccggctgtatcacgcacacacctatcaacatttgcaagatgtggacatcgagccgtacgtttctaagatgttaggcaccggcaaactgggatttagcttcgtccgaatcactgcactgatggtcagttgtaaccgtttgtgggtggggacggggaatggcgtgattatcagcattcctctgactgagaccgttatccttcatcagggcagattgcttggccttcgagcaaataaaacttccggagtgcctggtaaccgccctggcagtgtcatccgcgtctatggtgacgagaatagcgacaaagtcacacccggaacttttattccttactgcagtatggcgcatgcccagctttgctttcacggacaccgtgatgcagtcaaatttttcgtggccgtgcccggtcaggtgataagccctcagtcatctagctccggcacggacttaacaggcgacaaagccggaccttcagcacaggagccagggtctcagacaccactgaagtcgatgctagtcatctccggaggggagggctatattgatttccgcatgggagatgagggaggggagagcgaactcctcggtgaggatctccccctggagccttctgtgactaaggccgagaggagccacctcattgtgtggcaagtgatgtacggtaatgagtag

SEQ ID NO: 88046 - DNA, 4949 bp, Artificial Sequence
  derived and/or modified sequence
gcataaatgctaggagcagcagctctatggttatgaggtggggagaacggaatgacgtcatcgcttgggagctgctgcaggatggagtggaaagctgctgctgatggcattgtttttgtggcagcaagctgaatgacagatcctcactacaaagatacccctttggcccccgtgtaggcctccttggttcgggtgtttcaccatgccagcacagcgccatgagtcctggatgcatgctgctgtttgtgtttggctttgttggcggggcggtggtcattaattctgctatcttagtatctctctctgttttgctgcttgtgcacttttctatttctaccggtgtgccagctctgacgcagaacctaccaaggatactcagaaaagaacgccctatatcattaggaattttcccattacctgctggagatggattgcttacacctgatgctcagaaaggaggagagacccctggatctgagcaatggaaatttcaggaattaagtcaaccacgttctcataccagcctgaaggatgagctttctgatgttagccaaggcggatctaaagctaccactccagcatcaacagctaattcagatgtggcaacaattcctactgatactcccttaaaggaagaaaacgaaggatttgtgaaggttacagatgcgccaaataaatcagagataagcaaacacattgaagtacaggtagcccaggaaactagaaatgtatctactggctctgctgaaaatgaagaaaagtcagaagttcaagcaatcatcgaatctactcctgagctggatatggacaaagatctcagtggatataaaggttcaagcactcccaccaaaggcatagagaacaaagcttttgatcgcaatacagaatctctctttgaagaactgtcttcagctggctcaggcctaataggagatgtggatgaaggagcagatttactaggaatgggtcgggaagttgagaatcttatattagaaaatacacaactgttggaaaccaaaaatgctttgaacatagtgaagaatgatttgatagcaaaagtggatgaactgacctgtgagaaagatgtgctgcaaggggaattggaggctgtgaagcaagccaaactgaaactagaggaaaagaacagagaattggaggaagagcttaggaaagctcgggcagaagctgaagatgcaaggcaaaaagcaaaagatgacgatgatagtgatattcccacagcccagaggaaacggtttactagagtagaaatggcccgtgttctcatggagcgaaaccagtataaagagagattgatggagcttcaggaagctgttcgatggacagagatgattcgggcatcacgagaaaatccagccatgcaggaaaaaaaaaggtcaagcatttggcagtttttcagccgacttttcagctcctcaagtaacacgactaagaagcctgaaccacctgttaatctgaagtacaatgcacccacgtctcatgttactccgtccgtcaagaaaagaagcagcaccttatctcagctccctggggataagtccaaagcctttgatttccttagtgaagaaactgaagctagtttagcctcacgcagagaacaaaagagagagcagtatcgtcaggtaaaagcacatgttcagaaggaagacggtagagtgcaggcttttggctggagtctgcctcagaagtacaaacaggtaaccaatggtcaaggtgaaaataagatgaaaaatttacctgtgcctgtctatctcagacctctggatgaaaaagatacatcaatgaagctgtggtgtgctgttggagtcaatttatctggtgggaagaccagagatggtggttctgttgttggagcaagtgtattttacaaggatgttgctggtttggatacagaaggcagtaaacagcgaagtgcctctcagagtagtttagataagttagatcaggaacttaaggaacagcagaaggagttaaaaaatcaagaagaattatccagtctagtttggatctgtaccagcactcattcggctacaaaagttcttattattgatgctgttcaacctggcaacatcctagacagtttcactgtttgcaactctcatgttctgtgcattgcaagtgtgccaggtgcacgagaaacagactaccctgcaggagaagatctttcagaatctggtcaggtagacaaagcatctttatgtggaagtatgacaagcaacagctcagcagagacagacagcctgttaggaggcatcacagtggttggttgttctgcagaaggtgtgacgggagctgccacttcccctagtacaaatggtgcttctccagtgatggataaaccaccagaaatggaagcagaaaatagtgaggttgatgaaaatgttccaacagcagaagaagcaactgaagctacagaagggaatgcggggtcagctgaagacacagtggacatctcccaaactggcgtctacacagagcatgtctttacagatcctttgggagttcagatcccagaagacctctccccagtgtatcagtcgagcaatgactcagatgcatataaagatcaaatatcagtactgccaaatgaacaagacttggtgagagaagaagcccagaaaatgagtagtcttttaccaactatgtggcttggagctcaaaatggctgtttgtatgtccattcatctgtagcccagtggaggaaatgtctccattccattaaacttaaagattcgattctcagtattgtacacgtgaagggaatcgtgttagtagccctggctgacggcacccttgcaatctttcacagaggagtggatgggcagtgggatttgtcaaactatcacctcttagaccttggacggcctcatcattccatccgttgcatgactgtggtacatgacaaagtctggtgtggctataggaacaaaatctatgtggtgcagccaaaggccatgaaaatagagaaatcttttgatgcacatcccaggaaggagagccaagtgcgacagcttgcgtgggtgggggatggcgtgtgggtctccattcgcttggattctacgctccgtctctatcatgcacacacttatcaacatctacaggatgtggacattgagccttatgtaagcaaaatgttaggtactggaaaactgggcttctcttttgtgagaattacagctcttatggtgtcttgtaatcgtttgtgggtggggacaggaaatggtgtcattatctccatcccattgacagaaaccgtaatcctccaccagggacgtttactggggctgagggcaaataaaacctcaggtgtaccaggaaatcgtcctggaagtgtaatccgtgtatatggtgatgaaaacagtgataaagtgactccagggacatttataccctattgttcaatggcacatgcacagctttgcttccatgggcaccgggatgctgtgaaattctttgtggcagtcccaggtcaagtcatcagcccacaaagtagcagtagtggcacggatctgacgggtgacaaagcagggccatctgcacaggagcctggtagtcagacgcccttgaagtctatgcttgtcatcagtggaggagagggctacatcgacttccgaatgggtgatgaaggtggagaatcagaacttcttggagaggatcttccacttgaaccttctgtcaccaaagcagaaaggagtcacttgatagtgtggcaagtgatgtatggcaatgagtgagcccatgggaaacaggtggagatggggaagccgtctcttctgcatggtttattttccctctatccttttatttaatgctcttttgtgagataagtttcaccacataatgtgtgagcattttttcctgttaactttatattacaaaatccgttctaccataacaatacagaggaactagctgtgttactgcaccagtgttataggtaacttcagtatattatgaacaaatcaaagaatgtttacttcctgcaaactggtgaattatagaaagcaatccagatgtggtttactctgccacagtctaatgtcattcacttcatttgatggggtcacttgttagctgtcactaataatggaattaatgggaaacacttgataaatgaaactgtaccgttaaatacaatagctgagttttccccagtgtattgtaaaattgacacacactaatacaagatggattatcaggatgtatctaaatgtcccgagagggttaaaagctaactgtaaattactttaactttcactttcaaatctgacaaatcttgtttatatggtatataaaactttgttttcatcagatttgggggggttttatattaaagaaattaagactacactatttaaataaacgtttcctgtttctgacttattagagctctaaagtttatgaggcctacttctctgaatattctgatgggttttttttgagaccagtctcattttcatactgacatgtctgaaagatttattatttataaagcttaggacatactctgggaagcttagaagatacttcagcactgggaggattttttaaaggaaatgtgttttgtatttcttgtaccagagaatggtgatgttgattgagttttttccatgtaaaaaatgtacttgtttgccaaatgttcctagattgctcttaacctgttaatacaagtaaaactgtagtggggatggagtctggcctaagtacagaatgagggatttaattagaaaagttattttcttttgttctgtatcaaactgcagaacagctatatacttggtattttgtacgtgaataacgttttagcttttgtgcccttttgagcttgaagggttatcctcaaaggggaaaactatgaaggggaagaagacaaacctaagataccataaagtaaaggttgacattacatattttcattcacaatgcccatt

SEQ ID NO: 88047 - protein, 345 aa, Artificial Sequence
  derived and/or modified sequence
IVEIYPQGNASTTTTVIDSKNGSVPKSPGKVLKRTVTEDIVTTFSSPAAWLLVIALIITWSAVAIVMFDLVDYKNFSASSIAKIGSDPLKLVRDAMEETTDWIYGFFSLLSDIISSEDEEDDDGDEDTDKGEIDEPPLRKKEIHKDKTEKQEKPERKIQTKVTHKEKEKGKEKVREKEKPEKKATHKEKIEKKEKPETKTLAKEQKKAKTAEKSEEKTKKEVKGGKQEKVKQTAAKVKEVQKTPSKPKEKEDKEKAAVSKHEQKDQYAFCRYMIDIFVHGDLKPGQSPAIPPPLPTEQASRPTPASPALEEKEGEKKKAEKKVTSETKKKEKEDIKKKKKKKKKK

SEQ ID NO: 88048 - protein, 285 aa, Artificial Sequence
  derived and/or modified sequence
MPFPVTTQGSQQTQPPQKHYGITSPISLAAPKETDCVLTQKLIETLKPFGVFEEEEELQRRILILGKLNNLVKEWIREISESKNLPQSVIENVGGKIFTFGSYRLGVHTKGADIDALCVAPRHVDRSDFFTSFYDKLKLQEEVKDLRAVEEAFVPVIKLCFDGIEIDILFARLALQTIPEDLDLRDDSLLKNLDIRCIRSLNGCRVTDEILHLVPNIDNFRLTLRAIKLWAKRHNIYSNILGFLGGVSWAMLVARTCQLYPNAIASTLVHKFFLVFSKWYVFRLY

SEQ ID NO: 88049 - DNA, 858 bp, Artificial Sequence
  derived and/or modified sequence
atgcctttcccagtgaccacccagggctcccagcagacgcagccccctcagaaacattacggtattacatctcctatttccctagcggccccaaaagagaccgattgcgtactaacgcagaagctcattgagactctaaaaccgttcggtgtgtttgaggaggaggaggagttgcagagacggatactgatcctcggcaaactgaataatttggtcaaagaatggatcagggaaatttccgaatcaaagaacttacctcagtccgtgatcgaaaacgtaggcggcaagatcttcactttcgggagttatagactgggagtgcacaccaagggagctgacatagatgccctttgcgtcgcacccagacatgtcgaccgctcggattttttcacaagtttctacgataagctcaagttgcaggaagaggtaaaggacctgagagcggtcgaggaggcattcgttcccgtgatcaagctgtgcttcgatggtatcgaaatagatattctgttcgctcgcctggccctgcagaccatccccgaagacctggacttgcgggacgactcccttctcaagaacttggatattaggtgcattcgatcattaaacgggtgccgcgttacggacgaaatcctgcacctcgtgcctaacatcgacaattttagactcaccctccgtgcgatcaaactttgggctaagcggcacaatatttacagcaatatccttgggtttctggggggggtcagctgggccatgctcgttgcacgaacttgtcagctttaccccaacgctatcgcgtcgactctagttcataagttttttctggttttctccaagtggtacgtgtttcgtttatactag

SEQ ID NO: 88050 - DNA, 858 bp, Artificial Sequence
  derived and/or modified sequence
atgcccttccctgtgaccacccagggcagccagcagacccagcccccccagaagcactacggcatcaccagccccatcagcctggccgcccccaaggagacagactgtgtgctgacccagaagctgattgagaccctgaagccctttggagtgtttgaggaggaggaggagctgcagaggcgcatcctgatcctgggcaagctgaacaacctggtgaaggagtggatccgggagatcagcgagagcaagaacctgccccagagcgtgattgaaaatgtgggcggcaagatcttcaccttcggcagctaccgcctgggcgtgcacaccaagggagctgacattgatgccctgtgtgtggcccccaggcatgtggacagaagtgacttcttcaccagcttctatgacaagctgaagctgcaggaggaggtgaaggacctgcgggctgtggaggaggcctttgtgcctgtgatcaagctgtgctttgatggcatcgagattgacatcctgtttgcccggctggccctgcagaccatccctgaggacctggacctgagagatgacagcctgctgaagaacctggacatccgctgcatccgcagcctgaatggctgccgggtgacagatgagatcctgcacctggtgcccaacatcgacaacttccggctgaccctgcgggccatcaagctgtgggccaagaggcacaacatctacagcaacatcctgggcttcctgggcggcgtgtcctgggccatgctggtggcccggacctgccagctgtacccaaatgccatcgccagcaccctggtgcacaagttcttcctggtgttcagcaagtggtacgtgttccggctgtactag

SEQ ID NO: 88051 - DNA, 858 bp, Artificial Sequence
  derived and/or modified sequence
atgcccttccccgtgaccacccagggcagccagcagacccagccccctcagaagcattacgggatcacaagtcctatctccctggcggcgccaaaggaaaccgactgcgtactgactcagaagttgatcgagactcttaagccctttggagtctttgaagaggaagaagaactccagaggcgtattttgatccttggtaaactcaataatcttgttaaggaatggattagagaaatatctgaaagtaaaaacctcccccagtccgtcattgagaacgtggggggaaaaatttttaccttcggctcctatcgcttaggggtccatactaagggagcagatattgacgcgctatgcgtggcaccgcgccacgtcgaccgctccgacttctttacttccttttacgataagttaaaactgcaagaggaagtgaaggatctgagggccgttgaggaagccttcgtgcctgtaatcaagttgtgtttcgatggcattgagatcgatattcttttcgctcgacttgccttacagacaatcccagaggatctggaccttagggatgactcactgttaaaaaacttagacatccgatgtatccgatcactgaacggctgcagggttacagatgagatcctgcatttggtgcccaatatcgacaacttccgcctgaccctccgggctatcaagctgtgggctaaaaggcacaacatctatagcaatatcttgggctttctcggcggcgtgtcatgggccatgcttgttgccagaacctgtcagctatacccaaacgcaatcgccagcacccttgttcataagttttttcttgtattttccaaatggtatgtcttcagactgtattag

SEQ ID NO: 88052 - DNA, 3264 bp, Artificial Sequence
  derived and/or modified sequence
gctcgggcgccatgttaggacgaaggggaaggaggagaagcgcttaaagcggcgggagcggtgcgggagaggggttggacccagggctgaggcaggcccccccctccctcccgcctcagtggatcatgcccagggcggcagcggcggcggttgcgggggggaagtgactgggcggtgccggcgccggagacgatgccgtttccagttacaacacagggatcacaacaaacacaaccgccacagaagcactatggcattacttctcctatcagcttagcagcccccaaggagactgactgcgtacttacacagaaactaattgagacattgaaaccctttggggtttttgaagaggaagaggaactgcagcgcaggattttaattttgggaaaactaaataacctggtaaaagagtggatacgagaaatcagtgaaagcaagaatcttccacaatctgtaattgaaaatgttggaggaaaaatttttacatttggatcttacagattaggagtgcatacaaaaggtgctgatattgatgcgttgtgtgttgcaccaagacatgttgatcgaagtgactttttcacctcattctatgataagttgaaattacaggaagaagtaaaagatttaagagctgttgaagaggcattcgtaccagttattaaactctgttttgatgggatagagattgatattttgtttgcaagattagcactgcagacaattcctgaagatttggatctacgagatgacagtctgctaaaaaatttagatataagatgtataagaagtcttaacggttgcagggtaaccgatgaaattttacatctagtaccaaacattgacaacttcaggttaactctgagagctatcaaactatgggccaaacgccacaacatctattccaatatattaggtttcctcggtggtgtttcctgggctatgctagtagcaagaacttgccagctttatccaaatgcaatagcatcaactcttgtacataaatttttcttggtattttctaaatggtatgtgtttagattatattaaaataaaattgattgtagacactgaagtttagtcttatttctatgacatttctcagcttggtttcagattcaaattttagttcatgatgtagtcatgtaggcagccttggagatcacattgtgtataaaatggcaaactgaaactattttttttccctagtttggccaggatagtaaggcagattctatttgtacttccttgcataaacttaccctctgaataaactctgaattttagcagctaagatccaatttattgataggttgggaaatcagttactatacttttggataaaacttgtacacactacctctttcactcttttaattctctatctataggccattagtttcttgtgattgttttttttttctttttgctttcagcatttatttggcctaatattaaagatacgaattttcataagaagcttttaaagaataaattaacattaagtgcttcgggacaaaaaaggaatttgagattagtcattaacccagatttttttaagtttcttcgtttcatttccacatatgtcaactatgatttaagaaaaagtagaataaaagattactgccattttatattaattgccttggcccaaaaggtgagggttcttggtttttaatcaaattaagataaatcgtccattcctgttcttatgaactcctgctcctccctctgcaaaagagatgttcttttctagtaattttataaaaattagttatttgagacaatttagagctgtgttcaactggaggaaaaataaaaaaaatttagaaccatgccacacttttcagtacacattctggctgttttgggatttagtagcacttataatcaggtgtgataagattaaagaatgtcagaatttcttttttttttttttttttttttgtttgagacggagtctcactctgtcacccaggctggagtgcagtggcacgatcttggctcactgcaagctctgcctcctggattcatgctattctcctgccttagtctcctgagtagctgggactacaagcgcctgccaccacgcctggctaatttttgtatttttagtagagacgaggtttcactgtgttagccaggatggtctcgatctcctgacctcataatccgcccgcctcggcctcccatagtgctgggattacaggcgtgagccaccgcgtccggctgtcagaatttcttttaatgctacacatatataagcaaataatgtttttaagaagctaaccttgatgttaagagtggcaggtgttctccagtttttacctctttcatatgggaccaaagtagctagtttatggaacacatatgaaaatgtggttatgccaccaagttttactactacacttgtcttaccacttttaagtcatgaattctataattattcatacccctttgcctgtgatcagaagtaacttttaaaattatcacttgactttggatggaactagtataaaggcaggaattttgtctttcagtggagatttattctgttcaaggttgaagtggacacatcattatcttgggatggtacttctttatttaaatagtcctttaaagttctttgagtggcagagaacgtttttggtttcagtctgagaaggctaccaaatggtttaagttcatttcatagttaggagaaaaagattttgagtagtctaatgtcgtcagaaaggattaaaacgttgtatgtaccaagaaggcagaatgaagaaggatcacgttcacaaatgctgtatgtttaacaaaatacgtttagatggtaatatccaatagtcttatcaagtgctacaatctttttaaacagggaatggccaaatccagtgctattgaaacagcctgaagaatgcaatcttaatttgcctgtatgggacccaagggttagtgtattattttttcccctaccaattcacactgtgcaataacaagtaaaaatcatctgcataaactccagggagacttccagccttttacttatgaatggtcatgtccgtattacactttcttttagataacctcaactataattgtcctcaactataattgatgtgagaagcataattatgtaccctgtaaaccacatttaattgtacatagtttttaatacagattttactaacattttaatttattctatatagaactaccttgtaagtcaaagttgtgtgggcatttgtgctttaaaaaaaataaaaggatact

SEQ ID NO: 88053 - DNA, 858 bp, Artificial Sequence
  derived and/or modified sequence
atgccgtttcctgtcacaacacagggaagtcaacagacacagcccccacagaagcactatggtatcacgagcccaattagtttagccgctcccaaggaaacagactgcgttctgacgcagaagctgattgagaccctcaagcccttcggcgtttttgaggaggaggaagaactgcagcggaggattctcatcttggggaagttgaacaacctggtaaaagagtggatccgcgaaatctccgaaagcaaaaacctgccccagtctgtgatcgaaaatgttggaggaaaaatttttacttttggcagctaccgacttggagtgcataccaagggggcagatattgatgccctgtgcgttgcacctcgacacgtggatcgttctgacttcttcaccagtttctacgacaaactgaaactgcaggaagaggtcaaggacctcagagccgtggaggaagccttcgtccccgtcatcaaactgtgcttcgacggaatcgaaatagacatcctcttcgccaggttagccctgcagacgattcctgaggacctggacttgcgggacgacagcctgctgaaaaatctggacatcaggtgtatcagatctctgaatggctgcagagttacggacgagattctgcacttagttccaaacattgacaactttcgattgaccctgcgtgcgataaagctctgggcgaagcggcacaatatttatagcaatatccttggattcttgggcggagtatcgtgggctatgctggtcgcacgcacttgtcagctatatcctaacgcaatcgctagcacccttgttcataaattttttttggttttcagcaagtggtacgtgttcaggctctactag

SEQ ID NO: 88054 - DNA, 858 bp, Artificial Sequence
  derived and/or modified sequence
atgcccttccccgtgaccacccagggcagccagcagacccagcccccccagaagcactacggcatcaccagccccatcagcctggccgcccccaaggagaccgactgcgtgctgacccagaagctgatcgagaccctgaagcccttcggcgtgttcgaggaggaggaggagctgcagagaagaatcctgatcctgggcaagctgaacaacctggtgaaggagtggatcagagagatcagcgagagcaagaacctgccccagagcgtgatcgagaacgtgggcggcaagatcttcaccttcggcagctacagactgggcgtgcacaccaagggcgccgacatcgacgccctgtgcgtggcccccagacacgtggacagaagcgacttcttcaccagcttctacgacaagctgaagctgcaggaggaggtgaaggacctgagagccgtggaggaggccttcgtgcccgtgatcaagctgtgcttcgacggcatcgagatcgacatcctgttcgccagactggccctgcagaccatccccgaggacctggacctgagagacgacagcctgctgaagaacctggacatcagatgcatcagaagcctgaacggctgcagagtgaccgacgagatcctgcacctggtgcccaacatcgacaacttcagactgaccctgagagccatcaagctgtgggccaagagacacaacatctacagcaacatcctgggcttcctgggcggcgtgagctgggccatgctggtggccagaacctgccagctgtaccccaacgccatcgccagcaccctggtgcacaagttcttcctggtgttcagcaagtggtacgtgttcagactgtactag

SEQ ID NO: 88055 - protein, 1625 aa, Artificial Sequence
  derived and/or modified sequence
MGQKSWIEKTFCKRECIFVIPSMKDSNRCCCGQFTNQHIPPLPSATPSKNEEESKQVETQPEKWSVAKHTQSYPTDSYGVLEFQGGGYSNKAMYIRVSYDTKPDSLLHLMVKDWQLELPKLLISVHGGLQNFEMQPKLKQVFGKGLIKAAMTTGAWIFTGGVSTGVISHVGDALKDHSSKSRGRVCAIGIAPWGIVENKEDLVGKDVTRVYQTMSNPLSKLSVLNNSHTHFILADNGTLGKYGAEVKLRRLLEKHISLQKINTRLGQGVPLVGLVVEGGPNVVSIVLEYLQEEPPIPVVICDGSGRASDILSFAHKYCEEGGIINESLREQLLVTIQKTFNYNKAQSHQLFAIIMECMKKKELVTVFRMGSEGQQDIEMAILTALLKGTNVSAPDQLSLALAWNRVDIARSQIFVFGPHWPPLGSLAPPTDSKATEKEKKPPMATTKGGRGKGKGKKKGKVKEEVEEETDPRKIELLNWVNALEQAMLDALVLDRVDFVKLLIENGVNMQHFLTIPRLEELYNTRLGPPNTLHLLVRDVKKSNLPPDYHISLIDIGLVLEYLMGGAYRCNYTRKNFRTLYNNLFGPKRPKALKLLGMEDDEPPAKGKKKKKKKKEEEIDIDVDDPAVSRFQYPFHELMVWAVLMKRQKMAVFLWQRGEESMAKALVACKLYKAMAHESSESDLVDDISQDLDNNSKDFGQLALELLDQSYKHDEQIAMKLLTYELKNWSNSTCLKLAVAAKHRDFIAHTCSQMLLTDMWMGRLRMRKNPGLKVIMGILLPPTILFLEFRTYDDFSYQTSKENEDGKEKEEENTDANADAGSRKGDEENEHKKQRSIPIGTKICEFYNAPIVKFWFYTISYLGYLLLFNYVILVRMDGWPSLQEWIVISYIVSLALEKIREILMSEPGKLSQKIKVWLQEYWNITDLVAISTFMIGAILRLQNQPYMGYGRVIYCVDIIFWYIRVLDIFGVNKYLGPYVMMIGKMMIDMLYFVVIMLVVLMSFGVARQAILHPEEKPSWKLARNIFYMPYWMIYGEVFADQIDLYAMEINPPCGENLYDEEGKRLPPCIPGAWLTPALMACYLLVANILLVNLLIAVFNNTFFEVKSISNQVWKFQRYQLIMTFHDRPVLPPPMIILSHIYIIIMRLSGRCRKKREGDQEERDRGLKLFLSDEELKRLHEFEEQCVQEHFREKEDEQQSSSDERIRVTSERVENMSMRLEEINERETFMKTSLQTVDLRLAQLEELSNRMVNALENLAGIDRSDLIQARSRASSECEATYLLRQSSINSADGYSLYRYHFNGEELLFEDTSLSTSPGTGVRKKTCSFRIKEEKDVKTHLVPECQNSLHLSLGTSTSATPDGSHLAVDDLKNAEESKLGPDIGISKEDDERQTDSKKEETISPSLNKTDVIHGQDKSDVQNTQLTVETTNIEGTISYPLEETKITRYFPDETINACKTMKSRSFVYSRGRKLVGGVNQDVEYSSITDQQLTTEWQCQVQKITRSHSTDIPYIVSEAAVQAEHKEQFADMQDEHHVAEAIPRIPRLSLTITDRNGMENLLSVKPDQTLGFPSLRSKSLHGHPRNVKSIQGKLDRSGHASSVSSLVIVSGMTAEEKKVKKEKASTETEC

SEQ ID NO: 88056 - protein, 1642 aa, Artificial Sequence
  derived and/or modified sequence
MSSFKRGSLKSSTSGSQKGQKSWIEKTFCKRECIFVIPSMKDSNRCCCGQFTNQHIPPLPSATPSKNEEESKQVETQPEKWSVAKHTQSYPTDSYGVLEFQGGGYSNKAMYIRVSYDTKPDSLLHLMVKDWQLELPKLLISVHGGLQNFEMQPKLKQVFGKGLIKAAMTTGAWIFTGGVSTGVISHVGDALKDHSSKSRGRVCAIGIAPWGIVENKEDLVGKDVTRVYQTMSNPLSKLSVLNNSHTHFILADNGTLGKYGAEVKLRRLLEKHISLQKINTRLGQGVPLVGLVVEGGPNVVSIVLEYLQEEPPIPVVICDGSGRASDILSFAHKYCEEGGIINESLREQLLVTIQKTFNYNKAQSHQLFAIIMECMKKKELVTVFRMGSEGQQDIEMAILTALLKGTNVSAPDQLSLALAWNRVDIARSQIFVFGPHWPPLGSLAPPTDSKATEKEKKPPMATTKGGRGKGKGKKKGKVKEEVEEETDPRKIELLNWVNALEQAMLDALVLDRVDFVKLLIENGVNMQHFLTIPRLEELYNTRLGPPNTLHLLVRDVKKSNLPPDYHISLIDIGLVLEYLMGGAYRCNYTRKNFRTLYNNLFGPKRPKALKLLGMEDDEPPAKGKKKKKKKKEEEIDIDVDDPAVSRFQYPFHELMVWAVLMKRQKMAVFLWQRGEESMAKALVACKLYKAMAHESSESDLVDDISQDLDNNSKDFGQLALELLDQSYKHDEQIAMKLLTYELKNWSNSTCLKLAVAAKHRDFIAHTCSQMLLTDMWMGRLRMRKNPGLKVIMGILLPPTILFLEFRTYDDFSYQTSKENEDGKEKEEENTDANADAGSRKGDEENEHKKQRSIPIGTKICEFYNAPIVKFWFYTISYLGYLLLFNYVILVRMDGWPSLQEWIVISYIVSLALEKIREILMSEPGKLSQKIKVWLQEYWNITDLVAISTFMIGAILRLQNQPYMGYGRVIYCVDIIFWYIRVLDIFGVNKYLGPYVMMIGKMMIDMLYFVVIMLVVLMSFGVARQAILHPEEKPSWKLARNIFYMPYWMIYGEVFADQIDLYAMEINPPCGENLYDEEGKRLPPCIPGAWLTPALMACYLLVANILLVNLLIAVFNNTFFEVKSISNQVWKFQRYQLIMTFHDRPVLPPPMIILSHIYIIIMRLSGRCRKKREGDQEERDRGLKLFLSDEELKRLHEFEEQCVQEHFREKEDEQQSSSDERIRVTSERVENMSMRLEEINERETFMKTSLQTVDLRLAQLEELSNRMVNALENLAGIDRSDLIQARSRASSECEATYLLRQSSINSADGYSLYRYHFNGEELLFEDTSLSTSPGTGVRKKTCSFRIKEEKDVKTHLVPECQNSLHLSLGTSTSATPDGSHLAVDDLKNAEESKLGPDIGISKEDDERQTDSKKEETISPSLNKTDVIHGQDKSDVQNTQLTVETTNIEGTISYPLEETKITRYFPDETINACKTMKSRSFVYSRGRKLVGGVNQDVEYSSITDQQLTTEWQCQVQKITRSHSTDIPYIVSEAAVQAEHKEQFADMQDEHHVAEAIPRIPRLSLTITDRNGMENLLSVKPDQTLGFPSLRSKSLHGHPRNVKSIQGKLDRSGHASSVSSLVIVSGMTAEEKKVKKEKASTETEC

SEQ ID NO: 88057 - protein, 1527 aa, Artificial Sequence
  derived and/or modified sequence
MYIRVSYDTKPDSLLHLMVKDWQLELPKLLISVHGGLQNFEMQPKLKQVFGKGLIKAAMTTGAWIFTGGVSTGVISHVGDALKDHSSKSRGRVCAIGIAPWGIVENKEDLVGKDVTRVYQTMSNPLSKLSVLNNSHTHFILADNGTLGKYGAEVKLRRLLEKHISLQKINTRLGQGVPLVGLVVEGGPNVVSIVLEYLQEEPPIPVVICDGSGRASDILSFAHKIINESLREQLLVTIQKTFNYNKAQSHQLFAIIMECMKKKELVTVFRMGSEGQQDIEMAILTALLKGTNVSAPDQLSLALAWNRVDIARSQIFVFGPHWPPLGSLAPPTDSKATEKEKKPPMATTKGGRGKGKGKKKGKVKEEVEEETDPRKIELLNWVNALEQAMLDALVLDRVDFVKLLIENGVNMQHFLTIPRLEELYNTRLGPPNTLHLLVRDVKKSNLPPDYHISLIDIGLVLEYLMGGAYRCNYTRKNFRTLYNNLFGPKRPKALKLLGMEDDEPPAKGKKKKKKKKEEEIDIDVDDPAVSRFQYPFHELMVWAVLMKRQKMAVFLWQRGEESMAKALVACKLYKAMAHESSESDLVDDISQDLDNNSKDFGQLALELLDQSYKHDEQIAMKLLTYELKNWSNSTCLKLAVAAKHRDFIAHTCSQMLLTDMWMGRLRMRKNPGLKVIMGILLPPTILFLEFRTYDDFSYQTSKENEDGKEKEEENTDANADAGSRKGDEENEHKKQRSIPIGTKICEFYNAPIVKFWFYTISYLGYLLLFNYVILVRMDGWPSLQEWIVISYIVSLALEKIREILMSEPGKLSQKIKVWLQEYWNITDLVAISTFMIGAILRLQNQPYMGYGRVIYCVDIIFWYIRVLDIFGVNKYLGPYVMMIGKMMIDMLYFVVIMLVVLMSFGVARQAILHPEEKPSWKLARNIFYMPYWMIYGEVFADQIDLYAMEINPPCGENLYDEEGKRLPPCIPGAWLTPALMACYLLVANILLVNLLIAVFNNTFFEVKSISNQVWKFQRYQLIMTFHDRPVLPPPMIILSHIYIIIMRLSGRCRKKREGDQEERDRGLKLFLSDEELKRLHEFEEQCVQEHFREKEDEQQSSSDERIRVTSERVENMSMRLEEINERETFMKTSLQTVDLRLAQLEELSNRMVNALENLAGIDRSDLIQARSRASSECEATYLLRQSSINSADGYSLYRYHFNGEELLFEDTSLSTSPGTGVRKKTCSFRIKEEKDVKTHLVPECQNSLHLSLGTSTSATPDGSHLAVDDLKNAEESKLGPDIGISKEDDERQTDSKKEETISPSLNKTDVIHGQDKSDVQNTQLTVETTNIEGTISYPLEETKITRYFPDETINACKTMKSRSFVYSRGRKLVGGVNQDVEYSSITDQQLTTEWQCQVQKITRSHSTDIPYIVSEAAVQAEHKEQFADMQDEHHVAEAIPRIPRLSLTITDRNGMENLLSVKPDQTLGFPSLRSKSLHGHPRNVKSIQGKLDRSGHASSVSSLVIVSGMTAEEKKVKKEKASTETEC

SEQ ID NO: 88058 - DNA, 4929 bp, Artificial Sequence
  derived and/or modified sequence
atgagcagcttcaagagaggcagcctgaagagcagcaccagcggcagccagaagggccagaagagctggatcgagaagaccttctgcaagagagagtgcatcttcgtgatccccagcatgaaggacagcaacagatgctgctgcggccagttcaccaaccagcacatcccccccctgcccagcgccacccccagcaagaacgaggaggagagcaagcaggtggagacccagcccgagaagtggagcgtggccaagcacacccagagctaccccaccgacagctacggcgtgctggagttccagggcggcggctacagcaacaaggccatgtacatcagagtgagctacgacaccaagcccgacagcctgctgcacctgatggtgaaggactggcagctggagctgcccaagctgctgatcagcgtgcacggcggcctgcagaacttcgagatgcagcccaagctgaagcaggtgttcggcaagggcctgatcaaggccgccatgaccaccggcgcctggatcttcaccggcggcgtgagcaccggcgtgatcagccacgtgggcgacgccctgaaggaccacagcagcaagagcagaggcagagtgtgcgccatcggcatcgccccctggggcatcgtggagaacaaggaggacctggtgggcaaggacgtgaccagagtgtaccagaccatgagcaaccccctgagcaagctgagcgtgctgaacaacagccacacccacttcatcctggccgacaacggcaccctgggcaagtacggcgccgaggtgaagctgagaagactgctggagaagcacatcagcctgcagaagatcaacaccagactgggccagggcgtgcccctggtgggcctggtggtggagggcggccccaacgtggtgagcatcgtgctggagtacctgcaggaggagccccccatccccgtggtgatctgcgacggcagcggcagagccagcgacatcctgagcttcgcccacaagtactgcgaggagggcggcatcatcaacgagagcctgagagagcagctgctggtgaccatccagaagaccttcaactacaacaaggcccagagccaccagctgttcgccatcatcatggagtgcatgaagaagaaggagctggtgaccgtgttcagaatgggcagcgagggccagcaggacatcgagatggccatcctgaccgccctgctgaagggcaccaacgtgagcgcccccgaccagctgagcctggccctggcctggaacagagtggacatcgccagaagccagatcttcgtgttcggcccccactggccccccctgggcagcctggccccccccaccgacagcaaggccaccgagaaggagaagaagccccccatggccaccaccaagggcggcagaggcaagggcaagggcaagaagaagggcaaggtgaaggaggaggtggaggaggagaccgaccccagaaagatcgagctgctgaactgggtgaacgccctggagcaggccatgctggacgccctggtgctggacagagtggacttcgtgaagctgctgatcgagaacggcgtgaacatgcagcacttcctgaccatccccagactggaggagctgtacaacaccagactgggcccccccaacaccctgcacctgctggtgagagacgtgaagaagagcaacctgccccccgactaccacatcagcctgatcgacatcggcctggtgctggagtacctgatgggcggcgcctacagatgcaactacaccagaaagaacttcagaaccctgtacaacaacctgttcggccccaagagacccaaggccctgaagctgctgggcatggaggacgacgagccccccgccaagggcaagaagaagaagaagaagaagaaggaggaggagatcgacatcgacgtggacgaccccgccgtgagcagattccagtaccccttccacgagctgatggtgtgggccgtgctgatgaagagacagaagatggccgtgttcctgtggcagagaggcgaggagagcatggccaaggccctggtggcctgcaagctgtacaaggccatggcccacgagagcagcgagagcgacctggtggacgacatcagccaggacctggacaacaacagcaaggacttcggccagctggccctggagctgctggaccagagctacaagcacgacgagcagatcgccatgaagctgctgacctacgagctgaagaactggagcaacagcacctgcctgaagctggccgtggccgccaagcacagagacttcatcgcccacacctgcagccagatgctgctgaccgacatgtggatgggcagactgagaatgagaaagaaccccggcctgaaggtgatcatgggcatcctgctgccccccaccatcctgttcctggagttcagaacctacgacgacttcagctaccagaccagcaaggagaacgaggacggcaaggagaaggaggaggagaacaccgacgccaacgccgacgccggcagcagaaagggcgacgaggagaacgagcacaagaagcagagaagcatccccatcggcaccaagatctgcgagttctacaacgcccccatcgtgaagttctggttctacaccatcagctacctgggctacctgctgctgttcaactacgtgatcctggtgagaatggacggctggcccagcctgcaggagtggatcgtgatcagctacatcgtgagcctggccctggagaagatcagagagatcctgatgagcgagcccggcaagctgagccagaagatcaaggtgtggctgcaggagtactggaacatcaccgacctggtggccatcagcaccttcatgatcggcgccatcctgagactgcagaaccagccctacatgggctacggcagagtgatctactgcgtggacatcatcttctggtacatcagagtgctggacatcttcggcgtgaacaagtacctgggcccctacgtgatgatgatcggcaagatgatgatcgacatgctgtacttcgtggtgatcatgctggtggtgctgatgagcttcggcgtggccagacaggccatcctgcaccccgaggagaagcccagctggaagctggccagaaacatcttctacatgccctactggatgatctacggcgaggtgttcgccgaccagatcgacctgtacgccatggagatcaaccccccctgcggcgagaacctgtacgacgaggagggcaagagactgcccccctgcatccccggcgcctggctgacccccgccctgatggcctgctacctgctggtggccaacatcctgctggtgaacctgctgatcgccgtgttcaacaacaccttcttcgaggtgaagagcatcagcaaccaggtgtggaagttccagagataccagctgatcatgaccttccacgacagacccgtgctgcccccccccatgatcatcctgagccacatctacatcatcatcatgagactgagcggcagatgcagaaagaagagagagggcgaccaggaggagagagacagaggcctgaagctgttcctgagcgacgaggagctgaagagactgcacgagttcgaggagcagtgcgtgcaggagcacttcagagagaaggaggacgagcagcagagcagcagcgacgagagaatcagagtgaccagcgagagagtggagaacatgagcatgagactggaggagatcaacgagagagagaccttcatgaagaccagcctgcagaccgtggacctgagactggcccagctggaggagctgagcaacagaatggtgaacgccctggagaacctggccggcatcgacagaagcgacctgatccaggccagaagcagagccagcagcgagtgcgaggccacctacctgctgagacagagcagcatcaacagcgccgacggctacagcctgtacagataccacttcaacggcgaggagctgctgttcgaggacaccagcctgagcaccagccccggcaccggcgtgagaaagaagacctgcagcttcagaatcaaggaggagaaggacgtgaagacccacctggtgcccgagtgccagaacagcctgcacctgagcctgggcaccagcaccagcgccacccccgacggcagccacctggccgtggacgacctgaagaacgccgaggagagcaagctgggccccgacatcggcatcagcaaggaggacgacgagagacagaccgacagcaagaaggaggagaccatcagccccagcctgaacaagaccgacgtgatccacggccaggacaagagcgacgtgcagaacacccagctgaccgtggagaccaccaacatcgagggcaccatcagctaccccctggaggagaccaagatcaccagatacttccccgacgagaccatcaacgcctgcaagaccatgaagagcagaagcttcgtgtacagcagaggcagaaagctggtgggcggcgtgaaccaggacgtggagtacagcagcatcaccgaccagcagctgaccaccgagtggcagtgccaggtgcagaagatcaccagaagccacagcaccgacatcccctacatcgtgagcgaggccgccgtgcaggccgagcacaaggagcagttcgccgacatgcaggacgagcaccacgtggccgaggccatccccagaatccccagactgagcctgaccatcaccgacagaaacggcatggagaacctgctgagcgtgaagcccgaccagaccctgggcttccccagcctgagaagcaagagcctgcacggccaccccagaaacgtgaagagcatccagggcaagctggacagaagcggccacgccagcagcgtgagcagcctggtgatcgtgagcggcatgaccgccgaggagaagaaggtgaagaaggagaaggccagcaccgagaccgagtgctag

SEQ ID NO: 88059 - DNA, 4929 bp, Artificial Sequence
  derived and/or modified sequence
atgagcagcttcaagcggggctcattgaagagctcaaccagcggttcccagaaaggccagaagtcttggattgagaaaaccttttgcaagagggaatgtatctttgtgatccccagtatgaaggactctaataggtgctgctgcggacagtttaccaaccagcacatccccccactgcccagcgcaaccccttcgaagaatgaagaagagtccaagcaggtcgagacccagcctgagaaatggtcggtcgctaaacacactcaaagctatcctacagattcttacggagttttagagtttcaaggcggcggctattccaacaaggctatgtatattcgcgtgtcttatgatacaaagccagatagcctgctccatttgatggtgaaggattggcagttagagctgcctaagctgctgattagtgtccatggaggtctgcagaattttgaaatgcagcctaaactgaagcaagtgtttgggaaggggctgattaaggctgcaatgactacgggagcctggatattcacggggggggtctccactggtgtgataagccacgttggagatgcattgaaggaccatagtagcaaatcacggggccgggtgtgtgctattggcatagcaccctggggcattgtggagaacaaggaagacctcgtgggcaaggacgtgactagggtctatcagaccatgtctaatccgcttagtaaactgtctgtattgaacaattctcacacccatttcatcctcgccgacaatgggaccctgggcaagtatggcgccgaagtcaaattgaggcggctgctcgaaaagcatattagcctgcagaaaatcaatactcggctgggccagggtgtgcctttagtgggtctggtggtggagggcggtcctaatgtcgtgtcaattgtgctggagtacttgcaggaggaaccgccaattccagtcgtcatttgtgacggctctggtcgggcctccgacatcctgtccttcgcacacaaatactgcgaggaaggtggcatcattaacgagagcctgagggagcaattactggtgacaattcaaaagactttcaactacaacaaggcacagtctcaccaactcttcgccattatcatggagtgtatgaaaaagaaagagctcgtaacagtgtttcggatgggctccgaagggcagcaagacatagagatggccatcctcactgccttgcttaaaggcactaatgtttccgctcctgaccagttgagcctggcactcgcttggaatagggtagatatcgccaggtcacagatctttgtgttcgggcctcactggccccccttgggctctctcgctcccccaaccgactccaaggcaacagaaaaggagaagaaaccaccaatggcgacaacaaagggtggtcggggcaaaggtaagggcaagaagaaaggaaaggtgaaagaagaagtcgaagaagagacggatccacgtaagattgaactgctcaactgggtgaatgccctggagcaggccatgttggatgcactggtcctggacagagtggattttgttaagctgctcattgagaacggcgtcaacatgcagcacttcctgacgatcccgagactggaggaactgtacaatacgagactgggcccaccgaacaccttgcacctgctcgtgagagacgtgaaaaaaagcaacctgccgcccgattaccatatttctctcatcgacataggtctggttttggagtatcttatgggcggggcctataggtgtaactacactaggaagaattttaggacgctatacaataatttattcggaccaaaacgtcccaaggccctgaagctgctcggaatggaggacgatgaaccacctgccaagggcaagaaaaaaaagaagaagaagaaggaagaggagattgacatcgacgtggatgatccagccgtatcccgatttcagtacccttttcatgaactaatggtgtgggctgtgcttatgaagagacaaaaaatggccgttttcttgtggcagaggggagaggaaagtatggcaaaggcgttagtagcttgcaaactatataaagccatggctcacgaatctagcgagtcggacctcgtggacgatattagtcaggacctggacaataactccaaagatttcgggcaactcgccctagaactgttggaccagagctataaacatgatgagcagatcgctatgaagctgcttacttatgaattaaagaactggagcaactccacctgtctgaagttagcagtggctgccaaacacagagacttcattgcccatacatgttcccagatgctgttaaccgatatgtggatggggaggctcaggatgagaaagaatcccggattaaaggtgattatgggcattctgttgccgcccaccattctcttccttgagtttagaacgtacgacgatttttcttaccagacttccaaggagaatgaagatgggaaagagaaagaagaagaaaacaccgatgccaacgccgacgccggttctcgcaaaggtgatgaagaaaatgaacataagaaacagcgctcgattccaatcggcaccaaaatctgtgaattctacaatgcacccatcgtaaagttctggttttataccataagctacttgggatatctgctgttattcaactatgtcatcttggttaggatggatggatggccttctctccaggagtggatagttatttcctacattgttagcctggccctagagaagattcgcgaaattttgatgtccgagcccggtaaactgtctcaaaaaatcaaggtttggctccaggaatattggaatatcactgatctggttgccataagcaccttcatgatcggggccattctgcggctgcaaaaccagccttacatggggtacgggcgcgtcatctattgcgtcgatattattttttggtacatccgggtgctcgacatatttggggtgaataagtatctcgggccttatgtgatgatgattggaaagatgatgattgacatgctctactttgtagttatcatgctggtcgtgttgatgagcttcggggtcgcacggcaggctattctgcatccggaagaaaaaccgtcatggaagttagccagaaatatcttttacatgccctactggatgatctacggagaagttttcgccgaccagattgatttatacgctatggagatcaacccaccctgcggggagaatttgtatgacgaggaagggaagcgcctgccgccatgcatccccggggcttggttaaccccagccctgatggcttgttacctgttagtggccaatatcctgctcgtgaacttgctcatcgctgtttttaacaacaccttttttgaagtaaagtcaatctcgaatcaagtgtggaagtttcagcgttatcagttgatcatgacatttcacgatcgcccagtccttcctcccccgatgataatccttagccacatctacattatcatcatgcgcctgtccggccggtgtcggaagaaaagagaaggggaccaagaagagcgggatagggggctgaaactattcctgtctgatgaagagttaaaacgactgcatgagtttgaggagcaatgtgtgcaagaacacttcagggaaaaagaggacgaacagcagtccagctcagatgagaggatccgggttacatccgagcgcgtggaaaatatgtctatgaggctcgaggaaatcaacgagagagagacgttcatgaagacctctctccaaacagtcgacctccgattggcccagctggaagagctgtctaatcgtatggtcaacgccctcgaaaatctggcgggaatcgatcgcagcgacctgatccaggcacgttcacgcgcctcgagcgagtgcgaagccacatatctgttacgccagtcaagcattaattcggcggacggctattcactgtacaggtaccacttcaacggtgaagaactgctgtttgaagacacatccctttccacaagtccaggcactggggtgaggaaaaagacttgcagcttccggatcaaggaggaaaaggatgtaaaaacccacctggtgccagagtgccagaactctctgcacttatcactcgggacatcaacttctgctacccccgacggttcgcacctggcagtggatgatctgaaaaacgccgaggagagcaaactgggacccgacattggaatctccaaggaagatgacgagcggcagactgattcgaagaaggaagaaacgatttcaccaagcctgaacaagacggatgtcatacatggccaggataagtcagacgtccagaatactcaactcacggtcgaaaccaccaatatagagggcaccatctcttaccccctggaggagactaagatcacccggtatttccctgacgagacaatcaatgcttgtaagactatgaaaagtcggtcctttgtgtacagtaggggtcggaaactggtaggcggagtaaaccaggacgtcgaatattcctccatcacagaccaacagcttacaacggagtggcaatgccaggttcaaaaaatcacccgctcacactctacggatattccctatatagttagtgaggctgcggtccaagctgagcacaaggaacagttcgcggacatgcaggatgaacatcatgtcgccgaggccattcctcgtattcccagactgagcctcaccatcaccgacaggaatgggatggagaacttgctgtcagtgaagccagatcagacacttggttttcccagcctccgctccaaaagcctgcatggacatcctcgaaatgtaaagagtatacagggcaagctggaccggagcggccacgcttcttctgtctcctctctcgtgatagtgtctggaatgaccgccgaagaaaagaaggtgaaaaaggagaaggcgagtaccgaaacagaatgttag

SEQ ID NO: 88060 - DNA, 4929 bp, Artificial Sequence
  derived and/or modified sequence
atgagcagcttcaagaggggcagcctgaagagcagcaccagcggcagccagaagggccagaagtcctggattgagaagaccttctgcaagcgggagtgcatctttgtgatccccagcatgaaggacagcaaccgctgctgctgcggccagttcaccaaccagcacatcccccccctgcccagcgccacccccagcaagaatgaggaggagagcaagcaggtggagacccagcctgagaagtggagcgtggccaagcacacccagagctaccccacagacagctatggagtgctggagttccagggcggcggctacagcaacaaggccatgtacatccgggtgtcctatgacaccaagccagacagcctgctgcacctgatggtgaaggactggcagctggagctgcccaagctgctgatctctgtgcatggaggcctgcagaactttgagatgcagcccaagctgaagcaggtgtttgggaagggcctcatcaaggccgccatgaccaccggggcctggatcttcaccggcggcgtgtccactggagtcatcagccacgtgggagatgccctgaaggaccacagcagcaagagccggggccgggtgtgtgccatcggcatcgccccctggggcatcgtggagaacaaggaggacctggtgggcaaggatgtgaccagggtgtaccagaccatgagcaaccccctgagcaagctgtctgtgctgaacaacagccacacccacttcatcctggccgacaatggcaccctgggcaagtatggagctgaggtgaagctgcggcggctgctggagaagcacatcagcctgcagaagatcaacacccggctgggccagggcgtgcccctggtgggcctggtggtggagggcggccccaacgtggtgtccatcgtgctggagtacctgcaggaggagccccccatccctgtggtgatctgtgatggcagcggccgggccagtgacatcctgagctttgcccacaagtactgtgaggagggcggcatcatcaatgaaagcctgcgggagcagctgctggtgaccatccagaagaccttcaactacaacaaggcccagagccaccagctgtttgccatcatcatggagtgcatgaagaagaaggagctggtgaccgtcttcaggatgggcagcgagggccagcaggacatcgagatggccatcctgacagccctgctgaagggcaccaacgtgtctgccccagaccagctgagcctggccctggcctggaacagagtggacatcgcccggagccagatctttgtgtttggcccccactggccacccctgggcagcctggccccacccacagacagcaaggccacagagaaggagaagaagccacccatggccaccaccaagggcggccggggcaagggcaagggcaagaagaagggcaaggtgaaggaggaggtggaggaggagacagaccccaggaagattgagctgctgaactgggtgaatgccctggagcaggccatgctggatgccctggtgctggacagagtggactttgtgaagctgctgattgaaaatggagtgaacatgcagcacttcctgaccatcccccggctggaggagctgtacaacacccggctgggcccccccaacaccctgcacctgctggtgagagatgtgaagaagagcaacctgcccccagactaccacatcagcctgattgacatcggcctggtgctggagtacctgatgggcggggcctaccgctgcaactacaccaggaagaacttccgcaccctgtacaacaacctgtttggccccaagaggcccaaggccctgaagctgctgggcatggaggatgatgagcccccagccaagggcaagaagaagaagaagaagaagaaggaggaggagattgatattgatgtggatgatcctgctgtgagccgcttccagtaccccttccacgagctgatggtgtgggccgtgctgatgaagaggcagaagatggctgtgttcctgtggcagagaggagaggagagcatggccaaggccctggtggcctgcaagctgtacaaggccatggcccacgagagcagcgagagtgacctggtggatgacatcagccaggacctggacaacaacagcaaggactttggccagctggccctggagctgctggaccagagctacaagcatgatgagcagatcgccatgaagctgctgacctatgagctgaagaactggagcaacagcacctgcctgaagctggccgtggccgccaagcaccgggacttcatcgcccacacctgcagccagatgctgctgacagacatgtggatgggccgcctgaggatgaggaagaaccctggcctgaaggtgatcatgggcatcctgctgccccccaccatcctcttcctggagttccgcacctatgatgacttctcctaccagaccagcaaagaaaatgaagatggcaaggagaaggaggaggagaacacagatgccaatgctgatgctggcagcaggaaaggagatgaggagaatgagcacaagaagcagaggagcatccccatcggcaccaagatctgtgagttctacaatgcccccatcgtgaagttctggttctacaccatctcctacctgggctacctgctgctcttcaactacgtgatcctggtgaggatggatggctggcccagcctgcaggagtggatcgtcatctcctacatcgtgtccctggccctggagaagatccgggagatcctgatgtctgagcccgggaagctgagccagaagatcaaggtgtggctgcaggagtactggaacatcacagacctggtggccatcagcaccttcatgattggagccatcctgcggctgcagaaccagccctacatgggctacggccgggtcatctactgtgtggacatcatcttctggtacatccgggtgctggacatctttggagtgaacaagtacctgggcccctacgtgatgatgattggcaagatgatgattgacatgctgtactttgtggtgatcatgctggtggtgctgatgagctttggagtggcccggcaggccatcctgcaccctgaggagaagcccagctggaagctggccaggaacatcttctacatgccctactggatgatctacggggaggtgtttgctgaccagattgacctgtatgccatggagatcaaccccccctgtggggagaacctgtatgatgaggagggcaagaggctgcccccctgcatccctggggcctggctgaccccagccctgatggcctgctacctgctggtggccaacatcctgctggtgaacctgctgattgctgtgttcaacaacaccttctttgaggtgaagagcatcagcaaccaggtgtggaagttccagcgctaccagctgatcatgaccttccatgacaggcctgtgctgcccccacccatgatcatcctgagccacatctacatcatcatcatgaggctgagcggccgctgcaggaagaagcgggagggggaccaggaggagcgggaccggggcctgaagctgttcctgagtgatgaggagctgaagaggctgcatgaatttgaggagcagtgtgtgcaggagcacttccgggagaaggaggatgagcagcagagcagcagtgatgagcgcatccgggtgaccagcgagcgggtggagaacatgtccatgaggctggaggagatcaatgaaagagagaccttcatgaagaccagcctgcagacagtggacctgcggctggcccagctggaggagctgagcaacaggatggtgaatgccctggagaacctggccggcatcgacagaagtgacctgatccaggcccggagccgggccagcagtgaatgtgaggccacctacctgctgcggcagagcagcatcaacagcgcagatggctacagcctgtaccgctaccacttcaatggagaggagctgctgtttgaggacaccagcctgagcaccagccctggcaccggggtgaggaagaagacctgcagcttccgcatcaaggaggagaaggatgtgaagacccacctggtgcctgagtgccagaacagcctgcacctgagcctgggcaccagcaccagcgccaccccagatggcagccacctggccgtggatgacctgaagaatgctgaggagagcaagctgggccctgacatcggcatcagcaaggaggatgatgagcggcagacagacagcaagaaggaggagaccatcagccccagcctgaacaagacagatgtgattcatggccaggacaagagtgatgtgcagaacacccagctgactgtggagaccaccaacatcgagggcaccatctcctaccccctggaggagaccaagatcacccgctacttcccagatgagaccatcaatgcctgcaagaccatgaagagccgcagctttgtgtacagccggggcaggaagctggtgggcggcgtgaaccaggatgtggagtacagcagcatcacagaccagcagctgaccacagagtggcagtgccaggtgcagaagatcaccaggagccacagcacagacatcccctacatcgtgtctgaggccgctgtgcaggccgagcacaaggagcagtttgctgacatgcaggatgagcaccacgtggccgaggccatcccccgcatcccccggctgagcctgaccatcacagacagaaatggcatggagaacctgctgtctgtgaagccagaccagaccctgggcttccccagcctgcggagcaagagcctgcacggccaccccagaaatgtgaagagcatccagggcaagctggacagaagtggccacgccagctctgtgagcagcctggtgattgtgtctggcatgacagctgaggagaagaaggtgaagaaggagaaggccagcacagaaacagaatgttag

SEQ ID NO: 88061 - DNA, 4929 bp, Artificial Sequence
  derived and/or modified sequence
atgagcagcttcaagcggggcagcctgaagagcagcaccagcggctcgcagaagggccaaaagagctggatcgaaaagacgttttgcaagcgggagtgcatcttcgtcatcccatccatgaaagattctaatcgatgctgttgtgggcagttcacaaatcagcacatcccccctttgcccagcgcgaccccatcaaaaaacgaggaagaatccaagcaagttgagactcaaccagagaaatggagcgtcgcgaagcacacacagagctacccgacagactcctatggcgtgctcgaatttcagggggggggctattctaataaagctatgtatatccgggtcagctatgacacgaagcccgactctctcctgcatctgatggtgaaagattggcagctcgaactgcctaagctactcatttctgtgcatggcggcttacaaaacttcgagatgcagcccaaactcaagcaagttttcggtaaagggcttatcaaagcagccatgaccaccggggcctggatcttcactggtggtgtatccacaggcgtcattagtcacgtcggagatgctctgaaagaccattcttccaagtctaggggaagagtgtgtgcaattgggattgctccttggggaatcgtcgagaacaaggaggatcttgtggggaaggacgtcacaagggtgtatcagacaatgtccaatcccctgtccaagctgtccgtgcttaataatagccacacacatttcatcctggccgacaatggcactctgggcaagtatggtgctgaagtaaagctcagaaggctcctcgagaaacacattagcttgcaaaaaattaatacccgactggggcagggagtgccgcttgtgggactggtggtggagggcggacctaacgtagtgagtattgtgctggagtatctccaggaggagcctcctatcccagtggtaatttgcgatggatctgggagagctagcgacatcttgagctttgcccataagtactgcgaagaagggggtattatcaatgagtccttgcgggagcagctgctcgtaactatacagaaaacctttaactacaataaagcacagagccaccagttgttcgccatcatcatggagtgcatgaagaagaaggagctcgtgaccgtctttaggatgggctctgaagggcagcaggatatagagatggccatccttacagcattgcttaagggaactaacgtctctgcgccagaccagctctccctggcgctcgcctggaaccgcgtggacatcgctcggagccaaatcttcgtgttcggccctcactggccaccactggggtccctggccccccccaccgattctaaggccacagaaaaagaaaagaaacctcctatggcgacgactaaggggggcagaggtaaaggcaaggggaagaaaaaaggcaaagttaaagaggaagttgaggaagagaccgacccccggaaaattgagcttcttaactgggtcaacgcacttgaacaggcgatgctagatgccctcgttcttgatagagtggatttcgtgaagctgcttattgagaacggagtgaacatgcaacactttttaactatcccccggttggaggagctgtataataccagactcgggccccctaataccctgcacctcttggtccgggatgtgaaaaaaagcaacctgccaccagactaccatattagtttgattgatatcggactcgtgcttgaatatttgatgggcggagcgtatcgatgcaattatactagaaaaaattttcggaccctttacaacaatttgttcggccccaagcgccctaaggcccttaagctgcttggcatggaggatgatgagcctcctgctaaaggcaaaaaaaaaaaaaagaagaagaaagaagaggagatcgatatcgacgtggacgacccggccgtaagtcgatttcaatatcccttccatgaactgatggtgtgggctgttcttatgaaaaggcagaagatggcagtctttctttggcaaagaggggaagaatcaatggcaaaagctttggtcgcatgtaagctctacaaagccatggcacacgagtcctctgagtctgacctcgtggacgacatcagtcaagatttggacaacaattcgaaggactttgggcagctggccctcgagttactggaccaatcctataagcatgatgagcagattgcaatgaagcttttaacctacgagctgaagaattggtccaattccacctgtttgaaactggctgtagccgcaaaacatagagattttatagctcatacatgctcacaaatgctcttgacagatatgtggatgggtaggctgcggatgcggaaaaacccaggtctcaaagtgatcatggggattcttctgccacccaccatactgtttctggagttccgtacatacgacgatttcagctaccagacatctaaggaaaacgaggatggcaaggagaaggaggaagagaacacggatgcaaacgcagacgccgggtcgcggaagggggacgaagagaatgagcataagaaacaaaggtctattcctattggcactaaaatctgtgaattttataacgcacccatcgtcaagttctggttttatactataagttacctcgggtacctccttctattcaactacgtgattttggtgcggatggacggttggccctcactccaggagtggatcgtcatatcttacattgtctcacttgcactggaaaaaatcagagaaatcctcatgagtgagcctggaaaattatcccagaagatcaaggtctggctgcaagagtattggaacataactgacctagtggctataagcaccttcatgatcggcgccattcttcgtctgcaaaatcaaccatacatgggatacggaagggttatctactgcgtagacattattttctggtacatccgtgttttagacatcttcggcgtgaataaatacctcgggccatacgttatgatgatcggaaagatgatgatagacatgctgtatttcgtggttatcatgcttgtggtgctgatgtcctttggtgtggcacggcaggccatcctgcaccccgaggaaaaaccatcatggaaactggcaaggaacattttttacatgccctactggatgatctatggcgaagtgttcgcggatcagattgacttatacgccatggagatcaatcccccctgcggggagaatctttatgacgaggagggaaaacgcttacccccatgcataccaggagcttggctgaccccagccctcatggcctgctacttgctcgtggcgaacatcctcctcgtgaacctgttaatcgccgtgttcaacaacaccttctttgaagtgaagagtatctcgaatcaggtgtggaaatttcagaggtaccaattaattatgactttccacgacagacctgtgctgcctcctcctatgatcatactgagtcacatttatatcattatcatgcgattgagcggtcgttgccgaaagaagcgagaaggagaccaagaggagcgcgacaggggcttaaagttattcttatcagacgaagagttgaagaggttgcatgagttcgaggaacaatgcgtccaagagcattttcgtgagaaggaggacgaacagcagtcctcttcagatgagcgtattagagtcacaagcgagagggtggaaaacatgtccatgagattggaggagattaacgagcgagaaacttttatgaagacaagtcttcagactgtggatctgagactggcacagttagaagaactgagtaacaggatggtgaatgccctagagaacctggccggaatagatcgtagtgatctcatccaggcccgctcgagggcttccagcgagtgtgaggccacgtatctgctccggcagagtagcatcaatagcgctgatggctattctctctatagatatcattttaatggagaagaactgctgtttgaagacactagcctgtctaccagtcccggcactggcgttcgtaaaaaaacctgtagtttccgtatcaaggaggagaaggacgtgaaaactcacttggtgccggagtgccagaactctctgcacctatcactgggtaccagtacctctgctacaccagacggaagtcacttagcggtcgacgacctgaaaaacgctgaagagagtaagctgggccctgacatcggcatatccaaggaagacgacgaaaggcagacagattcgaagaaggaagaaaccatcagcccatccctcaataagaccgatgtcatccacggccaggataaatccgacgtgcagaacacgcagctgactgtggagacaacaaatatcgaaggaacaattagctacccgctcgaagagacaaaaattactcgatacttcccagacgagacgatcaatgcctgtaaaactatgaaatcaaggtcgttcgtgtacagcagagggagaaagctggtcggtggcgtaaatcaggatgtcgagtactccagtatcacagatcagcagttgaccacagaatggcagtgccaagttcagaaaatcactcgcagccacagcaccgatataccgtacatcgtctccgaggctgctgtccaggccgagcataaggagcagtttgccgacatgcaggatgaacaccatgttgcagaggccatccccagaatccctaggctaagcttaacaattaccgacagaaacggtatggaaaatctgctgtccgtcaagcccgaccaaactcttgggtttccctcactgagatctaagtcactgcacggacatccaagaaacgtcaagtcaatccaaggtaaactggatcgttccggtcatgcctccagcgtttctagtttggtcattgtctcggggatgacagctgaggagaaaaaggtgaagaaggagaaggcttccaccgaaactgagtgttag

SEQ ID NO: 88062 - DNA, 4929 bp, Artificial Sequence
  derived and/or modified sequence
atgagctcctttaagcgcggtagtcttaagagcagtacctccggcagccagaagggtcaaaaatcatggatcgagaagaccttctgcaaacgggaatgcatcttcgttattccctccatgaaggactctaacaggtgctgttgcggtcagttcactaaccagcacattccccctttacccagcgcaacaccttcaaaaaatgaggaagagagcaaacaggtcgaaacgcagcctgaaaaatggtctgtagctaagcacacccaaagctaccctacggattcctacggcgtgctggagttccagggcggtggatacagtaacaaggccatgtatatccgtgtgagttacgatactaaacctgattctctgttgcatctgatggttaaggactggcaacttgaactcccgaagctgctcatttcagtgcatggagggctgcagaattttgaaatgcagcctaaactgaagcaggtattcggcaagggcttgatcaaggccgcaatgactaccggggcatggatatttacaggcggagtcagcactggggtgatatcccatgtgggcgacgctctgaaggaccattcttccaagagtcgtggacgggtttgcgcgattggtattgcgccatggggaatcgtcgaaaataaagaggacctggtgggtaaagatgtgactagagtgtatcagacaatgtccaaccccctgtccaagctgtccgttttgaataattctcacactcattttatcctggcggataatggcacgctgggcaagtatggcgctgaagtaaagctgaggagacttttggaaaaacacatttcgcttcagaaaattaacactcggttaggccagggcgtccccctggtgggcctggtggtggaagggggacctaatgtcgtcagtatcgtgctggagtatttgcaggaggaaccacctattccagtggtgatctgcgatggctcaggtcgggcatcagatatcctgtcatttgcccataaatattgtgaggaaggagggattatcaatgagagtctcagggagcaactcttggtgacaattcaaaagaccttcaattataacaaggcccaatctcaccagctgttcgcaatcatcatggaatgtatgaaaaagaaagagcttgttactgtgttccggatgggttctgaaggtcagcaggatatcgagatggctatactcacagctctccttaaaggcaccaatgtgagtgccccagatcagctttcactggcgttagcctggaatcgcgtcgacatagctcgttcccaaatctttgtgttcggccctcattggcctccactagggtccctggctcctcctactgacagcaaagctacagaaaaagaaaagaagccacccatggccacaactaaggggggtcgaggcaaggggaagggaaagaagaagggtaaggtgaaagaagaggtcgaagaagagactgatcctcgaaagatcgaacttctcaattgggtcaacgccctcgagcaagctatgctcgatgctcttgtgctggaccgtgtggatttcgtgaagctcctgattgagaatggcgtgaacatgcaacactttcttactattccgagactcgaggagctttataacacgcggttgggcccaccgaacacactccatctgctcgttagggacgtgaagaaatcaaacctacctcctgactaccatatttctctcatcgacatcggcctcgtattagagtaccttatgggcggagcctataggtgcaattatacccgcaagaattttaggactctctacaacaacctgttcggccctaagcgtccaaaagccctgaagcttcttggcatggaggacgacgagcccccagctaaaggtaagaagaaaaaaaaaaagaaaaaggaagaagaaatcgatatagatgtggacgacccagctgtgtctagattccagtacccctttcacgagttaatggtctgggctgtgctgatgaagcggcagaagatggccgtgttcctctggcaacggggtgaagagagcatggcgaaggcacttgttgcgtgcaagctatacaaggccatggcgcacgagagcagcgagtccgacctggtggatgatatttcacaggaccttgacaacaattcaaaagatttcgggcagttggcgctggagctacttgatcagtcgtataaacacgatgaacaaatagctatgaagctgctgacctatgagctgaaaaactggtctaattctacttgtctgaagttggccgttgctgccaagcaccgcgatttcatcgctcatacatgcagccaaatgctccttaccgacatgtggatgggtcggttgcggatgagaaagaacccaggactgaaggttattatgggaatcttgcttccacccaccatactgttcctggagttccgcacatacgatgatttctcctatcagacctctaaggaaaacgaggatggcaaggagaaagaggaggaaaatacggacgctaatgcagacgcagggtcccggaagggtgatgaggaaaacgaacacaagaaacagcgttcgatccccattgggactaagatttgtgaattctataatgcaccgatagtcaaattctggttttacacaatctcttatctgggataccttctcctgtttaactacgttattctggtcaggatggacggatggcctagccttcaggagtggattgttatctcatacatcgtcagcttggctctggagaagatccgggagattctgatgtccgagcctggaaaactgagccagaagatcaaagtctggttgcaggaatattggaatatcacagatctggtggcaatcagtacctttatgattggcgctatcttacgtcttcagaatcagccctatatggggtacggaagggtgatttactgtgtggatattatcttttggtacatacgcgtgctggatatcttcggcgtgaacaaatacctgggcccttacgtgatgatgattggcaaaatgatgatagacatgctctactttgtcgttataatgttagttgtcctgatgtcttttggtgtcgccagacaagctatattgcatcctgaagaaaagccttcatggaaactggcacgaaacatcttttacatgccatattggatgatttacggtgaagtatttgctgatcagattgatctctacgcgatggagattaacccgccttgcggtgagaatctctacgatgaggaaggcaaacggctcccaccttgcatccctggggcttggctgaccccagccttaatggcatgctacttgttggtggccaatattctgctggtgaacctcctcatcgcggtgtttaataacaccttttttgaagttaaaagcatttccaatcaggtctggaaattccaaagataccagctgattatgaccttccatgacagacccgtgctcccaccaccaatgataatcctgtctcacatctatattatcattatgcgtttgagcgggaggtgtcgaaaaaagcgcgagggtgatcaggaggagcgggatcgcggactgaagctgttcttgtcggatgaagagttaaagagactccacgagttcgaggagcagtgtgtgcaggagcattttagggaaaaggaggacgaacagcaatcgagctccgatgagcgaattcgcgtgacgagtgagagggttgaaaacatgagtatgcgcttggaggagattaatgagcgcgaaacttttatgaagacatcactgcagacagtagacctcagactcgctcagctggaagaactgagcaaccgcatggtaaacgctcttgagaatctggctgggattgatcggtcagacctcatacaggcccgatcacgagcctcaagtgaatgtgaggccacctatctccttaggcagagttctatcaattccgccgatggctatagcctttacaggtatcacttcaacggcgaggagctcctgttcgaagacacctcacttagtacgagccctgggaccggtgtacgcaagaagacttgtagcttccgcatcaaggaagagaaggatgtcaagacacacctggtccccgaatgccagaacagcttgcacctgtccctgggtacctcaacctccgcgacccctgatgggagtcacctggccgtggacgacctgaaaaatgctgaagaaagcaagcttggaccagacatcggtatctcgaaagaggacgacgaacggcagacagactctaagaaggaggagaccatctctccgtcccttaacaaaacagacgtcattcacgggcaggataaatcagatgtccaaaatactcagctgactgtcgaaactactaatatcgagggtaccatttcataccccttggaggagaccaagattaccaggtattttccagatgaaacaatcaacgcgtgtaaaacaatgaagtccaggtcttttgtatactcgcgcggaagaaagctggtgggcggagtaaaccaggacgtagagtatagctctatcacagaccagcagctgacaaccgaatggcagtgtcaggtccaaaaaattaccaggagccatagcactgacattccttacatcgtgtctgaggcagcggtgcaggccgaacataaggagcagtttgcggacatgcaagatgagcatcacgtggccgaagcaattccacggattccaagactgtccttaacaattactgacagaaatgggatggaaaacctcctatcagtgaaaccggaccagacactaggcttcccctccctgcggtcaaagtctcttcacgggcatccacgcaacgtgaagtccatccagggtaagctggatagatctggccacgcaagctccgtcagcagcttggtgatcgtgagcggcatgaccgctgaggagaagaaagtgaaaaaagaaaaggcttcaacagaaacagagtgttag

SEQ ID NO: 88063 - DNA, 5687 bp, Artificial Sequence
  derived and/or modified sequence
ggaggctgaaagagcctgagctgtgccctctccattccactgctgtggcagggtcagaaatcttggatagagaaaaccttttgcaaacgggaatgtatctttgtaattcctagcatgaaagactctaacaggtgttgctgtggccagttcaccaaccagcatatcccccctctgccaagtgcaacacccagcaaaaatgaagaggaaagcaaacaggtggagactcagcctgagaaatggtctgttgccaagcacacccagagctacccaacagattcctatggagttcttgaattccagggtggcggatattccaataaagccatgtatatccgtgtatcctatgacaccaagccagactcactgctccatctcatggtgaaagattggcagctggaactccccaagctcttaatatctgtgcatggaggcctccagaactttgagatgcagcccaagctgaaacaagtctttgggaaaggcctgatcaaggctgctatgaccaccggggcctggatcttcaccgggggtgtcagcacaggtgttatcagccacgtaggggatgccttgaaagaccactcctccaagtccagaggccgggtttgtgctataggaattgctccatggggcatcgtggagaataaggaagacctggttggaaaggatgtaacaagagtgtaccagaccatgtccaaccctctaagtaagctctctgtgctcaacaactcccacacccacttcatcctggctgacaatggcaccctgggcaagtatggcgccgaggtgaagctgcgaaggctgctggaaaagcacatctccctgcagaagatcaacacaagactggggcagggcgtgcccctcgtgggtctcgtggtggaggggggccctaacgtggtgtccatcgtcttggaatacctgcaagaagagcctcccatccctgtggtgatttgtgatggcagcggacgtgcctcggacatcctgtcctttgcgcacaagtactgtgaagaaggcggaataataaatgagtccctcagggagcagcttctagttaccattcagaaaacatttaattataataaggcacaatcacatcagctgtttgcaattataatggagtgcatgaagaagaaagaactcgtcactgtgttcagaatgggttctgagggccagcaggacatcgagatggcaattttaactgccctgctgaaaggaacaaacgtatctgctccagatcagctgagcttggcactggcttggaaccgcgtggacatagcacgaagccagatctttgtctttgggccccactggccgcccctgggaagcctggcacccccgacggacagcaaagccacggagaaggagaagaagccacccatggccaccaccaagggaggaagaggaaaagggaaaggcaagaagaaagggaaagtgaaagaggaagtggaggaagaaactgacccccggaagatagagctgctgaactgggtgaatgctttggagcaagcgatgctagatgctttagtcttagatcgtgtcgactttgtgaagctcctgattgaaaacggagtgaacatgcaacactttctgaccattccgaggctggaggagctttataacacaagactgggtccaccaaacacacttcatctgctggtgagggatgtgaaaaagagcaaccttccgcctgattaccacatcagcctcatagacatcgggctcgtgctggagtacctcatgggaggagcctaccgctgcaactacactcggaaaaactttcggaccctttacaacaacttgtttggaccaaagaggcctaaagctcttaaacttctgggaatggaagatgatgagcctccagctaaagggaagaaaaagaaaaagaagaaaaaggaggaagagatcgacattgatgtggacgaccctgccgtgagtcggttccagtatcccttccacgagctgatggtgtgggcagtgctgatgaaacgccagaaaatggcagtgttcctctggcagcgaggggaagagagcatggccaaggccctggtggcctgcaagctctacaaggccatggcccacgagtcctccgagagtgatctggtggatgacatctcccaggacttggataacaattccaaagacttcggccagcttgctttggagttattagaccagtcctataagcatgacgagcagatcgctatgaaactcctgacctacgagctgaaaaactggagcaactcgacctgcctcaaactggccgtggcagccaaacaccgggacttcattgctcacacctgcagccagatgctgctgaccgatatgtggatgggaagactgcggatgcggaagaaccccggcctgaaggttatcatggggattcttctaccccccaccatcttgtttttggaatttcgcacatatgatgatttctcgtatcaaacatccaaggaaaatgaggatggcaaagaaaaagaagaggaaaatacggatgcaaatgcagatgctggctcaagaaagggggatgaggagaacgagcacaaaaaacagagaagtattcccatcggaacaaagatctgtgaattctataacgcgcccattgtcaagttctggttttacacaatatcatacttgggctacctgctgctgtttaactacgtcatcctggtgcggatggatggctggccgtccctccaggagtggatcgtcatctcctacatcgtgagcctggcgttagagaagatacgagagatcctcatgtcagaaccaggcaaactcagccagaaaatcaaagtttggcttcaggagtactggaacatcacagatctcgtggccatttccacattcatgattggagcaattcttcgcctacagaaccagccctacatgggctatggccgggtgatctactgtgtggatatcatcttctggtacatccgtgtcctggacatctttggtgtcaacaagtatctggggccatacgtgatgatgattggaaagatgatgatcgacatgctgtactttgtggtcatcatgctggtcgtgctcatgagtttcggagtagcccgtcaagccattctgcatccagaggagaagccctcttggaaactggcccgaaacatcttctacatgccctactggatgatctatggagaggtgtttgcagaccagatagacctctacgccatggaaattaatcctccttgtggtgagaacctatatgatgaggagggcaagcggcttcctccctgtatccccggcgcctggctcactccagcactcatggcgtgctatctactggtcgccaacatcctgctggtgaacctgctgattgctgtgttcaacaataccttctttgaagtaaaatcaatatccaaccaggtgtggaagttccagcgatatcagctgattatgacatttcatgacaggccagtcctgcccccaccgatgatcattttaagccacatctacatcatcattatgcgtctcagcggccgctgcaggaaaaagagagaaggggaccaagaggaacgggatcgtggattgaagctcttccttagcgacgaggagctaaagaggctgcatgagttcgaggagcagtgcgtgcaggagcacttccgggagaaggaggatgagcagcagtcgtccagcgacgagcgcatccgggtcacttctgaaagagttgaaaatatgtcaatgaggttggaagaaatcaatgaaagagaaacttttatgaaaacttccctgcagactgttgaccttcgacttgctcagctagaagaattatctaacagaatggtgaatgctcttgaaaatcttgcgggaatcgacaggtctgacctgatccaggcacggtcccgggcttcttctgaatgtgaggcaacgtatcttctccggcaaagcagcatcaatagcgctgatggctacagcttgtatcgatatcattttaacggagaagagttattatttgaggatacatctctctccacgtcaccagggacaggagtcaggaaaaaaacctgttccttccgtataaaggaagagaaggacgtgaaaacgcacctagtcccagaatgtcagaacagtcttcacctttcactgggcacaagcacatcagcaaccccagatggcagtcaccttgcagtagatgacttaaagaacgctgaagagtcaaaattaggtccagatattgggatttcaaaggaagatgatgaaagacagacagactctaaaaaagaagaaactatttccccaagtttaaataaaacagatgtgatacatggacaggacaaatcagatgttcaaaacactcagctaacagtggaaacgacaaatatagaaggcactatttcctatcccctggaagaaaccaaaattacacgctatttccccgatgaaacgatcaatgcttgtaaaacaatgaagtccagaagcttcgtctattcccggggaagaaagctggtcggtggggttaaccaggatgtagagtacagttcaatcacggaccagcaattgacgacggaatggcaatgccaagttcaaaagatcacgcgctctcatagcacagatattccttacattgtgtcggaagctgcagtgcaagctgagcataaagagcagtttgcagatatgcaagatgaacaccatgtcgctgaagcaattcctcgaatccctcgcttgtccctaaccattactgacagaaatgggatggaaaacttactgtctgtgaagccagatcaaactttgggattcccatctctcaggtcaaaaagtttacatggacatcctaggaatgtgaaatccattcagggaaagttagacagatctggacatgccagtagtgtaagcagcttagtaattgtgtctggaatgacagcagaagaaaaaaaggttaagaaagagaaagcttccacagaaactgaatgctagtctgttttgtttctttaatttttttttttaacagtcagaaccactaatgggtgtcatcttggccatctaaacatcatcaatttctaaaaacattttccttaaaaaattttggaaattcagacttgatttacaatttaatgcactaaaagtagtattttgttagcatatgttagtaggcttagttttttcagttgcagtagtatcaaatgaaagtgatgatactgtaacgaagataaattggctaatcagtatacaagattatacaatctctttattactgagggccaccaaatagcctaggaagtgccctcgagcactgaagtcaccattaggtcacttaagaagtaagcaactagctgggcacagtggctcatgcctgtaatcctagcactttgggaggccaaggcagaaagatagcttgagtccaggagtttgagaccagcctgggcaacatagtgataccccatctcttaaaaaaaaaaaaaaaagtaagcaactgtgtaagaaagagaaactaaagagaaagcaaacatgaaaaaagggaggggtggaaagaagaaaaataaaattgtgaggcacaataagtgggaaggagccacaaatatgtttttatggggtctttgttttctgttttaatgttttattttaaactacacaatgggaaaaaaagtacacaattatatcaaacatcatactctaataatttagggtgacctagagttttgttaatgtgcaaaaataaagtatccaatatgcatttt

SEQ ID NO: 88064 - DNA, 5715 bp, Artificial Sequence
  derived and/or modified sequence
ctaaatctcttccctctaaaccttttggggatggagggattaagcctgattacagatgttgggggtggtagcaggagtcgggcaggaggggccaccaaaagccagcacatgctcctcctaggctgaaccagcctccggccggcctcgccccaggatctcggccccctcgcccagtgcgtggggctgccgccgagtgtggggctgccgccgagtgtgtggctccgctcctgcccacccagggagggcagcccctgtgccactggcctggccacccgagggagtcagcagggtggctcacaggctcactgagagagatgagctccttcaagcggggctcgctcaagagctccacatcagggtcgcagaagggtcagaaatcttggatagagaaaaccttttgcaaacgggaatgtatctttgtaattcctagcatgaaagactctaacaggtgttgctgtggccagttcaccaaccagcatatcccccctctgccaagtgcaacacccagcaaaaatgaagaggaaagcaaacaggtggagactcagcctgagaaatggtctgttgccaagcacacccagagctacccaacagattcctatggagttcttgaattccagggtggcggatattccaataaagccatgtatatccgtgtatcctatgacaccaagccagactcactgctccatctcatggtgaaagattggcagctggaactccccaagctcttaatatctgtgcatggaggcctccagaactttgagatgcagcccaagctgaaacaagtctttgggaaaggcctgatcaaggctgctatgaccaccggggcctggatcttcaccgggggtgtcagcacaggtgttatcagccacgtaggggatgccttgaaagaccactcctccaagtccagaggccgggtttgtgctataggaattgctccatggggcatcgtggagaataaggaagacctggttggaaaggatgtaacaagagtgtaccagaccatgtccaaccctctaagtaagctctctgtgctcaacaactcccacacccacttcatcctggctgacaatggcaccctgggcaagtatggcgccgaggtgaagctgcgaaggctgctggaaaagcacatctccctgcagaagatcaacacaagactggggcagggcgtgcccctcgtgggtctcgtggtggaggggggccctaacgtggtgtccatcgtcttggaatacctgcaagaagagcctcccatccctgtggtgatttgtgatggcagcggacgtgcctcggacatcctgtcctttgcgcacaagtactgtgaagaaggcggaataataaatgagtccctcagggagcagcttctagttaccattcagaaaacatttaattataataaggcacaatcacatcagctgtttgcaattataatggagtgcatgaagaagaaagaactcgtcactgtgttcagaatgggttctgagggccagcaggacatcgagatggcaattttaactgccctgctgaaaggaacaaacgtatctgctccagatcagctgagcttggcactggcttggaaccgcgtggacatagcacgaagccagatctttgtctttgggccccactggccgcccctgggaagcctggcacccccgacggacagcaaagccacggagaaggagaagaagccacccatggccaccaccaagggaggaagaggaaaagggaaaggcaagaagaaagggaaagtgaaagaggaagtggaggaagaaactgacccccggaagatagagctgctgaactgggtgaatgctttggagcaagcgatgctagatgctttagtcttagatcgtgtcgactttgtgaagctcctgattgaaaacggagtgaacatgcaacactttctgaccattccgaggctggaggagctttataacacaagactgggtccaccaaacacacttcatctgctggtgagggatgtgaaaaagagcaaccttccgcctgattaccacatcagcctcatagacatcgggctcgtgctggagtacctcatgggaggagcctaccgctgcaactacactcggaaaaactttcggaccctttacaacaacttgtttggaccaaagaggcctaaagctcttaaacttctgggaatggaagatgatgagcctccagctaaagggaagaaaaagaaaaagaagaaaaaggaggaagagatcgacattgatgtggacgaccctgccgtgagtcggttccagtatcccttccacgagctgatggtgtgggcagtgctgatgaaacgccagaaaatggcagtgttcctctggcagcgaggggaagagagcatggccaaggccctggtggcctgcaagctctacaaggccatggcccacgagtcctccgagagtgatctggtggatgacatctcccaggacttggataacaattccaaagacttcggccagcttgctttggagttattagaccagtcctataagcatgacgagcagatcgctatgaaactcctgacctacgagctgaaaaactggagcaactcgacctgcctcaaactggccgtggcagccaaacaccgggacttcattgctcacacctgcagccagatgctgctgaccgatatgtggatgggaagactgcggatgcggaagaaccccggcctgaaggttatcatggggattcttctaccccccaccatcttgtttttggaatttcgcacatatgatgatttctcgtatcaaacatccaaggaaaatgaggatggcaaagaaaaagaagaggaaaatacggatgcaaatgcagatgctggctcaagaaagggggatgaggagaacgagcacaaaaaacagagaagtattcccatcggaacaaagatctgtgaattctataacgcgcccattgtcaagttctggttttacacaatatcatacttgggctacctgctgctgtttaactacgtcatcctggtgcggatggatggctggccgtccctccaggagtggatcgtcatctcctacatcgtgagcctggcgttagagaagatacgagagatcctcatgtcagaaccaggcaaactcagccagaaaatcaaagtttggcttcaggagtactggaacatcacagatctcgtggccatttccacattcatgattggagcaattcttcgcctacagaaccagccctacatgggctatggccgggtgatctactgtgtggatatcatcttctggtacatccgtgtcctggacatctttggtgtcaacaagtatctggggccatacgtgatgatgattggaaagatgatgatcgacatgctgtactttgtggtcatcatgctggtcgtgctcatgagtttcggagtagcccgtcaagccattctgcatccagaggagaagccctcttggaaactggcccgaaacatcttctacatgccctactggatgatctatggagaggtgtttgcagaccagatagacctctacgccatggaaattaatcctccttgtggtgagaacctatatgatgaggagggcaagcggcttcctccctgtatccccggcgcctggctcactccagcactcatggcgtgctatctactggtcgccaacatcctgctggtgaacctgctgattgctgtgttcaacaataccttctttgaagtaaaatcaatatccaaccaggtgtggaagttccagcgatatcagctgattatgacatttcatgacaggccagtcctgcccccaccgatgatcattttaagccacatctacatcatcattatgcgtctcagcggccgctgcaggaaaaagagagaaggggaccaagaggaacgggatcgtggattgaagctcttccttagcgacgaggagctaaagaggctgcatgagttcgaggagcagtgcgtgcaggagcacttccgggagaaggaggatgagcagcagtcgtccagcgacgagcgcatccgggtcacttctgaaagagttgaaaatatgtcaatgaggttggaagaaatcaatgaaagagaaacttttatgaaaacttccctgcagactgttgaccttcgacttgctcagctagaagaattatctaacagaatggtgaatgctcttgaaaatcttgcgggaatcgacaggtctgacctgatccaggcacggtcccgggcttcttctgaatgtgaggcaacgtatcttctccggcaaagcagcatcaatagcgctgatggctacagcttgtatcgatatcattttaacggagaagagttattatttgaggatacatctctctccacgtcaccagggacaggagtcaggaaaaaaacctgttccttccgtataaaggaagagaaggacgtgaaaacgcacctagtcccagaatgtcagaacagtcttcacctttcactgggcacaagcacatcagcaaccccagatggcagtcaccttgcagtagatgacttaaagaacgctgaagagtcaaaattaggtccagatattgggatttcaaaggaagatgatgaaagacagacagactctaaaaaagaagaaactatttccccaagtttaaataaaacagatgtgatacatggacaggacaaatcagatgttcaaaacactcagctaacagtggaaacgacaaatatagaaggcactatttcctatcccctggaagaaaccaaaattacacgctatttccccgatgaaacgatcaatgcttgtaaaacaatgaagtccagaagcttcgtctattcccggggaagaaagctggtcggtggggttaaccaggatgtagagtacagttcaatcacggaccagcaattgacgacggaatggcaatgccaagttcaaaagatcacgcgctctcatagcacagatattccttacattgtgtcggaagctgcagtgcaagctgagcataaagagcagtttgcagatatgcaagatgaacaccatgtcgctgaagcaattcctcgaatccctcgcttgtccctaaccattactgacagaaatgggatggaaaacttactgtctgtgaagccagatcaaactttgggattcccatctctcaggtcaaaaagtttacatggacatcctaggaatgtgaaatccattcagggaaagttagacagatctggacatgccagtagtgtaagcagcttagtaattgtgtctggaatgacagcagaagaaaaaaaggttaagaaagagaaagcttccacagaaactgaatgctagtctgttttgtttctttaatttttttttttaacagtcagaaccactaatgggtgtcatcttggccatctaaacatcatcaatttctaaaaacattttccttaaaaaattttggaaattcagacttgatttacaatttaatgcactaaaagtagtattttgttagcatatgttagtaggcttagttttttcagttgcagtagtatcaaatgaaagtgatgatactgtaacgaagataaattggctaatcagtatacaagattatacaatctctttattactgagggccaccaaatagcctaggaagtgccctcgagcactgaagtcaccattaggtcacttaagaagtaagcaactagctgggcacagtggctcatgcctgtaatcctagcactttgggaggccaaggcagaaagatagcttgagtccaggagtttgagaccagcctgggcaacatagtgataccccatctctt

SEQ ID NO: 88065 - DNA, 4282 bp, Artificial Sequence
  derived and/or modified sequence
ctccttcaagcggggctcgctcaagagctccacatcagggtcgcagaagggtcagaaatcttggatagagaaaaccttttgcaaacgggaatgtatctttgtaattcctagcatgaaagactctaacaggtgttgctgtggccagttcaccaaccagcatatcccccctctgccaagtgcaacacccagcaaaaatgaagaggaaagcaaacaggtggagactcagcctgagaaatggtctgttgccaagcacacccagagctacccaacagattcctatggagttcttgaattccagggtggcggatattccaataaagccatgtatatccgtgtatcctatgacaccaagccagactcactgctccatctcatggtgaaagattggcagctggaactccccaagctcttaatatctgtgcatggaggcctccagaactttgagatgcagcccaagctgaaacaagtctttgggaaaggcctgatcaaggctgctatgaccaccggggcctggatcttcaccgggggtgtcagcacaggtgttatcagccacgtaggggatgccttgaaagaccactcctccaagtccagaggccgggtttgtgctataggaattgctccatggggcatcgtggagaataaggaagacctggttggaaaggatgtaacaagagtgtaccagaccatgtccaaccctctaagtaagctctctgtgctcaacaactcccacacccacttcatcctggctgacaatggcaccctgggcaagtatggcgccgaggtgaagctgcgaaggctgctggaaaagcacatctccctgcagaagatcaacacaagactggggcagggcgtgcccctcgtgggtctcgtggtggaggggggccctaacgtggtgtccatcgtcttggaatacctgcaagaagagcctcccatccctgtggtgatttgtgatggcagcggacgtgcctcggacatcctgtcctttgcgcacaagtactgtgaagaaggcggaataataaatgagtccctcagggagcagcttctagttaccattcagaaaacatttaattataataaggcacaatcacatcagctgtttgcaattataatggagtgcatgaagaagaaagaactcgtcactgtgttcagaatgggttctgagggccagcaggacatcgagatggcaattttaactgccctgctgaaaggaacaaacgtatctgctccagatcagctgagcttggcactggcttggaaccgcgtggacatagcacgaagccagatctttgtctttgggccccactggccgcccctgggaagcctggcacccccgacggacagcaaagccacggagaaggagaagaagccacccatggccaccaccaagggaggaagaggaaaagggaaaggcaagaagaaagggaaagtgaaagaggaagtggaggaagaaactgacccccggaagatagagctgctgaactgggtgaatgctttggagcaagcgatgctagatgctttagtcttagatcgtgtcgactttgtgaagctcctgattgaaaacggagtgaacatgcaacactttctgaccattccgaggctggaggagctttataacacaagactgggtccaccaaacacacttcatctgctggtgagggatgtgaaaaagagcaaccttccgcctgattaccacatcagcctcatagacatcgggctcgtgctggagtacctcatgggaggagcctaccgctgcaactacactcggaaaaactttcggaccctttacaacaacttgtttggaccaaagaggcctaaagctcttaaacttctgggaatggaagatgatgagcctccagctaaagggaagaaaaagaaaaagaagaaaaaggaggaagagatcgacattgatgtggacgaccctgccgtgagtcggttccagtatcccttccacgagctgatggtgtgggcagtgctgatgaaacgccagaaaatggcagtgttcctctggcagcgaggggaagagagcatggccaaggccctggtggcctgcaagctctacaaggccatggcccacgagtcctccgagagtgatctggtggatgacatctcccaggacttggataacaattccaaagacttcggccagcttgctttggagttattagaccagtcctataagcatgacgagcagatcgctatgaaactcctgacctacgagctgaaaaactggagcaactcgacctgcctcaaactggccgtggcagccaaacaccgggacttcattgctcacacctgcagccagatgctgctgaccgatatgtggatgggaagactgcggatgcggaagaaccccggcctgaaggttatcatggggattcttctaccccccaccatcttgtttttggaatttcgcacatatgatgatttctcgtatcaaacatccaaggaaaatgaggatggcaaagaaaaagaagaggaaaatacggatgcaaatgcagatgctggctcaagaaagggggatgaggagaacgagcacaaaaaacagagaagtattcccatcggaacaaagatctgtgaattctataacgcgcccattgtcaagttctggttttacacaatatcatacttgggctacctgctgctgtttaactacgtcatcctggtgcggatggatggctggccgtccctccaggagtggatcgtcatctcctacatcgtgagcctggcgttagagaagatacgagagatcctcatgtcagaaccaggcaaactcagccagaaaatcaaagtttggcttcaggagtactggaacatcacagatctcgtggccatttccacattcatgattggagcaattcttcgcctacagaaccagccctacatgggctatggccgggtgatctactgtgtggatatcatcttctggtacatccgtgtcctggacatctttggtgtcaacaagtatctggggccatacgtgatgatgattggaaagatgatgatcgacatgctgtactttgtggtcatcatgctggtcgtgctcatgagtttcggagtagcccgtcaagccattctgcatccagaggagaagccctcttggaaactggcccgaaacatcttctacatgccctactggatgatctatggagaggtgtttgcagaccagatagacctctacgccatggaaattaatcctccttgtggtgagaacctatatgatgaggagggcaagcggcttcctccctgtatccccggcgcctggctcactccagcactcatggcgtgctatctactggtcgccaacatcctgctggtgaacctgctgattgctgtgttcaacaataccttctttgaagtaaaatcaatatccaaccaggtgtggaagttccagcgatatcagctgattatgacatttcatgacaggccagtcctgcccccaccgatgatcattttaagccacatctacatcatcattatgcgtctcagcggccgctgcaggaaaaagagagaaggggaccaagaggaacgggatcgtggattgaagctcttccttagcgacgaggagctaaagaggctgcatgagttcgaggagcagtgcgtgcaggagcacttccgggagaaggaggatgagcagcagtcgtccagcgacgagcgcatccgggtcacttctgaaagagttgaaaatatgtcaatgaggttggaagaaatcaatgaaagagaaacttttatgaaaacttccctgcagactgttgaccttcgacttgctcagctagaagaattatctaacagaatggtgaatgctcttgaaaatcttgcgggaatcgacaggtctgacctgatccaggcacggtcccgggcttcttctgaatgtgaggcaacgtatcttctccggcaaagcagcatcaatagcgctgatggctacagcttgtatcgatatcattttaacggagaagagttattatttgaggatacatctctctccacgtcaccagggacaggagtcaggaaaaaaacctgttccttccgtataaaggaagagaaggacgtgaaaacgcacctagtcccagaatgtcagaacagtcttcacctttcactgggcacaagcacatcagcaaccccagatggcagtcaccttgcagtagatgacttaaagaacgctgaagagtcaaaattaggtccagatattgggatttcaaaggaagatgatgaaagacagacagactctaaaaaagaagaaactatttccccaagtttaaataaaacagatgtgatacatggacag

SEQ ID NO: 88066 - DNA, 4878 bp, Artificial Sequence
  derived and/or modified sequence
atgggccagaagagctggatcgagaagaccttctgcaagagagagtgcatcttcgtgatccccagcatgaaggacagcaacagatgctgctgcggccagttcaccaaccagcacatcccccccctgcccagcgccacccccagcaagaacgaggaggagagcaagcaggtggagacccagcccgagaagtggagcgtggccaagcacacccagagctaccccaccgacagctacggcgtgctggagttccagggcggcggctacagcaacaaggccatgtacatcagagtgagctacgacaccaagcccgacagcctgctgcacctgatggtgaaggactggcagctggagctgcccaagctgctgatcagcgtgcacggcggcctgcagaacttcgagatgcagcccaagctgaagcaggtgttcggcaagggcctgatcaaggccgccatgaccaccggcgcctggatcttcaccggcggcgtgagcaccggcgtgatcagccacgtgggcgacgccctgaaggaccacagcagcaagagcagaggcagagtgtgcgccatcggcatcgccccctggggcatcgtggagaacaaggaggacctggtgggcaaggacgtgaccagagtgtaccagaccatgagcaaccccctgagcaagctgagcgtgctgaacaacagccacacccacttcatcctggccgacaacggcaccctgggcaagtacggcgccgaggtgaagctgagaagactgctggagaagcacatcagcctgcagaagatcaacaccagactgggccagggcgtgcccctggtgggcctggtggtggagggcggccccaacgtggtgagcatcgtgctggagtacctgcaggaggagccccccatccccgtggtgatctgcgacggcagcggcagagccagcgacatcctgagcttcgcccacaagtactgcgaggagggcggcatcatcaacgagagcctgagagagcagctgctggtgaccatccagaagaccttcaactacaacaaggcccagagccaccagctgttcgccatcatcatggagtgcatgaagaagaaggagctggtgaccgtgttcagaatgggcagcgagggccagcaggacatcgagatggccatcctgaccgccctgctgaagggcaccaacgtgagcgcccccgaccagctgagcctggccctggcctggaacagagtggacatcgccagaagccagatcttcgtgttcggcccccactggccccccctgggcagcctggccccccccaccgacagcaaggccaccgagaaggagaagaagccccccatggccaccaccaagggcggcagaggcaagggcaagggcaagaagaagggcaaggtgaaggaggaggtggaggaggagaccgaccccagaaagatcgagctgctgaactgggtgaacgccctggagcaggccatgctggacgccctggtgctggacagagtggacttcgtgaagctgctgatcgagaacggcgtgaacatgcagcacttcctgaccatccccagactggaggagctgtacaacaccagactgggcccccccaacaccctgcacctgctggtgagagacgtgaagaagagcaacctgccccccgactaccacatcagcctgatcgacatcggcctggtgctggagtacctgatgggcggcgcctacagatgcaactacaccagaaagaacttcagaaccctgtacaacaacctgttcggccccaagagacccaaggccctgaagctgctgggcatggaggacgacgagccccccgccaagggcaagaagaagaagaagaagaagaaggaggaggagatcgacatcgacgtggacgaccccgccgtgagcagattccagtaccccttccacgagctgatggtgtgggccgtgctgatgaagagacagaagatggccgtgttcctgtggcagagaggcgaggagagcatggccaaggccctggtggcctgcaagctgtacaaggccatggcccacgagagcagcgagagcgacctggtggacgacatcagccaggacctggacaacaacagcaaggacttcggccagctggccctggagctgctggaccagagctacaagcacgacgagcagatcgccatgaagctgctgacctacgagctgaagaactggagcaacagcacctgcctgaagctggccgtggccgccaagcacagagacttcatcgcccacacctgcagccagatgctgctgaccgacatgtggatgggcagactgagaatgagaaagaaccccggcctgaaggtgatcatgggcatcctgctgccccccaccatcctgttcctggagttcagaacctacgacgacttcagctaccagaccagcaaggagaacgaggacggcaaggagaaggaggaggagaacaccgacgccaacgccgacgccggcagcagaaagggcgacgaggagaacgagcacaagaagcagagaagcatccccatcggcaccaagatctgcgagttctacaacgcccccatcgtgaagttctggttctacaccatcagctacctgggctacctgctgctgttcaactacgtgatcctggtgagaatggacggctggcccagcctgcaggagtggatcgtgatcagctacatcgtgagcctggccctggagaagatcagagagatcctgatgagcgagcccggcaagctgagccagaagatcaaggtgtggctgcaggagtactggaacatcaccgacctggtggccatcagcaccttcatgatcggcgccatcctgagactgcagaaccagccctacatgggctacggcagagtgatctactgcgtggacatcatcttctggtacatcagagtgctggacatcttcggcgtgaacaagtacctgggcccctacgtgatgatgatcggcaagatgatgatcgacatgctgtacttcgtggtgatcatgctggtggtgctgatgagcttcggcgtggccagacaggccatcctgcaccccgaggagaagcccagctggaagctggccagaaacatcttctacatgccctactggatgatctacggcgaggtgttcgccgaccagatcgacctgtacgccatggagatcaaccccccctgcggcgagaacctgtacgacgaggagggcaagagactgcccccctgcatccccggcgcctggctgacccccgccctgatggcctgctacctgctggtggccaacatcctgctggtgaacctgctgatcgccgtgttcaacaacaccttcttcgaggtgaagagcatcagcaaccaggtgtggaagttccagagataccagctgatcatgaccttccacgacagacccgtgctgcccccccccatgatcatcctgagccacatctacatcatcatcatgagactgagcggcagatgcagaaagaagagagagggcgaccaggaggagagagacagaggcctgaagctgttcctgagcgacgaggagctgaagagactgcacgagttcgaggagcagtgcgtgcaggagcacttcagagagaaggaggacgagcagcagagcagcagcgacgagagaatcagagtgaccagcgagagagtggagaacatgagcatgagactggaggagatcaacgagagagagaccttcatgaagaccagcctgcagaccgtggacctgagactggcccagctggaggagctgagcaacagaatggtgaacgccctggagaacctggccggcatcgacagaagcgacctgatccaggccagaagcagagccagcagcgagtgcgaggccacctacctgctgagacagagcagcatcaacagcgccgacggctacagcctgtacagataccacttcaacggcgaggagctgctgttcgaggacaccagcctgagcaccagccccggcaccggcgtgagaaagaagacctgcagcttcagaatcaaggaggagaaggacgtgaagacccacctggtgcccgagtgccagaacagcctgcacctgagcctgggcaccagcaccagcgccacccccgacggcagccacctggccgtggacgacctgaagaacgccgaggagagcaagctgggccccgacatcggcatcagcaaggaggacgacgagagacagaccgacagcaagaaggaggagaccatcagccccagcctgaacaagaccgacgtgatccacggccaggacaagagcgacgtgcagaacacccagctgaccgtggagaccaccaacatcgagggcaccatcagctaccccctggaggagaccaagatcaccagatacttccccgacgagaccatcaacgcctgcaagaccatgaagagcagaagcttcgtgtacagcagaggcagaaagctggtgggcggcgtgaaccaggacgtggagtacagcagcatcaccgaccagcagctgaccaccgagtggcagtgccaggtgcagaagatcaccagaagccacagcaccgacatcccctacatcgtgagcgaggccgccgtgcaggccgagcacaaggagcagttcgccgacatgcaggacgagcaccacgtggccgaggccatccccagaatccccagactgagcctgaccatcaccgacagaaacggcatggagaacctgctgagcgtgaagcccgaccagaccctgggcttccccagcctgagaagcaagagcctgcacggccaccccagaaacgtgaagagcatccagggcaagctggacagaagcggccacgccagcagcgtgagcagcctggtgatcgtgagcggcatgaccgccgaggagaagaaggtgaagaaggagaaggccagcaccgagaccgagtgctag

SEQ ID NO: 88067 - DNA, 4878 bp, Artificial Sequence
  derived and/or modified sequence
atgggacagaagtcatggattgaaaaaaccttctgcaagagggaatgcatattcgtgataccaagcatgaaagacagcaacaggtgctgctgtggccaattcaccaaccagcatatcccgccactgccttcagcgaccccatccaagaatgaggaagagtctaaacaggtggaaacacagcccgagaaatggtctgtcgccaaacatactcagagttaccctaccgattcgtatggagtcctggaatttcagggtgggggttactccaataaagccatgtatattcgcgtgtcatatgacactaagcctgattcacttctccaccttatggtgaaagattggcaactcgaattgccgaaactcctcatctccgtgcacggcggactgcagaatttcgaaatgcagcccaaattgaaacaggtattcggcaaggggctaattaaggctgcaatgacgacaggcgcctggatcttcacagggggggttagtaccggcgtaatctcacacgtcggggacgcccttaaggaccatagcagcaaatctagggggagggtctgcgcaatcggaattgcaccctggggcattgttgaaaacaaagaagatttagtgggcaaggatgtcaccagggtgtaccagactatgtcaaatccgctgtctaaactttcggtgcttaacaattcccacacacacttcatactggccgataacggcactctcggtaagtatggcgccgaggtaaaactgagaaggcttctcgaaaagcacataagcctccagaagatcaatacacgcctggggcagggagtgcccctggtcgggctggtcgtggaaggcggcccaaacgtggtgagcatcgttctggaatacctgcaggaagaaccccctatccccgtcgtaatatgcgacggctcagggcgtgcatctgatatcctttcttttgcacataagtactgcgaggagggtgggatcattaatgaaagcctgcgcgagcaacttcttgtaactattcagaaaacatttaattataataaggcccagtcccaccaattattcgctataatcatggagtgcatgaaaaagaaggagctggtcactgtcttccggatgggcagtgaggggcaacaggatattgaaatggcaattttgacggcgctgctgaagggcacaaatgtctccgcccctgaccagctcagtcttgccttagcctggaacagagtggacattgcccggtcacagatcttcgtcttcggaccccattggcctcctcttggatcactggcacctcccaccgatagtaaggccacggagaaggagaaaaagccgccaatggccacgacgaagggtggacgcgggaagggcaaaggcaagaaaaagggcaaagttaaggaagaggtcgaagaggaaactgacccccgtaaaatcgaactgctcaactgggtcaatgcccttgagcaggcaatgctcgacgccctggttctcgaccgtgtcgatttcgtcaagctactgatagaaaacggcgtgaatatgcagcactttctgacaattcctagactcgaggaactgtataatacaaggctgggcccacccaacacactgcacttgcttgtacgagatgtcaaaaaaagcaacctgcctcccgattaccacatttctttgatcgatatcgggctcgtgctggagtacctaatgggcggagcctaccggtgtaactacacaaggaaaaattttcggaccctgtataacaatctatttggacctaaaaggccaaaggccctgaagctgctggggatggaagacgacgagccaccagcgaagggcaaaaaaaaaaaaaaaaaaaagaaggaagaggagattgatatcgatgttgatgatccggctgtaagccggtttcaatacccttttcacgagctgatggtgtgggcagtgttgatgaagagacagaaaatggctgtgttcctgtggcagcggggcgaagaatctatggcgaaggccctggtggcctgcaaactgtataaagcaatggcacatgagagttcagagtcggacctggtggacgacatctctcaagacctcgataacaatagcaaagacttcggtcaactggcattagagctgttggatcagagctacaaacacgatgagcagatagccatgaagctcctgacgtacgagctgaaaaactggtctaacagtacgtgcctaaagcttgcggtggcagccaagcatagggacttcattgctcacacctgttctcagatgctcttaacagacatgtggatgggccgtttacgaatgcgtaagaaccccggactcaaagttatcatgggtattttgctccctcctactatcctcttcctagaattcagaacatacgacgacttctcctaccaaacgtcaaaggaaaacgaagatggaaaagaaaaggaggaggaaaataccgacgcaaacgctgacgcaggatcgcgcaaaggagacgaggagaacgagcacaaaaagcagaggtccattccaatcggcactaagatttgtgaattctataacgcccccatcgtgaagttctggttttatacaatcagttacctgggatatttactgcttttcaactatgtcatcctggtgaggatggatggctggccatcactccaggaatggatcgtgatcagttacatagtgtctttggcgctcgaaaaaatccgggaaatactcatgtccgaacctggaaagctgtcccaaaaaattaaagtttggctccaggaatattggaatatcacagatcttgtggcaattagtactttcatgattggcgctatcctgcgtctgcagaatcagccgtacatgggatatggtagggtgatttactgcgtcgacattatattttggtacataagggttctggatatctttggagtgaataaatatctcggtccttatgtgatgatgattgggaaaatgatgatagatatgctctacttcgtggtcattatgctggtcgtcctgatgagctttggcgtggcccgacaagcgatcctgcatcctgaagaaaagccatcttggaaactcgcaagaaatatcttctacatgccctattggatgatctatggcgaggtgttcgcggaccagatcgacctctacgcaatggagatcaacccgccctgtggcgaaaacctctatgatgaggagggcaaacgcctgccgccctgcattcctggggcatggctaactcctgccctcatggcctgctaccttttggtggcgaatattctgctcgtaaacctactgattgccgttttcaataatacattcttcgaagtaaagtctattagcaatcaggtgtggaaatttcagaggtaccagcttataatgactttccatgatagaccggtgctcccgccgccaatgatcatcctgtcacacatttacataatcattatgaggctgtcaggcagatgcagaaaaaagagagaaggggatcaggaggagagagataggggactgaagctgtttctgagcgacgaggagcttaagcgcctccacgagtttgaagaacaatgcgtgcaagaacacttcagggagaaagaagatgaacagcagtcttctagcgatgaacgcatccgcgtcaccagtgaaagggttgagaatatgtcgatgcggttggaggagataaacgaaagggagacatttatgaaaacctcgcttcagactgtagacctgaggctggcacagctggaggagttgagcaatcgcatggtcaatgcgctggagaacctcgcaggaattgaccggagcgatttaatccaggctaggagcagagcctcttctgaatgcgaggctacgtatcttctgcggcagagcagcattaatagcgcagatgggtatagcctgtacaggtatcatttcaacggtgaagagctgctcttcgaggacacctctctctccacttcaccaggcacgggcgttaggaaaaaaacatgtagcttcaggatcaaggaagaaaaggacgtaaagacacacttggtgccggagtgccagaattctctgcacctgtccctcggtacatcaaccagcgcaactcctgatggttcacacctggcagtggatgacctgaaaaatgctgaggaatcgaagctcgggcccgacatcggaattagcaaagaagacgatgaaaggcagacagacagcaagaaggaagagaccatcagcccgagcttgaacaaaaccgatgtgattcacgggcaggacaaatcggacgttcaaaacacacaactgaccgtggagacgaccaacatcgaaggcacaatcagctatcctctagaggagacaaaaatcactaggtactttccggacgaaacaataaacgcctgcaagacgatgaaatccagatcttttgtctactcaagggggagaaagcttgtaggcggggtgaatcaggatgttgagtactccagtatcacagaccagcaactcacaacagagtggcagtgtcaggtgcagaagattactagatcccattcaaccgacatcccttacatcgtaagtgaagctgctgtccaggctgagcataaggagcaattcgctgatatgcaggacgagcaccacgtagcagaggctatccccagaattcctcgactttccttgaccatcactgaccgtaatggaatggagaacctcctgtccgtcaaaccagaccaaactcttgggttcccgtcactgcggtctaagagcctccatgggcaccccagaaacgtaaaatccatccaagggaagttggacagatctgggcatgcaagcagtgtgtccagcctggtgatcgtgagtggaatgaccgccgaggagaagaaagtcaagaaggagaaagcctccaccgaaaccgaatgttag

SEQ ID NO: 88068 - DNA, 4878 bp, Artificial Sequence
  derived and/or modified sequence
atgggccagaagtcctggattgagaagaccttctgcaagcgggagtgcatcttcgtcatccccagcatgaaggacagcaaccgctgctgctgcggccagttcaccaaccagcacatcccccccctgcccagcgccacccccagcaagaatgaggaggagagcaagcaggtggagacccagcctgagaagtggagcgtggccaagcacacccagagctaccccacagacagctatggagtgctggagttccagggcggcggctacagcaacaaggccatgtacatccgggtgtcctatgacaccaagccagacagcctgctgcacctgatggtgaaggactggcagctggagctgcccaagctgctgatctctgtgcacggcggcctgcagaactttgagatgcagcccaagctgaagcaggtgtttgggaagggcctcatcaaggccgccatgaccactggagcctggatcttcaccggaggagtgtccactggagtcatcagccacgtgggagatgccctgaaggaccacagcagcaagagccggggccgggtgtgtgccatcggcatcgccccctggggcatcgtggagaacaaggaggacctggtgggcaaggatgtgaccagggtgtaccagaccatgagcaaccccctgagcaagctgtctgtgctgaacaacagccacacccacttcatcctggccgacaatggcaccctgggcaagtacggggctgaggtgaagctgcggcggctgctggagaagcacatcagcctgcagaagatcaacacccggctgggccagggcgtgcccctggtgggcctggtggtggagggcggccccaacgtggtgtccatcgtgctggagtacctgcaggaggagccccccatccctgtggtgatctgtgatggcagcggccgggccagtgacatcctgagctttgcccacaagtactgtgaggagggcggcatcatcaatgaaagcctgcgggagcagctgctggtgaccatccagaagaccttcaactacaacaaggcccagagccaccagctgtttgccatcatcatggagtgcatgaagaagaaggagctggtgacagtgttcaggatgggcagcgagggccagcaggacatcgagatggccatcctgacagccctgctgaagggcaccaacgtgtctgccccagaccagctgagcctggccctggcctggaacagagtggacatcgcccggagccagatctttgtgtttggcccccactggccacccctgggcagcctggccccacccacagacagcaaggccacagagaaggagaagaagccacccatggccaccaccaagggcggccggggcaagggcaagggcaagaagaagggcaaggtgaaggaggaggtggaggaggagacagaccccaggaagattgagctgctgaactgggtgaatgccctggagcaggccatgctggatgccctggtgctggacagagtggactttgtgaagctgctgattgaaaatggagtgaacatgcagcacttcctgaccatcccccggctggaggagctgtacaacacccggctgggcccccccaacaccctgcacctgctggtgagagatgtgaagaagagcaacctgcccccagactaccacatcagcctgattgatattggcctggtgctggagtacctgatgggcggggcctaccgctgcaactacaccaggaagaacttccgcaccctgtacaacaacctgtttggccccaagaggcccaaggccctgaagctgctgggcatggaggatgatgagcccccagccaagggcaagaagaagaagaagaagaagaaggaggaggagattgatattgatgtggatgatcctgctgtgagccgcttccagtaccccttccacgagctgatggtgtgggccgtgctgatgaagaggcagaagatggctgtgttcctgtggcagagaggagaggagagcatggccaaggccctggtggcctgcaagctgtacaaggccatggcccacgagagcagcgagagtgacctggtggatgacatcagccaggacctggacaacaacagcaaggactttggccagctggccctggagctgctggaccagagctacaagcatgatgagcagatcgccatgaagctgctgacctatgagctgaagaactggagcaacagcacctgcctgaagctggccgtggccgccaagcaccgggacttcatcgcccacacctgcagccagatgctgctgacagacatgtggatgggccgcctgaggatgaggaagaaccctggcctgaaggtgatcatgggcatcctgctgccccccaccatcctcttcctggagttccgcacctatgatgacttctcctaccagaccagcaaagaaaatgaagatggcaaggagaaggaggaggagaacacagatgccaatgctgatgctggcagcaggaaaggagatgaagaaaatgagcacaagaagcagaggagcatccccatcggcaccaagatctgtgagttctacaatgcccccatcgtgaagttctggttctacaccatctcctacctgggctacctgctgctcttcaactacgtgatcctggtgaggatggatggctggcccagcctgcaggagtggatcgtcatctcctacatcgtgtccctggccctggagaagatccgggagatcctgatgtctgagcccgggaagctgagccagaagatcaaggtgtggctgcaggagtactggaacatcacagacctggtggccatcagcaccttcatgattggagccatcctgcggctgcagaaccagccctacatgggctacggccgggtcatctactgtgtggacatcatcttctggtacatccgggtgctggacatcttcggcgtgaacaagtacctgggcccctacgtgatgatgattggcaagatgatgattgacatgctgtactttgtggtgatcatgctggtggtgctgatgagctttggagtggcccggcaggccatcctgcaccctgaggagaagcccagctggaagctggccaggaacatcttctacatgccctactggatgatctatggagaggtgtttgctgaccagattgacctgtatgccatggagatcaaccccccctgtggggagaacctgtatgatgaggagggcaagaggctgcccccctgcatccctggggcctggctgaccccagccctgatggcctgctacctgctggtggccaacatcctgctggtgaacctgctgattgctgtgttcaacaacaccttctttgaggtgaagagcatcagcaaccaggtgtggaagttccagcgctaccagctgatcatgaccttccatgacaggcctgtgctgcccccacccatgatcatcctgagccacatctacatcatcatcatgaggctgagcggccgctgcaggaagaagcgggagggggaccaggaggagcgggaccggggcctgaagctgttcctgagtgatgaggagctgaagaggctgcacgagtttgaggagcagtgtgtgcaggagcacttccgggagaaggaggatgagcagcagagcagcagtgatgagcgcatccgggtgaccagcgagcgggtggagaacatgtccatgaggctggaggagatcaatgaaagagagaccttcatgaagaccagcctgcagacagtggacctgcggctggcccagctggaggagctgagcaacaggatggtgaatgccctggagaacctggccggcatcgacagaagtgacctgatccaggcccggagccgggccagcagtgaatgtgaggccacctacctgctgcggcagagcagcatcaacagcgcagatggctacagcctgtaccgctaccacttcaacggggaggagctgctgtttgaggacaccagcctgagcaccagccctggcactggagtgaggaagaagacctgcagcttccgcatcaaggaggagaaggatgtgaagacccacctggtgcctgagtgccagaacagcctgcacctgagcctgggcaccagcaccagcgccaccccagatggcagccacctggccgtggatgacctgaagaatgctgaggagagcaagctgggccctgacatcggcatcagcaaagaagatgatgagcggcagacagacagcaagaaggaggagaccatcagccccagcctgaacaagacagatgtgatccacggccaggacaagagtgatgtgcagaacacccagctgactgtggagaccaccaacatcgagggcaccatctcctaccccctggaggagaccaagatcacccgctacttcccagatgagaccatcaatgcctgcaagaccatgaagagccgcagctttgtgtacagccggggcaggaagctggtgggcggcgtgaaccaggatgtggagtacagcagcatcacagaccagcagctgaccacagagtggcagtgccaggtgcagaagatcaccaggagccacagcacagacatcccctacatcgtgtctgaggccgctgtgcaggccgagcacaaggagcagtttgctgacatgcaggatgagcaccacgtggccgaggccatcccccgcatcccccggctgagcctgaccatcacagacagaaatggcatggagaacctgctgtctgtgaagccagaccagaccctgggcttccccagcctgcggagcaagagcctgcacggccaccccagaaatgtgaagagcatccagggcaagctggacaggagcggccacgccagctctgtgagcagcctggtgattgtgtctggcatgacagctgaggagaagaaggtgaagaaggagaaggccagcacagaaacagagtgctag

SEQ ID NO: 88069 - DNA, 4878 bp, Artificial Sequence
  derived and/or modified sequence
atgggccagaagagctggatcgagaagaccttctgcaagcgggagtgtatatttgtaatccccagcatgaaggactctaacagatgttgctgtggtcagttcaccaatcaacatatcccaccactgcctagcgcgactccaagcaaaaacgaggaagaaagcaaacaggtcgagacgcaaccagagaaatggagtgtggccaaacacacacagtcctatccgactgacagttatggagtcttggaatttcagggagggggctattcaaataaagccatgtatatcagagtgtcctatgatacaaaacccgactccttgctgcatctgatggtgaaagactggcaactggaactgccaaaactgctgatttccgtgcacggcgggctgcagaacttcgaaatgcagcccaagctaaaacaggtgttcgggaaggggttgatcaaagccgcgatgaccaccggggcttggatctttacaggtggggtctccaccggggtcattagccatgtgggcgatgcccttaaagatcactcttccaagagtcgaggccgggtctgtgctatcggtatcgccccatggggaattgttgaaaacaaggaagatctggtgggcaaggatgtcactagagtctatcagaccatgtctaatcctttgtcaaagcttagcgttctcaataattcacacactcacttcatcctggcagacaacggcacactgggcaaatatggagctgaggtcaagctacgcaggttactggagaagcacattagtctacagaagatcaatacccggctcggccagggagtgccattagtgggtctggttgttgaaggcggacccaatgtggtatccatagtgttagagtatctacaggaggagcccccgatacccgtggtgatttgtgatggcagtgggcgagcctctgacattctctcctttgcccataagtattgtgaagagggagggataataaacgagagtctgcgagagcaattattggtgaccattcagaaaacctttaactataacaaagctcagagtcatcaacttttcgcgatcatcatggaatgtatgaagaaaaaggaactggttaccgtgttccgcatgggctctgagggacaacaggatatcgaaatggctattctcacggcactgctcaaagggacaaatgtttctgccccggatcaattatctctcgctctggcttggaatcgagtggacatagcacgctcgcagatctttgtgtttgggccacattggccacccctgggatctcttgccccacctactgactccaaggctacagaaaaggagaagaagcctcctatggccaccactaagggcggcagggggaaggggaaggggaagaaaaagggaaaagtgaaggaagaggtggaggaggagactgatccacggaagattgagttactcaactgggtgaacgccttagagcaagctatgctcgatgctctggtcttggaccgcgtcgactttgtcaagctgctcatcgagaatggagtgaacatgcagcatttcctaacaatccctagactggaggaactgtacaatactcgcttgggacctcctaacacactgcacctcttggtccgggacgttaaaaagtccaatctgcctccggattaccatattagcctcattgatattggacttgtgctcgagtacctgatgggcggcgcctaccggtgcaactacacccgaaagaatttcaggaccctctacaacaatctgtttgggccaaagcggcccaaagctctcaagctgcttggaatggaagacgacgagcctccagccaagggtaaaaagaagaagaagaaaaagaaggaagaggaaattgacatcgatgttgacgatcccgccgtgagcagattccagtacccctttcatgagctgatggtgtgggccgtactgatgaaacggcagaagatggctgttttcctgtggcaacggggggaagagtctatggccaaggctttggtagcgtgcaaactctataaagccatggcacatgaaagcagtgagagcgatctcgttgacgatattagtcaggacctggacaacaattccaaagatttcggtcagctcgcgctcgaacttctcgatcagtcttacaagcacgacgagcagatcgccatgaaattactgacctatgagctgaagaattggtccaattcaacctgtttgaaattggcagtggccgccaagcacagggatttcattgctcacacgtgttcccagatgttactgacggacatgtggatggggcgactcaggatgcggaagaatcccggcctgaaagtcattatgggtattttgctaccccccaccatcctgttcctggagtttcgcacctacgacgacttcagctaccagacctcgaaagagaacgaggacggcaaagaaaaggaggaggagaacactgatgcaaacgcagacgccgggtctagaaaaggggatgaggaaaatgaacacaagaagcagcggagcattccaatcggaaccaaaatttgtgagttctataatgcgccaatagtgaaattctggttctatacaattagctacctgggctacctgttgttgtttaactacgttatccttgttagaatggacggttggcctagcctacaggagtggatcgtgatctcctacatcgtgtctctggcattggagaaaatcagggagatactgatgagcgaacccggcaaactgtcgcagaagatcaaagtctggcttcaggagtattggaacatcacagatctcgtggctatatccacctttatgatcggagcaatactgcgtctgcagaatcagccttatatgggttatgggcgagtgatatattgcgtagatataattttctggtacattagagttctggacattttcggagttaataaatatcttggaccttatgtgatgatgatcgggaaaatgatgatcgatatgctttacttcgtcgtcatcatgttagtagttttgatgtccttcggagtcgctaggcaagccatcctgcaccccgaagagaagccttcatggaaattagcccggaacatcttctatatgccgtattggatgatctatggagaagtttttgctgaccagatcgacctttatgccatggagataaatcccccttgtggagaaaacctgtatgatgaggagggaaaacgcttgcctccttgcattcccggcgcctggcttactcccgccctgatggcctgttacctgcttgtagcgaatatcctgctcgtgaacctcctcattgccgtattcaacaataccttctttgaggtcaaaagcatctcaaatcaggtgtggaaattccagcggtatcaactgatcatgacgttccacgaccgccctgtccttccacctccaatgattattctgtcacatatctacatcattataatgcgcctgtccggaagatgccgaaagaagagggagggggatcaggaagagcgcgaccggggcttaaaactcttcctgtctgacgaggaactaaagagactgcacgagttcgaggagcagtgcgtccaggaacattttcgagagaaggaagacgaacagcaaagctccagcgacgaacggattcgggtgacctctgagcgcgtggagaatatgtctatgcgcctagaagagattaacgagcgcgaaacttttatgaaaacatcacttcagacagtggatctgaggctggcccaactggaagaactctcaaacaggatggtgaacgccctggagaacttagctggaatcgaccgaagtgatttgattcaagctcggagtagggctagtagcgagtgcgaggcgacttatctactcagacagtcaagcattaactccgctgacggctattcattatatcggtaccattttaatggcgaggagctactgttcgaagatacgagcctgtcaacctcccctgggacaggtgtgagaaagaaaacatgctcgttcagaataaaggaggaaaaagatgttaaaacccatctggtccccgagtgccagaactccctacacttatccctggggaccagtacttcagccacgcccgatggcagtcatctcgcagtggatgatctgaagaacgcggaggagagcaaattgggtccggacattggcatctccaaggaggacgacgagaggcagacagatagtaaaaaagaagagaccatctctccaagcctcaataagacagacgtcattcatggtcaggataagagtgatgtgcagaatactcagcttaccgtggagactaccaatatcgagggaacgatcagctatcccctggaggaaaccaaaattaccagatatttccccgatgagacaataaatgcctgtaaaacgatgaagtcccggagcttcgtttactctcggggtcgtaagctcgttggaggagtgaatcaggacgtggagtattcttctattacggaccaacagctcacaacagagtggcagtgccaggtccagaagatcacgagatctcatagcaccgacatcccgtacatcgtgtcggaggctgctgttcaagccgagcataaggagcagttcgctgacatgcaggatgagcatcacgtggccgaagccattcctcgcatccccaggctctcattgactattactgataggaacgggatggaaaatctcctgagcgtgaagccagatcaaacacttggcttcccttcattacgctccaagagtctgcatggccacccccgcaatgttaagtccatccagggaaagctggataggtcaggacatgcctctagtgtctctagtctggtcattgtttcaggaatgaccgctgaagaaaagaaggtgaaaaaggaaaaggcgtcaactgagacggaatgctag

SEQ ID NO: 88070 - DNA, 4878 bp, Artificial Sequence
  derived and/or modified sequence
atgggccagaaatcctggatcgagaagaccttttgtaaaagagaatgcatctttgtgatccccagcatgaaagacagcaaccggtgttgctgcggacaattcactaaccaacacattccaccactgccatcggctaccccatctaagaacgaagaagaatcaaagcaggtagaaactcagccagagaaatggtcagttgctaaacacactcaatcctaccccaccgacagttacggagttctggagtttcagggcggagggtacagcaataaagctatgtacatccgtgtgagctatgatacgaagcccgactcattgttgcatctgatggtaaaggactggcaactcgagctccccaagctgctgatcagtgtgcatggcggtctccagaacttcgagatgcagcctaagctaaagcaggtttttggcaagggcttgataaaggcagcaatgaccacaggggcatggatcttcactggtggcgtttccaccggcgtaatctctcatgtgggagatgcgttgaaggatcactcctccaagagccggggtcgagtctgtgcaatcgggatcgccccttggggcatcgttgagaataaagaagaccttgtgggcaaagatgtgacccgggtctaccagacaatgagtaaccctttgagcaaactgtctgtcctcaacaactcacatactcactttatactcgctgacaatgggacgctgggaaagtatggtgccgaagtgaagctgcgaaggctgttggaaaagcacatctcactgcagaagatcaataccagactggggcagggtgttcccctggtgggactcgtagtggagggtggtcccaatgtagtgtccatagttctggagtacctccaggaggagccacctattccagtggtaatttgtgatggcagcgggcgtgcaagcgatatattgtcattcgcccacaaatattgtgaagagggtgggatcattaacgagtcccttagagaacagctcttggtgaccattcagaagacttttaactacaataaagcccagtctcatcagctctttgccataataatggaatgtatgaaaaaaaaggaacttgtgacggtctttagaatgggatccgaaggacagcaggatatcgagatggccattctgacagctcttttgaaggggacgaatgtgagcgcccctgaccaactctcactagctttggcttggaatcgagtggacatcgctcgctcccaaatatttgtcttcggtcctcactggccccctctcggctctctggctccccctacggactccaaggctaccgaaaaggaaaaaaaacccccaatggccactaccaaaggtggcaggggaaagggaaagggtaagaaaaagggcaaagttaaggaagaggtggaggaagaaaccgatcccaggaagattgagctgttgaattgggtgaacgcgctggagcaggctatgttggatgccttagtccttgatcgggtggacttcgtgaagctgctgatcgaaaacggagtgaatatgcagcacttcttaacaatacctcgccttgaagaactttacaacactagactcggccctcccaataccctgcatctgctagttagggacgtgaaaaagtcgaatctcccacctgattatcacatcagcctgatcgatataggactggttcttgaatatctgatgggcggagcctataggtgtaattatacgagaaagaattttcgtacgctgtataacaacctgttcgggccaaaacgtcctaaggctctcaagctgcttggtatggaggacgatgaaccgcctgccaagggcaaaaagaagaagaaaaaaaaaaaggaggaggaaattgatatcgatgtggacgatccagcagtcagtcgcttccaatatccgttccacgagctcatggtgtgggccgtgttaatgaagagacaaaagatggctgtcttcctgtggcaacgtggagaggagtcaatggctaaggccctggtcgcatgtaagctgtacaaagctatggcacacgaatccagcgagagtgacctggtagacgatatcagccaggacttagataacaattccaaggactttggccaactggctctggaattgctggatcaatcttataagcacgatgaacagatcgctatgaaattgctgacatatgaacttaaaaactggtcaaattccacgtgtctgaagctcgctgtggcggctaagcatagagactttattgctcacacttgcagtcaaatgctcctcactgatatgtggatggggaggctcaggatgagaaagaaccctgggctcaaggtgattatgggaattttgctcccgcctactatcctgtttctggagttccgcacatacgacgacttttcctatcagacgtccaaggagaacgaagacggtaaggagaaggaggaagagaacactgatgccaacgccgacgcgggttccaggaaaggcgatgaagagaacgagcacaaaaaacagcggagcatccctatcggcaccaagatttgcgagttctataatgcacccattgtcaagttttggttctacactatcagttacttggggtacctgctgttattcaactatgtcattctggtgcgcatggatggttggccgtcccttcaagagtggatcgttatcagttacatagtttctttggcactggaaaagattagggaaatcctgatgtccgaacccggtaaactgagtcagaagataaaggtatggctccaggagtattggaacattaccgatctggtggcgatcagcacttttatgattggagccatactacgtctccagaatcaaccctacatggggtacgggagggttatatactgcgtggatatcatattttggtacattcgcgtattggacatatttggcgtgaacaagtaccttggaccatatgtaatgatgataggtaagatgatgatcgacatgttgtactttgtggtcataatgctggtggtgctgatgtcctttggcgtggcccgtcaggccatcctgcacccagaggaaaaaccctcctggaagctggctcggaacatattctacatgccctattggatgatttacggcgaagtgtttgccgaccagattgatctgtacgcgatggagataaaccccccatgcggtgaaaacctctacgacgaagaggggaagaggctgcctccatgtatccccggagcctggctgacgcctgctttaatggcctgttacctactcgtggccaatattctcttggtgaatctcctgatagcagtcttcaataacacattcttcgaggtgaaatctatctccaaccaggtgtggaagtttcagcgctatcagctcatcatgacgtttcacgacaggcctgtgttgccccctcccatgatcatcctgtctcacatttacatcattattatgagactctctggacggtgtcgtaaaaaaagggagggcgatcaggaggagcgtgacaggggactgaaactatttctgtcagacgaggaattaaagcgtctccacgaatttgaggagcagtgtgtacaagagcactttcgtgagaaagaagatgaacagcagagctcttccgacgagcggatccgagtgacttcagaacgtgtggaaaatatgagtatgcgcctggaggagataaacgagagggagacgttcatgaaaacatctctgcagaccgtggatctgaggttagcccaattagaggagttgtctaataggatggtcaacgctctcgagaatctggcgggaatagatcggagtgatctgatccaggcccgttctcgcgcatcatcagaatgtgaagcaacatacctgctccgccaatccagcattaactcagccgatggctatagcctgtatcggtaccatttcaacggggaggaactgttgttcgaggatacctctctctcaaccagtcctgggacaggggttagaaaaaagacctgttcatttagaataaaagaggaaaaggatgtgaagacgcacttggtaccggagtgccaaaactccttacacctttctcttgggacctcaacttcagcaacaccagatggcagccaccttgcagtggacgatctgaagaacgccgaagaatctaagttgggacccgatatcggcatttcaaaagaagacgatgaaaggcaaaccgattccaagaaggaggagacaatcagtccctccctgaataagacagacgtcatccatggccaggacaagagtgatgtccaaaatacgcagctgacggtggagaccacaaatattgaaggtaccatatcctatcccctcgaagaaacgaagattacacggtactttcctgacgagaccattaacgcttgcaagacaatgaaatcaaggtccttcgtgtactcacgcggtagaaagctggtcggcggagtaaatcaggatgtagagtactcaagtatcacagaccagcagctgacgacggagtggcagtgtcaagtccagaagatcactagaagccacagtacagacatcccatacattgtgtctgaggccgcagtccaggctgagcacaaagaacagttcgccgacatgcaagacgagcaccatgtggcagaggcaattcccaggatcccacgcctcagcctgactatcaccgacaggaatgggatggagaatttgctttccgtgaaaccagaccaaaccctgggttttccttccctgcgctccaagtcattacacggacaccccagaaacgtgaagtcaattcagggtaaactcgaccggtctggtcacgccagtagcgtgtcttcattggtgattgttagtggtatgactgccgaagaaaagaaagttaaaaaggagaaggcaagcaccgaaaccgagtgctag

SEQ ID NO: 88071 - DNA, 5514 bp, Artificial Sequence
  derived and/or modified sequence
gccctggccaaggaggaggctgaaagagcctgagctgtgccctctccattccactgctgtggcaggttctagaagatttctgaggactcagcagtaacttgcagtgctggactgaggctatttccttatatcaactttttgaaaactcatgggtcagaaatcttggatagagaaaaccttttgcaaacgggaatgtatctttgtaattcctagcatgaaagactctaacaggtgttgctgtggccagttcaccaaccagcatatcccccctctgccaagtgcaacacccagcaaaaatgaagaggaaagcaaacaggtggagactcagcctgagaaatggtctgttgccaagcacacccagagctacccaacagattcctatggagttcttgaattccagggtggcggatattccaataaagccatgtatatccgtgtatcctatgacaccaagccagactcactgctccatctcatggtgaaagattggcagctggaactccccaagctcttaatatctgtgcatggaggcctccagaactttgagatgcagcccaagctgaaacaagtctttgggaaaggcctgatcaaggctgctatgaccaccggggcctggatcttcaccgggggtgtcagcacaggtgttatcagccacgtaggggatgccttgaaagaccactcctccaagtccagaggccgggtttgtgctataggaattgctccatggggcatcgtggagaataaggaagacctggttggaaaggatgtaacaagagtgtaccagaccatgtccaaccctctaagtaagctctctgtgctcaacaactcccacacccacttcatcctggctgacaatggcaccctgggcaagtatggcgccgaggtgaagctgcgaaggctgctggaaaagcacatctccctgcagaagatcaacacaagactggggcagggcgtgcccctcgtgggtctcgtggtggaggggggccctaacgtggtgtccatcgtcttggaatacctgcaagaagagcctcccatccctgtggtgatttgtgatggcagcggacgtgcctcggacatcctgtcctttgcgcacaagtactgtgaagaaggcggaataataaatgagtccctcagggagcagcttctagttaccattcagaaaacatttaattataataaggcacaatcacatcagctgtttgcaattataatggagtgcatgaagaagaaagaactcgtcactgtgttcagaatgggttctgagggccagcaggacatcgagatggcaattttaactgccctgctgaaaggaacaaacgtatctgctccagatcagctgagcttggcactggcttggaaccgcgtggacatagcacgaagccagatctttgtctttgggccccactggccgcccctgggaagcctggcacccccgacggacagcaaagccacggagaaggagaagaagccacccatggccaccaccaagggaggaagaggaaaagggaaaggcaagaagaaagggaaagtgaaagaggaagtggaggaagaaactgacccccggaagatagagctgctgaactgggtgaatgctttggagcaagcgatgctagatgctttagtcttagatcgtgtcgactttgtgaagctcctgattgaaaacggagtgaacatgcaacactttctgaccattccgaggctggaggagctttataacacaagactgggtccaccaaacacacttcatctgctggtgagggatgtgaaaaagagcaaccttccgcctgattaccacatcagcctcatagacatcgggctcgtgctggagtacctcatgggaggagcctaccgctgcaactacactcggaaaaactttcggaccctttacaacaacttgtttggaccaaagaggcctaaagctcttaaacttctgggaatggaagatgatgagcctccagctaaagggaagaaaaagaaaaagaagaaaaaggaggaagagatcgacattgatgtggacgaccctgccgtgagtcggttccagtatcccttccacgagctgatggtgtgggcagtgctgatgaaacgccagaaaatggcagtgttcctctggcagcgaggggaagagagcatggccaaggccctggtggcctgcaagctctacaaggccatggcccacgagtcctccgagagtgatctggtggatgacatctcccaggacttggataacaattccaaagacttcggccagcttgctttggagttattagaccagtcctataagcatgacgagcagatcgctatgaaactcctgacctacgagctgaaaaactggagcaactcgacctgcctcaaactggccgtggcagccaaacaccgggacttcattgctcacacctgcagccagatgctgctgaccgatatgtggatgggaagactgcggatgcggaagaaccccggcctgaaggttatcatggggattcttctaccccccaccatcttgtttttggaatttcgcacatatgatgatttctcgtatcaaacatccaaggaaaatgaggatggcaaagaaaaagaagaggaaaatacggatgcaaatgcagatgctggctcaagaaagggggatgaggagaacgagcacaaaaaacagagaagtattcccatcggaacaaagatctgtgaattctataacgcgcccattgtcaagttctggttttacacaatatcatacttgggctacctgctgctgtttaactacgtcatcctggtgcggatggatggctggccgtccctccaggagtggatcgtcatctcctacatcgtgagcctggcgttagagaagatacgagagatcctcatgtcagaaccaggcaaactcagccagaaaatcaaagtttggcttcaggagtactggaacatcacagatctcgtggccatttccacattcatgattggagcaattcttcgcctacagaaccagccctacatgggctatggccgggtgatctactgtgtggatatcatcttctggtacatccgtgtcctggacatctttggtgtcaacaagtatctggggccatacgtgatgatgattggaaagatgatgatcgacatgctgtactttgtggtcatcatgctggtcgtgctcatgagtttcggagtagcccgtcaagccattctgcatccagaggagaagccctcttggaaactggcccgaaacatcttctacatgccctactggatgatctatggagaggtgtttgcagaccagatagacctctacgccatggaaattaatcctccttgtggtgagaacctatatgatgaggagggcaagcggcttcctccctgtatccccggcgcctggctcactccagcactcatggcgtgctatctactggtcgccaacatcctgctggtgaacctgctgattgctgtgttcaacaataccttctttgaagtaaaatcaatatccaaccaggtgtggaagttccagcgatatcagctgattatgacatttcatgacaggccagtcctgcccccaccgatgatcattttaagccacatctacatcatcattatgcgtctcagcggccgctgcaggaaaaagagagaaggggaccaagaggaacgggatcgtggattgaagctcttccttagcgacgaggagctaaagaggctgcatgagttcgaggagcagtgcgtgcaggagcacttccgggagaaggaggatgagcagcagtcgtccagcgacgagcgcatccgggtcacttctgaaagagttgaaaatatgtcaatgaggttggaagaaatcaatgaaagagaaacttttatgaaaacttccctgcagactgttgaccttcgacttgctcagctagaagaattatctaacagaatggtgaatgctcttgaaaatcttgcgggaatcgacaggtctgacctgatccaggcacggtcccgggcttcttctgaatgtgaggcaacgtatcttctccggcaaagcagcatcaatagcgctgatggctacagcttgtatcgatatcattttaacggagaagagttattatttgaggatacatctctctccacgtcaccagggacaggagtcaggaaaaaaacctgttccttccgtataaaggaagagaaggacgtgaaaacgcacctagtcccagaatgtcagaacagtcttcacctttcactgggcacaagcacatcagcaaccccagatggcagtcaccttgcagtagatgacttaaagaacgctgaagagtcaaaattaggtccagatattgggatttcaaaggaagatgatgaaagacagacagactctaaaaaagaagaaactatttccccaagtttaaataaaacagatgtgatacatggacaggacaaatcagatgttcaaaacactcagctaacagtggaaacgacaaatatagaaggcactatttcctatcccctggaagaaaccaaaattacacgctatttccccgatgaaacgatcaatgcttgtaaaacaatgaagtccagaagcttcgtctattcccggggaagaaagctggtcggtggggttaaccaggatgtagagtacagttcaatcacggaccagcaattgacgacggaatggcaatgccaagttcaaaagatcacgcgctctcatagcacagatattccttacattgtgtcggaagctgcagtgcaagctgagcataaagagcagtttgcagatatgcaagatgaacaccatgtcgctgaagcaattcctcgaatccctcgcttgtccctaaccattactgacagaaatgggatggaaaacttactgtctgtgaagccagatcaaactttgggattcccatctctcaggtcaaaaagtttacatggacatcctaggaatgtgaaatccattcagggaaagttagacagatctggacatgccagtagtgtaagcagcttagtaattgtgtctggaatgacagcagaagaaaaaaaggttaagaaagagaaagcttccacagaaactgaatgctagtctgttttgtttctttaatttttttttttaacagtcagaaccactaatgggtgtcatcttggccatctaaacatcatcaatttctaaaaacattttccttaaaaaattttggaaattcagacttgatttacaatttaatgcactaaaagtagtattttgttagcatatgttagtaggcttagttttttcagttgcagtagtatcaaatgaaagtgatgatactgtaacgaagataaattggctaatcagtatacaagattatacaatctctttattactgagggccaccaaatagcctaggaagtgccctcgagcactgaagtcaccattaggtcacttaagaagtaagcaactagctgggcacagtggctcatgcctgtaatcctagcactttgggaggccaaggcagaaagatagcttgagtccaggagtttgagaccagcctgggcaacatagtgataccccatctcttaaaaaaaaaaaaaaaa

SEQ ID NO: 88072 - protein, 136 aa, Artificial Sequence
  derived and/or modified sequence
MKDSNRCCCGQFTNQHIPPLPSATPSKNEEESKQVETQPEKWSVAKHTQSYPTDSYGVLEFQGGGYSNKAMVRKAFRHGATRITAFIGGQSPSPKLQIPGLLHGCGSIFLDISLKNQEIYLCTWLLAMRLGNWTPL

SEQ ID NO: 88073 - DNA, 411 bp, Artificial Sequence
  derived and/or modified sequence
atgaaggacagcaacagatgctgctgcggccagttcaccaaccagcacatcccccccctgcccagcgccacccccagcaagaacgaggaggagagcaagcaggtggagacccagcccgagaagtggagcgtggccaagcacacccagagctaccccaccgacagctacggcgtgctggagttccagggcggcggctacagcaacaaggccatggtgagaaaggccttcagacacggcgccaccagaatcaccgccttcatcggcggccagagccccagccccaagctgcagatccccggcctgctgcacggctgcggcagcatcttcctggacatcagcctgaagaaccaggagatctacctgtgcacctggctgctggccatgagactgggcaactggacccccctgtag

SEQ ID NO: 88074 - DNA, 411 bp, Artificial Sequence
  derived and/or modified sequence
atgaaagatagtaaccggtgctgctgcggccaattcacaaatcagcacataccccccctgcccagtgctacaccgtcgaagaacgaggaggagagtaaacaagttgaaacacaaccagagaaatggagtgttgcaaagcacactcagtcttatcccactgacagctatggtgtcttggaattccagggaggaggatactctaacaaggccatggtgaggaaggcgttccgccacggagcaactcgtataactgccttcatcgggggccagtctccttctcccaaactgcagatacctggcctgctccatggatgtgggtcaatttttcttgacatatcactgaaaaatcaggagatctacctgtgcacttggctcctggccatgcggctggggaactggacaccactttag

SEQ ID NO: 88075 - DNA, 411 bp, Artificial Sequence
  derived and/or modified sequence
atgaaggacagcaaccgctgctgctgcggccagttcaccaaccagcacatcccccccctgcccagcgccacccccagcaagaatgaggaggagagcaagcaggtggagacccagcctgagaagtggagcgtggccaagcacacccagagctaccccacagacagctatggagtgctggagttccagggcggcggctacagcaacaaggccatggtgaggaaggccttccgccacggggccacccgcatcacagccttcatcggcggccagagccccagccccaagctgcagatccctggcctgctgcacggctgcggcagcatcttcctggacatcagcctgaagaaccaggagatctacctgtgcacctggctgctggccatgaggctgggcaactggacccccctgtag

SEQ ID NO: 88076 - DNA, 411 bp, Artificial Sequence
  derived and/or modified sequence
atgaaggacagcaaccggtgctgctgcggccagttcaccaaccagcacatcccgcccttaccctctgccacacctagtaaaaatgaagaagagtctaagcaagtcgagactcagccggaaaaatggagcgtggccaagcacacacagtcctaccctactgactcatacggggttctggagttccaggggggcggatactctaataaagcaatggtgcggaaagctttccgccacggggctacaagaatcaccgcctttatcgggggccaatctccgagcccgaaactgcagataccaggactgctgcacggctgcggatctattttcttggatatatccctgaaaaaccaggagatatacctctgcacttggctgctcgcaatgcgcctggggaactggacaccgctgtag

SEQ ID NO: 88077 - DNA, 411 bp, Artificial Sequence
  derived and/or modified sequence
atgaaagatagtaaccgctgttgttgtgggcagtttacaaaccagcacatcccaccgttaccatcagccaccccgtccaaaaacgaagaggaatctaaacaggtagaaacgcagcctgagaaatggagtgtcgctaagcacacccagtcataccctacagattcgtacggagttctggagtttcaggggggaggatactccaataaggcaatggtgcgtaaagccttcaggcatggggcaacgaggatcactgcctttatcggagggcagtcacccagtccaaagctccagatccccggacttttacacggttgcggctccatctttttggacatttcactaaagaaccaggagatttatctgtgtacctggctgctcgccatgcggctgggtaattggacgccactgtag

SEQ ID NO: 88078 - DNA, 1002 bp, Artificial Sequence
  derived and/or modified sequence
ctccctgccctggccaaggaggaggctgaaagagcctgagctgtgccctctccattccactgctgtggcagggtcagaaatcttggatagagaaaaccttttgcaaacgggaatgtatctttgtaattcctagcatgaaagactctaacaggtgttgctgtggccagttcaccaaccagcatatcccccctctgccaagtgcaacacccagcaaaaatgaagaggaaagcaaacaggtggagactcagcctgagaaatggtctgttgccaagcacacccagagctacccaacagattcctatggagttcttgaattccagggtggcggatattccaataaagccatggtgagaaaggcattcagacatggtgccactaggatcacagctttcattggcggccagtctcccagccccaaactgcagatacctggtcttcttcatggctgtggctcaatcttcctagatatttcattgaaaaaccaagagatatatctgtgcacatggcttttagccatgaggcttggaaactggacaccactgtaaagaacatctagtgtcccgtaaatccataccaaagctctgaatccacaaaccaggctctggcccaaccctgcaaacacactccattgctccatcttcagtaaaggaagacaaattcatttttctaataactgtggacctgcagcccccttagatgtgttgagagtctttggaaatattttcctctgaggtctgtccacagcttccctgggcctgcgctcagctggcccgagaaggaccaaggtccctcacatttgcatgtaaacagggagtgccctctgcccttccagtgagccctgccagcgtgggggaggcttcagctctgtgatccgttccagctcactctgaattacactcctacatgcccagtcacagactttttgcaatttcattttatttcactggcccaacatcattgttaaaataaaatttagctgtgttccaaatgctgcaatataca

SEQ ID NO: 88079 - protein, 174 aa, Artificial Sequence
  derived and/or modified sequence
MTSRSTARPNGQPQASKICQFKLVLLGESAVGKSSLVLRFVKGQFHEYQESTIGAAFLTQSVCLDDTTVKFEIWDTAGQERYHSLAPMYYRGAQAAIVVYDITNQEAQAYADDNSLLFMETSAKTAMNVNDLFLAIAKKLPKSEPQNLGGAAGRSRGVDLHEQSQQNKSQCCSN

SEQ ID NO: 88080 - DNA, 525 bp, Artificial Sequence
  derived and/or modified sequence
atgacctcacgctcgacagcccgaccaaatggtcagcctcaggcttccaagatttgccagtttaagctggtgctgctaggcgaatcagctgtcggaaaatcaagtctggtgctgagatttgtcaaggggcaattccacgagtatcaagaaagcaccataggcgcggccttccttacgcagtcagtttgccttgatgataccacagtaaagtttgagatttgggacactgcaggccaggaacggtatcactctctcgctccaatgtactatcggggagcacaagccgctatcgttgtgtatgacattaccaatcaggaggcacaggcgtacgctgatgacaactctctgctgttcatggaaactagtgccaagactgccatgaacgtcaatgacctcttcctcgccattgctaagaagctgccaaagtctgagccccaaaacctcggcggggcagccggacgatctcgcggggtggaccttcatgaacaaagccaacaaaacaaaagccaatgctgtagtaactag

SEQ ID NO: 88081 - DNA, 303 bp, Artificial Sequence
  derived and/or modified sequence
atgacctcacggagtactgctcgtccaaatggtcagccacaggcgtcaaaaatttgccagtttaagctggttctgctgggcgagtccgctgtgggaaagagcagtttggtgctacgctttgtgaagggccagttccatgagtaccaggagagcacaattggcgctgcatttttaacacaaagcgtgtgcctggatgatactactgtaaagttcgaaatttgggacactgccggccaagagaggtatcatagcctggcacctatgtactataggggggcccaggcagcaatcgttgtgtattag

SEQ ID NO: 88082 - DNA, 525 bp, Artificial Sequence
  derived and/or modified sequence
atgaccagccgcagcacagcccggcccaacggccagccccaggccagcaagatctgccagttcaagctggtgctgctgggggagagcgctgtgggcaagagcagcctggtgctgcgctttgtgaagggccagttccacgagtaccaggagagcaccatcggggccgccttcctgacccagagcgtgtgcctggatgacaccaccgtgaagtttgagatctgggacacagctggccaggagcgctaccacagcctggcccccatgtactacagaggagcccaggccgccatcgtggtgtatgacatcaccaaccaggaggcccaggcctatgcagatgacaacagcctgctcttcatggagaccagcgccaagacagccatgaatgtgaatgacctcttcctggccatcgccaagaagctgcccaagtctgagccccagaacctgggcggggccgccggccgcagcagaggagtggacctgcacgagcagagccagcagaacaagagccagtgctgcagcaactag

SEQ ID NO: 88083 - DNA, 303 bp, Artificial Sequence
  derived and/or modified sequence
atgaccagccgcagcacagcccggcccaacggccagccccaggccagcaagatctgccagttcaagctggtgctgctgggggagagcgctgtgggcaagagcagcctggtgctgcgctttgtgaagggccagttccacgagtaccaggagagcaccatcggggccgccttcctgacccagagcgtgtgcctggatgacaccaccgtgaagtttgagatctgggacacagctggccaggagcgctaccacagcctggcccccatgtactacagaggagcccaggccgccatcgtggtgtactag

SEQ ID NO: 88084 - DNA, 525 bp, Artificial Sequence
  derived and/or modified sequence
atgaccagccggagcaccgcccggcccaacggccagccccaggccagtaaaatttgccagtttaagctggtgctgctcggggagtctgccgtgggtaaaagcagcctggtgcttagatttgtgaaaggccagtttcatgagtatcaggaatctaccataggagccgccttcctcacccagagcgtttgtctagacgacactacggtgaaattcgaaatctgggataccgcgggtcaggagagataccattccctggccccaatgtactacagaggagcccaagcggcaatcgtagtgtatgatataaccaaccaggaggcacaagcatatgccgacgataattcactgctatttatggaaacttccgccaagaccgccatgaatgtgaatgatctgtttctggcaatcgccaaaaaactgcccaagagcgaaccccagaatctgggaggtgcagcaggccgcagtaggggtgtcgaccttcacgagcagtcacagcaaaacaaatcccagtgctgttcgaactag

SEQ ID NO: 88085 - DNA, 303 bp, Artificial Sequence
  derived and/or modified sequence
atgaccagccggagcaccgcccggcccaacggccagccccaggccagcaaaatctgccagtttaagctcgttctgttaggtgaatccgcggttgggaagtcctctttagtgctgcgcttcgtgaaaggacagttccatgagtatcaagagtcaacaatcggcgctgcgttcctcacgcaatccgtgtgtttagatgacactacagttaagtttgagatctgggataccgcaggacaggagcggtaccattcacttgcacctatgtactaccgcggggcccaggcagctattgtcgtctactag

SEQ ID NO: 88086 - DNA, 525 bp, Artificial Sequence
  derived and/or modified sequence
atgacttcacgatccactgccaggcccaatggacaaccccaggcttccaagatctgtcaatttaaattggtgctgctgggcgaatcagccgtaggcaaatcgtccttagttctcagatttgtaaagggccagttccacgagtaccaagaatcaacaatcggcgctgcattcctcactcagagcgtctgcttggatgataccacagttaagtttgaaatatgggacacagccggtcaggaaagatatcactcactggccccaatgtactaccggggagcccaggctgccatcgtcgtctacgatattaccaaccaagaagcgcaggcttacgccgatgataacagcctgttatttatggaaacttcagcgaaaacagccatgaacgttaacgacctgtttctggcaatcgctaagaaattgcctaagagcgagccgcaaaacctgggcggagctgctgggagatcccggggagtcgatctgcacgagcagagtcagcagaacaaatcccagtgctgcagtaattag

SEQ ID NO: 88087 - DNA, 303 bp, Artificial Sequence
  derived and/or modified sequence
atgacttcccgaagcactgccaggcccaatggccagcctcaggcaagcaaaatatgccagttcaagctcgtgctgcttggcgagagtgctgtcggtaagagctccctggtgttgcgctttgttaagggtcagtttcacgagtatcaggaatcaaccattggcgctgccttcctgacccaatccgtgtgcttggacgacaccacagtgaaattcgaaatctgggacacggcagggcaggaacgctaccattctctagcccctatgtactatcgtggtgcccaagccgctatcgtggtttactag

SEQ ID NO: 88088 - DNA, 1530 bp, Artificial Sequence
  derived and/or modified sequence
gacacaggcttggggccgacgggggagacggagccccaggagtgttgaagcctggaaatcccctccccttccccctcccccctttacagtatccccctccctccaccctttcccattctgataatctggccatgactagcagaagcacagctaggcccaatgggcaaccccaggccagcaaaatttgccagttcaaattggtcctgctgggagaatctgcagtgggaaagtcaagcctggtattacgttttgtcaaagggcagttccatgagtaccaggagagcaccattggagcggccttcctcacccagtccgtttgtctagatgacacaacagtgaagtttgagatctgggacacagctgggcaggagcgatatcacagcttagcccccatgtactacaggggtgcccaagctgcaatcgtggtttacgacattactaatcaggaggcccaggcatatgcagatgacaacagcttattgttcatggagacttcagccaagacagctatgaacgtgaatgatctcttcctggcaatagctaagaagttgccaaagagtgaaccccagaatctgggaggtgcagcaggccgaagccggggtgtggatctccatgaacagtcccagcagaacaagagccagtgttgtagcaactgagggggtggctagcagcaaacaagtatggagctagcacaagagctaagaaataacctccatccctacccctcagcacacaacccctacggtaacagcacactgagccctggctcccaagggctgcctcctgacagctccgtcatggcactttttaacgcttcagcaacaaacaccaggcagctgttgccactggcctcctaccccctactctggggcttgggggtcaactccccccaggacttaccttccaaaacaaactttcttcactttgtattataggtacaagacagcgacttacgtatcttttctcctcctccctagtgttcctccccattttttcagaaaacacttctgactcctgtcccttccccttctgcttttggtcagtccctgttcttgagcctcttttctcctctccccaggatgcagaaagtggtgaacccaggaactgaggaaggaggtttccagttcatttacattaagggccctgggggagaataaagctcagagcaggagggagtaaggaaacatttcctttttgtttttatttggttggagtttctcatatttgaaaacattgcggtatccatgatttggccttgtggagggtgttcctaggtagaggtgagaatggggaggcaagatctcaggcaccaggcaggaggtgccttgtaagctaactgggcggaggtggaggtgcagtgtcaactgtggctctgtaactcttcaaaggcccagtttcccctcacgcagcctcttaggtagcgtttcccctaatcgtgggggttggaccccagagtcttccaaagaattttcactggttgcctgcatctttggctctgctgtgatctgattggaggagggacagtttctg

SEQ ID NO: 88089 - DNA, 569 bp, Artificial Sequence
  derived and/or modified sequence
gacacaggcttggggccgacgggggagacggagccccaggtaacactggatcaacaaaatgaagagctgagccaagtggtagaactctcatttcaagattttggtgacttgggtttaaacagagttggagagggagatgaagtgcggatcttgaaatcaattccgatggtggagatgagtgttgaagcctggaaatcccctccccttccccctcccccctttacagtatccccctccctccaccctttcccattctgataatctggccatgactagcagaagcacagctaggcccaatgggcaaccccaggccagcaaaatttgccagttcaaattggtcctgctgggagaatctgcagtgggaaagtcaagcctggtattacgttttgtcaaagggcagttccatgagtaccaggagagcaccattggagcggccttcctcacccagtccgtttgtctagatgacacaacagtgaagtttgagatctgggacacagctgggcaggagcgatatcacagcttagcccccatgtactacaggggtgcccaagctgcaatcgtggtttacg

SEQ ID NO: 88090 - DNA, 525 bp, Artificial Sequence
  derived and/or modified sequence
atgaccagcagaagcaccgccagacccaacggccagccccaggccagcaagatctgccagttcaagctggtgctgctgggcgagagcgccgtgggcaagagcagcctggtgctgagattcgtgaagggccagttccacgagtaccaggagagcaccatcggcgccgccttcctgacccagagcgtgtgcctggacgacaccaccgtgaagttcgagatctgggacaccgccggccaggagagataccacagcctggcccccatgtactacagaggcgcccaggccgccatcgtggtgtacgacatcaccaaccaggaggcccaggcctacgccgacgacaacagcctgctgttcatggagaccagcgccaagaccgccatgaacgtgaacgacctgttcctggccatcgccaagaagctgcccaagagcgagccccagaacctgggcggcgccgccggcagaagcagaggcgtggacctgcacgagcagagccagcagaacaagagccagtgctgcagcaactag

SEQ ID NO: 88091 - DNA, 303 bp, Artificial Sequence
  derived and/or modified sequence
atgaccagcagaagcaccgccagacccaacggccagccccaggccagcaagatctgccagttcaagctggtgctgctgggcgagagcgccgtgggcaagagcagcctggtgctgagattcgtgaagggccagttccacgagtaccaggagagcaccatcggcgccgccttcctgacccagagcgtgtgcctggacgacaccaccgtgaagttcgagatctgggacaccgccggccaggagagataccacagcctggcccccatgtactacagaggcgcccaggccgccatcgtggtgtactag

SEQ ID NO: 88092 - protein, 216 aa, Artificial Sequence
  derived and/or modified sequence
MAGRGGAARPNGPAAGNKICQFKLVLLGESAVGKSSLVLRFVKGQFHEYQESTIGAAFLTQTVCLDDTTVKFEIWDTAGQERYHSLAPMYYRGAQAAIVVYDITNTDTFARAKNWVKELQRQASPNIVIALAGNKADLASKRAVEFQEAQAYADDNSLLFMETSAKTAMNVNEIFMAIAKKLPKNEPQNATGAPGRNRGVDLQENNPASRSQCCSN

SEQ ID NO: 88093 - protein, 249 aa, Artificial Sequence
  derived and/or modified sequence
MELSWRSPSPLSASLHSTSPHPHALWTTTAGRAMAGRGGAARPNGPAAGNKICQFKLVLLGESAVGKSSLVLRFVKGQFHEYQESTIGAAFLTQTVCLDDTTVKFEIWDTAGQERYHSLAPMYYRGAQAAIVVYDITNTDTFARAKNWVKELQRQASPNIVIALAGNKADLASKRAVEFQEAQAYADDNSLLFMETSAKTAMNVNEIFMAIAKKLPKNEPQNATGAPGRNRGVDLQENNPASRSQCCSN

SEQ ID NO: 88094 - protein, 74 aa, Artificial Sequence
  derived and/or modified sequence
MAGRGGAARPNGPAAGNKICQFKLVLLGESAVGKSSLVLRFVKGQFHEYQESTIGAAFLTQTVCLDDTTVKFEI

SEQ ID NO: 88095 - protein, 124 aa, Artificial Sequence
  derived and/or modified sequence
MAGRGGAARPNGPAAGNKICQFKLVLLGESAVGKSSLVLRFVKGQFHEYQESTIGAAFLTQTVCLDDTTVKFEIWDTAGQERYHSLAPMYYRGAQAAIVVYDITNTDTFARAKNWVKELQRQAS

SEQ ID NO: 88096 - DNA, 1671 bp, Artificial Sequence
  derived and/or modified sequence
agatccggatccggagcggctgaaaggcggaagtggaggccggagcctgggacaccgccggcggggagagaagcggatcccgtccgagccccggccccaagtaacgccgccgccccggagccgccttggaggtccccctccccactaagtgcctctttgcatagcaccagtccccacccgcacgctctctggaccactacagctggacgggcaatggcgggtcggggaggcgcagcacgacccaatggaccagctgctgggaacaagatctgtcaatttaagctggttctgctgggggagtctgcggtaggcaaatccagcctcgtcctccgctttgtcaagggacagtttcacgagtaccaggagagcacaattggagcggccttcctcacacagactgtctgcctggatgacacaacagtcaagtttgagatctgggacacagctggacaggagcggtatcacagcctggcccccatgtactatcggggggcccaggctgccatcgtggtctatgacatcaccaacacagatacatttgcacgggccaagaactgggtgaaggagctacagaggcaggccagccccaacatcgtcattgcactcgcgggtaacaaggcagacctggccagcaagagagccgtggaattccaggaagcacaagcctatgcagacgacaacagtttgctgttcatggagacatcagcaaagactgcaatgaacgtgaacgaaatcttcatggcaatagctaagaagcttcccaagaacgagccccagaatgcaactggtgctccaggccgaaaccgaggtgtggacctccaggagaacaacccagccagccggagccagtgctgcagcaactgagccccccttgcctgcccgctgcccccgcctcctccgcctgaatgacccgactggaatccactctaaccaatcgcacttaacgactcgggccaccactgggggggcagggggaggggtccaccatgatttctccatataattttgatcataggccggagtgagtcattccacctgcacctttctgtacaaatactaattcaattttaagtcttaagtcacttttttaatatatatgatcttctgctcttcccacttcctcccctttctactgctctcccattttcccttgctgggagtagccacatgctcttgccccccaacccttgtatatggggacagtggggtcagtgcagctaccctttctttccctcctgcggaacagcggacccagcaagagcatccacatcctcactttgttcggagtggtctttggtttgggcggtggggcagaccttgggaaggggcttaggaagggagaggcagctcttccttcagctggctctcatcaggctgcagccccctccccgctcccacctccctgctgggaaaccacagcattatcacagcattattgtgacagccacgaacccattgcccacaacccctccaccctcggtcaccccaacctctggctctgagccctgttctgaccaaatcatgatgatgagtatttgggggtgggtgggtaagggggggagtgggaggggacggaaccaactttttctgtattttgtattgtatgttttcttcaacatgtaaccaatcagtatcttgtcaatatagtcagccgatcgatcgacctcacaa

SEQ ID NO: 88097 - DNA, 750 bp, Artificial Sequence
  derived and/or modified sequence
atggaactatcatggagatctcctagtccactctccgccagcttacactcgacctcaccccacccccatgcactgtggaccactaccgccggccgggccatggcgggtagagggggggcagctaggcccaacgggcccgccgcaggcaacaaaatatgccagtttaagctggtgttgttaggagagtcagcagtcgggaaatccagcctcgttttaaggttcgttaaaggccaatttcatgaataccaagagtccacaatcggggctgccttcctgactcaaacggtgtgtcttgatgacacgaccgtgaaattcgaaatatgggacactgctggtcaggagcgttaccatagcctcgctcccatgtattaccggggcgcccaagcagccatcgtcgtttacgatattacaaacaccgacactttcgccagagccaaaaactgggtgaaggagctgcagcgacaggcctcccctaacatcgtgatcgccttggcaggtaataaagctgatttagcctcaaagagagctgttgagttccaagaggcccaggcctatgcagatgacaatagcttgctgtttatggagacctctgcgaaaactgcaatgaacgtgaatgaaatcttcatggcgattgctaaaaagctccccaaaaacgaacctcagaacgccacgggcgcccccggtcgaaacagaggagtcgacctgcaggagaataaccccgctagtagatcccagtgttgtagcaactag

SEQ ID NO: 88098 - DNA, 750 bp, Artificial Sequence
  derived and/or modified sequence
atggagctgtcctggaggagccccagccccctgagcgccagcctgcacagcaccagcccccacccccacgccctgtggaccaccacagctggccgggccatggccggccggggcggggccgcccggcccaacggccctgctgctggcaacaagatctgccagttcaagctggtgctgctgggggagagcgctgtgggcaagagcagcctggtgctgcgctttgtgaagggccagttccacgagtaccaggagagcaccatcggggccgccttcctgacccagacagtgtgcctggatgacaccaccgtgaagtttgagatctgggacacagctggccaggagcgctaccacagcctggcccccatgtactacagaggagcccaggccgccatcgtggtgtatgacatcaccaacacagacacctttgcccgggccaagaactgggtgaaggagctgcagaggcaggccagccccaacatcgtcatcgccctggccggcaacaaggctgacctggccagcaagagagctgtggagttccaggaggcccaggcctatgcagatgacaacagcctgctcttcatggagaccagcgccaagacagccatgaatgtgaatgagatcttcatggccatcgccaagaagctgcccaagaatgagccccagaatgccaccggggcccctggaagaaacagaggagtggacctgcaggagaacaacccagccagccgcagccagtgctgcagcaactag

SEQ ID NO: 88099 - DNA, 750 bp, Artificial Sequence
  derived and/or modified sequence
atggagctgagctggcggagccccagccccctgagcgccagcctgcacagcactagccctcatccacacgccctgtggactactaccgcaggtcgggcaatggcgggccgaggaggggcggccagacctaatggaccagctgccgggaacaagatttgtcaattcaagctcgtgctcctgggtgagagtgcagtcggcaagtctagtctggtcctgcggttcgttaagggccaatttcatgagtaccaggagtcaaccatcggtgccgcattccttacccagacagtctgcttagacgacacaaccgttaagtttgagatttgggacacagcaggacaggagcgataccacagccttgcacctatgtactacagaggagctcaggcagcaattgtagtgtacgatatcactaatactgacactttcgccagggcaaagaactgggtcaaggagctgcaaagacaggcttcccccaacatcgtgattgccctcgccggcaacaaagctgatttggcatcaaaacgggcggtagaatttcaggaagcacaggcatacgctgatgacaattcactactcttcatggagacatcagccaaaacagcaatgaatgtgaatgaaatctttatggctatcgctaaaaagttaccaaaaaacgagccacagaatgccaccggcgcacccggccggaaccggggggtggacctccaggaaaacaaccccgcctcccggtcccagtgttgcagcaactag

SEQ ID NO: 88100 - DNA, 750 bp, Artificial Sequence
  derived and/or modified sequence
atggagctcagttggcgcagcccgtctcccttatccgcttccttgcactctacctcaccacacccgcatgcactttggaccaccaccgctggacgggctatggcgggacggggaggtgcagcccgaccaaacggcccagcagctggcaacaagatctgtcaatttaagttggtgttgctgggcgagagcgccgtggggaaaagttccctcgtgcttagatttgtgaagggacaattccatgagtaccaggagtcaacaatcggagcagcgttcctgacgcagacagtctgcctagatgacacaacagttaaattcgagatctgggacaccgcagggcaggagagataccactccctggccccaatgtattacaggggcgcacaggccgctatcgtagtatacgatatcacgaatactgacacttttgcaagagcgaaaaattgggtcaaggaattacagcgtcaggcatctcccaatatcgtgattgccctggccggaaacaaagccgacttggcctctaagcgcgctgtggagttccaggaggctcaagcttacgcggacgacaactctcttctgtttatggaaaccagcgcaaaaacagccatgaacgttaatgagattttcatggctatcgctaaaaagctgcccaaaaatgagccacagaatgctactggggcacccggacgtaatagaggcgttgacctgcaggagaacaatcccgcttccaggtcccagtgctgttcaaattag

SEQ ID NO: 88101 - DNA, 1771 bp, Artificial Sequence
  derived and/or modified sequence
gagcggctgaaaggcggaagtggaggccggagcctgggacaccgccggcggggagagaagcggatcccgtccgagccccggccccaagtaacgccgccgccccggagccgccagtctcgctctctcgccaggccggagtgcagtggcactatctcagctcagtgcaacctctgcctcccgggttcaagcgattctcctgcctcagcctcccgagtagctgggactacagttggaggtccccctccccactaagtgcctctttgcatagcaccagtccccacccgcacgctctctggaccactacagctggacgggcaatggcgggtcggggaggcgcagcacgacccaatggaccagctgctgggaacaagatctgtcaatttaagctggttctgctgggggagtctgcggtaggcaaatccagcctcgtcctccgctttgtcaagggacagtttcacgagtaccaggagagcacaattggagcggccttcctcacacagactgtctgcctggatgacacaacagtcaagtttgagatctgggacacagctggacaggagcggtatcacagcctggcccccatgtactatcggggggcccaggctgccatcgtggtctatgacatcaccaacacagatacatttgcacgggccaagaactgggtgaaggagctacagaggcaggccagccccaacatcgtcattgcactcgcgggtaacaaggcagacctggccagcaagagagccgtggaattccaggaagcacaagcctatgcagacgacaacagtttgctgttcatggagacatcagcaaagactgcaatgaacgtgaacgaaatcttcatggcaatagctaagaagcttcccaagaacgagccccagaatgcaactggtgctccaggccgaaaccgaggtgtggacctccaggagaacaacccagccagccggagccagtgctgcagcaactgagccccccttgcctgcccgctgcccccgcctcctccgcctgaatgacccgactggaatccactctaaccaatcgcacttaacgactcgggccaccactgggggggcagggggaggggtccaccatgatttctccatataattttgatcataggccggagtgagtcattccacctgcacctttctgtacaaatactaattcaattttaagtcttaagtcacttttttaatatatatgatcttctgctcttcccacttcctcccctttctactgctctcccattttcccttgctgggagtagccacatgctcttgccccccaacccttgtatatggggacagtggggtcagtgcagctaccctttctttccctcctgcggaacagcggacccagcaagagcatccacatcctcactttgttcggagtggtctttggtttgggcggtggggcagaccttgggaaggggcttaggaagggagaggcagctcttccttcagctggctctcatcaggctgcagccccctccccgctcccacctccctgctgggaaaccacagcattatcacagcattattgtgacagccacgaacccattgcccacaacccctccaccctcggtcaccccaacctctggctctgagccctgttctgaccaaatcatgatgatgagtatttgggggtgggtgggtaagggggggagtgggaggggacggaaccaactttttctgtattttgtattgtatgttttcttcaacatgtaaccaatcagtatcttgtcaatatagtcagccgatcgatcgacctc

SEQ ID NO: 88102 - DNA, 1167 bp, Artificial Sequence
  derived and/or modified sequence
gaagtggaggccggagcctgggacaccgccggcggggagagaagcggatcccgtccgagccccggccccaagtaacgccgccgccccggagccgccaggcttctagagataggctcctcatgtgtctgcaattccaaaacttaacaaaaacaaaaagttgagcctctgaagctgtcactaaccaagtgattcagatgtcgggactggaacaccagctgttggggatgcaggacttggtctctgccctcccacacctcctgcctcttctttctctccatcgccccatctctgccagtagagaatggaactgagttggaggtccccctccccactaagtgcctctttgcatagcaccagtccccacccgcacgctctctggaccactacagctggacgggcaatggcgggtcggggaggcgcagcacgacccaatggaccagctgctgggaacaagatctgtcaatttaagctggttctgctgggggagtctgcggtaggcaaatccagcctcgtcctccgctttgtcaagggacagtttcacgagtaccaggagagcacaattggagcggccttcctcacacagactgtctgcctggatgacacaacagtcaagtttgagatctgggacacagctggacaggagcggtatcacagcctggcccccatgtactatcggggggcccaggctgccatcgtggtctatgacatcaccaacacagatacatttgcacgggccaagaactgggtgaaggagctacagaggcaggccagccccaacatcgtcattgcactcgcgggtaacaaggcagacctggccagcaagagagccgtggaattccaggaagcacaagcctatgcagacgacaacagtttgctgttcatggagacatcagcaaagactgcaatgaacgtgaacgaaatcttcatggcaatagctaagaagcttcccaagaacgagccccagaatgcaactggtgctccaggccgaaaccgaggtgtggacctccaggagaacaacccagccagccggagccagtgctgcagcaactgagccccccttgcctgcccgctgcccccgcctcctccgcctgaatgacccgactggaatccactctaaccaatcgcacttaacgactcgggccaccactgggggggcagggggagggg

SEQ ID NO: 88103 - DNA, 500 bp, Artificial Sequence
  derived and/or modified sequence
accgccggcggggagagaagcggatcccgtccgagccccggccccaagtaacgccgccgccccggagccgccagtctcgctctctcgccaggccggagtgcagtggcactatctcagctcagtgcaacctctgcctcccgggttcaagcgattctcctgcctcagcctcccgagtagctgggactacagttggaggtccccctccccactaagtgcctctttgcatagcaccagtccccacccgcacgctctctggaccactacagctggacgggcaatggcgggtcggggaggcgcagcacgacccaatggaccagctgctgggaacaagatctgtcaatttaagctggttctgctgggggagtctgcggtaggcaaatccagcctcgtcctccgctttgtcaagggacagtttcacgagtaccaggagagcacaattggagcggccttcctcacacagactgtctgcctggatgacacaacagtcaagtttgagatct

SEQ ID NO: 88104 - DNA, 583 bp, Artificial Sequence
  derived and/or modified sequence
aaacccggctcagcctcccaagtcctaacctgctagccacgctggggaaggttgtgggtacctcgtgtggatcgtggctggcgttgcttcagattcttctttcctctgggtctgcaaccagctagaagcctggatagtcctgctgtgagtctgtcctctgtttctgtgtgctggcagtggttttcccttttgaggaagagctgtgttcttgagcctatggttggaggtccccctccccactaagtgcctctttgcatagcaccagtccccacccgcacgctctctggaccactacagctggacgggcaatggcgggtcggggaggcgcagcacgacccaatggaccagctgctgggaacaagatctgtcaatttaagctggttctgctgggggagtctgcggtaggcaaatccagcctcgtcctccgctttgtcaagggacagtttcacgagtaccaggagagcacaattggagcggccttcctcacacagactgtctgcctggatgacacaacagtcaagtttgagatctgggacacagctggacaggagcggtatcacagcctggcccccatgtactatcg

SEQ ID NO: 88105 - DNA, 551 bp, Artificial Sequence
  derived and/or modified sequence
gtgggtacctcgtgtggatcgtggctggcgttgcttcagattcttctttcctctgggtctgcaaccagctagaagcctggatagtcctgctttggaggtccccctccccactaagtgcctctttgcatagcaccagtccccacccgcacgctctctggaccactacagctggacgggcaatggcgggtcggggaggcgcagcacgacccaatggaccagctgctgggaacaagatctgtcaatttaagctggttctgctgggggagtctgcggtaggcaaatccagcctcgtcctccgctttgtcaagggacagtttcacgagtaccaggagagcacaattggagcggccttcctcacacagactgtctgcctggatgacacaacagtcaagtttgagatctgggacacagctggacaggagcggtatcacagcctggcccccatgtactatcggggggcccaggctgccatcgtggtctatgacatcaccaacacagatacatttgcacgggccaagaactgggtgaaggagctacagaggcaggccagc

SEQ ID NO: 88106 - DNA, 750 bp, Artificial Sequence
  derived and/or modified sequence
atggagctgagctggagaagccccagccccctgagcgccagcctgcacagcaccagcccccacccccacgccctgtggaccaccaccgccggcagagccatggccggcagaggcggcgccgccagacccaacggccccgccgccggcaacaagatctgccagttcaagctggtgctgctgggcgagagcgccgtgggcaagagcagcctggtgctgagattcgtgaagggccagttccacgagtaccaggagagcaccatcggcgccgccttcctgacccagaccgtgtgcctggacgacaccaccgtgaagttcgagatctgggacaccgccggccaggagagataccacagcctggcccccatgtactacagaggcgcccaggccgccatcgtggtgtacgacatcaccaacaccgacaccttcgccagagccaagaactgggtgaaggagctgcagagacaggccagccccaacatcgtgatcgccctggccggcaacaaggccgacctggccagcaagagagccgtggagttccaggaggcccaggcctacgccgacgacaacagcctgctgttcatggagaccagcgccaagaccgccatgaacgtgaacgagatcttcatggccatcgccaagaagctgcccaagaacgagccccagaacgccaccggcgcccccggcagaaacagaggcgtggacctgcaggagaacaaccccgccagcagaagccagtgctgcagcaactag

SEQ ID NO: 88107 - protein, 1122 aa, Artificial Sequence
  derived and/or modified sequence
MPAGGRAGSLKDPDVAELFFKDDPEKLFSDLREIGHGSFGAVYFARDVRNSEVVAIKKMSYSGKQSNEKWQDIIKEVRFLQKLRHPNTIQYRGCYLREHTAWLVMEYCLGSASDLLEVHKKPLQEVEIAAVTHGALQGLAYLHSHNMIHRDVKAGNILLSEPGLVKLGDFGSASIMAPANSFVGTPYWMAPEVILAMDEGQYDGKVDVWSLGITCIELAERKPPLFNMNAMSALYHIAQNESPVLQSGHWSEYFRNFVDSCLQKIPQDRPTSEVLLKHRFVLRERPPTVIMDLIQRTKDAVRELDNLQYRKMKKILFQEAPNGPGAEAPEEEEEAEPYMHRAGTLTSLESSHSVPSMSISASSQSSSVNSLADASDNEEEEEEEEEEEEEEEGPEAREMAMMQEGEHTVTSHSSIIHRLPGSDNLYDDPYQPEITPSPLQPPAAPAPTSTTSSARRRAYCRNRDHFATIRTASLVSRQIQEHEQDSALREQLSGYKRMRRQHQKQLLALESRLRGEREEHSARLQRELEAQRAGFGAEAEKLARRHQAIGEKEARAAQAEERKFQQHILGQQKKELAALLEAQKRTYKLRKEQLKEELQENPSTPKREKAEWLLRQKEQLQQCQAEEEAGLLRRQRQYFELQCRQYKRKMLLARHSLDQDLLREDLNKKQTQKDLECALLLRQHEATRELELRQLQAVQRTRAELTRLQHQTELGNQLEYNKRREQELRQKHAAQVRQQPKSLKERSIVGQEEAGTWSLWGKEDESLLDEEFELGWVQGPALTPVPEEEEEEEEGAPIGTPRDPGDGCPSPDIPPEPPPTHLRPCPASQLPGLLSHGLLAGLSFAVGSSSGLLPLLLLLLLPLLAAQGGGGLQAALLALEVGLVGLGASYLLLCTALHLPSSLFLLLAQGTALGAVLGLSWRRGLMGVPLGLGAAWLLAWPGLALPLVAMAAGGRWVRQQGPRVRRGISRLWLRVLLRLSPMAFRALQGCGAVGDRGLFALYPKTNKDGFRSRLPVPGPRRRNPRTTQHPLALLARVWVLCKGWNWRLARASQGLASHLPPWAIHTLASWGLLRGERPTRIPRLLPRSQRQLGPPASRQPLPGTLAGRRSRTRQSRALPPWR

SEQ ID NO: 88108 - DNA, 585 bp, Artificial Sequence
  derived and/or modified sequence
atgcctgccccccgcttcctgtacagcctgagaaattatgagcccatgaagcccctcttcttcatcaactaccctgtgtctgacatggagctgcctgtgcgcagcagcacagtgaccctgctgcctgcccccctgccccggcggggctctgtgaagaccttcctggcccccagcaagagctacttccctgaggaggagcgggccctgctgaagagcagccacgccttctgcaccggcctgtggccctggaggcgggacttccagctgccccagtgccacctggccctgggcctgctgcccggggagaggtctgtgcggctgccccgcttcctggccgtgctgaaggagctgagcgccacagccagcttcaccctggccagcgaggccatccccttcctgagcagcttccccttcccctggaacctgctgctgcccagcgtcttccaggccctgccccagaagtggcagttcaaggctgacttcctgctggagtgcaccctgtctgtgaaggaggccttccaccaggagtgtggggccggcgtgtccctggccaacggcctgaacaagggcctgaggactggatag

SEQ ID NO: 88109 - DNA, 3369 bp, Artificial Sequence
  derived and/or modified sequence
atgcccgccggcggcagagccggcagcctgaaggaccccgacgtggccgagctgttcttcaaggacgaccccgagaagctgttcagcgacctgagagagatcggccacggcagcttcggcgccgtgtacttcgccagagacgtgagaaacagcgaggtggtggccatcaagaagatgagctacagcggcaagcagagcaacgagaagtggcaggacatcatcaaggaggtgagattcctgcagaagctgagacaccccaacaccatccagtacagaggctgctacctgagagagcacaccgcctggctggtgatggagtactgcctgggcagcgccagcgacctgctggaggtgcacaagaagcccctgcaggaggtggagatcgccgccgtgacccacggcgccctgcagggcctggcctacctgcacagccacaacatgatccacagagacgtgaaggccggcaacatcctgctgagcgagcccggcctggtgaagctgggcgacttcggcagcgccagcatcatggcccccgccaacagcttcgtgggcaccccctactggatggcccccgaggtgatcctggccatggacgagggccagtacgacggcaaggtggacgtgtggagcctgggcatcacctgcatcgagctggccgagagaaagccccccctgttcaacatgaacgccatgagcgccctgtaccacatcgcccagaacgagagccccgtgctgcagagcggccactggagcgagtacttcagaaacttcgtggacagctgcctgcagaagatcccccaggacagacccaccagcgaggtgctgctgaagcacagattcgtgctgagagagagaccccccaccgtgatcatggacctgatccagagaaccaaggacgccgtgagagagctggacaacctgcagtacagaaagatgaagaagatcctgttccaggaggcccccaacggccccggcgccgaggcccccgaggaggaggaggaggccgagccctacatgcacagagccggcaccctgaccagcctggagagcagccacagcgtgcccagcatgagcatcagcgccagcagccagagcagcagcgtgaacagcctggccgacgccagcgacaacgaggaggaggaggaggaggaggaggaggaggaggaggaggaggagggccccgaggccagagagatggccatgatgcaggagggcgagcacaccgtgaccagccacagcagcatcatccacagactgcccggcagcgacaacctgtacgacgacccctaccagcccgagatcacccccagccccctgcagccccccgccgcccccgcccccaccagcaccaccagcagcgccagaagaagagcctactgcagaaacagagaccacttcgccaccatcagaaccgccagcctggtgagcagacagatccaggagcacgagcaggacagcgccctgagagagcagctgagcggctacaagagaatgagaagacagcaccagaagcagctgctggccctggagagcagactgagaggcgagagagaggagcacagcgccagactgcagagagagctggaggcccagagagccggcttcggcgccgaggccgagaagctggccagaagacaccaggccatcggcgagaaggaggccagagccgcccaggccgaggagagaaagttccagcagcacatcctgggccagcagaagaaggagctggccgccctgctggaggcccagaagagaacctacaagctgagaaaggagcagctgaaggaggagctgcaggagaaccccagcacccccaagagagagaaggccgagtggctgctgagacagaaggagcagctgcagcagtgccaggccgaggaggaggccggcctgctgagaagacagagacagtacttcgagctgcagtgcagacagtacaagagaaagatgctgctggccagacacagcctggaccaggacctgctgagagaggacctgaacaagaagcagacccagaaggacctggagtgcgccctgctgctgagacagcacgaggccaccagagagctggagctgagacagctgcaggccgtgcagagaaccagagccgagctgaccagactgcagcaccagaccgagctgggcaaccagctggagtacaacaagagaagagagcaggagctgagacagaagcacgccgcccaggtgagacagcagcccaagagcctgaaggagagaagcatcgtgggccaggaggaggccggcacctggagcctgtggggcaaggaggacgagagcctgctggacgaggagttcgagctgggctgggtgcagggccccgccctgacccccgtgcccgaggaggaggaggaggaggaggagggcgcccccatcggcacccccagagaccccggcgacggctgccccagccccgacatcccccccgagcccccccccacccacctgagaccctgccccgccagccagctgcccggcctgctgagccacggcctgctggccggcctgagcttcgccgtgggcagcagcagcggcctgctgcccctgctgctgctgctgctgctgcccctgctggccgcccagggcggcggcggcctgcaggccgccctgctggccctggaggtgggcctggtgggcctgggcgccagctacctgctgctgtgcaccgccctgcacctgcccagcagcctgttcctgctgctggcccagggcaccgccctgggcgccgtgctgggcctgagctggagaagaggcctgatgggcgtgcccctgggcctgggcgccgcctggctgctggcctggcccggcctggccctgcccctggtggccatggccgccggcggcagatgggtgagacagcagggccccagagtgagaagaggcatcagcagactgtggctgagagtgctgctgagactgagccccatggccttcagagccctgcagggctgcggcgccgtgggcgacagaggcctgttcgccctgtaccccaagaccaacaaggacggcttcagaagcagactgcccgtgcccggccccagaagaagaaaccccagaaccacccagcaccccctggccctgctggccagagtgtgggtgctgtgcaagggctggaactggagactggccagagccagccagggcctggccagccacctgcccccctgggccatccacaccctggccagctggggcctgctgagaggcgagagacccaccagaatccccagactgctgcccagaagccagagacagctgggcccccccgccagcagacagcccctgcccggcaccctggccggcagaagaagcagaaccagacagagcagagccctgcccccctggagatag

SEQ ID NO: 88110 - DNA, 3369 bp, Artificial Sequence
  derived and/or modified sequence
atgcccgccggtgggcgcgctggctctctcaaggatcctgatgtggccgaattgttctttaaggacgatccagagaaattattcagtgaccttcgtgagattggccacggctccttcggtgcggtgtacttcgccagagacgttcgaaactccgaagtggtggcaataaagaaaatgtcatatagcggtaagcagtccaacgagaagtggcaagacattattaaggaggtgcggttcttgcagaagctccgtcaccctaacaccatccagtaccgaggctgctatttgcgagagcacaccgcgtggttggtcatggaatattgcctgggctcagcgagtgacctgctggaggtacacaagaagcccctgcaggaggtcgagatcgcggcagtaactcacggggcgcttcaggggctggcttacctccacagccacaacatgatccatcgggatgtcaaagcagggaatattctcctgagcgagcctggcctggttaaactgggcgactttggctcagcctcaatcatggccccagctaatagctttgtgggtactccctattggatggcaccggaagttattctggccatggatgaaggccagtacgacggcaaagtcgacgtgtggagcctcggcatcacatgtatcgagttggcggagagaaaacctcctttgttcaacatgaacgcgatgagtgcactttatcacatcgctcaaaacgaatccccagtgctgcagagcggccactggtcagagtactttcgaaacttcgtggactcttgtcttcagaagatcccccaagacaggcccacatccgaagtgctcctgaagcatagatttgtgctgagggagcggccgccaactgtgattatggacctgatccagcggacaaaagatgcagttcgggagctggacaatctgcagtaccggaaaatgaaaaagatcctgtttcaagaggctcctaacgggcccggcgccgaagcccctgaggaagaggaggaggcagagccttatatgcacagggcagggacgttgactagcttagagagtagccactcggttcccagcatgtcaatttcagcctcgtctcagtcttcatcagtgaattctctagccgacgcatcagacaatgaagaggaggaagaggaggaagaagaggaggaagaagaggaagaaggccctgaggctagggagatggctatgatgcaagagggggaacatacggtaacaagccattcttcaatcatacaccgtctcccaggctctgataacctctatgatgacccttatcagcctgagattactcccagtccacttcaacctcccgccgcccctgccccaacttcaacgacatcctcggctcgccgacgggcatattgccggaatagggaccattttgcgacaatccgcactgcttctctcgtgagccggcagatccaagagcatgaacaggatagtgccttgcgagagcaactctccggatacaagcggatgaggagacagcaccaaaagcagctcctggccctggagtctcgcttgcggggtgaacgagaggagcatagcgcccgtctgcaacgcgaacttgaagcccagagggcaggatttggcgcagaagccgagaaactggcacgaaggcaccaagctattggggaaaaggaggccagagccgcgcaggcggaggaacgcaagttccagcagcacatactgggccaacagaagaaagaactagccgccctcctggaggcccagaagaggacatacaagctccgcaaagagcaactgaaggaggaactccaggagaatccatccactccaaagcgcgaaaaggctgagtggcttcttcgacagaaggaacagctccaacaatgtcaggcggaggaggaagccggcctgctgcgcaggcagcgccagtactttgaactgcagtgtaggcagtacaaacgcaagatgttgctggcccgccattccctggaccaggatttacttcgagaggatctcaacaaaaaacagacgcagaaagacttagaatgtgctttgttattacgccagcatgaagcaaccagagaacttgagctccggcagctccaggcagttcagcgtacaagagctgaactcactagactccaacatcaaacggagctggggaatcaattagagtacaataagaggcgcgagcaggagctgagacaaaaacacgcagcccaggtcagacagcagcccaagtccttgaaggaaaggtctatcgttggacaggaggaagctgggacgtggagcctgtggggtaaagaagatgagtccttactggatgaggagtttgagttgggctgggtccagggcccagcccttacacccgtaccggaagaagaggaggaggaggaggagggggcacctatcgggacaccacgcgaccctggggacggctgtccatcacccgatatcccccctgaaccaccacctacacaccttcgcccatgccctgcttcacaactacccggcctcttgtcccatggcctacttgctggcctgtcgtttgctgtgggatcctccagcggcctgctgccactcctgctcctgttgctgctgcctttactggctgctcaggggggggggggcctgcaagccgccttacttgccctcgaagtagggctggttgggctgggggccagctacctgctattgtgcaccgctctgcaccttccgtcctcattgtttctgcttctcgctcagggtacagcactgggtgccgtactcggcctgagctggcgaagaggcctgatgggcgttccactggggctcggcgccgcctggctgctggcctggcctggacttgcattgcccttggttgccatggcagccggaggacgctgggtccggcagcagggaccacgggtgaggcggggaattagtcggctgtggctgcgcgtgctgttgcggctgtcccctatggcgtttcgggcattgcaaggatgtggagctgtgggcgatagaggtctctttgccctgtacccaaagacaaacaaggacggattcaggtcccggctacccgtcccagggccccgaagacgcaatccccggacaacccagcatcccttagcactcctagccagagtgtgggttctctgcaagggttggaactggcgcctggcaagggcatcccaagggttggcctcccacctccccccctgggccattcatacgcttgctagttggggactgctgcgtggcgagagaccaactagaatcccacggttactccctcgctctcagcggcagttgggccccccggcctcaaggcagccattaccaggtactctcgctggtaggagatccagaacaagacaaagtcgcgccctgccaccttggcggtag

SEQ ID NO: 88111 - DNA, 3369 bp, Artificial Sequence
  derived and/or modified sequence
atgcctgctgggggccgggccggcagcctgaaggaccctgatgtggccgagctgttcttcaaggatgatcctgagaagctgttcagtgacctgcgggagatcggccacggcagctttggagctgtgtactttgccagagatgtgagaaattctgaggtggtggccatcaagaagatgagctacagcggcaagcagagcaatgagaagtggcaggacatcatcaaggaggtgcgcttcctgcagaagctgcggcaccccaacaccatccagtaccggggctgctacctgcgggagcacacagcctggctggtgatggagtactgcctgggcagcgccagtgacctgctggaggtgcacaagaagcccctgcaggaggtggagattgctgctgtgacccatggagccctgcagggcctggcctacctgcacagccacaacatgatccacagagatgtgaaggccggcaacatcctgctgtctgagcccggcctggtgaagctgggggactttggcagcgccagcatcatggccccagccaacagctttgtgggcaccccctactggatggcccctgaggtgatcctggccatggatgagggccagtatgatggcaaggtggatgtgtggagcctgggcatcacctgcatcgagctggccgagaggaagcccccactcttcaacatgaatgccatgtctgccctgtaccacatcgcccagaatgaaagccctgtgctgcagagcggccactggagcgagtacttcaggaactttgtggacagctgcctgcagaagatcccccaggaccggcccaccagcgaggtgctgctgaagcacagatttgtgctgcgggagcggccccccaccgtcatcatggacctgatccagaggaccaaggatgctgtgcgggagctggacaacctgcagtacaggaagatgaagaagatcctcttccaggaggcccccaacggccctggagctgaggcccctgaggaggaggaggaggccgagccctacatgcaccgggccggcaccctgaccagcctggagagcagccacagcgtgcccagcatgagcatcagcgccagcagccagagcagctctgtgaacagcctggctgatgccagtgacaatgaggaggaggaggaggaggaggaggaggaggaggaggaggaggagggccctgaggcccgggagatggccatgatgcaggagggggagcacacagtgaccagccacagcagcatcatccaccggctgcccggcagtgacaacctgtatgatgacccctaccagcctgagatcacccccagccccctgcagcccccagctgccccagcccccaccagcaccaccagcagcgcccggcggcgggcctactgcaggaacagagaccactttgccaccatcagaacagccagcctggtgtcccggcagatccaggagcacgagcaggacagcgccctgcgggagcagctgagcggctacaagaggatgaggcggcagcaccagaagcagctgctggccctggagagccggctgcggggggagcgggaggagcacagcgcccggctgcagcgggagctggaggcccagagagctggctttggagctgaggccgagaagctggcccggcggcaccaggccatcggggagaaggaggcccgggccgcccaggccgaggagaggaagttccagcagcacatcctgggccagcagaagaaggagctggccgccctgctggaggcccagaagaggacctacaagctgaggaaggagcagctgaaggaggagctgcaggagaaccccagcacccccaagcgggagaaggccgagtggctgctgcggcagaaggagcagctgcagcagtgccaggccgaggaggaggccggcctgctgcggcggcagaggcagtactttgagctgcagtgccggcagtacaagaggaagatgctgctggcccggcacagcctggaccaggacctgctgcgggaggacctgaacaagaagcagacccagaaggacctggagtgtgccctgctgctgcggcagcacgaggccacccgggagctggagctgcggcagctgcaggccgtgcagaggaccagggctgagctgacccggctgcagcaccagacagagctgggcaaccagctggagtacaacaagagaagagagcaggagctgcggcagaagcatgctgcccaggtgcggcagcagcccaagagcctgaaggagaggagcatcgtgggccaggaggaggccggcacctggagcctgtggggcaaggaggatgagagcctgctggatgaggagtttgagctgggctgggtgcagggccctgccctgacccctgtgcctgaggaggaggaggaggaggaggagggcgcccccatcggcaccccccgggaccctggagatggctgccccagcccagacatccccccagagcccccacccacccacctgcggccctgcccagccagccagctgcccggcctgctgagccacggcctgctggccggcctgagctttgctgtgggcagcagcagcggcctgctgcccctgctgctgctgctgctgctgcccctgctggccgcccagggcggcggcggcctgcaggccgccctgctggccctggaggtgggcctggtgggcctgggcgccagctacctgctgctgtgcacagccctgcacctgcccagcagcctcttcctgctgctggcccagggcacagccctgggcgctgtgctgggcctgtcctggaggcggggcctgatgggcgtgcccctgggcctgggcgccgcctggctgctggcctggccaggcctggccctgcccctggtggccatggccgccggcggccgctgggtgcggcagcagggcccccgggtgagaagaggcatcagccggctgtggctgcgggtgctgctgcggctgagccccatggccttccgggccctgcagggctgtggggctgtgggggaccggggcctgtttgccctgtaccccaagaccaacaaggatggcttccgcagccggctgcctgtgcccggccccaggagaagaaaccccaggaccacccagcaccccctggccctgctggcccgggtgtgggtgctgtgcaagggctggaactggaggctggcccgggccagccagggcctggccagccacctgcccccctgggccatccacaccctggcctcctggggcctgctgcggggggagcggcccacccgcatcccccggctgctgcccaggagccagaggcagctgggccccccagccagccggcagcccctgcccggcaccctggccggccgccgcagcaggacccggcagagccgggccctgcccccctggaggtag

SEQ ID NO: 88112 - DNA, 3369 bp, Artificial Sequence
  derived and/or modified sequence
atgcccgccggcggccgggccggcagcctgaaggaccccgacgtggctgaactgttcttcaaggacgatcccgagaagctgttctctgatctgcgagaaattggacacggctcctttggtgcagtgtattttgctagagacgtgcgaaattctgaggtggtggctattaagaagatgtcatatagtggcaagcagtcaaacgagaagtggcaggatataattaaggaagtgagatttctccagaaattgcggcacccgaatacaatccagtaccgcggctgctacctcagggaacacaccgcctggttggtgatggaatattgtctgggttctgcttcggacctgttagaagtgcacaaaaagccactgcaagaggtggagatcgccgcagtgactcatggggctcttcaagggctcgcgtatctgcacagccataacatgatccatcgagacgtgaaggctgggaatatcctgctgtccgaacctggactcgttaaattgggggacttcggaagtgcatcaatcatggcccccgcgaattcctttgtagggaccccttattggatggctccagaggttattctggccatggacgaaggtcagtacgacggaaaggtcgatgtgtggtcattaggaataacatgcattgaactggcagaacggaagccgcctttgttcaatatgaatgccatgagtgctctctaccatatagcccagaacgaaagtcccgtgctacagagcggccattggtctgaatattttaggaatttcgtcgattcttgcctgcaaaagatcccccaggacagaccgacgtccgaggtgctgctcaagcatcgcttcgttctcagggagaggccacctaccgtgataatggacctgatacagcggacaaaggatgcggtgcgtgagctggataatctgcaatacagaaagatgaaaaagattctcttccaggaggctcctaacggcccaggggccgaagcacccgaggaagaggaagaggccgaaccatatatgcaccgggcaggaacactcacttccctggagtcatcccattcagtcccatctatgagtatcagtgccagtagccagagttcttccgtcaactccctggccgacgcaagcgacaatgaagaggaggaagaggaagaagaagaggaagaggaagaggaggaaggccctgaagcccgcgagatggcaatgatgcaagagggcgaacacactgtaacttctcattcctccattatccacaggctgcctgggagtgacaacttgtacgacgatccttatcagccagagattacgccctccccactgcagccacccgctgctcctgcccccacaagcactacaagttcagccagacgacgagcctattgcagaaatagggatcactttgctacaattcgaaccgcctccttagtctccaggcagattcaggaacatgaacaggactccgctcttcgcgagcagctgtctggttacaaaagaatgcggcggcaacatcagaagcagctcttggctctggagtcaaggctccgaggtgagagggaggagcacagcgctaggctgcagcgggaacttgaggcccagcgcgctggtttcggtgcagaggctgaaaagcttgcccggaggcatcaggcgattggcgaaaaggaggcccgcgccgcccaggcagaagagcgaaagtttcagcagcacattctgggacagcagaagaaggaactggctgctctgctggaggcgcagaaacgcacatacaaacttcgcaaagagcaattaaaagaagagcttcaggagaatccatctacaccaaaaagggagaaagcagaatggctgctgagacagaaggagcagttgcagcagtgccaggccgaggaagaagcgggacttctgcggcgccagcgccagtattttgaattgcagtgtcggcagtacaagcgtaagatgttgctggctcgccatagtttggaccaggacctgttgagagaagacctcaacaagaaacagacccagaaagacctggagtgtgccctgttgcttcggcaacatgaagccacacgagaattggagctcaggcaattacaagccgtccagcgaacgcgcgcggaactcacaaggttgcagcaccagacggaactaggaaaccagcttgaatataataaacgccgagagcaggagttgcggcaaaagcatgccgcacaggtgagacagcagcctaaatccctgaaagaacgctcaattgtcgggcaggaagaagcaggaacgtggagcctgtggggaaaggaggacgaatccttgctcgacgaggaatttgagttaggctgggttcaggggcccgctctgaccccagtgcctgaggaggaagaggaggaagaagaaggagcccccatagggaccccaagggatcccggagacggctgcccctcgcccgacatcccacctgagcctccccctacacacctgagaccgtgtcccgcatctcagcttccaggtctcctctcccacggcctgttggccggcttatcattcgccgtgggctccagtagcggcctgctgcccttattgctgttgctccttcttcctcttctcgctgcccaaggcggcggcggtcttcaggccgccttactcgcacttgaagttggactggtagggctaggggcaagctatctcctactctgcacggccctgcaccttccaagttctctcttcctacttctggcacagggcactgctctgggtgccgtgctcgggctgtcttggagacgcggccttatgggtgtccccctggggctaggcgctgcttggctcctggcttggccagggctggcccttccactagtggccatggccgcaggtggccggtgggtgcggcagcaggggcctcgcgtgcgacggggaatcagccgactttggttaagggttttactgaggctgtctcctatggcgttccgggcactgcaagggtgcggagccgtcggggatcgaggactgtttgccctgtatccaaaaacaaacaaggatggtttcaggtcccggttgccggttccgggtccacggcggcgtaatcctagaactacccagcacccgctcgccctcctggccagagtctgggtgctctgcaaaggttggaattggcgcctcgcgagagcttctcaaggtctggcatcacacctgccaccttgggccatccacacgctggcttcctggggcttactgaggggagaacgccctacacgtataccccgcctgctgcctagaagccaaagacaactgggcccccccgccagtcgccaacctttaccgggaacgttagcagggcggcggagtagaaccagacagagtcgcgctctgcccccctggagatag

SEQ ID NO: 88113 - DNA, 3369 bp, Artificial Sequence
  derived and/or modified sequence
atgcccgcaggtggcagagccggttcattgaaagatcctgacgtagctgagctgtttttcaaggatgatccagaaaagcttttttctgacttgagggaaattggccacgggtccttcggcgctgtatactttgccagagacgtgaggaacagcgaggtggttgcgatcaaaaaaatgtcctatagcgggaaacagagtaacgagaaatggcaggacatcatcaaagaagtgaggttcttacaaaagttgcggcaccccaatacgatccaatacagagggtgctatcttcgggagcacactgcctggctggtcatggagtattgtctcggcagtgcctccgacctgctcgaggtgcacaagaaacccctgcaagaagtagagatcgccgctgtgacacacggtgcgctgcagggcctcgcatacttgcactcccacaatatgatacaccgagacgtgaaagctgggaacattctgttgagcgagcccggtctcgtgaaactaggcgactttgggagtgccagcatcatggcaccagctaacagctttgtggggaccccttactggatggccccagaagtgatactggcaatggatgagggccagtatgatggaaaggtggacgtgtggtcactgggaattacctgcatcgaattggccgaaaggaaacccccactgtttaatatgaacgccatgtccgccctctatcatatcgcccaaaatgagagtccggttctgcagagcggtcattggagtgagtatttccgcaactttgttgattcttgcctccagaagattccacaagaccgtcccacatcagaagtgctcctgaagcacaggttcgtcctccgtgaaaggcctcctacggttattatggatctgatccagaggaccaaggacgctgtaagagaactcgacaacttgcaatatagaaaaatgaaaaaaatcctgttccaggaggccccaaacgggccaggggcagaggcacccgaggaggaagaagaggccgagccgtatatgcatagagccggaaccctcaccagcctcgagagtagtcactctgtgcccagcatgtctatctctgctagctcccagagtagttcagttaatagcttagctgatgcttcagataatgaggaagaagaagaagaggaggaggaggaggaggaggaggaggagggcccagaagctagagaaatggctatgatgcaggagggggagcatacagtcaccagtcatagctccatcatccacagactcccaggcagtgacaacctgtacgatgacccttaccagcccgagattacgcccagccctttacagcccccagctgcacctgccccaacttccactacctcttccgcacggaggagggcctattgtaggaatagagatcacttcgccacaattcgaaccgctagtttggtttcccgacagattcaagagcacgaacaagattctgctctgagagaacagctctcggggtataaaagaatgcgtcgacagcaccagaagcagctccttgccctggaatcaagattgcgtggagaacgtgaggagcacagtgcaagactgcagcgcgagctggaggcccaacgtgccggattcggcgcagaagccgagaaactagcaagacggcatcaggcaattggggagaaagaagctagagcagcccaggccgaagaacggaagttccagcaacatattttgggccagcagaagaaggagttagctgctctgctcgaggcccagaagcgtacatataaactgcggaaagagcagctcaaggaggagctccaggaaaatccctctacccccaagagagagaaagcagagtggcttctccgacaaaaggaacagctgcaacagtgtcaggctgaggaggaggctggcttgttgcgcaggcagagacaatattttgaattgcaatgccgccagtacaaacggaagatgctgctggctaggcacagcctggatcaagaccttttgagagaagatttgaacaaaaaacaaacgcagaaggatctggagtgcgccctcctgctgcgccagcacgaagcaactcgggagttggaactgcggcagttgcaggcagtccagcgaactagggctgagctgacccgattgcagcatcagaccgagctgggtaatcagttggaatacaataaacgacgtgagcaggagctccgtcaaaagcatgcagcccaggttaggcaacagcctaagagcctcaaagaaaggagcatcgtgggccaagaagaggcgggaacctggagcttatggggaaaggaggacgagagtctgttggacgaggagttcgaattgggttgggtgcaagggcctgctctgacccctgtgccagaagaagaagaagaggaggaggagggcgctccaatcggcacccccagggaccccggagacggttgcccaagccctgatattccccctgagccacctcccactcacctgcgtccctgtcccgcatcacagcttccagggctcctatcacacgggttactggcaggactatccttcgcagtcgggagctcttcaggtctgctgccactgctgctgctcctgctgttaccccttctcgcagcccagggaggtggaggtctacaggccgcacttctggccttagaagtcggcttggtgggactgggggcttcataccttcttctgtgcacagcattgcatctcccatcctctcttttcttgcttctggctcagggaaccgcccttggcgctgtgctcggcctctcatggagaaggggcctgatgggtgttcctcttggtctaggagccgcttggctgctggcctggcccggactggctctgcctctggtggctatggccgctggaggccgttgggtcaggcagcagggccctcgtgtgcgaagagggatctccagactgtggctccgcgttttgttgaggctttctcctatggcattcagagccctgcagggctgtggagccgtcggggaccgtgggctcttcgccctataccctaagactaataaagacggcttcaggtctcgcctgcccgtgccaggcccacgtcgccgtaaccccaggactacacagcaccctctcgcactcctcgcacgggtatgggtgctctgtaagggctggaactggcgtctcgctagggcaagccagggcctggcaagccaccttccaccatgggccattcacacactcgcatcttggggacttctgcggggagagagaccgactcggatcccacggttgctgcccagatcacaaagacagttgggtcccccagcatcccgccagcctctgccaggaacactggctgggagaaggagtcgcactcggcagtcccgcgctctgccaccctggcgatag

SEQ ID NO: 88114 - DNA, 4072 bp, Artificial Sequence
  derived and/or modified sequence
tgcccctcctcctttctcagatacccgggtaacagtcctcatagtccagatatccgggactcgggtcccaacctctctaaacctgggtctctgtttcatagaatttcaaatatcaggttcaggcccctgcgtgcaccagtatccggggttcattccccgggcgttcaaatatcggattcagtctccatcccgttcagatattcggggttcagaccccacaatcagaaatccggaattcggcagctgtcgccctcgacgagggggaggactggaccgcgaggtcagattaggttgtcaccccctcccctccaggggaggcttcccgggcccgcccctcaggaagggcgaaagccgaggaagaggtggcaaggggaaaggtctccttgcccctctccctgcttggcagagccgctggaggaccccaggcggaagcggaggcgctggggcaccatagtgacccctaccaggccaggccccactctcagggcccccaggggccaccatgccagctgggggccgggccgggagcctgaaggacccagatgtggctgagctcttcttcaaggatgacccagaaaagctcttctctgacctccgggaaattggccatggcagctttggagccgtatactttgcccgggatgtccggaatagtgaggtggtggccatcaagaagatgtcctacagtgggaagcagtccaatgagaaatggcaagacatcatcaaggaggtgcggttcttacagaagctccggcatcccaacaccattcagtaccggggctgttacctgagggagcacacggcttggctggtaatggagtattgcctgggctcagcttctgaccttctagaagtgcacaagaaaccccttcaggaggtagagatcgcagctgtgacccacggggcgcttcagggcctggcatatctgcactcccacaacatgatccatagggatgtgaaggctggaaacatcctgctgtcagagccagggttagtgaagctaggggactttggttctgcgtccatcatggcacctgccaactccttcgtgggcaccccatactggatggcacccgaggtgatcctggccatggatgaggggcagtacgatggcaaagtggacgtctggtccttggggataacctgcatcgagctggctgaacggaaaccaccgctctttaacatgaatgcgatgagtgccttataccacattgcacagaacgaatcccccgtgctccagtcaggacactggtctgagtacttccggaattttgtcgactcctgtcttcagaaaatccctcaagacagaccaacctcagaggttctcctgaagcaccgctttgtgctccgggagcggccacccacagtcatcatggacctgatccagaggaccaaggatgccgtgcgggagctggacaacctgcagtaccgcaagatgaagaagatcctgttccaagaggcacccaacggccctggtgccgaggccccagaggaggaagaggaggccgagccctacatgcaccgggccgggactctgaccagcctcgagagtagccactcagtgcccagcatgtccatcagcgcctccagccagagcagctccgtcaacagcctagcagatgcctcagacaacgaggaagaggaggaggaggaggaggaagaggaggaggaggaagaaggccctgaagcccgggagatggccatgatgcaggagggggagcacacagtcacctctcacagctccattatccaccggctgccgggctctgacaacctatatgatgacccctaccagccagagataacccccagccctctccagccgcctgcagccccagctcccacttccaccacctcttccgcccgccgccgggcctactgccgtaaccgagaccactttgccaccatccgaaccgcctccctggtcagccgtcagatccaggagcatgagcaggactctgcgctgcgggagcagctgagcggctataagcggatgcgacgacagcaccagaagcagctgctggccctggagtcacggctgaggggtgaacgggaggagcacagtgcacggctgcagcgggagcttgaggcgcagcgggctggctttggggcagaggcagaaaagctggcccggcggcaccaggccataggtgagaaggaggcacgagctgcccaggccgaggagcggaagttccagcagcacatccttgggcagcagaagaaggagctggctgccctgctggaggcacagaagcggacctacaaacttcgcaaggaacagctgaaggaggagctccaggagaaccccagcactcccaagcgggagaaggccgagtggctgctgcggcagaaggagcagctccagcagtgccaggcggaggaggaagcagggctgctgcggcggcagcgccagtactttgagctgcagtgtcgccagtacaagcgcaagatgttgctggctcggcacagcctggaccaggacctgctgcgggaggacctgaacaagaagcagacccagaaggacttggagtgtgcactgctgcttcggcagcacgaggccacgcgggagctggagctgcggcagctccaggccgtgcagcgcacgcgggctgagctcacccgcctgcagcaccagacggagctgggcaaccagctggagtacaacaagcggcgtgagcaagagttgcggcagaagcatgcggcccaggttcgccagcagcccaagagcctcaaagagaggagcattgttggccaggaggaggctgggacatggagcttgtgggggaaggaggatgagagtcttctggatgaggagtttgagcttggctgggtccagggcccagcactgactcccgtccctgaggaggaggaagaagaggaagagggggctccgattgggacccctagggatcctggagatggttgtccttcccccgacatccctcctgaaccccctccaacacacctgaggccctgccctgccagccagctccctggactcctgtcccatggcctcctggccggcctctcctttgcagtggggtcctcctctggcctcctgcccctcctgctgctgctgctgcttccattgctggcagcccagggtgggggtggcctgcaggcagcgctgctggcccttgaggtggggctggtgggtctgggggcctcctacctgctcctttgtacagccctgcacctgccctccagtcttttcctactcctggcccagggtaccgcactgggggccgtcctgggcctgagctggcgccgaggcctcatgggtgttcccctgggccttggagctgcctggctcttagcttggccaggcctagctctacctctggtggctatggcagcggggggcagatgggtgcggcagcagggcccccgggtgcgccggggcatatctcgactctggttgcgggttctgctgcgcctgtcacccatggccttccgggccctgcagggctgtggggctgtgggggaccggggtctgtttgcactgtaccccaaaaccaacaaggatggcttccgcagccgcctgcccgtccctgggccccggcggcgtaatccccgcaccacccaacacccattagctctgttggcaagggtctgggtcctgtgcaagggctggaactggcgtctggcacgggccagccagggtttagcatcccacttgcccccgtgggccatccacacactggccagctggggcctgcttcggggtgaacggcccacccgaatcccccggctactaccacgcagccagcgccagctagggccccctgcctcccgccagccactgccagggactctagccgggcggaggtcacgcacccgccagtcccgggccctgcccccctggaggtagctgactccagcccttccagcccaaatctagagcattgagcactttatctcccacgactcagtgaagtttctccagtccctagtcctctcttttcacccaccttcctcagtttgctcacttaccccaggcccagcccttcggacctctagacaggcagcctcctcagctgtggagtccagcagtcactctgtgttctcctgg

SEQ ID NO: 88115 - protein, 286 aa, Artificial Sequence
  derived and/or modified sequence
MPGARSGGSGGDGSNSGSYSGDASGAVTVWEVVSLLGKLLGTVVALKVVLYLLRVCLAMAWKSGGASHSELIHNLRKNGIIKTDKVFEVMLATDRSHYAKCNPYMDSPQSIGFQATISAPHMHAYALELLFDQLHEGAKALDVGSGSGILTACFARMVGCTGKVIGIDHIKELVDDSVNNVRKDDPTLLSSGRVQLVVGDGRMGYAEEAPYDAIHVGAAAPVVPQALIDQLKPGGRLILPVGPAGGNQMLEQYDKLQDGSIKMKPLMGVIYVPLTDKEKQWSRDEL

SEQ ID NO: 88116 - DNA, 861 bp, Artificial Sequence
  derived and/or modified sequence
atgcctggagcccgttcaggcggctccggaggggatggctctaattcaggctcttactctggagacgcaagcggggcggtcactgtctgggaggtcgttagcctgctgggcaaactcctgggcaccgtggtcgcactcaaggtcgttctgtatttgctcagggtgtgtcttgctatggcctggaaatccggaggggcaagccacagcgagctgatacacaatctcaggaagaatgggatcatcaaaactgataaagtgtttgaggtgatgctggccactgataggagtcattatgctaagtgtaacccatacatggactctccacaatctattggctttcaggcaactatctcagccccgcacatgcatgcttatgctctggagctgctgttcgaccagctgcacgaaggcgccaaggcgctcgatgttggctctgggagcggcatccttacggcgtgctttgcccgtatggttggctgcacaggaaaggtgattggcatcgaccacatcaaggagctcgtggacgattccgttaataatgttcgcaaagatgaccctacgctcctgagcagtgggcgtgtccagctggtggtgggagatggccgaatgggatacgccgaggaagccccatatgatgccattcacgttggcgcagccgctccagttgtgccccaggctttgatagatcagctgaagcctgggggtcggctgatactgccagttggccccgcaggcggaaatcagatgttagagcagtacgacaaactccaagatggcagtattaaaatgaagccattgatgggtgtgatctacgtgccgctgactgataaagaaaagcaatggagccgggacgaactgtag

SEQ ID NO: 88117 - DNA, 861 bp, Artificial Sequence
  derived and/or modified sequence
atgcctggggcccggagcggcggcagcggaggagatggcagcaacagcggcagctacagcggagatgccagcggggctgtgacagtgtgggaggtggtgtccctgctgggcaagctgctgggcaccgtggtggccctgaaggtggtgctgtacctgctgcgggtgtgcctggccatggcctggaagtctggaggagccagccacagcgagctgatccacaacctgaggaagaatggcatcatcaagacagacaaggtgtttgaggtgatgctggccacagacaggagccactacgccaagtgcaacccctacatggacagcccccagagcatcggcttccaggccaccatcagcgccccccacatgcacgcctatgccctggagctgctgtttgaccagctgcatgaaggagccaaggccctggatgtgggcagcggcagcggcatcctgacagcctgctttgccaggatggtgggctgcaccgggaaggtgattggaattgaccacatcaaggagctggtggatgattctgtgaacaacgtgaggaaggatgaccccaccctgctgagcagcggccgggtgcagctggtggtgggagatggccgcatgggctacgccgaggaggccccctatgatgccatccacgtgggcgctgctgcccctgtggtgccccaggccctgattgaccagctgaagccaggcggccgcctcatcctgcctgtgggccctgctgggggcaaccagatgctggagcagtatgacaagctgcaggacggcagcatcaagatgaagcccctgatgggcgtcatctacgtgcccctgacagacaaggagaagcagtggagcagagatgagctgtag

SEQ ID NO: 88118 - DNA, 861 bp, Artificial Sequence
  derived and/or modified sequence
atgcccggcgcccggagcggcggcagcggcggcgacggcagcaactctggttcctactcaggagatgccagcggagcagttacggtgtgggaggtcgtgtcactcctgggcaagctgctggggaccgtggtggcactcaaagtggttctgtacctgttgcgcgtttgtctggcaatggcttggaagagcgggggggcctcccacagtgaactgatacataatctcaggaagaatggtatcatcaagacagacaaagtgttcgaggtgatgttagcaactgaccgttcccactacgctaaatgcaatccatatatggactccccacagagcatcggcttccaagccactattagcgcaccccacatgcatgcatatgccctggaactcctcttcgatcagctccatgagggtgctaaggcgctggatgtgggaagcgggtctggcatactgaccgcctgcttcgctcgaatggttggttgcacaggcaaagtgatcggcatagatcacatcaaagagctggtggacgatagtgtgaataatgtccgcaaggatgatcccaccctattatccagcggcagagtccagcttgtcgtgggcgatggtcgcatggggtatgctgaggaagctccctatgacgccatccacgtcggcgctgccgcccctgtggtgccacaagcgctgatcgatcaactgaagcctggcggacgcctgatcttgcctgtgggccccgctggaggaaaccagatgttagaacagtatgacaaactccaggatggctccatcaaaatgaagcctcttatgggggtgatctacgtgccgcttacagacaaggaaaaacagtggtccagagacgagctgtag

SEQ ID NO: 88119 - DNA, 861 bp, Artificial Sequence
  derived and/or modified sequence
atgccaggagcacgcagcgggggtagcggcggagacggtagcaactcaggctcctatagcggggatgcctctggggctgttacagtctgggaggtagtatcactgctaggtaagctgttgggcacagttgttgctcttaaggtggtgctgtatctgctgcgtgtgtgcttggcgatggcatggaagtccggtggggcatcccacagcgagctcatccataatctgcgcaaaaatggcattatcaagacagacaaggtcttcgaggttatgcttgctaccgatagaagccattacgccaaatgcaacccttatatggactcaccgcagtcaatcgggttccaggccactatctccgctccccacatgcatgcttatgcactggaactgctattcgaccaactccatgaaggcgctaaggccttggacgttggctctggctccgggattttgacggcctgttttgccagaatggtgggatgtactgggaaagtgatcggaatcgaccacattaaggaactcgtggatgacagtgtgaataacgtgcggaaggacgatccaaccctgctgtcgtctggtagggttcagctggtggtaggagatgggaggatgggatatgccgaggaggccccatacgatgctatccacgtgggcgcagctgcaccagtggtgcctcaggctttaattgaccagcttaaaccgggaggaaggctgattctgccagtggggcctgccggagggaaccagatgttggaacagtacgataagctccaggatggatctatcaaaatgaagcccttgatgggcgttatctacgtacccctgactgataaggagaagcagtggagcagagacgagttatag

SEQ ID NO: 88120 - DNA, 1938 bp, Artificial Sequence
  derived and/or modified sequence
cccgccatcccgccgtcccgctcggtgaccggagacacagccgggaacgcgactgatcaggctaccgagccgggccgcagggcgaaagcggtgcggtccgaggcctcagaaagggacacgcagcagcggaagtggcgctgactcagcccggcctccctgcagtcccctggcagcggtagcagccacaggggcgggcggctgggccacacgcctcccccgccctcggccccacccggccgcaccctaagccgcgcggcgtcacagagcgcatgcgtgccgcgggggatgccgggagcgcgcagtggcggcagcggcggcgacggcagtaacagcggcagctacagcggggacgcgagcggggcggtgacggtgtgggaggtggtctcactcttgggaaaactgctgggcaccgtcgtcgcgctgaaggtggttctgtacctgctccgagtgtgcttagcgatggcctggaaatccggcggcgccagccactcggagctaatccacaatctccgcaaaaatggaatcatcaagacagataaagtatttgaagtgatgctggctacagaccgctcccactatgcaaaatgtaacccatacatggattctccacaatcaataggtttccaagcaacaatcagtgctccacacatgcatgcatatgcgctagaacttctatttgatcagttgcatgaaggagctaaagctcttgatgtaggatctggaagtggaatccttactgcatgttttgcacgtatggttggatgtactggaaaagtcataggaattgatcacattaaagagctagtagatgactcagtaaataatgtcaggaaggacgatccaacacttctgtcttcagggagagtacagcttgttgtgggggatggaagaatgggatatgctgaagaagccccttatgatgccattcatgtgggagctgcagcccctgttgtaccccaggcgctaatagatcagttaaagcccggaggaagattgatattgcctgttggtcctgcaggcggaaaccaaatgttggagcagtatgacaagctacaagatggcagcatcaaaatgaagcctctgatgggggtgatatacgtgcctttaacagataaagaaaagcagtggtccagggatgaattgtaaaagcaacatcagcttgaccagtataaaattacagtggattgctcatctcagtcctcaaagctttttgaaaaccaacaccatcacagcttgttttggactttgttacactgttattttcagcatgaaaatgtgtgtttttttagggtttctgattcttcaaagaggcacagagccaaattggtagaggaaggatgcaaagtataaatttgtgtaatattactttaacatgcccatattttacttggaaatattaaaagaaagggttctgtaaaatggaaaacttagtttgtgaattgattttgaggagtggtttttcttttcttggacacttaattctgttctgatattaatttatcagattgcttttgtgcattggataacaccaccattcacaagttaagattcttggtatttggatatctgttagatgctactaagaaaatagagatgagctttctttttaaagcttttgatgtggtgtcatagaatagcatgttgtagatacaatcagctgctttgttaccttaaaactaggcatttgtaaatattaaaccataagatggcaggtgatgtcctgtaaacactcagctgttcagattggacataactgacttagttcttcccttctctctctctcaaaattataggagacttgtagtttagtgtggttttctgtttctaatttgctgctgataatgtatatgaacttaacatgctgtgtaagctgtgtcctagttcttgaacagtttatgcagtgctgctttgccaaataaagttaaaagtaaaagaggc

SEQ ID NO: 88121 - DNA, 861 bp, Artificial Sequence
  derived and/or modified sequence
atgcccggcgccagaagcggcggcagcggcggcgacggcagcaacagcggcagctacagcggcgacgccagcggcgccgtgaccgtgtgggaggtggtgagcctgctgggcaagctgctgggcaccgtggtggccctgaaggtggtgctgtacctgctgagagtgtgcctggccatggcctggaagagcggcggcgccagccacagcgagctgatccacaacctgagaaagaacggcatcatcaagaccgacaaggtgttcgaggtgatgctggccaccgacagaagccactacgccaagtgcaacccctacatggacagcccccagagcatcggcttccaggccaccatcagcgccccccacatgcacgcctacgccctggagctgctgttcgaccagctgcacgagggcgccaaggccctggacgtgggcagcggcagcggcatcctgaccgcctgcttcgccagaatggtgggctgcaccggcaaggtgatcggcatcgaccacatcaaggagctggtggacgacagcgtgaacaacgtgagaaaggacgaccccaccctgctgagcagcggcagagtgcagctggtggtgggcgacggcagaatgggctacgccgaggaggccccctacgacgccatccacgtgggcgccgccgcccccgtggtgccccaggccctgatcgaccagctgaagcccggcggcagactgatcctgcccgtgggccccgccggcggcaaccagatgctggagcagtacgacaagctgcaggacggcagcatcaagatgaagcccctgatgggcgtgatctacgtgcccctgaccgacaaggagaagcagtggagcagagacgagctgtag

SEQ ID NO: 88122 - protein, 192 aa, Artificial Sequence
  derived and/or modified sequence
MAWKSGGASHSELIHNLRSFQATISAPHMHAYALELLFDQLHEGAKALDVGSGSGILTACFARMVGCTGKVIGIDHIKELVDDSVNNVRKDDPTLLSSGRVQLVVGDGRMGYAEEAPYDAIHVGAAAPVVPQALIDQLKPGGRLILPVGPAGGNQMLEQYDKLQDGSIKMKPLMGVIYVPLTDKEKQWSRWK

SEQ ID NO: 88123 - DNA, 579 bp, Artificial Sequence
  derived and/or modified sequence
atggcttggaagtcaggcggcgcctcccactcggagctcattcacaatctccgctcttttcaagccactatctcagctccccatatgcacgcctacgcccttgaactgttgttcgaccagctacatgaaggagccaaagccctggatgttgggtcagggtccggtattctgaccgcttgttttgcccggatggtcggctgcacaggaaaagtcattggcatcgatcatatcaaggagctggttgacgattctgtgaacaatgtgaggaaagacgacccgacgcttttaagttctgggagagtgcagctagtcgtcggcgatgggcggatgggctacgctgaggaagcaccttacgacgccattcacgttggagccgccgcgcctgtggtgccacaggcgctgatcgaccaactcaagccaggcggacggctcattctgccggtcggacccgccggtgggaatcagatgctggaacagtacgacaagctgcaagacgggtccatcaaaatgaagcccttgatgggagtgatctatgttccactcaccgacaaagaaaagcagtggagcaggtggaagtag

SEQ ID NO: 88124 - DNA, 579 bp, Artificial Sequence
  derived and/or modified sequence
atggcctggaagtctggaggagccagccacagcgagctgatccacaacctgcgctccttccaggccaccatcagcgccccccacatgcacgcctatgccctggagctgctgtttgaccagctgcacgagggcgccaaggccctggatgtgggcagcggcagcggcatcctgacagcctgctttgccaggatggtgggctgcaccgggaaggtgattggcatcgaccacatcaaggagctggtggatgacagcgtgaacaacgtgaggaaggatgaccccaccctgctgagcagcggccgggtgcagctggtggtgggagatggccgcatgggctatgcagaggaggccccctatgatgccatccacgtgggcgccgccgcccctgtggtgccccaggccctgattgaccagctgaagccaggcggccgcctcatcctgcctgtgggccctgctgggggcaaccagatgctggagcagtatgacaagctgcaggacggcagcatcaagatgaagcccctgatgggcgtcatctacgtgcccctgacagacaaggagaagcagtggagccgctggaagtag

SEQ ID NO: 88125 - DNA, 579 bp, Artificial Sequence
  derived and/or modified sequence
atggcctggaagagcggcggcgccagccacagcgagctgatccacaatctcaggtcctttcaggccaccattagcgctccacacatgcatgcctacgcgctggaactccttttcgatcagcttcatgaaggagctaaggctctggacgtggggagcggcagcggtatcctcactgcttgttttgccaggatggtggggtgcacaggcaaagtgataggtatagatcatatcaaagaacttgtggacgactcggtgaataatgtccggaaggatgacccaacattgctgagcagtggacgcgtacaactggtggttggggacgggcgaatgggctatgccgaagaggctccctatgacgccattcacgttggggccgctgcacccgtggtgccccaggcattaatcgatcagcttaagcccggaggccgattgatcctcccagtgggaccggctgggggaaaccagatgttggaacagtatgacaaactccaggacggctccatcaaaatgaaaccacttatgggagtcatctacgtgcccctgaccgacaaggagaagcagtggtctagatggaagtag

SEQ ID NO: 88126 - DNA, 579 bp, Artificial Sequence
  derived and/or modified sequence
atggcctggaagtcaggcggagcttcgcatagtgagcttattcacaaccttaggagctttcaggccaccattagtgcgcctcacatgcatgcatatgccttggaactcctttttgatcaactgcatgagggcgcaaaggcgctagacgtaggctccggctcggggattttgaccgcatgcttcgctcgtatggtaggctgcacgggaaaggtgattggaatcgaccacattaaggagctggtagatgacagcgtcaacaatgtgcgcaaagacgatcccactctgctgagttccggcagggtccagctcgtggttggcgatgggaggatgggctacgccgaggaagccccttatgatgctattcatgttggcgcagccgctcccgtcgtccctcaggcactcatcgatcaactgaagcctggcggtcgccttatcctgcccgtcggccctgcgggaggaaaccagatgttggaacagtacgataagttgcaagatggcagtatcaaaatgaagcctttgatgggagtcatttatgttccactcacggataaggagaagcagtggtctcgctggaagtag

SEQ ID NO: 88127 - DNA, 930 bp, Artificial Sequence
  derived and/or modified sequence
gcggcagctacagcggggacgcgagcggggcggtgacggtgtgggaggtggtctcactcttgggaaaactgctgggcaccgtcgtcgcgctgaaggtggttctgtacctgctccgagtgtgcttagcgatggcctggaaatccggcggcgccagccactcggagctaatccacaatctccgcagtttccaagcaacaatcagtgctccacacatgcatgcatatgcgctagaacttctatttgatcagttgcatgaaggagctaaagctcttgatgtaggatctggaagtggaatccttactgcatgttttgcacgtatggttggatgtactggaaaagtcataggaattgatcacattaaagagctagtagatgactcagtaaataatgtcaggaaggacgatccaacacttctgtcttcagggagagtacagcttgttgtgggggatggaagaatgggatatgctgaagaagccccttatgatgccattcatgtgggagctgcagcccctgttgtaccccaggcgctaatagatcagttaaagcccggaggaagattgatattgcctgttggtcctgcaggcggaaaccaaatgttggagcagtatgacaagctacaagatggcagcatcaaaatgaagcctctgatgggggtgatatacgtgcctttaacagataaagaaaagcagtggtccaggtggaagtgattttatcttctgctctttcttcttccacacatgcaagggatgaattgtaaaagcaacatcagcttgaccagtataaaattacagtggattgctcatctcagtcctcaaagctttttgaaaaccaacaccatcacagcttgttttggactttgttacactgttattttcagcatgaaaatgtgtgtttttttagggtttctgattcttcaaagaggcacagagc

SEQ ID NO: 88128 - DNA, 579 bp, Artificial Sequence
  derived and/or modified sequence
atggcctggaagagcggcggcgccagccacagcgagctgatccacaacctgagaagcttccaggccaccatcagcgccccccacatgcacgcctacgccctggagctgctgttcgaccagctgcacgagggcgccaaggccctggacgtgggcagcggcagcggcatcctgaccgcctgcttcgccagaatggtgggctgcaccggcaaggtgatcggcatcgaccacatcaaggagctggtggacgacagcgtgaacaacgtgagaaaggacgaccccaccctgctgagcagcggcagagtgcagctggtggtgggcgacggcagaatgggctacgccgaggaggccccctacgacgccatccacgtgggcgccgccgcccccgtggtgccccaggccctgatcgaccagctgaagcccggcggcagactgatcctgcccgtgggccccgccggcggcaaccagatgctggagcagtacgacaagctgcaggacggcagcatcaagatgaagcccctgatgggcgtgatctacgtgcccctgaccgacaaggagaagcagtggagcagatggaagtag

SEQ ID NO: 88129 - protein, 285 aa, Artificial Sequence
  derived and/or modified sequence
MPGARSGGSGGDGSNSGSYSGDASGAVTVWEVVSLLGKLLGTVVALKVVLYLLRVCLAMAWKSGGASHSELIHNLRKNGIIKTDKVFEVMLATDRSHYAKCNPYMDSPQSIGFQATISAPHMHAYALELLFDQLHEGAKALDVGSGSGILTACFARMVGCTGKVIGIDHIKELVDDSVNNVRKDDPTLLSSGRVQLVVGDGRMGYAEEAPYDAIHVGAAAPVVPQALIDQLKPGGRLILPVGPAGGNQMLEQYDKLQDGSIKMKPLMGVIYVPLTDKEKQWSRWK

SEQ ID NO: 88130 - protein, 227 aa, Artificial Sequence
  derived and/or modified sequence
MAWKSGGASHSELIHNLRKNGIIKTDKVFEVMLATDRSHYAKCNPYMDSPQSIGFQATISAPHMHAYALELLFDQLHEGAKALDVGSGSGILTACFARMVGCTGKVIGIDHIKELVDDSVNNVRKDDPTLLSSGRVQLVVGDGRMGYAEEAPYDAIHVGAAAPVVPQALIDQLKPGGRLILPVGPAGGNQMLEQYDKLQDGSIKMKPLMGVIYVPLTDKEKQWSRWK

SEQ ID NO: 88131 - DNA, 858 bp, Artificial Sequence
  derived and/or modified sequence
atgcccggtgccagaagcggaggctctggcggtgatggcagtaattctgggtcttacagtggggatgccagcggagccgtaactgtatgggaggtggtatctttgcttggaaagttgctgggcaccgtcgtggctttaaaggtggtgctttaccttctcagagtgtgtctggccatggcttggaagagcggcggagcaagtcatagcgaactcattcataatcttcggaagaacggaatcatcaaaacagacaaagtgttcgaggtcatgctagccacggatcggagccattacgcaaagtgcaacccatatatggacagtcctcagtcaatcggctttcaggctacgatttccgctccacacatgcacgcctatgccctggagctcttgtttgatcaactccatgaaggcgctaaagccctcgacgtgggcagcgggtctggcattttaaccgcttgcttcgcgaggatggtcgggtgtaccggcaaggtaatcggcatcgatcatatcaaggaactggttgacgactcggtgaacaatgtcaggaaggatgatcccaccttgctcagctcaggtcgcgtgcaattagtcgtaggggacggtagaatgggttatgctgaggaggctccctatgatgcaattcatgtgggagcggctgctcccgtggtgcctcaggctctgatcgaccagctgaaacccggtggcagactcatcctgccagtcggtccggccggcgggaatcagatgctggagcagtacgataaactgcaggacggatcaattaaaatgaaacctctgatgggcgtaatttatgtgccgctgaccgataaggaaaagcagtggtccagatggaagtag

SEQ ID NO: 88132 - DNA, 684 bp, Artificial Sequence
  derived and/or modified sequence
atggcttggaagtcaggtggagctagtcatagtgaattaattcataatctgcgcaagaacggaattatcaaaaccgacaaagtttttgaggttatgctggccactgaccgtagtcactacgccaagtgcaacccatatatggattcaccacagagcatcggcttccaagctacaataagtgcaccgcacatgcacgcatacgcactagaactgctctttgaccagttgcacgagggagctaaggccctggatgtcgggagcggtagcggaattctgacagcgtgcttcgccaggatggtcggatgtacaggaaaagttatcgggatagatcatattaaagagctcgtggatgactctgtaaacaatgtgagaaaagacgacccgaccctgctttcgtctgggcgagtgcaactggtcgtgggtgatgggcgaatgggatatgccgaagaggcgccatatgatgccatacatgttggggccgccgcaccagtcgtccctcaggcgctcattgatcagttaaagccgggcgggaggctgattctccctgttggcccagccggggggaatcagatgctggagcagtacgacaaactgcaggacggaagcatcaaaatgaagccactgatgggtgtaatttacgtccccttaaccgataaggagaaacagtggtcaagatggaaatag

SEQ ID NO: 88133 - DNA, 858 bp, Artificial Sequence
  derived and/or modified sequence
atgccgggcgccagatcaggaggatccgggggtgacgggagtaacagcggctcatattctggtgatgcctccggcgcggtgactgtgtgggaagttgtctccctgcttggaaaattgctggggaccgttgtcgctctgaaggtggttttgtatttattgcgggtctgtcttgcaatggcttggaagagtgggggcgcgtcacactccgagcttatccataatctccgtaaaaatggcattattaagactgacaaagtgtttgaggtgatgttggcgaccgatcgctctcactatgccaagtgtaacccctatatggactcacctcagagcattggttttcaggctaccatctcagcaccccatatgcacgcatatgctttggagctcctttttgatcagctgcacgaaggggcgaaggccctggacgtgggatccggatctggaatattaacagcctgtttcgcccggatggtggggtgcacagggaaggtgattgggattgaccacatcaaagagctcgtcgacgatagtgttaataatgtccggaaagacgatcccacactgctgagttcaggcagagtacagctggttgtgggtgacggaagaatgggctacgccgaggaggcaccgtacgacgctatccacgtaggagcagcggcacctgtggtgccccaggccctgatagatcagctgaagcctggtggcaggctgatactccccgtgggcccagcaggcgggaatcagatgcttgagcagtacgacaaattgcaagacggatccatcaagatgaaaccgctgatgggagttatctatgtacctctaacagataaggagaagcagtggtctcgatggaaatag

SEQ ID NO: 88134 - DNA, 858 bp, Artificial Sequence
  derived and/or modified sequence
atgcctggggcccggagcggcggcagcggaggagatggcagcaacagcggcagctacagcggagatgccagcggggctgtgacagtgtgggaggtggtgtccctgctgggcaagctgctgggcaccgtggtggccctgaaggtggtgctgtacctgctgcgggtgtgcctggccatggcctggaagtctggaggagccagccacagcgagctgatccacaacctgaggaagaatggcatcatcaagacagacaaggtgtttgaggtgatgctggccacagacaggagccactacgccaagtgcaacccctacatggacagcccccagagcatcggcttccaggccaccatcagcgccccccacatgcacgcctatgccctggagctgctgtttgaccagctgcatgaaggagccaaggccctggatgtgggcagcggcagcggcatcctgacagcctgctttgccaggatggtgggctgcaccgggaaggtgattggaattgaccacatcaaggagctggtggatgattctgtgaacaacgtgaggaaggatgaccccaccctgctgagcagcggccgggtgcagctggtggtgggagatggccgcatgggctacgccgaggaggccccctatgatgccatccacgtgggcgctgctgcccctgtggtgccccaggccctgattgaccagctgaagccaggcggccgcctcatcctgcctgtgggccctgctgggggcaaccagatgctggagcagtatgacaagctgcaggacggcagcatcaagatgaagcccctgatgggcgtcatctacgtgcccctgacagacaaggagaagcagtggagccgctggaagtag

SEQ ID NO: 88135 - DNA, 684 bp, Artificial Sequence
  derived and/or modified sequence
atggcctggaagtctggaggagccagccacagcgagctgatccacaacctgaggaagaatggcatcatcaagacagacaaggtgtttgaggtgatgctggccacagacaggagccactacgccaagtgcaacccctacatggacagcccccagagcatcggcttccaggccaccatcagcgccccccacatgcacgcctatgccctggagctgctgtttgaccagctgcatgaaggagccaaggccctggatgtgggcagcggcagcggcatcctgacagcctgctttgccaggatggtgggctgcaccgggaaggtgattggaattgaccacatcaaggagctggtggatgattctgtgaacaacgtgaggaaggatgaccccaccctgctgagcagcggccgggtgcagctggtggtgggagatggccgcatgggctacgccgaggaggccccctatgatgccatccacgtgggcgctgctgcccctgtggtgccccaggccctgattgaccagctgaagccaggcggccgcctcatcctgcctgtgggccctgctgggggcaaccagatgctggagcagtatgacaagctgcaggacggcagcatcaagatgaagcccctgatgggcgtcatctacgtgcccctgacagacaaggagaagcagtggagccgctggaagtag

SEQ ID NO: 88136 - DNA, 858 bp, Artificial Sequence
  derived and/or modified sequence
atgcccggcgcccggagcggcggcagcggcggcgacggcagcaacagcggaagttattctggtgatgccagcggagcggtgactgtgtgggaggttgtgagcctactgggaaagcttctgggcacggtcgtcgctctgaaagtggtgctgtacttactcagagtctgcctagcgatggcctggaagtcaggtggcgcctcacattctgagctgattcataatctgcgtaaaaacgggatcataaagacagacaaggtgttcgaggtaatgctggccacagatagaagccactatgctaaatgtaacccttatatggactctccgcagtccatcggtttccaggctacgataagcgctccacacatgcacgcatatgccctggagttgcttttcgatcagctccatgaaggcgccaaagccctggacgtcggcagcgggtctggcatcttaactgcatgtttcgccaggatggttggttgcacaggaaaggtgattggaatagatcacattaaagaacttgtagatgacagcgttaataacgtgcggaaggatgatccaaccttgctcagtagcggtagagtgcagctggtagtaggggatgggcggatgggttacgccgaggaggccccctacgacgcaatccatgtcggagcagccgcgcccgtcgtacctcaggctctcatcgaccagctaaagcccggcggtaggctaatattgcccgtggggccagccggaggcaaccagatgctcgagcagtacgacaagctgcaggacggatccataaagatgaagcctctgatgggcgtcatatatgttcctttgaccgataaagaaaagcaatggtcacgctggaagtag

SEQ ID NO: 88137 - DNA, 684 bp, Artificial Sequence
  derived and/or modified sequence
atggcctggaagagcggcggcgccagccacagcgagctgatccacaatcttaggaagaacggtattataaagactgataaagtattcgaggtcatgcttgctaccgaccgtagtcactatgctaagtgcaatccttacatggacagcccgcagtcaatcggattccaggccaccatctcagcgccacacatgcatgcttacgctcttgagctgctgttcgatcagctccatgagggggccaaagctctggacgttgggtctggtagcggcatcctcacggcatgcttcgcaaggatggtgggatgcacaggcaaggtgatcgggatcgatcatatcaaggaactggtggatgactcagtgaataacgtgcggaaagatgatcccaccctgctgtcatctggaagagtgcaactagtcgtgggagacggccggatgggctatgccgaagaagctccttacgacgcaatccatgttggggcagccgctccggtggttccacaggcacttatcgaccaacttaaacccggaggccgcttaattcttcccgtgggaccagcaggcggtaaccagatgttggagcaatacgacaaactccaagatggcagcatcaagatgaaacctctcatgggcgtgatctatgttcctctgacagataaggaaaagcagtggtcaaggtggaaatag

SEQ ID NO: 88138 - DNA, 858 bp, Artificial Sequence
  derived and/or modified sequence
atgcccggcgcccggagcggcggcagcggcggcgacggcagcaacagtggtagctacagcggggatgccagtggggccgtaacagtatgggaggtggtgtcacttttgggaaagctgctagggacagtagtggccctgaaagtcgtgctctatctgctacgcgtctgtctggctatggcgtggaaatctggaggggcctcacactcggagctgatacacaacctgcggaaaaatgggatcataaaaacagacaaggtgttcgaggtgatgttagccacagatagaagccactatgctaaatgtaacccctacatggattccccacaatctattgggtttcaagcgaccatctcggctccgcatatgcacgcatatgcacttgaactgctgttcgatcaactccacgagggcgccaaggccttggacgtaggaagcggatccggaattctcaccgcctgcttcgcaagaatggtggggtgcactgggaaagtgataggcatcgaccatatcaaggaacttgtggacgatagtgtgaacaatgtgcggaaggacgaccctactttgctctcatcaggcagagttcagctggtcgttggggacggccgcatgggttacgccgaggaggctccctacgacgctatacacgtcggggctgctgcccccgtggtgccccaggccttgatcgatcaactgaagcccggcggcaggctcatcctgcccgtcgggcccgccggcgggaaccagatgctggaacagtacgacaaactgcaggatgggagtataaagatgaagcccttgatgggagtcatctacgtgccacttactgataaggagaaacagtggagcaggtggaaatag

SEQ ID NO: 88139 - DNA, 858 bp, Artificial Sequence
  derived and/or modified sequence
atgccaggggctcgcagtggcggatccggaggagacgggagtaactcggggtcatactcaggggacgcaagcggcgcagtgacagtgtgggaggttgtgtccttgcttggcaaactgctgggaactgtggttgccctcaaagtggtactttatctgcttcgggtttgcctggctatggcgtggaagagtgggggagcgtcccatagcgagctgatacacaatctccgcaaaaacggcatcatcaagaccgacaaagtgttcgaagtgatgcttgctacggaccgcagccactatgctaaatgcaatccttatatggattcgccacagtctatcggctttcaggctaccatcagcgctccccacatgcatgcttatgctctagagctgctctttgatcaattgcatgagggggcaaaggcgttggacgtcggatccggctctgggatcctgacagcttgttttgcgcgaatggtgggatgtacaggaaaagtgatcggtatagatcacataaaggaattagtggacgacagcgtcaataatgtgcgaaaagacgatcctacccttctgtcatccggccgagtccaactggtagtcggcgacgggagaatgggctatgccgaagaggccccttatgatgcaattcacgtgggggctgccgcaccagtggtaccacaggcactgatcgatcaactgaagcctggaggcaggctaatcttacccgtcggccctgccggtggcaaccagatgctggaacagtacgataagctgcaggatggcagcatcaagatgaagcctctgatgggggtaatatatgtgccactaaccgacaaggagaaacagtggtcaaggtggaagtag

SEQ ID NO: 88140 - DNA, 684 bp, Artificial Sequence
  derived and/or modified sequence
atggcctggaagtccgggggagccagtcatagcgagctgattcacaacttgagaaaaaatggtattataaagaccgacaaggttttcgaagtaatgctggcgactgatcgctcccactacgcaaaatgtaatccttatatggactctccacagtctatcggctttcaagccactatcagtgcccctcacatgcatgcctacgccctggaactcctctttgaccagcttcacgagggcgctaaagctttggacgtcggtagcgggtccggaattctcactgcatgtttcgccagaatggtaggatgtacaggcaaagtgattgggatagaccatattaaggagctggtggatgactccgtgaataatgttagaaaggacgaccctactctcttgtcatccggaagggtgcaattggtagtaggcgacggaaggatggggtacgctgaagaggctccctatgacgccattcacgtgggtgctgctgcgcctgtcgtgccacaggcactgattgaccagctgaaacctgggggacgtctgatacttcctgtcggacctgctggcggtaatcagatgctcgagcagtacgataagctgcaagatggcagcataaagatgaaacctctgatgggagtcatttacgtccctctcacggacaaggaaaagcagtggtccagatggaaatag

SEQ ID NO: 88141 - DNA, 858 bp, Artificial Sequence
  derived and/or modified sequence
atgccaggggcacgctctggcggatccggcggagacggatcaaactcggggtcctacagcggggacgcctctggggctgtcaccgtctgggaggttgtgagcctattggggaagcttctgggtacagttgtcgctcttaaggtggtgctctatctgctacgcgtgtgcttggctatggcctggaaatctggtggagccagccactctgaactgatccacaatctcaggaaaaatgggatcatcaaaaccgacaaggtctttgaagtgatgttggccacggaccggtcccattacgcaaagtgcaatccttacatggattctcctcaatcaatcggattccaggctacgatttcagcccctcacatgcacgcctacgctctggaattgctgttcgaccaacttcatgagggagcaaaagcacttgatgttggcagtggcagcgggatcctaacagcatgcttcgccaggatggtgggttgtaccggtaaagtgatcggcatcgaccatattaaggaattagttgacgatagcgtgaataacgtgcgcaaggacgatcccactcttctgagcagcgggagggtgcagcttgtcgtgggggacggcaggatgggctatgccgaggaggccccttatgatgccattcatgtcggggcagctgcccctgtcgtaccacaagctttgatcgaccagttgaaaccgggaggaagactgatattgccagttgggccagcgggagggaatcaaatgttggaacaatacgataagctgcaagatggctctatcaaaatgaaacccctgatgggagtcatctacgtgccattgaccgataaggagaagcagtggtctcggtggaaatag

SEQ ID NO: 88142 - DNA, 1293 bp, Artificial Sequence
  derived and/or modified sequence
ccgccatcccgccgtcccgctcggtgaccggagacacagccgggaacgcgactgatcaggctaccgagccgggccgcagggcgaaagcggtgcggtccgaggcctcagaaagggacacgcagcagcggaagtggcgctgactcagcccggcctccctgcagtcccctggcagcggtagcagccacaggggcgggcggctgggccacacgcctcccccgccctcggccccacccggccgcaccctaagccgcgcggcgtcacagagcgcatgcgtgccgcgggggatgccgggagcgcgcagtggcggcagcggcggcgacggcagtaacagcggcagctacagcggggacgcgagcggggcggtgacggtgtgggaggtggtctcactcttgggaaaactgctgggcaccgtcgtcgcgctgaaggtggttctgtacctgctccgagtgtgcttagcgatggcctggaaatccggcggcgccagccactcggagctaatccacaatctccgcaaaaatggaatcatcaagacagataaagtatttgaagtgatgctggctacagaccgctcccactatgcaaaatgtaacccatacatggattctccacaatcaataggtttccaagcaacaatcagtgctccacacatgcatgcatatgcgctagaacttctatttgatcagttgcatgaaggagctaaagctcttgatgtaggatctggaagtggaatccttactgcatgttttgcacgtatggttggatgtactggaaaagtcataggaattgatcacattaaagagctagtagatgactcagtaaataatgtcaggaaggacgatccaacacttctgtcttcagggagagtacagcttgttgtgggggatggaagaatgggatatgctgaagaagccccttatgatgccattcatgtgggagctgcagcccctgttgtaccccaggcgctaatagatcagttaaagcccggaggaagattgatattgcctgttggtcctgcaggcggaaaccaaatgttggagcagtatgacaagctacaagatggcagcatcaaaatgaagcctctgatgggggtgatatacgtgcctttaacagataaagaaaagcagtggtccaggtggaagtgattttatcttctgctctttcttcttccacacatgcaaggtgaaagggtgtggattttaagacattagactacaagagctgtttttggttgtcacctttatgctcctccattataacgtcagaaattcattacattaaaaatgtgaaaaatgt

SEQ ID NO: 88143 - DNA, 1733 bp, Artificial Sequence
  derived and/or modified sequence
gcggcgtcacagagcgcatgcgtgccgcgggggatgccgggagcgcgcagtggcggcagcggcggcgacggcagtaacagcggcagctacagcggggacgcgagcggggcggtgacggtgtgggaggtggtctcactcttgggaaaactgctgggcaccgtcgtcgcgctgaaggtggttctgtacctgctccgagtgtgcttagcgatggcctggaaatccggcggcgccagccactcggagctaatccacaatctccgcaaaaatggaatcatcaagacagataaagtatttgaagtgatgctggctacagaccgctcccactatgcaaaatgtaacccatacatggattctccacaatcaataggtttccaagcaacaatcagtgctccacacatgcatgcatatgcgctagaacttctatttgatcagttgcatgaaggagctaaagctcttgatgtaggatctggaagtggaatccttactgcatgttttgcacgtatggttggatgtactggaaaagtcataggaattgatcacattaaagagctagtagatgactcagtaaataatgtcaggaaggacgatccaacacttctgtcttcagggagagtacagcttgttgtgggggatggaagaatgggatatgctgaagaagccccttatgatgccattcatgtgggagctgcagcccctgttgtaccccaggcgctaatagatcagttaaagcccggaggaagattgatattgcctgttggtcctgcaggcggaaaccaaatgttggagcagtatgacaagctacaagatggcagcatcaaaatgaagcctctgatgggggtgatatacgtgcctttaacagataaagaaaagcagtggtccaggtggaagtgattttatcttctgctctttcttcttccacacatgcaagggatgaattgtaaaagcaacatcagcttgaccagtataaaattacagtggattgctcatctcagtcctcaaagctttttgaaaaccaacaccatcacagcttgttttggactttgttacactgttattttcagcatgaaaatgtgtgtttttttagggtttctgattcttcaaagaggcacagagccaaattggtagaggaaggatgcaaagtataaatttgtgtaatattactttaacatgcccatattttacttggaaatattaaaagaaagggttctgtaaaatggaaaacttagtttgtgaattgattttgaggagtggtttttcttttcttggacacttaattctgttctgatattaatttatcagattgcttttgtgcattggataacaccaccattcacaagttaagattcttggtatttggatatctgttagatgctactaagaaaatagagatgagctttctttttaaagcttttgatgtggtgtcatagaatagcatgttgtagatacaatcagctgctttgttaccttaaaactaggcatttgtaaatattaaaccataagatggcaggtgatgtcctgtaaacactcagctgttcagattggacataactgacttagttcttcccttctctctctctcaaaattataggagacttgtagtttagtgtggttttctgtttctaatttgctgctgataatgtatatgaacttaacatgctgtgtaagctgtgtcctagttcttgaacagtttatgcagtgctgctttgccaaataaagttaaaagtaaaagaggc

SEQ ID NO: 88144 - DNA, 1984 bp, Artificial Sequence
  derived and/or modified sequence
ccgccatcccgccgtcccgctcggtgaccggagacacagccgggaacgcgactgatcaggctaccgagccgggccgcagggcgaaagcggtgcggtccgaggcctcagaaagggacacgcagcagcggaagtggcgctgactcagcccggcctccctgcagtcccctggcagcggtagcagccacaggggcgggcggctgggccacacgcctcccccgccctcggccccacccggccgcaccctaagccgcgcggcgtcacagagcgcatgcgtgccgcgggggatgccgggagcgcgcagtggcggcagcggcggcgacggcagtaacagcggcagctacagcggggacgcgagcggggcggtgacggtgtgggaggtggtctcactcttgggaaaactgctgggcaccgtcgtcgcgctgaaggtggttctgtacctgctccgagtgtgcttagcgatggcctggaaatccggcggcgccagccactcggagctaatccacaatctccgcaaaaatggaatcatcaagacagataaagtatttgaagtgatgctggctacagaccgctcccactatgcaaaatgtaacccatacatggattctccacaatcaataggtttccaagcaacaatcagtgctccacacatgcatgcatatgcgctagaacttctatttgatcagttgcatgaaggagctaaagctcttgatgtaggatctggaagtggaatccttactgcatgttttgcacgtatggttggatgtactggaaaagtcataggaattgatcacattaaagagctagtagatgactcagtaaataatgtcaggaaggacgatccaacacttctgtcttcagggagagtacagcttgttgtgggggatggaagaatgggatatgctgaagaagccccttatgatgccattcatgtgggagctgcagcccctgttgtaccccaggcgctaatagatcagttaaagcccggaggaagattgatattgcctgttggtcctgcaggcggaaaccaaatgttggagcagtatgacaagctacaagatggcagcatcaaaatgaagcctctgatgggggtgatatacgtgcctttaacagataaagaaaagcagtggtccaggtggaagtgattttatcttctgctctttcttcttccacacatgcaagggatgaattgtaaaagcaacatcagcttgaccagtataaaattacagtggattgctcatctcagtcctcaaagctttttgaaaaccaacaccatcacagcttgttttggactttgttacactgttattttcagcatgaaaatgtgtgtttttttagggtttctgattcttcaaagaggcacagagccaaattggtagaggaaggatgcaaagtataaatttgtgtaatattactttaacatgcccatattttacttggaaatattaaaagaaagggttctgtaaaatggaaaacttagtttgtgaattgattttgaggagtggtttttcttttcttggacacttaattctgttctgatattaatttatcagattgcttttgtgcattggataacaccaccattcacaagttaagattcttggtatttggatatctgttagatgctactaagaaaatagagatgagctttctttttaaagcttttgatgtggtgtcatagaatagcatgttgtagatacaatcagctgctttgttaccttaaaactaggcatttgtaaatattaaaccataagatggcaggtgatgtcctgtaaacactcagctgttcagattggacataactgacttagttcttcccttctctctctctcaaaattataggagacttgtagtttagtgtggttttctgtttctaatttgctgctgataatgtatatgaacttaacatgctgtgtaagctgtgtcctagttcttgaacagtttatgcagtgctgctttgccaaataaagttaaaagtaaaagaggc

SEQ ID NO: 88145 - DNA, 858 bp, Artificial Sequence
  derived and/or modified sequence
atgcccggcgccagaagcggcggcagcggcggcgacggcagcaacagcggcagctacagcggcgacgccagcggcgccgtgaccgtgtgggaggtggtgagcctgctgggcaagctgctgggcaccgtggtggccctgaaggtggtgctgtacctgctgagagtgtgcctggccatggcctggaagagcggcggcgccagccacagcgagctgatccacaacctgagaaagaacggcatcatcaagaccgacaaggtgttcgaggtgatgctggccaccgacagaagccactacgccaagtgcaacccctacatggacagcccccagagcatcggcttccaggccaccatcagcgccccccacatgcacgcctacgccctggagctgctgttcgaccagctgcacgagggcgccaaggccctggacgtgggcagcggcagcggcatcctgaccgcctgcttcgccagaatggtgggctgcaccggcaaggtgatcggcatcgaccacatcaaggagctggtggacgacagcgtgaacaacgtgagaaaggacgaccccaccctgctgagcagcggcagagtgcagctggtggtgggcgacggcagaatgggctacgccgaggaggccccctacgacgccatccacgtgggcgccgccgcccccgtggtgccccaggccctgatcgaccagctgaagcccggcggcagactgatcctgcccgtgggccccgccggcggcaaccagatgctggagcagtacgacaagctgcaggacggcagcatcaagatgaagcccctgatgggcgtgatctacgtgcccctgaccgacaaggagaagcagtggagcagatggaagtag

SEQ ID NO: 88146 - DNA, 684 bp, Artificial Sequence
  derived and/or modified sequence
atggcctggaagagcggcggcgccagccacagcgagctgatccacaacctgagaaagaacggcatcatcaagaccgacaaggtgttcgaggtgatgctggccaccgacagaagccactacgccaagtgcaacccctacatggacagcccccagagcatcggcttccaggccaccatcagcgccccccacatgcacgcctacgccctggagctgctgttcgaccagctgcacgagggcgccaaggccctggacgtgggcagcggcagcggcatcctgaccgcctgcttcgccagaatggtgggctgcaccggcaaggtgatcggcatcgaccacatcaaggagctggtggacgacagcgtgaacaacgtgagaaaggacgaccccaccctgctgagcagcggcagagtgcagctggtggtgggcgacggcagaatgggctacgccgaggaggccccctacgacgccatccacgtgggcgccgccgcccccgtggtgccccaggccctgatcgaccagctgaagcccggcggcagactgatcctgcccgtgggccccgccggcggcaaccagatgctggagcagtacgacaagctgcaggacggcagcatcaagatgaagcccctgatgggcgtgatctacgtgcccctgaccgacaaggagaagcagtggagcagatggaagtag

SEQ ID NO: 88147 - protein, 981 aa, Artificial Sequence
  derived and/or modified sequence
MAEGGAADLDTQRSDIATLLKTSLRKGDTWYLVDSRWFKQWKKYVGFDSWDKYQMGDQNVYPGPIDNSGLLKDGDAQSLKEHLIDELDYILLPTEGWNKLVSWYTLMEGQEPIARKVVEQGMFVKHCKVEVYLTELKLCENGNMNNVVTRRFSKADTIDTIEKEIRKIFSIPDEKETRLWNKYMSNTFEPLNKPDSTIQDAGLYQGQVLVIEQKNEDGTWPRGPSTPKSPGASNFSTLPKISPSSLSNNYNNMNNRNVKNSNYCLPSYTAYKNYDYSEPGRNNEQPGLCGLSNLGNTCFMNSAIQCLSNTPPLTEYFLNDKYQEELNFDNPLGMRGEIAKSYAELIKQMWSGKFSYVTPRAFKTQVGRFAPQFSGYQQQDCQELLAFLLDGLHEDLNRIRKKPYIQLKDADGRPDKVVAEEAWENHLKRNDSIIVDIFHGLFKSTLVCPECAKISVTFDPFCYLTLPLPMKKERTLEVYLVRMDPLTKPMQYKVVVPKIGNILDLCTALSALSGIPADKMIVTDIYNHRFHRIFAMDENLSSIMERDDIYVFEININRTEDTEHVIIPVCLREKFRHSSYTHHTGSSLFGQPFLMAVPRNNTEDKLYNLLLLRMCRYVKISTETEETEGSLHCCKDQNINGNGPNGIHEEGSPSEMETDEPDDESSQDQELPSENENSQSEDSVGGDNDSENGLCTEDTCKGQLTGHKKRLFTFQFNNLGNTDINYIKDDTRHIRFDDRQLRLDERSFLALDWDPDLKKRYFDENAAEDFEKHESVEYKPPKKPFVKLKDCIELFTTKEKLGAEDPWYCPNCKEHQQATKKLDLWSLPPVLVVHLKRFSYSRYMRDKLDTLVDFPINDLDMSEFLINPNAGPCRYNLIAVSNHYGGMGGGHYTAFAKNKDDGKWYYFDDSSVSTASEDQIVSKAAYVLFYQRQDTFSGTGFFPLDRETKGASAATGIPLESDEDSNDNDNDIENENCMHTN

SEQ ID NO: 88148 - DNA, 2946 bp, Artificial Sequence
  derived and/or modified sequence
atggccgagggcggcgccgccgacctggacacccagagaagcgacatcgccaccctgctgaagaccagcctgagaaagggcgacacctggtacctggtggacagcagatggttcaagcagtggaagaagtacgtgggcttcgacagctgggacaagtaccagatgggcgaccagaacgtgtaccccggccccatcgacaacagcggcctgctgaaggacggcgacgcccagagcctgaaggagcacctgatcgacgagctggactacatcctgctgcccaccgagggctggaacaagctggtgagctggtacaccctgatggagggccaggagcccatcgccagaaaggtggtggagcagggcatgttcgtgaagcactgcaaggtggaggtgtacctgaccgagctgaagctgtgcgagaacggcaacatgaacaacgtggtgaccagaagattcagcaaggccgacaccatcgacaccatcgagaaggagatcagaaagatcttcagcatccccgacgagaaggagaccagactgtggaacaagtacatgagcaacaccttcgagcccctgaacaagcccgacagcaccatccaggacgccggcctgtaccagggccaggtgctggtgatcgagcagaagaacgaggacggcacctggcccagaggccccagcacccccaagagccccggcgccagcaacttcagcaccctgcccaagatcagccccagcagcctgagcaacaactacaacaacatgaacaacagaaacgtgaagaacagcaactactgcctgcccagctacaccgcctacaagaactacgactacagcgagcccggcagaaacaacgagcagcccggcctgtgcggcctgagcaacctgggcaacacctgcttcatgaacagcgccatccagtgcctgagcaacaccccccccctgaccgagtacttcctgaacgacaagtaccaggaggagctgaacttcgacaaccccctgggcatgagaggcgagatcgccaagagctacgccgagctgatcaagcagatgtggagcggcaagttcagctacgtgacccccagagccttcaagacccaggtgggcagattcgccccccagttcagcggctaccagcagcaggactgccaggagctgctggccttcctgctggacggcctgcacgaggacctgaacagaatcagaaagaagccctacatccagctgaaggacgccgacggcagacccgacaaggtggtggccgaggaggcctgggagaaccacctgaagagaaacgacagcatcatcgtggacatcttccacggcctgttcaagagcaccctggtgtgccccgagtgcgccaagatcagcgtgaccttcgaccccttctgctacctgaccctgcccctgcccatgaagaaggagagaaccctggaggtgtacctggtgagaatggaccccctgaccaagcccatgcagtacaaggtggtggtgcccaagatcggcaacatcctggacctgtgcaccgccctgagcgccctgagcggcatccccgccgacaagatgatcgtgaccgacatctacaaccacagattccacagaatcttcgccatggacgagaacctgagcagcatcatggagagagacgacatctacgtgttcgagatcaacatcaacagaaccgaggacaccgagcacgtgatcatccccgtgtgcctgagagagaagttcagacacagcagctacacccaccacaccggcagcagcctgttcggccagcccttcctgatggccgtgcccagaaacaacaccgaggacaagctgtacaacctgctgctgctgagaatgtgcagatacgtgaagatcagcaccgagaccgaggagaccgagggcagcctgcactgctgcaaggaccagaacatcaacggcaacggccccaacggcatccacgaggagggcagccccagcgagatggagaccgacgagcccgacgacgagagcagccaggaccaggagctgcccagcgagaacgagaacagccagagcgaggacagcgtgggcggcgacaacgacagcgagaacggcctgtgcaccgaggacacctgcaagggccagctgaccggccacaagaagagactgttcaccttccagttcaacaacctgggcaacaccgacatcaactacatcaaggacgacaccagacacatcagattcgacgacagacagctgagactggacgagagaagcttcctggccctggactgggaccccgacctgaagaagagatacttcgacgagaacgccgccgaggacttcgagaagcacgagagcgtggagtacaagccccccaagaagcccttcgtgaagctgaaggactgcatcgagctgttcaccaccaaggagaagctgggcgccgaggacccctggtactgccccaactgcaaggagcaccagcaggccaccaagaagctggacctgtggagcctgccccccgtgctggtggtgcacctgaagagattcagctacagcagatacatgagagacaagctggacaccctggtggacttccccatcaacgacctggacatgagcgagttcctgatcaaccccaacgccggcccctgcagatacaacctgatcgccgtgagcaaccactacggcggcatgggcggcggccactacaccgccttcgccaagaacaaggacgacggcaagtggtactacttcgacgacagcagcgtgagcaccgccagcgaggaccagatcgtgagcaaggccgcctacgtgctgttctaccagagacaggacaccttcagcggcaccggcttcttccccctggacagagagaccaagggcgccagcgccgccaccggcatccccctggagagcgacgaggacagcaacgacaacgacaacgacatcgagaacgagaactgcatgcacaccaactag

SEQ ID NO: 88149 - DNA, 2946 bp, Artificial Sequence
  derived and/or modified sequence
atggccgaggggggtgcagctgatcttgacacacagaggagcgacatcgccacactcttaaagacctctctgcgcaagggggacacatggtatttggtcgactccagatggtttaagcagtggaaaaaatatgtcgggtttgactcttgggacaagtatcagatgggggatcagaacgtatacccaggacccatcgacaatagtggtcttctgaaggatggcgatgcacagagtctcaaagagcatctgattgacgagctcgactatattttgctccccaccgaggggtggaataagttggtctcctggtataccctaatggagggccaagagcctattgccaggaaggtcgtcgaacagggaatgtttgtgaagcactgcaaagtcgaagtgtatttgaccgaattgaaattgtgcgaaaatggtaatatgaacaatgttgtgactcgtaggttttctaaagctgatacaattgacaccattgaaaaggaaattaggaagattttttccatccctgatgagaaagagacccggctttggaataagtatatgtctaatacttttgagcccctcaacaaacctgatagcacaattcaggatgcaggcctctaccagggacaggtgctggtgattgagcagaaaaatgaggatggcacgtggccacggggcccttcaactccgaagtctcccggcgcttccaacttttccaccctgcccaagatttccccttcctcgctgagcaacaattataacaacatgaataataggaatgtgaaaaacagcaactattgcctaccttcatacaccgcctacaagaactacgactacagtgagccaggacgaaataacgaacagcctgggctgtgcggcttgagtaatcttggaaatacctgtttcatgaatagcgccattcagtgcctctcaaacactcccccactaacagaatacttcctgaacgacaaatatcaggaagagttgaatttcgataaccccctgggcatgcgcggagagattgccaaaagttacgctgagttaatcaagcaaatgtggagcgggaagttctcctacgtcacgcctcgtgccttcaagacccaggtgggcaggtttgccccacagtttagcggctatcagcagcaagattgtcaggagctattagcattcctccttgatgggttgcatgaggatctcaaccggatccggaaaaagccatatattcagcttaaagatgcagatggacggcccgataaggtcgttgcagaagaggcttgggagaaccacctgaaaaggaatgattccattatcgtggacatctttcatgggctgttcaaaagtacgttggtgtgccccgagtgtgcaaagattagtgtgacatttgatcccttctgctatctgacattacccctgccaatgaaaaaagagagaacattggaagtgtatttggtgagaatggacccactgaccaagccaatgcagtataaggtggtggtgccaaagatcgggaacattctggacctgtgcacagcactctctgctttatccggaattcctgccgataaaatgatagtgactgacatttacaaccatcgtttccacagaatatttgccatggacgagaatctgtcatccattatggaacgcgatgatatctacgtgtttgagatcaatatcaatcgcacagaagacaccgaacatgtgataatccctgtctgcctccgagaaaaatttcgccatagttcatacacccaccacaccgggtcctccctattcggccagccctttcttatggctgtgccaaggaataacaccgaggataagctttataatctgcttctgcttcgcatgtgccgttacgttaagatatcaacagagactgaagagacggagggatcactgcattgctgtaaagaccagaatatcaatggcaacggccctaacggcatccatgaggaaggatcgccatccgaaatggaaactgacgagccggatgatgagtcttctcaggaccaagaacttccgtccgagaatgagaactcacagtccgaagattcagttggaggggataatgacagtgagaatgggttgtgtactgaggatacatgtaaggggcagttaaccggtcataagaagaggctgtttacctttcagttcaataatctggggaataccgacatcaactatatcaaagatgatacgagacacattcgatttgacgaccgacagcttagactcgatgagcggtcattcctcgcgctggattgggacccagacctgaagaagagatatttcgatgaaaacgccgccgaagactttgagaagcatgaatccgtcgagtacaaaccacctaagaagccttttgtgaaactgaaagactgtatcgaactctttactaccaaggagaaactgggcgcagaagacccctggtattgccctaattgtaaagagcaccaacaagccactaagaagttagacttgtggtcactgcctccagtcctggtcgtgcatctgaagcgattttcctactcaaggtatatgagagataaactggacaccctggtggatttcccaattaatgatcttgatatgtcagaattcctgatcaaccctaacgccgggccatgccgctacaacttgatcgctgtcagtaaccattatggaggaatgggtggcgggcactacaccgcgtttgccaaaaacaaagacgatgggaaatggtactacttcgacgacagttctgtgtcgaccgcaagcgaggaccaaattgtgagtaaagccgcttacgtgcttttctaccagcgccaagacaccttttcaggtacagggttttttcctctggacagagaaaccaagggtgccagcgccgccacggggattcctctggagtcagacgaagatagcaatgataatgataatgatatcgaaaatgaaaactgcatgcacacaaactag

SEQ ID NO: 88150 - DNA, 2946 bp, Artificial Sequence
  derived and/or modified sequence
atggccgagggcggcgctgctgacctggacacccagaggagtgacatcgccaccctgctgaagaccagcctgaggaagggggacacctggtacctggtggacagccgctggttcaagcagtggaagaagtatgtgggctttgacagctgggacaagtaccagatgggagaccagaatgtgtacccaggccccatcgacaacagcggcctgctgaaggatggagatgcccagagcctgaaggagcacctgattgatgagctggactacatcctgctgcccacagagggctggaacaagctggtgtcctggtacaccctgatggagggccaggagcccatcgccaggaaggtggtggagcagggcatgtttgtgaagcactgcaaggtggaggtgtacctgacagagctgaagctgtgtgaaaatggaaacatgaacaacgtggtgacccggcgcttcagcaaggctgacaccatcgacaccatcgagaaggagatcaggaagatcttcagcatcccagatgagaaggagacccggctgtggaacaagtacatgagcaacacctttgagcccctgaacaagccagacagcaccatccaggatgctggcctgtaccagggccaggtgctggtgattgagcagaagaatgaagatggcacctggccccggggccccagcacccccaagagccctggggccagcaacttcagcaccctgcccaagatcagccccagcagcctgagcaacaactacaacaacatgaacaacagaaatgtgaagaacagcaactactgcctgcccagctacacagcctacaagaactatgactacagcgagcctggaagaaataatgagcagcccggcctgtgtggcctgagcaacctgggcaacacctgcttcatgaacagcgccatccagtgcctgagcaacaccccacccctgacagagtacttcctgaatgacaagtaccaggaggagctgaactttgacaaccccctgggcatgagaggagagatcgccaagagctatgcagagctgatcaagcagatgtggagcggcaagttctcctatgtgaccccccgggccttcaagacccaggtgggccgctttgccccccagttcagcggctaccagcagcaggactgccaggagctgctggccttcctgctggatggcctgcacgaggacctgaaccgcatcaggaagaagccctacatccagctgaaggatgctgatggccgcccagacaaggtggtggccgaggaggcctgggagaaccacctgaagagaaatgacagcatcatcgtggacatcttccacggcctcttcaagagcaccctggtgtgcccagaatgtgccaagatctctgtgacctttgaccccttctgctacctgaccctgcccctgcccatgaagaaggagaggaccctggaggtgtacctggtgaggatggaccccctgaccaagcccatgcagtacaaggtggtggtgcccaagattggcaacatcctggacctgtgcacagccctgagcgccctgagcggcatcccagctgacaagatgattgtgacagacatctacaaccaccgcttccaccgcatctttgccatggatgagaacctgagcagcatcatggagagagatgacatctacgtgtttgagatcaacatcaacagaacagaggacacagagcacgtgatcatccctgtgtgcctgcgggagaagttccgccacagcagctacacccaccacacaggcagcagcctgtttggccagcccttcctgatggctgtgcccaggaacaacacagaggacaagctgtacaacctgctgctgctgaggatgtgccgctacgtgaagatcagcacagaaacagaggagacagagggcagcctgcactgctgcaaggaccagaacatcaatggaaatggccccaacggcatccacgaggagggcagccccagcgagatggagacagatgagccagatgatgagagcagccaggaccaggagctgcccagtgaaaatgaaaacagccagagtgaagattctgtgggcggggacaatgacagtgaaaatggcctgtgcacagaggacacctgcaagggccagctgaccggccacaagaagaggctcttcaccttccagttcaacaacctgggcaacacagacatcaactacatcaaggatgacaccaggcacatccgctttgatgaccggcagctgcggctggatgagaggagcttcctggccctggactgggaccctgacctgaagaagcgctactttgatgaaaatgctgctgaggactttgagaagcatgaatctgtggagtacaagccacccaagaagccctttgtgaagctgaaggactgcatcgagctgttcaccaccaaggagaagctgggcgctgaggacccctggtactgccccaactgcaaggagcaccagcaggccaccaagaagctggacctgtggagcctgccccctgtgctggtggtgcacctgaagcgcttctcctacagccgctacatgagggacaagctggacaccctggtggacttccccatcaatgacctggacatgtctgagttcctgatcaaccccaatgccggcccctgccgctacaacctgattgctgtgagcaaccactacggcggcatgggcggcggccactacacagcctttgccaagaacaaggatgatggcaagtggtactactttgatgacagctctgtgtccacagccagcgaggaccagatcgtgtccaaggccgcctacgtgctcttctaccagaggcaggacaccttctctggaacaggcttcttccccctggaccgggagaccaagggggccagcgctgccaccggcatccccctggagagtgatgaggacagcaatgacaatgacaatgacattgaaaatgaaaactgcatgcacaccaactag

SEQ ID NO: 88151 - DNA, 2946 bp, Artificial Sequence
  derived and/or modified sequence
atggccgagggcggcgccgccgacctggacacccagcggagcgacatcgcaacattgttgaagacctctctgagaaagggagatacatggtatctggtcgattcccggtggttcaaacagtggaaaaaatatgttggcttcgacagctgggataaatatcagatgggcgaccagaacgtttatcccggacctatcgacaacagcggcctgctgaaggacggcgatgcccagagcctcaaggaacaccttatagacgagctggactatatccttctgcctactgaaggctggaacaaactggtttcttggtataccttgatggaagggcaggaacctatcgccagaaaggtggtcgaacagggtatgtttgtgaagcactgtaaggtcgaggtttacttgaccgagctgaaactttgtgagaacggtaacatgaataacgtcgttactaggcgcttcagcaaagctgacacgatcgacactatcgagaaagaaatccggaaaatcttcagtatacctgatgagaaagaaacccgactctggaacaaatacatgtcaaacacctttgaaccattaaacaaacctgattccaccatccaggatgcaggcctgtatcagggacaagtgttggtgatcgagcagaaaaatgaggatgggacgtggcctaggggtccctctactcctaagtctcctggcgccagcaatttttccaccctaccaaaaatctctccttctagcctgtcaaataattataataatatgaacaatagaaacgtaaaaaatagcaactactgtctgccgtcctatacagcttataagaattatgactacagtgagccagggcgtaacaatgagcagccgggactgtgcggactgagtaatttggggaatacttgtttcatgaatagtgccatccagtgcctgtctaatactccccctctgaccgaatacttcctgaatgataagtatcaggaggagttgaatttcgacaatccgcttggcatgagaggagagatcgccaaaagctacgccgaactcatcaagcagatgtggtctggtaaattctcctacgtgacacctagggcgtttaagacacaggtgggccgcttcgcccctcagtttagcggataccaacaacaagattgtcaggagctcctggcctttctcctggatggactgcatgaagatttaaaccggatacggaagaaaccatatatccagctgaaagacgcagatggaaggccagacaaggttgtggctgaagaggcctgggagaaccatctaaaacgcaacgattctatcatcgtcgacattttccacggcttattcaaatccacactggtgtgccctgaatgtgcgaagatctctgtgacgttcgatccattctgttacctcaccctgcctttaccaatgaagaaagagagaacactggaggtctaccttgtgcgtatggatcccctgactaagccgatgcagtacaaagtggtggtgcccaagatcggcaatatacttgacctttgcacagctctctcagctctgtcaggcatccctgcagacaagatgattgtgacagatatatataaccaccgcttccatcgtattttcgcaatggacgaaaacctgagctctatcatggaacgagacgacatctatgtatttgaaatcaatattaacaggaccgaggatactgagcacgtgattatccccgtgtgcctgcgagagaaatttcggcattcctcttacacgcaccacaccggatcctccttgtttggacaaccctttctcatggcagtgccgcggaataataccgaggacaagttgtataacttattgcttctgcgaatgtgccgctatgtgaaaattagtactgagactgaggaaacagagggatctctgcactgttgcaaggaccagaatatcaatggcaacggcccaaacgggattcacgaggaggggtctccctccgagatggaaaccgatgaacctgacgatgagagcagccaggatcaagaactgccaagtgaaaatgagaattctcaaagtgaggacagcgtcggcggtgacaacgacagcgaaaatggcctctgcaccgaagacacatgtaagggacaattaacagggcacaaaaaaagattgttcacattccagttcaacaacctggggaatactgatatcaactatattaaagatgatactaggcatattagatttgacgatcggcagcttcgcctggatgagagatcattccttgcactggattgggaccctgacctgaagaaaagatacttcgacgagaatgccgccgaggacttcgaaaaacacgagtccgtcgagtacaaacctcctaagaagccttttgttaaattgaaggattgcattgaactgtttaccacaaaagagaagttgggtgccgaggacccctggtattgccccaactgcaaagagcaccagcaggccactaaaaagctggatctctggagcctgcccccagttcttgttgttcaccttaagaggttctcctatagccggtatatgagagacaaactagatacccttgtagatttccctattaacgacttagatatgtctgagtttctgataaatcctaatgcaggcccttgcaggtataacctgatcgccgtgtctaatcactacggaggaatgggaggcgggcactacacggcctttgcaaaaaacaaagacgacggtaagtggtattacttcgatgactcttccgtctcaactgcctccgaggaccagattgtttctaaggctgcctacgtgttgttctatcagcggcaggataccttcagcggaacaggatttttccctctagaccgagaaacaaagggggccagtgccgctaccggtatacccttggagtcagatgaggattcgaatgacaatgataacgatattgagaacgagaattgtatgcacaccaattag

SEQ ID NO: 88152 - DNA, 2946 bp, Artificial Sequence
  derived and/or modified sequence
atggcggagggaggtgccgctgacctggacacacagcgctcagatattgccacattactgaaaacttcacttaggaagggcgacacctggtacttagtggacagtcggtggtttaagcaatggaaaaagtatgttggattcgatagttgggacaagtaccaaatgggagaccagaatgtgtatccaggacctatcgataatagcggactactgaaggacggagatgctcagtctctgaaggaacatctcatcgacgagttagattatattttactgcccaccgaagggtggaacaagctggtttcctggtataccctcatggaaggacaagagcctattgccaggaaagtggtcgaacagggaatgtttgtgaagcattgcaaggtagaggtatacctcactgaattgaagttatgcgagaacggcaacatgaataacgttgtgactcggagattctccaaagcagataccatcgatacaattgaaaaggaaatcagaaagatcttctccattccagacgaaaaagaaacacgcttgtggaacaagtacatgtcaaatacattcgaaccactgaataaacccgatagcaccatccaggacgccggactataccagggtcaagttctggtaattgaacagaagaacgaggacggaacgtggcctcgaggcccatcaaccccgaagtcccctggagccagtaacttctcaaccctgccaaagatcagtcccagctctctgagcaataattataacaatatgaataatagaaatgtgaagaactctaattattgcctgccttcttataccgcttacaaaaactacgactacagcgaacccggacgaaacaatgagcagcctggcctctgtgggcttagcaatctcggaaatacgtgctttatgaattcagctatacagtgcctgtctaatactcctcctcttaccgaatacttcctgaatgacaaatatcaggaggagctgaatttcgacaaccccctcgggatgagaggggaaatcgccaagagctatgccgaactgattaagcaaatgtggtctggcaagttcagctatgtgacaccaagagcctttaaaacccaagtcgggaggttcgctccacagttctcgggctatcagcagcaagactgtcaggagctgctggcattcctgcttgacggtctacacgaggatttgaaccggatccgcaagaagccatacattcagctgaaggacgcggacggccgtcctgataaggtggtggctgaagaggcatgggaaaatcatctgaagcggaatgattccatcatcgtcgacattttccacggcctgttcaagagcaccctcgtgtgtcctgaatgcgccaaaatcagcgtgactttcgaccccttctgctacctaaccctgccattgcccatgaagaaggaacgcaccttggaagtttatttagtgagaatggaccccctgactaagccaatgcagtacaaagtggttgtgccgaagattggcaacattttggatctctgtacagccttgtcagccttgtccggcataccagccgacaaaatgatcgtaacagacatttataatcataggttccacaggatttttgcaatggacgagaaccttagtagcattatggaacgagatgacatttatgtctttgagattaacatcaaccgcaccgaagacaccgagcacgtgataatccccgtctgtctgagagagaagtttagacactcttcttatactcaccatacagggagttctctgtttggacagcccttcctaatggctgtgcctagaaataacactgaagacaaattgtataatcttctactgctgaggatgtgtcggtatgtcaaaatatctacagaaactgaggagacagaaggaagcttgcactgttgcaaggaccagaacattaacgggaacgggcctaatgggatccacgaggaggggtctccctctgaaatggagacagatgagccagacgacgagagttcccaggatcaggaattgccttcagagaacgagaactcccagtccgaggactccgttggcggagataacgacagcgagaacggcttatgcacggaagatacttgtaaagggcaactgacaggacacaagaagcgactgttcacgttccaatttaataacctgggaaacaccgatattaattatatcaaagacgatacaaggcacatccgatttgatgatcgccaactgcgtctggatgagagatccttcctggctctggattgggacccagaccttaagaagaggtacttcgacgagaatgctgctgaggattttgaaaagcatgagtcagtcgagtataagccgcctaagaagcctttcgtaaagctcaaggactgcattgaactgttcactacaaaggaaaagctgggggctgaagacccctggtattgtcctaactgcaaggagcatcagcaagcaacgaaaaaattggatctttggtccctgccccctgttctggtggtgcacctgaagcgattttcatatagtcgctacatgcgggataagctggacaccctggtcgatttccctattaacgacttggacatgtccgagttcctgattaatccgaacgccggtccttgtcgttataacttaatcgctgtgagcaaccattatgggggaatgggcggagggcactatacagcattcgccaagaataaggatgacggcaagtggtactactttgacgatagttccgttagcaccgcctccgaggatcaaatcgtgtctaaggctgcctatgtgcttttttaccaaaggcaagacacattttccgggacaggatttttcccacttgacagagagactaagggtgcctccgcagctacaggtatacccttagaatccgatgaagacagcaacgataacgacaatgatattgagaatgaaaattgcatgcacaccaattag

SEQ ID NO: 88153 - DNA, 4748 bp, Artificial Sequence
  derived and/or modified sequence
atgctctggggcgtgccgccgccgtcgctgccacctcccctaccgctagtggaagaagatggcggaaggcggagcggcggatctggacacccagcggtctgacatcgcgacgctgctcaaaacctcgctccggaaaggggacacctggtacctagtcgatagtcgctggttcaaacagtggaaaaaatatgttggctttgacagttgggacaaataccagatgggagatcaaaatgtgtatcctggacccattgataactctggacttctcaaagatggtgatgcccagtcacttaaggaacaccttattgatgaattggattacatactgttgccaactgaaggttggaataaacttgtcagctggtacacattgatggaaggtcaagagccaatagcacgaaaggtggttgaacagggtatgtttgtaaagcactgcaaagtagaagtatatctcacagaattgaagctatgtgaaaatggaaacatgaataatgttgtaactcgaagatttagcaaagctgacacaatagatacaattgaaaaggaaataagaaaaatcttcagtattccagatgaaaaggagaccagattgtggaacaaatacatgagtaacacatttgaaccactgaataaaccagacagcaccattcaggatgctggtttataccaaggacaggtattagtgatagaacagaaaaatgaagatggaacatggccaaggggtccttctactcctaagtccccaggtgcatccaatttttcaactttaccaaagatctctccttcatctctatcaaataattataacaacatgaacaacagaaatgtgaaaaactcaaattactgtcttccatcatataccgcttataagaactatgattattcggaacctggaagaaacaatgaacagccaggcctctgtggcctaagtaacttgggaaatacgtgtttcatgaactcagctattcagtgtttgagcaacacacctccacttactgagtatttcctcaatgataagtatcaagaagaactgaattttgacaatcccttaggaatgagaggtgaaatagctaaatcttatgccgaactgatcaagcaaatgtggtctggaaagtttagctacgtcaccccaagagcctttaagacacaggtaggacgttttgcacctcagttctctggatatcagcagcaagactgtcaagaactgttagctttcctattagatggattacatgaggatttgaatagaattaggaaaaaaccatatatacaattaaaagatgcagatggaaggccagataaggtggttgccgaagaagcctgggaaaaccatttaaaacgaaatgattctatcatagtagatatatttcatggccttttcaaatcaactttagtttgtcctgagtgtgctaagatttcagtaacatttgatcctttttgttacttgacacttccattgcccatgaaaaaagaacgcaccttggaagtttacttagttagaatggatccacttaccaaacctatgcagtacaaagtggttgtccccaaaattggaaacatattagatctttgtacagcattgtctgctttgtcaggaatacctgcagataagatgatagttactgatatatacaatcatagatttcacagaatattcgctatggatgaaaaccttagtagtattatggaacgggatgatatttatgtgtttgaaattaacatcaataggacagaagatacagagcacgtgattattcctgtttgcctaagagaaaaattcagacactcgagttatacccaccatactggttcttcactttttggtcagccctttcttatggctgtaccacgaaacaatactgaagacaaactttataatctcctgctcttgagaatgtgccgatatgtcaaaatatctactgaaactgaagaaactgaaggatccctacactgctgtaaggaccaaaatattaatgggaatggcccaaatggcatacatgaagaaggctcaccaagtgaaatggaaacagatgagccagatgatgaatccagccaggatcaagaacttccctcagagaatgaaaacagtcagtctgaagattcagttggaggagataatgattctgaaaatggattatgtactgaggatacttgcaaaggtcaactcacgggacacaaaaaacgattgtttacattccagttcaacaacttaggcaatactgatatcaactacatcaaagatgataccaggcatataagatttgatgataggcagcttaggctagatgaaagatcttttcttgctttggattgggatcctgatttgaaaaaaagatattttgatgaaaatgctgctgaggactttgaaaaacatgaaagtgtggagtataaacctcctaaaaaaccctttgtgaaattaaaagattgcattgaactttttacaacaaaagaaaagctaggtgctgaagatccctggtattgtccgaattgtaaagaacatcagcaagccacaaagaaattggatttatggtccctgcctccagtacttgtagtacatctcaagcgattttcttacagtcgatacatgagagacaagttggataccttagttgattttcctatcaatgacttggatatgtcggaattcttaattaatccaaatgcaggtccttgccgctataatctgattgctgtttccaaccactatggagggatgggaggaggacactatactgcttttgcaaaaaataaagatgatggaaaatggtactattttgatgacagtagtgtctccactgcatctgaagaccaaattgtgtccaaagcagcatatgtactcttctaccagagacaagacactttcagtggaactggcttttttcctcttgaccgagaaactaaaggtgcttcagctgccactggcatcccattagaaagtgatgaagatagcaatgataatgacaatgatatagaaaatgaaaactgtatgcacactaactaatgaaagtcctagaagccataaaagagacactttcctgctggtggtatctatggaaatgatgaagttacccaccacattaaaacaaaagtctgagatggggagtttcagataaccgaatgtaaatcctttatcagattttaacttgtgcagtacttgaagtgaaacacaatgaaaactttaacagaaattgtctcttaatacatttacagtcttgtatttacaagctaaatatatataggaaatcacaaataaatcccttttaagtttgctgctgttttgattaattatgtttcctttaattttttggatgtgagttgatgacaaatgttaaatttgtggatgttggtcatttattttgctctaataatactgcaagaaaactatggctgaacttagtttttggataatctagttcatgtgcattaggctgccgtatatactactatgatatttagctgcagtatcaatgtggcataaatactgcggcagcattcttcgaaaaccgcattttcaaatttatccccgtaatcaatgtgggcctattaaaaaaccaaatcatgatacaagaaacaaccttggaaaagttatttccctttgtaatacctttaaaaatccagagtattatattcattttactgccactgtggaaacaggttctagatttcatactccatctaaagtcatttttcagttacatgtaagtattatttactgctattgggatctattcttcagatattcaaaaacattttttgctttaaaatgcatatctttaattgggtgttggtccaaaattaaaatttttgctgtctgtttttctctaccccattttgtggtaatttggcaacttgagctctcccaattattgtaatataaggacagacataatagtattctgtacccatagtaataattgcatcaagcttagatgagaaatttttttcatatactggcctttaaatcattaatggacaattggctataaaggtaggtctgttaactttctttgtgtgttcctgatggaattcaccatagccttacagcttttctcagaaggtaacttgttataagagaaatggcatttgcatgttccagagtcagaacctgtacagtatataaagcataaacaccttgaatttgattttagttcaccacattcaaggatccaggatgccaaaaatatgtgtgaacatttgaaacatttttatttgctgctttttccctttgatatagttgaaagaatgtattgtaaattggcatacaatactgcctttaatagaaaacctaaatgctggggcacatttcacatatcgactacctgagaaattgctttgtgtcccactgttattaaagcaaaaagtataatgttcttcacttgaactaatcaaatacaatagattataaattgtgtattgtaaataaaagttcactctgtgagtgcacattttggtaaattatttatttatgttagcatttaaaagtttaaaaaaaatgcatttgaccaggataaatgaggtatgttgatcatggctttgctttatatcttgatattaaagctggtttatcatcctggtattttaaaagctgctttggggttttttttttcttttttttttttttaatgtaaactaacctcctgcatgacagaggttaaaattttgtctgcacttgagttcacttgagtttacatttgaaatgtgcatgtttatttatatagatttcaataaagctattcaaggcctta

SEQ ID NO: 88154 - protein, 109 aa, Artificial Sequence
  derived and/or modified sequence
MKEEDSSFKLCVPGIVALQSPPNKAFRSTDTVGFLESELKKLLGMQQESRLWKLGSQEGRELLTRPEITVVEGEGYEVQRRLRHLPSPISVAQCLLLEEKGEMGNWPPE

SEQ ID NO: 88155 - protein, 235 aa, Artificial Sequence
  derived and/or modified sequence
MAEGGAADLDTQRSDIATLLKTSLRKGDTWYLVDSRWFKQWKKYVGFDSWDKYQMGDQNVYPGPIDNSGLLKDGDAQSLKEHLIDELDYILLPTEGWNKLVSWYTLMEGQEPIARKVVEQGMFVKHCKVEVYLTELKLCENGNMNNVVTRRFSKADTIDTIEKEIRKIFSIPDEKETRLWNKYMSNTFEPLNKPDSTIQDAGLYQGQVLVIEQKNEDGTWPRGPSTPKKPLEQSC

SEQ ID NO: 88156 - DNA, 330 bp, Artificial Sequence
  derived and/or modified sequence
atgaaggaggaggacagcagcttcaagctgtgcgtgcccggcatcgtggccctgcagagcccccccaacaaggccttcagaagcaccgacaccgtgggcttcctggagagcgagctgaagaagctgctgggcatgcagcaggagagcagactgtggaagctgggcagccaggagggcagagagctgctgaccagacccgagatcaccgtggtggagggcgagggctacgaggtgcagagaagactgagacacctgcccagccccatcagcgtggcccagtgcctgctgctggaggagaagggcgagatgggcaactggccccccgagtag

SEQ ID NO: 88157 - DNA, 960 bp, Artificial Sequence
  derived and/or modified sequence
ggctgctcctccatgttccgccaccagggtgccatttccctgatgatgagccaagagggacatgtgaggaggagggggccgggaccatctgccttgccgccccaccccttctctgtggccatacccaggggcttctcaaaacggtcacagcagcctcccttaaagctgggcatggggcgtatggtgacctacacctgcaagagcaagaaggcctggcggagaggtgaagtcagttctgcccatagcaagccaggaggtgttgggcaacctgcctgagaaggaggggaaggagccagcaggggacgcctctgggaaaacaggggcctcagacagcagccactttatccagatcctgcagttgaaggaagaatacctgcagagagccacagggccccgtgaggtcagccctgagccctccaccagggagaaggagtgtctgcttgaaggcctggaccaccccacttgctgccagcctgtcagtgaccaccacccattcacaggagactgcgtgttggcctcttccagggtggaggcaactccttggaaccacttccacagtttggacaaggagcttcaaaactcggccatggccaaggtttgcccagcgaggagaaaagtgaggaagagaaaatgaaggaagaggacagctcattcaagctctgtgtcccaggcattgttgccctccagtcgccaccgaacaaggctttcagatccacagacacagtgggtttcctggagtcggagttgaagaagcttctgggaatgcagcaagagtcccgcctctggaagctaggcagccaagagggccgagagctgcttacccggccagagatcaccgtggtggagggagaaggttatgaggtgcagagaagactgaggcatcttccttcacccatttctgtcgcccagtgcctgcttcttgaggagaaaggtgagatgggaaactggcctccagagtga

SEQ ID NO: 88158 - DNA, 330 bp, Artificial Sequence
  derived and/or modified sequence
atgaaggaagaagattcaagttttaagttatgcgtgcccggaatcgtggccctgcaatcgcctcccaataaagcctttagatctaccgacaccgtgggcttcctggagtcagaattaaagaagcttctgggcatgcaacaggaatcacgcttgtggaagctagggtctcaggaggggagggagctgcttactcggccggaaattactgttgtggaaggcgaaggctatgaggtccagaggcgtctcaggcatctacccagccctatctctgttgcgcaatgcctgctgctggaggagaaaggcgaaatgggaaactggccccctgagtag

SEQ ID NO: 88159 - DNA, 330 bp, Artificial Sequence
  derived and/or modified sequence
atgaaggaggaggacagcagcttcaagctgtgtgtgcccggcatcgtggccctgcagagcccccccaacaaggccttccgcagcacagacacagtgggcttcctggagagcgagctgaagaagctgctgggcatgcagcaggagagccggctgtggaagctgggcagccaggagggccgggagctgctgaccaggcctgagatcaccgtggtggagggggagggctatgaggtgcagaggcggctgcggcacctgcccagccccatctctgtggcccagtgcctgctgctggaggagaagggggagatgggcaactggcccccagagtag

SEQ ID NO: 88160 - DNA, 330 bp, Artificial Sequence
  derived and/or modified sequence
atgaaggaggaggacagcagcttcaagctgtgcgtgcccggcatcgttgcactgcagagtccgcccaacaaggcctttcggagtactgatactgttggctttctggagtcggaactgaagaaacttctgggaatgcaacaggaatctcggctgtggaaactgggtagtcaagaaggcagggagctacttaccaggccagaaatcaccgtagtcgagggcgagggctacgaagtccaaagaagactgcgtcatctgccgagcccgatctcagtggctcagtgcctgcttttggaagagaaaggcgaaatgggtaattggcctccggagtag

SEQ ID NO: 88161 - DNA, 330 bp, Artificial Sequence
  derived and/or modified sequence
atgaaagaggaggattctagcttcaagctgtgtgttcccggaatcgtggccctgcaatcccctccaaacaaggcttttcggagtactgacactgtcggttttcttgaatctgagttaaagaagcttcttggcatgcagcaggagtctaggctctggaagctcggaagccaggaaggcagagaactgctgactagacccgagatcactgttgtcgagggagaaggctacgaggtgcagcgcagactccgccacctgccatcccccatctccgttgctcagtgcctcttgcttgaggagaagggcgagatgggcaactggccaccagagtag

SEQ ID NO: 88162 - DNA, 708 bp, Artificial Sequence
  derived and/or modified sequence
atggccgagggcggcgccgccgacctggacacccagagaagcgacatcgccaccctgctgaagaccagcctgagaaagggcgacacctggtacctggtggacagcagatggttcaagcagtggaagaagtacgtgggcttcgacagctgggacaagtaccagatgggcgaccagaacgtgtaccccggccccatcgacaacagcggcctgctgaaggacggcgacgcccagagcctgaaggagcacctgatcgacgagctggactacatcctgctgcccaccgagggctggaacaagctggtgagctggtacaccctgatggagggccaggagcccatcgccagaaaggtggtggagcagggcatgttcgtgaagcactgcaaggtggaggtgtacctgaccgagctgaagctgtgcgagaacggcaacatgaacaacgtggtgaccagaagattcagcaaggccgacaccatcgacaccatcgagaaggagatcagaaagatcttcagcatccccgacgagaaggagaccagactgtggaacaagtacatgagcaacaccttcgagcccctgaacaagcccgacagcaccatccaggacgccggcctgtaccagggccaggtgctggtgatcgagcagaagaacgaggacggcacctggcccagaggccccagcacccccaagaagcccctggagcagagctgctag

SEQ ID NO: 88163 - DNA, 708 bp, Artificial Sequence
  derived and/or modified sequence
atggccgaaggaggcgccgccgacctggacacgcaacggtccgatatagctacactgctgaaaaccagcctcagaaagggggatacctggtacctggtcgatagtagatggttcaagcagtggaagaaatacgtggggtttgatagctgggataagtatcagatgggagatcagaatgtgtaccctggccccatcgacaattcaggcttacttaaggatggtgacgcccagtccctgaaggagcatctgatcgacgagctggattatatccttctgcccaccgagggatggaacaaactggtcagctggtacactttgatggaagggcaggaacctatcgcccgtaaggtggtagagcaggggatgtttgtgaagcattgtaaggtggaggtttacttaacagagctgaagttgtgcgagaatggaaacatgaacaacgttgtgactaggagattttccaaagccgacaccattgatactattgaaaaagaaattcgcaaaatcttcagcattcccgatgagaaagaaacccgcctttggaataagtacatgtctaatacatttgagcctctgaataaacccgattctactatccaggatgccggcctataccagggacaggtcctcgtaattgagcagaagaacgaggacgggacctggccgcgtggacctagcactcctaagaagcctctggagcaatcttgctag

SEQ ID NO: 88164 - DNA, 708 bp, Artificial Sequence
  derived and/or modified sequence
atggccgagggcggcgctgctgacctggacacccagaggagtgacatcgccaccctgctgaagaccagcctgaggaagggggacacctggtacctggtggacagccgctggttcaagcagtggaagaagtatgtgggctttgacagctgggacaagtaccagatgggagaccagaatgtgtacccaggccccatcgacaacagcggcctgctgaaggatggagatgcccagagcctgaaggagcacctgattgatgagctggactacatcctgctgcccacagagggctggaacaagctggtgtcctggtacaccctgatggagggccaggagcccatcgccaggaaggtggtggagcagggcatgtttgtgaagcactgcaaggtggaggtgtacctgacagagctgaagctgtgtgaaaatggaaacatgaacaacgtggtgacccggcgcttcagcaaggctgacaccatcgacaccatcgagaaggagatcaggaagatcttcagcatcccagatgagaaggagacccggctgtggaacaagtacatgagcaacacctttgagcccctgaacaagccagacagcaccatccaggatgctggcctgtaccagggccaggtgctggtgattgagcagaagaatgaagatggcacctggccccggggccccagcacccccaagaagcccctggagcagagctgctag

SEQ ID NO: 88165 - DNA, 708 bp, Artificial Sequence
  derived and/or modified sequence
atggccgagggcggcgccgccgacctggacacccagcggagcgacatagccaccctactgaaaacaagtttgcggaagggagatacgtggtaccttgttgactctcgttggtttaagcagtggaagaaatatgtaggattcgattcatgggataagtaccagatgggcgatcagaacgtctatcctggacctatcgataacagcgggctgctgaaggacggcgatgctcagagtctaaaggaacaccttatagatgagctcgattacatcctgctcccaaccgagggatggaataagctggtttcgtggtacacattgatggagggacaggaaccaatcgctcgcaaagtcgtggagcagggaatgttcgtaaagcattgtaaggtggaggtgtatcttaccgaacttaagctgtgcgagaacggaaacatgaacaatgttgtaacacgccgcttcagcaaagccgatacaatagacaccatcgagaaggagattagaaaaattttttctatccctgatgagaaggaaacaaggttgtggaacaagtacatgtcaaatacgttcgagcccctgaacaagcctgattccaccatacaggatgccgggctttaccagggccaggtgctggttatcgaacagaaaaatgaggatggaacatggcctaggggaccatcgacccccaaaaagcctttggaacagagctgctag

SEQ ID NO: 88166 - DNA, 708 bp, Artificial Sequence
  derived and/or modified sequence
atggctgaagggggagctgcagatcttgatacgcagcggtctgacatcgccactctgctgaaaacctccctccggaaaggcgatacctggtatctggtggactctcgctggtttaaacagtggaagaaatatgtcggtttcgacagctgggacaaatatcagatgggtgaccagaacgtgtatcccggacccattgataacagcgggctgctgaaagacggggacgctcaaagtctgaaagagcatctgattgacgaacttgactacatactactgcctacagagggatggaacaagctcgtgagctggtacacattgatggaagggcaggagcccattgccaggaaggtggtcgaacagggaatgttcgtcaagcactgcaaggtcgaggtgtatctgacagaactgaagctttgcgaaaacgggaacatgaataatgtggtcacacggaggttcagcaaggcagatactatcgacacaatagagaaggagatcagaaaaatatttagcattcccgacgagaaagaaacccgtctgtggaacaagtacatgagcaacacattcgaaccactcaataagcctgacagcactatccaggatgctgggctgtatcagggtcaggtactagtgattgagcagaaaaacgaagatggaacatggcctcgaggtccttcaacccctaagaaaccattggaacagagctgttag

SEQ ID NO: 88167 - DNA, 2226 bp, Artificial Sequence
  derived and/or modified sequence
taccgctagtggaagaagatggcggaaggcggagcggcggatctggacacccagcggtctgacatcgcgacgctgctcaaaacctcgctccggaaaggggacacctggtacctagtcgatagtcgctggttcaaacagtggaaaaaatatgttggctttgacagttgggacaaataccagatgggagatcaaaatgtgtatcctggacccattgataactctggacttctcaaagatggtgatgcccagtcacttaaggaacaccttattgatgaattggattacatactgttgccaactgaaggttggaataaacttgtcagctggtacacattgatggaaggtcaagagccaatagcacgaaaggtggttgaacagggtatgtttgtaaagcactgcaaagtagaagtatatctcacagaattgaagctatgtgaaaatggaaacatgaataatgttgtaactcgaagatttagcaaagctgacacaatagatacaattgaaaaggaaataagaaaaatcttcagtattccagatgaaaaggagaccagattgtggaacaaatacatgagtaacacatttgaaccactgaataaaccagacagcaccattcaggatgctggtttataccaaggacaggtattagtgatagaacagaaaaatgaagatggaacatggccaaggggtccttctactcctaaaaagccactagagcagagttgctagtgaacagtttaatttccacatacgtcacagaaagagagctaaagggctctggttatcatccacagactgaccagtcaacccctaaataacctgatattaactccacaaatgttagctagattggaccatgtgtaatctgagtcagaagtcggaatcagaagagataaatgatgcgttatcactcaacagtaatgtctgcaacagtattgtaaaattgttgtactttacctgtcgaccacatccatccttagctctctgatcaccttactatttaaggacagtccctctactctacctgtagtatttatctcaatgcttcctggtccttgctttttcttttattatctcctctctcctacatatataaatgcctagcatagtgccacacatatggtaaacaccagtttattatttttatttcttttctaatgtcatcttccccctcagcctatgaatataaacacatcttcatctttaaaaccaaaaaccatatacttcctccatttaccatccttaagcttttttttctttgacagccacctacatttaaaaggctatacttaatgttgcttgccacccattcaggatttaacaaagttcttatttgtctttcttttaacctagtttatttgacctgtctttagtatttctttttgataaccatcttctaaagaaattctctgaatttgaatgcatgatacgaccttttatgccaaggactttgcctctctgaccagtcctttgtctgtctagctcggttcctctttagggttgccacatttagttttgcaaattgtgcacagctctaggaggcatcattcatatcatatgtagtctatgtgataggccctccttggcacggtgcagtgcagcttcactaactgtttgcagcagctctactcagaccttaaatgcattgacattcactaaatttctgtcagaagacctcttttatcataccatagtaggtgttcaaaattaggtgattctatgctaatcctctcccccagctcaaactgacacaaaatatgccattctgtatttctagactagaccacttttctgaattccagatttttcataaatttcatgtaggactcaccacctcaaattaaaccaaatctttttacccctccttctcccatcccctcaacctaaactgtcttcatttcctgtattgcctatttcaagtaccatccaagagccatcctgagttcctcctccagcctttcttctcttgtctagttagtcagcaagtcttgcagattctgcctcctcacctgaagttttcaaacagtacccctttacattcttgaaaattattaaagatccaaagaacttctgttatatgggttatagctgttaatatttgtcatattcgaaattgaaataagattttaaggtattttaaaataacagtacaaaaccattgtattttgacatgaataacacttttatgaaaataactatattccaaaacaataaaattaccaaaaagtt

SEQ ID NO: 88168 - protein, 208 aa, Artificial Sequence [sequence omitted]

SEQ ID NO: 88169 - protein, 132 aa, Artificial Sequence
  derived and/or modified sequence
MREQYMRTGDGFLIVYSVTDKASFEHVDRFHQLILRVKDRESFPMILVANKVDLMHLRKITREQGKEMATKHNIPYIETSAKDPPLNVDKAFHDLVRVIRQQIPEKSQKKKKKTKWRGDRATGTHKLQCVIL

SEQ ID NO: 88170 - protein, 23 aa, Artificial Sequence
  derived and/or modified sequence
MATSAVPSDNLPTYKLVVVGDGG

SEQ ID NO: 88171 - DNA, 627 bp, Artificial Sequence
  derived and/or modified sequence
atggccacttccgcagttccatccgataacttgccaacatataagttagtggtggtcggtgacggcggggtgggaaaaagcgcactgaccatccagttcttccagaagatctttgtgccagactacgacccaaccattgaggatagctacctcaagcatactgagattgacaaccaatgggctatcctagatgtactggatacggctggacaggaggagtttagtgccatgcgcgagcagtacatgcgtacgggggatgggttcttaattgtgtattcagtgacggataaggccagtttcgaacatgtggaccggtttcaccagctgattttaagagtgaaggatagggagagcttcccaatgattcttgtcgctaataaagtagacctgatgcaccttcgtaaaatcacaagagagcaggggaaagaaatggctacaaagcacaacataccatacatcgaaacgagcgctaaggatccgcctctgaacgttgacaaggcttttcacgatttggtaagagtaattaggcagcagatccccgagaagtctcaaaaaaagaagaagaaaaccaagtggcggggcgatcgggcaacaggcactcacaagctgcagtgcgtcatactgtag

SEQ ID NO: 88172 - DNA, 627 bp, Artificial Sequence
  derived and/or modified sequence
atggctacaagtgccgtgccatccgataatctgcccacgtataaactcgtggtggtcggtgatggtggagttggaaaaagtgcgctgacaatccagttcttccagaaaatcttcgtacctgactatgaccctaccattgaggacagctatctcaaacacaccgagatcgataatcagtgggctatccttgatgtcctcgacaccgccggccaggaagagttctcagcgatgcgcgagcagtacatgaggaccggtgatggatttctaatcgtgtactcagtgaccgacaaggctagttttgagcatgttgaccggttccaccaattgattcttcgcgtcaaagatcgggagagttttccaatgatcctcgtggcaaacaaggtcgatctgatgcacctgcggaagataactagagaacagggaaaagaaatggcaacaaaacataatataccatatatagagacatccgctaaagacccgcctctgaacgttgataaggcattccatgatctcgtacgtgtgatcaggcagcaaattccggaaaagagtcagaagaaaaaaaagaagaccaaatggcgaggcgatagggcaacgggaactcataaacttcagtgcgtgatcctgtag

SEQ ID NO: 88173 - DNA, 627 bp, Artificial Sequence
  derived and/or modified sequence
atggccacaagcgctgtaccttccgacaatcttccaacgtataagctcgttgtggtgggagacgggggggtcggaaagtctgcacttactatacaattctttcagaaaatcttcgtaccagattatgatcctacaatcgaagacagctacctgaaacatactgaaattgacaatcaatgggcaatcctggatgttctcgataccgctggacaggaggagttctcagccatgagggaacaatacatgagaaccggggacggttttctcatcgtgtattcagtcacggacaaagcctctttcgagcacgtggatcgttttcatcagctgatactaagagtgaaggatagggagtccttccctatgatcctcgtagccaataaagttgatctcatgcacctgcggaaaatcacgcgggaacagggaaaagagatggcaacaaaacacaatatcccgtatatcgaaacatccgccaaggacccccccttgaacgtggataaagcttttcatgacctcgttcgtgttatccgccaacagataccagagaaaagccagaaaaagaagaaaaagactaagtggagaggggacagagcaacaggcacgcataagttgcagtgtgtgatcctttag

SEQ ID NO: 88174 - DNA, 627 bp, Artificial Sequence
  derived and/or modified sequence
atggccaccagcgctgtgcccagcgacaacctgcccacctacaagctggtggtggtgggagatggaggagtgggcaagagcgccctgaccatccagttcttccagaagatctttgtgcctgactatgaccccaccattgaagattcctacctgaagcacacagaaattgacaaccagtgggccatcctggatgtgctggacacagctggccaggaggagttcagcgccatgagggagcagtacatgaggactggagatggcttcctgattgtgtacagcgtgacagacaaggccagctttgagcacgtggaccgcttccaccagctgatcctgcgggtgaaggaccgggagagcttccccatgatcctggtggccaacaaggtggacctgatgcacctgaggaagatcacccgggagcagggcaaggagatggccaccaagcacaacatcccctacatcgagaccagcgccaaggacccccccctgaatgtggacaaggccttccatgacctggtgcgggtcatccggcagcagatccctgagaagagccagaagaagaagaagaagaccaagtggaggggggaccgggccaccggcacccacaagctgcagtgtgtgatcctgtag

SEQ ID NO: 88175 - DNA, 4538 bp, Artificial Sequence
  derived and/or modified sequence
attctcctgcctcagcctcccgagtagatgagatcacaggcacgtgccgccatgccgggttgacttttgtatttttagtagagacggggtttcaccatgttgcctaggctggtcttgaactcctgacctcaggcgattcacccgcctcggcctcccaaagtgttaggattacaggcgtgagccaccgcgcccggcttgaattgtacacttcaaaaggtggaattttatggtgttgaattatatctttatttttttaacggggggaaaatgacgccgctggagaggagttagcggaactgaaacaatgaaatggtgcgcgagtgtcgcctgtccccgtcgcatccatcccaacgaagtttgggccctggaacggtgcacccagaaggcctgcggggagagacgctggggcatgatctggaagaaagacgtctcaggattcgaagggaatgcagctaaggtggcggcggaggttcgcctaggactggggaggcgtccctaggctcagaagttggcccggccggagcggagatttaaaggttggagcgcagaggctcttaaagaggccgagtcgaattcccactcggcgtccaccttaaagccagctccccggcaccacggatctgacccgggtctgacctacgagaaacatggcaaccagcgccgtccccagtgacaacctccccacatacaagctggtggtggtgggggatgggggtgtgggcaaaagtgccctcaccatccagtttttccagaagatctttgtgcctgactatgaccccaccattgaagactcctacctgaaacatacggagattgacaatcaatgggccatcttggacgttctggacacagctgggcaggaggaattcagcgccatgcgggagcaatacatgcgcacgggggatggcttcctcatcgtctactccgtcactgacaaggccagctttgagcacgtggaccgcttccaccagcttatcctgcgcgtcaaagacagggagtcattcccgatgatcctcgtggccaacaaggtcgatttgatgcacttgaggaagatcaccagggagcaaggaaaagaaatggcgaccaaacacaatattccgtacatagaaaccagtgccaaggacccacctctcaatgtcgacaaagccttccatgacctcgttagagtaattaggcaacagattccggaaaaaagccagaagaagaagaagaaaaccaaatggcggggagaccgggccacaggcacccacaaactgcaatgtgtgatcttgtgacaggcctgaggccctgggcacagtgacggtggcctggccagccctcgggacccctccccacctaactgcactgaaaccatttctaaccacaacccttggcccaaggacttggtacaggaagggagaagggcaggtgggcagggagcagacagggtctggctttgcccagagggcacgggctttcccacctctcaaagagacaaggaagccacctgtaagcagaagcagcatccaagtgcccctggcccccccatgtgttgattcaacccggttcctccccctctctcggtgggtgtgttgtttattgtaactacatagtgttggtttgatgtggaagtgtttatccacatacaaagtacaaaacaagccatgaacaagcttctttcccttaccccccatccacaatgtctgagcttggatgtcttttatagatttttaaattattttagtgattattattttattaaaggggtctgggctcactgcctggtgaagtttcaagtgttcagcagacctctctggtaacatatctggaatattgttgttgttttttaaccgagttttcccatcagtgccaaaactcaactcaatctgaaagtagagtgtctgagaggacagaaggtaatgggaactgtagctggaggcctcaggccatgggtcaaacctgggagggaaagagaccctacacatggcctagaaatgagagaagagagaggtatttacccagaggattttcctatggttggggatgcaaatattagaaaacagattgtattttgctgaggggagtggctgtcatgagcatgtcagttctaaaaggggttttcattatcctggaaatgtataaactaaagtaagctgattggctttgcaaacatgttcatttgtttttcagacagtatgggttaagttctctgccctccccaggggtctgaggaggctctgggtttctcagatctgtctcttgctgcgttttcacatcagctgtgctgcttggtgcctctctgatacgaatacactgacacgtcaaagtaacctaatgtggacaccatccagaaaactccagttcatgctggatcttaaccaaaaatgattcaatactgttatcactaaaacagcaccaagacctgaagccatcttcccttggagtcaactgactaccacctctataagcctagtcaatgagcagaccccttccagtatttgtaaaagtagtactaggttgcctttttggcaatttttattgacctgttgaatcttgactataaaatgatctgagaagtaaggaaggctgggctgatgtgtggctctcatataccttctgcaagggggcagtctccccagctccctgatgatgctcacccccgcccccccacctcaggtgctgctggtgtgagccaaagactggagtttttccagctggggtgggagtggagagacaacaggaacaacgctgcaccaaagaaaaggtcagaataaaaggcagcacagctggtgaccttattttctagatgttacaaatcaggtcactatgcaaactagaatatcctcagcaggtggcctggccactctggagaaagaaacccaaggaaagtgagcacccaactggatgccaagacacccgggttctgaaaatgtgctgtgttcctacctcggcaagatcaccagcactgaggggcccagctggagaatgattctgctacaaaaggagacagttgagacttttgcttgttggaaatcaaacttcttatttgtctaaattgcccctttttctgttcctaaaaggaaggataagagagaacattccaggtgaggcacttcaaagtttccttagaccctatagtgttaagaggtattttaaacactaaaaggacaaagctcttcccaatccttatgcttccctaagtggtatctgcagcagtttgttgtgtgcagtttgatggcagctgcaaactggaggtgaggcggaggaaaggcaggtaggaaggagtaaggatggagatgctcagaatcaagagcatggcggagtaggagaagaagccctgcacacagggcagtgtccacagccagaaaactcctgctgggcaccaaccactacgagcataccccatgcccaccgtggagctgcaactcctcgacagcactgagtttgatagtctcactggaagcagatcagctgatgtagaacagagacctcggccataaaggtgagaagacatagggatttcaaccacacagttgggacagaagggacagtgcatctgttcatccatcctgcacttggcccacgttgaactccatggtgcctgagagagactagttaagggttggtcttctgtatcctctgctgttgagcctctggtaagctttcatctcccatgaactcatttccccataaatgaaatgggtaaataatgccccatttgtagaagtgggccctcatgactgaggtagcttccagataggccagagtagagtgtagagtgtgccccgtgacatccctccatcttctcctccattatcatctagcagggtcagactgggaaacctggttggccacgccacaccatgaccgaggagccaactgggacttctggctgtttgacatcctcatgttcccgttggtcttccggagaatagtgctaccctcacatcccctggagcacagccttcctgaaatgccctcaccccatgcctttgccattgtgtgctctcagatttcttccactgtttgacaccctccttagagggctgctcttttttttccagagataatcctagccatcctctccactcccacggctggggacaatggccacttactacctgtgcactttgccactcgggacacctggatggtttctcttaggactttgcccacctccttctcatggcacttgctgtggaaaatgcctggctggcctcgtggggcctgtctcacttttccaggagacatgacccactaacgtggcaactttaacccaaaggcccctcagacatgttacagcaaatctggagccacagacaggttccctccattggcagcccattgtgtttgaaattccatgtcgggtttacttggaatgaaagatacttgaattattgtgcgcctgtgagcgcccagcttctgtttcatagtcttaacaggtggccattgtcgtgaaacgagtgatgcctgaagatctcagtgatgtttgaaccttctgtgtaactttttattaagtctttgtatctctcgactgattaataaagaagagaaacacg

SEQ ID NO: 88176 - DNA, 1803 bp, Artificial Sequence
  derived and/or modified sequence
agggtcgaggcacccggcccgggctccccactggcgcgcccgcagcggcgctctatttttagcaggcgctgtggcaatataaggaatgcgcggcgcgctaggcgctcggggcgcacgctggcggcgcggtcgctttaaggaggcgccggggcggggacggaccggagtggccggctggcggggagccgtcagtccggcggccgcggggcccggcgggcgcgacgctgcctcctcaccggcgcaggctaggagggggcggcctgagtgccgtagccgagccggggctggagcgcgcggtctgacctacgagaaacatggcaaccagcgccgtccccagtgacaacctccccacatacaagctggtggtggtgggggatgggggtgtgggcaaaagtgccctcaccatccagtttttccagaagatctttgtgcctgactatgaccccaccattgaagactcctacctgaaacatacggagattgacaatcaatgggccatcttggacgttctggacacagctgggcaggaggaattcagcgccatgcgggagcaatacatgcgcacgggggatggcttcctcatcgtctactccgtcactgacaaggccagctttgagcacgtggaccgcttccaccagcttatcctgcgcgtcaaagacagggagtcattcccgatgatcctcgtggccaacaaggtcgatttgatgcacttgaggaagatcaccagggagcaaggaaaagaaatggcgaccaaacacaatattccgtacatagaaaccagtgccaaggacccacctctcaatgtcgacaaagccttccatgacctcgttagagtaattaggcaacagattccggaaaaaagccagaagaagaagaagaaaaccaaatggcggggagaccgggccacaggcacccacaaactgcaatgtgtgatcttgtgacaggcctgaggccctgggcacagtgacggtggcctggccagccctcgggacccctccccacctaactgcactgaaaccatttctaaccacaacccttggcccaaggacttggtacaggaagggagaagggcaggtgggcagggagcagacagggtctggctttgcccagagggcacgggctttcccacctctcaaagagacaaggaagccacctgtaagcagaagcagcatccaagtgcccctggcccccccatgtgttgattcaacccggttcctccccctctctcggtgggtgtgttgtttattgtaactacatagtgttggtttgatgtggaagtgtttatccacatacaaagtacaaaacaagccatgaacaagcttctttcccttaccccccatccacaatgtctgagcttggatgtcttttatagatttttaaattattttagtgattattattttattaaaggggtctgggctcactgcctggtgaagtttcaagtgttcagcagacctctctggtaacatatctggaatattgttgttgttttttaaccgagttttcccatcagtgccaaaactcaactcaatctgaaagtagagtgtctgagaggacagaaggtaatgggaactgtagctggaggcctcaggccatgggtcaaacctgggagggaaagagaccctacacatggcctagaaatgagagaagagagaggtatttacccagaggattttcctatggttggggatgcaaatattagaaaacagattgtattttgctgaggggagtggctgtcatgagcatgtcagttctaaaaggggttttcattatcctggaaatgtataaactaaagtaagctga

SEQ ID NO: 88177 - DNA, 1534 bp, Artificial Sequence
  derived and/or modified sequence
aggtgtggccgccctccgggctcggccgcgctctccgcttgcggggtgcgccctgggaccggctgtgcgtggcgttttgcccccatcgcgggctcccgcgtaacggtgtgcgttcgtgaaatcggccacgaccaagaccccagtggggagggcctgcgcgccgctcagagagaccctttcatgttctggacacagctgggcaggaggaattcagcgccatgcgggagcaatacatgcgcacgggggatggcttcctcatcgtctactccgtcactgacaaggccagctttgagcacgtggaccgcttccaccagcttatcctgcgcgtcaaagacagggagtcattcccgatgatcctcgtggccaacaaggtcgatttgatgcacttgaggaagatcaccagggagcaaggaaaagaaatggcgaccaaacacaatattccgtacatagaaaccagtgccaaggacccacctctcaatgtcgacaaagccttccatgacctcgttagagtaattaggcaacagattccggaaaaaagccagaagaagaagaagaaaaccaaatggcggggagaccgggccacaggcacccacaaactgcaatgtgtgatcttgtgacaggcctgaggccctgggcacagtgacggtggcctggccagccctcgggacccctccccacctaactgcactgaaaccatttctaaccacaacccttggcccaaggacttggtacaggaagggagaagggcaggtgggcagggagcagacagggtctggctttgcccagagggcacgggctttcccacctctcaaagagacaaggaagccacctgtaagcagaagcagcatccaagtgcccctggcccccccatgtgttgattcaacccggttcctccccctctctcggtgggtgtgttgtttattgtaactacatagtgttggtttgatgtggaagtgtttatccacatacaaagtacaaaacaagccatgaacaagcttctttcccttaccccccatccacaatgtctgagcttggatgtcttttatagatttttaaattattttagtgattattattttattaaaggggtctgggctcactgcctggtgaagtttcaagtgttcagcagacctctctggtaacatatctggaatattgttgttgttttttaaccgagttttcccatcagtgccaaaactcaactcaatctgaaagtagagtgtctgagaggacagaaggtaatgggaactgtagctggaggcctcaggccatgggtcaaacctgggagggaaagagaccctacacatggcctagaaatgagagaagagagaggtatttacccagaggattttcctatggttggggatgcaaatattagaaaacagattgtattttgctgaggggagtggctgtcatgagcatgtcagttctaaaaggggttttcattatcctggaaatgtataaactaaagtaagctgattggctttgcaaacatgttcatttgtttttcagacagtatgggttaagttctctg

SEQ ID NO: 88178 - DNA, 856 bp, Artificial Sequence
  derived and/or modified sequence
gctgtggtcacaactagggcctgggctcatgcattgaactgatctggctgaggcatcagacacggtgccagtcctgccctgcggggaagacaagagcacaaagtgacaagccagtgtggtctgacctacgagaaacatggcaaccagcgccgtccccagtgacaacctccccacatacaagctggtggtggtgggggatgggggtgtgggcaaaagtgccctcaccatccagtttttccagaagatctttgtgcctgactatgaccccaccattgaagactcctacctgaaacatacggagattgacaatcaatgggccatcttggacgttctggacacagctgggcaggaggaattcagcgccatgcgggagcaatacatgcgcacgggggatggcttcctcatcgtctactccgtcactgacaaggccagctttgagcacgtggaccgcttccaccagcttatcctgcgcgtcaaagacagggagtcattcccgatgatcctcgtggccaacaaggtcgatttgatgcacttgaggaagatcaccagggagcaaggaaaagaaatggcgaccaaacacaatattccgtacatagaaaccagtgccaaggacccacctctcaatgtcgacaaagccttccatgacctcgttagagtaattaggcaacagattccggaaaaaagccagaagaagaagaagaaaaccaaatggcggggagaccgggccacaggcacccacaaactgcaatgtgtgatcttgtgacaggcctgaggccctgggcacagtgacggtggcctggccagccctcgggacccctccccacctaactgcactgaaaccatttctaaccacaac

SEQ ID NO: 88179 - DNA, 627 bp, Artificial Sequence
  derived and/or modified sequence
atggccaccagcgccgtgcccagcgacaacctgcccacctacaagcttgtcgtggttggagacggcggagttggaaagagcgccctgactattcagttctttcagaagattttcgtccccgactacgatccaactatagaagactcatacctgaagcatactgaaattgacaatcagtgggccattctcgatgtgctggacacggcaggtcaggaagagttctccgcaatgcgtgagcagtatatgaggaccggagacggcttcttgattgtctattccgttaccgacaaggcaagtttcgaacatgtcgataggtttcaccagctcatcctgagggtgaaagatagagagtcattccccatgatcctggtggccaacaaggtcgaccttatgcacctaagaaagatcacccgagaacaggggaaggagatggcaacaaagcataatattccgtatattgaaacatcagctaaggacccacctctaaacgttgataaagcttttcacgacctggtgagggtgatccgccaacagattccggaaaaatcccagaagaagaagaagaagactaagtggaggggagatagagctaccggcacccacaagctacaatgtgtgatactttag

SEQ ID NO: 88180 - DNA, 627 bp, Artificial Sequence
  derived and/or modified sequence
atggccaccagcgccgtgcccagcgacaacctgcccacctacaagcttgtggtcgtcggggatggcggcgtgggtaagtctgccctgaccatccagtttttccagaagatttttgttcctgattatgatcccaccattgaggattcctacttgaagcacactgaaattgacaaccagtgggccatccttgatgtccttgacactgccgggcaagaggaatttagcgcaatgcgcgaacagtatatgagaactggagatggatttctcattgtctattccgtgacagacaaggcatcttttgaacacgtggacagattccaccagctgattctcagagtcaaggatagagagtcgttccctatgattctcgtcgcaaacaaggtagatctgatgcatctacgcaagatcacaagagaacaaggtaaagaaatggctaccaagcacaatataccctatatcgaaacaagtgctaaggacccgcccctgaacgtcgacaaggcgtttcatgacctggtccgcgtcatacgacagcagatccccgaaaagagtcagaagaagaagaaaaaaactaaatggcgaggcgaccgggctaccggtactcacaagctgcagtgcgtgattttatag

SEQ ID NO: 88181 - DNA, 627 bp, Artificial Sequence
  derived and/or modified sequence
atggccaccagcgccgtgcccagcgacaacctgcccacctacaagctggttgtggtgggcgacggcggggtcggcaaaagcgctctgacaattcagttttttcaaaagatatttgtgcccgattatgaccccaccatcgaagactcttacttaaagcacacggagatagacaatcagtgggcgatactggatgtgctggataccgcaggccaggaagagttttcagctatgcgggaacagtatatgaggaccggagatggcttcctcatcgtctatagtgtgaccgataaagcttcctttgagcatgtggacaggtttcatcagcttatcctccgggtcaaagatcgggaaagtttccccatgattctagtggcaaacaaagtggacctcatgcacttgagaaagattacaagagagcagggcaaagaaatggcgaccaagcacaacattccttacattgagacatctgcaaaagatccacccctgaacgtcgataaagcctttcacgacctcgtccgggtcatcaggcaacagattcccgagaagagccagaagaagaagaaaaagactaagtggcgaggggatagggccaccggcacacacaagctccagtgcgtgattttgtag

SEQ ID NO: 88182 - DNA, 627 bp, Artificial Sequence
  derived and/or modified sequence
atggcaacatcagcggttccctctgataaccttcccacttacaagctcgtagtggtgggcgatggcggagttggcaaaagcgcattgacaatccagtttttccagaagatatttgtacccgactacgatccaaccatcgaggattcctacctcaaacatactgaaattgacaatcagtgggccattctcgacgtgctcgatactgcaggacaggaggagttttccgctatgagggagcaatatatgcgcactggggatggcttcctcattgtgtatagcgtcaccgacaaagccagctttgaacatgtcgaccggtttcaccagctcatcctacgcgtgaaggatcgggagagttttcctatgattcttgtggccaacaaagtggacctcatgcatcttcgcaagatcacacgagagcaagggaaggagatggctactaaacacaatattccttacatcgaaacttcagctaaggaccctcctttgaatgtggacaaggctttccacgacctggttcgcgtgattcggcagcagattccagagaagtcacagaagaagaaaaaaaagaccaagtggaggggtgatagagcaactggtacacacaagctccaatgtgtgatactgtag

SEQ ID NO: 88183 - DNA, 627 bp, Artificial Sequence
  derived and/or modified sequence
atggcaacaagtgccgttcccagtgacaatctgccgacttataagcttgtggtggtgggagacgggggagtgggaaagtccgctcttactatccagttcttccagaagatatttgtgcccgactacgacccaaccatcgaggatagttacctaaagcacactgagattgataatcaatgggcgattctggatgtcctagacactgcaggacaggaagagtttagcgccatgcgtgaacagtacatgcgcaccggtgacggtttccttattgtatactccgtgactgataaggcctcgttcgagcacgttgatcgcttccatcagctgattctgagagtaaaggacagggagtctttccccatgattctagtcgcaaacaaagttgacctgatgcaccttcggaaaatcacacgggagcaagggaaagaaatggctactaagcacaatattccatacattgaaaccagcgcaaaggacccaccactcaacgtggacaaagcattccatgatctcgtaagggtgatacgtcagcagattcccgagaaatctcagaagaagaaaaaaaagaccaagtggagaggggatcgggcaacaggcacgcataaactccagtgcgtgatcctgtag

SEQ ID NO: 88184 - DNA, 627 bp, Artificial Sequence
  derived and/or modified sequence
atggcaacatctgccgtgccctctgacaatttgcccacatacaaattagtggtcgtcggcgatggcggagtaggtaaatctgcccttactatacaattctttcaaaaaatctttgtccctgattatgacccgacaattgaggattcttaccttaaacacactgaaatagacaaccaatgggcaatccttgatgtgctcgatactgcgggtcaggaggagttttctgccatgcgagaacaatacatgcgaacaggtgatggatttctgatcgtgtattctgtcaccgacaaggcctcattcgaacacgtggaccggttccaccagctaattcttcgggtgaaagaccgagagtccttccctatgattttggtggcaaataaggtggacctgatgcacttgcgcaaaattacaagagaacagggaaaagagatggctacgaagcataatatcccatacatcgagacaagcgctaaggacccaccactgaatgtggataaggccttccatgacttggtcagagtaatccggcagcagatacccgaaaagtcacaaaaaaaaaaaaagaagaccaagtggcggggagatagggccacaggaacccataaactacagtgtgtgatcctctag

SEQ ID NO: 88185 - DNA, 627 bp, Artificial Sequence
  derived and/or modified sequence
atggccaccagcgccgtgcccagcgacaacctgcccacctacaagctggtggtggtgggcgacggcggcgtgggcaagagcgccctgaccatccagttcttccagaagatcttcgtgcccgactacgaccccaccatcgaggacagctacctgaagcacaccgagatcgacaaccagtgggccatcctggacgtgctggacaccgccggccaggaggagttcagcgccatgagagagcagtacatgagaaccggcgacggcttcctgatcgtgtacagcgtgaccgacaaggccagcttcgagcacgtggacagattccaccagctgatcctgagagtgaaggacagagagagcttccccatgatcctggtggccaacaaggtggacctgatgcacctgagaaagatcaccagagagcagggcaaggagatggccaccaagcacaacatcccctacatcgagaccagcgccaaggacccccccctgaacgtggacaaggccttccacgacctggtgagagtgatcagacagcagatccccgagaagagccagaagaagaagaagaagaccaagtggagaggcgacagagccaccggcacccacaagctgcagtgcgtgatcctgtag

SEQ ID NO: 88186 - DNA, 399 bp, Artificial Sequence
  derived and/or modified sequence
atgcgggaacagtacatgagaacaggagatggattcttaattgtgtacagtgttactgacaaggcctcctttgagcatgtggaccgctttcaccagctgatcctgagagtgaaggatagagaatcttttcccatgatcctcgtagccaataaagtggatttaatgcacctgcggaagatcacaagagaacagggcaaagaaatggctacgaaacacaacataccatatattgagacatccgccaaagaccctcctcttaatgtggataaggccttccatgacctcgtcagggttattaggcaacagatacccgagaaaagccaaaaaaagaaaaagaagaccaagtggaggggggaccgcgccaccggtacccataaacttcaatgcgtgatcctgtag

SEQ ID NO: 88187 - DNA, 399 bp, Artificial Sequence
  derived and/or modified sequence
atgagggagcagtacatgaggactggagatggcttcctgattgtgtacagcgtgacagacaaggccagctttgagcacgtggaccgcttccaccagctgatcctgcgggtgaaggaccgggagagcttccccatgatcctggtggccaacaaggtggacctgatgcacctgaggaagatcacccgggagcagggcaaggagatggccaccaagcacaacatcccctacatcgagaccagcgccaaggacccccccctgaatgtggacaaggccttccatgacctggtgcgggtcatccggcagcagatccctgagaagagccagaagaagaagaagaagaccaagtggaggggggaccgggccaccggcacccacaagctgcagtgtgtgatcctgtag

SEQ ID NO: 88188 - DNA, 399 bp, Artificial Sequence
  derived and/or modified sequence
atgcgggagcagtacatgcggaccggcgacggcttcctgatcgtgtatagcgttaccgataaagcgtcctttgaacatgtcgaccggtttcaccagttgatcctccgggtcaaagatagggagtcctttcccatgatcctggtagctaataaggtcgatctgatgcatcttcggaaaatcacgcgagagcagggcaaggaaatggccaccaagcataacataccatacatcgagacatccgcgaaggacccccctctgaacgtggacaaggcattccacgacctggttcgtgtcatccggcagcagatcccagaaaagagccagaagaagaaaaagaaaactaagtggaggggcgatagagcaactggaactcacaagctccagtgtgtcatcctgtag

SEQ ID NO: 88189 - DNA, 399 bp, Artificial Sequence
  derived and/or modified sequence
atgagggaacagtacatgcggactggggacggtttcctgatcgtctatagcgttacagataaagccagtttcgagcacgtggatcgatttcaccagctcatactgcgggtgaaggacagggaatctttccccatgattctggttgcaaataaggtagacctcatgcaccttaggaaaatcacccgggaacaggggaaagagatggcaacaaagcacaatattccctatatcgaaacatcagctaaggaccctcctctgaacgtggacaaggcattccatgatctggttcgggttattaggcagcagataccagagaagagtcagaaaaaaaagaaaaagactaaatggcgaggagatcgagctactgggacccacaaattgcagtgcgtgatactgtag

SEQ ID NO: 88190 - DNA, 399 bp, Artificial Sequence
  derived and/or modified sequence
atgagagagcagtacatgagaaccggcgacggcttcctgatcgtgtacagcgtgaccgacaaggccagcttcgagcacgtggacagattccaccagctgatcctgagagtgaaggacagagagagcttccccatgatcctggtggccaacaaggtggacctgatgcacctgagaaagatcaccagagagcagggcaaggagatggccaccaagcacaacatcccctacatcgagaccagcgccaaggacccccccctgaacgtggacaaggccttccacgacctggtgagagtgatcagacagcagatccccgagaagagccagaagaagaagaagaagaccaagtggagaggcgacagagccaccggcacccacaagctgcagtgcgtgatcctgtag

SEQ ID NO: 88191 - protein, 1637 aa, Artificial Sequence
  derived and/or modified sequence
MAGQGDCCVKVAVRIRPQLSKEKIEGCHICTSVTPGEPQVLLGKDKAFTYDFVFDLDTWQEQIYSTCVSKLIEGCFEGYNATVLAYGQTGAGKTYTMGTGFDMATSEEEQGIIPRAIAHLFGGIAERKRRAQEQGVAGPEFKVSAQFLELYNEEILDLFDSTRDPDTRHRRSNIKIHEDANGGIYTTGVTSRLIHSQEELIQCLKQGALSRTTASTQMNVQSSRSHAIFTIHLCQMRMCTQPDLVNEAVTGLPDGTPPSSEYETLTAKFHFVDLAGSERLKRTGATGERAKEGISINCGLLALGNVISALGDQSKKVVHVPYRDSKLTRLLQDSLGGNSQTIMIACVSPSDRDFMETLNTLKYANRARNIKNKVVVNQDKTSQQISALRAEIARLQMELMEYKAGKRVIGEDGAEGYSDLFRENAMLQKENGALRLRVKAMQEAIDAINNRVTQLMSQEANLLLAKAGDGNEAIGALIQNYIREIEELRTKLLESEAMNESLRRSLSRASARSPYSLGASPAAPAFGGSPASSMEDASEVIRRAKQDLERLKKKEVRQRRKSPEKEAFKKRAKLQQENSEETDENEAEEEEEERDESGCEEEEGREDEDEDSGSEESLVDSDSDPEEKEVNFQADLADLTCEIEIKQKLIDELENSQRRLQTLKHQYEEKLILLQNKIRDTQLERDRVLQNLSTMECYTEEKANKIKADYEKRLREMNRDLQKLQAAQKEHARLLKNQSRYERELKKLQAEVAEMKKAKVALMKQMREEQQRRRLVETKRNREIAQLKKEQRRQEFQIRALESQKRQQEMVLRRKTQEVSALRRLAKPMSERVAGRAGLKPPMLDSGAEVSASTTSSEAESGARSVSSIVRQWNRKINHFLGDHPAPTVNGTRPARKKFQKKGASQSFSKAARLKWQSLERRIIDIVMQRMTIVNLEADMERLIKKREELFLLQEALRRKRERLQAESPEEEKGLQELAEEIEVLAANIDYINDGITDCQATIVQLEETKEELDSTDTSVVISSCSLAEARLLLDNFLKASIDKGLQVAQKEAQIRLLEGRLRQTDMAGSSQNHLLLDALREKAEAHPELQALIYNVQQENGYASTDEEISEFSEGSFSQSFTMKGSTSHDDFKFKSEPKLSAQMKAVSAECLGPPLDISTKNITKSLASLVEIKEDGVGFSVRDPYYRDRVSRTVSLPTRGSTFPRQSRATETSPLTRRKSYDRGQPIRSTDVGFTPPSSPPTRPRNDRNVFSRLTSNQSQGSALDKSDDSDSSLSEVLRGIISPVGGAKGARTAPLQCVSMAEGHTKPILCLDATDELLFTGSKDRSCKMWNLVTGQEIAALKGHPNNVVSIKYCSHSGLVFSVSTSYIKVWDIRDSAKCIRTLTSSGQVISGDACAATSTRAITSAQGEHQINQIALSPSGTMLYAASGNAVRIWELSRFQPVGKLTGHIGPVMCLTVTQTASQHDLVVTGSKDHYVKMFELGECVTGTIGPTHNFEPPHYDGIECLAIQGDILFSGSRDNGIKKWDLDQQELIQQIPNAHKDWVCALAFIPGRPMLLSACRAGVIKVWNVDNFTPIGEIKGHDSPINAICTNAKHIFTASSDCRVKLWNYVPGLTPCLPRRVLAIKGRATTLP

SEQ ID NO: 88192 - protein, 1668 aa, Artificial Sequence
  derived and/or modified sequence
MAGQGDCCVKVAVRIRPQLSKEKIEGCHICTSVTPGEPQVLLGKDKAFTYDFVFDLDTWQEQIYSTCVSKLIEGCFEGYNATVLAYGQTGAGKTYTMGTGFDMATSEEEQGIIPRAIAHLFGGIAERKRRAQEQGVAGPEFKVSAQFLELYNEEILDLFDSTRDPDTRHRRSNIKIHEDANGGIYTTGVTSRLIHSQEELIQCLKQGALSRTTASTQMNVQSSRSHAIFTIHLCQMRMCTQPDLVNEAVTGLPDGTPPSSEYETLTAKFHFVDLAGSERLKRTGATGERAKEGISINCGLLALGNVISALGDQSKKVVHVPYRDSKLTRLLQDSLGGNSQTIMIACVSPSDRDFMETLNTLKYANRARNIKNKVVVNQDKTSQQISALRAEIARLQMELMEYKAGKRVIGEDGAEGYSDLFRENAMLQKENGALRLRVKAMQEAIDAINNRVTQLMSQEANLLLAKAGDGNEAIGALIQNYIREIEELRTKLLESEAMNESLRRSLSRASARSPYSLGASPAAPAFGGSPASSMEDASEVIRRAKQDLERLKKKEVRQRRKSPEKEAFKKRAKLQQENSEETDENEAEEEEEERDESGCEEEEGREDEDEDSGSEESLVDSDSDPEEKEVNFQADLADLTCEIEIKQKLIDELENSQRRLQTLKHQYEEKLILLQNKIRDTQLERDRVLQNLSTMECYTEEKANKIKADYEKRLREMNRDLQKLQAAQKEHARLLKNQSRYERELKKLQAEVAEMKKAKVALMKQMREEQQRRRLVETKRNREIAQLKKEQRRQEFQIRALESQKRQQEMVLRRKTQEVSALRRLAKPMSERVAGRAGLKPPMLDSGAEVSASTTSSEAESGARSVSSIVRQWNRKINHFLGDHPAPTVNGTRPARKKFQKKGASQSFSKAARLKWQSLERRIIDIVMQRMTIVNLEADMERLIKKREELFLLQEALRRKRERLQAESPEEEKGLQELAEEIEVLAANIDYINDGITDCQATIVQLEETKEELDSTDTSVVISSCSLAEARLLLDNFLKASIDKGLQVAQKEAQIRLLEGRLRQTDMAGSSQNHLLLDALREKAEAHPELQALIYNVQQENGYASTDEEISEFSEGSFSQSFTMKGSTSHDDFKFKSEPKLSAQMKAVSAECLGPPLDISTKNITKSLASLVEIKEDGVGFSVRDPYYRDRVSRTVSLPTRGSTFPRQSRATETSPLTRRKSYDRGQPIRSTDVGFTPPSSPPTRPRNDRNVFSRLTSNQSQGSALDKSDDSDSSLSEVLRGIISPVGGAKGARTAPLQCVSMAEGHTKPILCLDATDELLFTGSKDRSCKMWNLVTGQEIAALKGHPNNVVSIKYCSHSGLVFSVSTSYIKVWDIRDSAKCIRTLTSSGQVISGDACAATSTRAITSAQGEHQINQIALSPSGTMLYAASGNAVRIWELSRFQPVGKLTGHIGPVMCLTVTQTASQHDLVVTGSKDHYVKMFELGECVTGTIGPTHNFEPPHYDGIECLAIQGDILFSGSRDNGIKKWDLDQQELIQQIPNAHKDWVCALAFIPGRPMLLSACRAGVIKVWNVDNFTPIGEIKGHDSPINAICTNAKHIFTASSDCRVKLWNYVPGLTPCLPRRVLAIKGRATTCPDPPQLSLSPLSFFPSFLFPLFPHFDLSCFLT

SEQ ID NO: 88193 - DNA, 4914 bp, Artificial Sequence
  derived and/or modified sequence
atggcggggcagggagattgctgtgtgaaggtggccgtgagaatcagaccacagctaagtaaggagaaaatcgagggttgtcacatctgtacctcggttacccctggagagccgcaggtcttacttggaaaggacaaagctttcacctatgatttcgtgttcgacctggacacatggcaagagcaaatttacagcacctgtgtgagcaagctgatagagggttgttttgaaggatataatgcaaccgtgttggcttacgggcaaaccggtgctggcaagacttatacaatgggaacaggatttgacatggccactagcgaggaggaacagggaataatcccacgggcaattgcacatctgttcggcggcatagcggagcggaaacgccgcgcccaggagcagggcgtagccggcccagagttcaaagtgtctgctcagtttcttgaactttacaatgaggagatacttgatcttttcgacagcactagggatcccgatactaggcacagacgaagcaatatcaaaatccacgaagacgcaaacggtggtatttacactacaggagtgacctctcgcctcatacactcacaagaggagctgatacagtgcctaaagcaaggcgccctgtctcgtactactgcctccacccagatgaatgtccagtcctcaaggtcccacgcgatttttacaattcatttatgccagatgagaatgtgtacacagccagaccttgttaatgaagccgtcacagggcttcccgacggcacgccgccgagcagcgaatatgaaacactcaccgctaagtttcacttcgtggacttggctggttctgagcggttaaagaggacaggagccactggcgaacgagccaaagaagggatatccatcaactgtggtctcctggccctcggaaatgtgatcagcgccctcggcgaccagtctaagaaggtggtgcacgtgccctaccgtgactccaaactgacccgcctgctgcaggactctctcggcggcaactctcagacaattatgatcgcttgtgtttctccgtccgatcgcgattttatggaaacgctaaatactctcaaatacgctaaccgagcgaggaatattaaaaacaaagtagtcgttaaccaggataagacttcccagcaaatctcagctcttcgcgccgaaattgcaagactgcagatggagttgatggagtataaggccggaaaaagagtgattggagaggacggagccgagggctattcagatctcttccgggaaaacgccatgctccagaaggagaacggcgcgctacggctgagggtgaaggcgatgcaggaggctatagacgcgattaacaatagagtgactcagttgatgtctcaggaggcaaacctcctattagcaaaggctggagatgggaatgaggctatcggagccctgatacaaaactatattcgagagattgaggagctgcgcacaaaactgctggagagtgaagcaatgaacgaaagcctgcgcagatcactgtcacgggcctcggccaggtccccctactcccttggcgcttcccccgctgcccccgcctttgggggcagcccagccagctctatggaggacgcgtccgaggttatacggcgcgcaaagcaggatcttgaaagactgaagaagaaagaggtgcgacagagacggaaaagccctgagaaagaggcctttaagaaaagagctaagctgcagcaagaaaactctgaagaaaccgatgaaaatgaagcagaggaagaagaggaagaaagggacgagtccgggtgcgaagaagaggaggggcgcgaggatgaagatgaagacagcggaagtgaggaaagcctggtggactccgactccgacccagaggagaaggaagtcaatttccaagccgaccttgccgatcttacttgtgaaatagagattaagcagaaactcattgacgagttggaaaacagtcaaagacggctccaaacattgaaacatcagtacgaggagaagctgatcctgctgcaaaacaagattcgggacactcaactggaacgggatagagtgttgcagaacctatctaccatggagtgctacaccgaggagaaagcaaataaaatcaaggctgattacgagaagcgccttcgtgagatgaaccgtgatctgcagaaactgcaggccgcccagaaagagcacgcccgcctcctaaaaaatcagagcagatacgagcgcgaactaaagaagttgcaagcggaggttgccgagatgaaaaaggcaaaggtggcccttatgaagcagatgcgggaagaacagcagaggagacgactcgttgagacaaagcgaaaccgcgagatcgcacagctcaagaaagagcagagacgccaagaattccaaattagggcgctggaatctcagaagcgtcaacaggagatggtgctccggcgcaagacccaagaggtaagtgcccttaggagactggccaagcccatgagtgagagggtcgcaggccgggccggcttgaaacctcctatgctagactcaggcgccgaagtctctgcttccacaacctcttccgaggcagagtccggtgcacgtagcgtgtccagtattgtgaggcaatggaatcggaagattaatcattttctgggcgatcatcccgcccctaccgtgaatggaactaggccagcccgcaagaagtttcagaagaaaggggcgtcccaaagcttctccaaggccgcacgactgaagtggcagtcgctggaacgacgaatcattgacattgtcatgcagaggatgaccattgtcaacttggaggcagatatggaacgactcattaagaagcgcgaggagctgtttctgctgcaggaggcactccggagaaaacgcgagagacttcaggcagaatcaccagaagaggaaaaaggtctgcaggagcttgctgaggaaattgaagtcttggcagctaatattgactatataaacgatggcattaccgattgtcaggccaccattgttcagctggaagagaccaaggaagaactggactcgactgacacttctgttgtcatctcttcctgtagccttgccgaggcacggctgttgttggataacttcctgaaagcctccatagacaaggggttacaggtggctcagaaggaagcgcaaatccgccttctggaagggcggctcaggcaaacagacatggccggttcctcacagaaccacctgcttctggacgctctccgcgaaaaagctgaggcccatcctgagctgcaggccctaatctacaatgtgcagcaggagaacggctacgctagtacagatgaagaaatatcagaattctctgaaggatctttcagtcagagcttcactatgaaagggtcaacttcacacgacgattttaagtttaagtctgaacccaagttgtctgcccaaatgaaggccgtgagtgccgagtgccttgggcctccactcgacatatcaactaagaacatcactaaatctcttgcctctctagtggagataaaggaagatggggttgggttctccgtgagagacccctactatagagaccgcgtatcccgaaccgtgtcactgccaacccgcgggagcacctttccccgacagtcaagggcaactgaaacatcaccattaacaagacgtaagagctatgaccgtggccagcctatcagatcaaccgatgttggttttacaccccctagttccccgcccacacgcccccgcaacgaccgcaatgttttttcgcgccttaccagcaaccagtcacaggggagtgccctggataagagtgacgactcagactcctccctgtctgaggtactgagaggtattatctctccggtcggcggagccaagggcgctcgtactgcaccgttacaatgtgtcagtatggccgaggggcacaccaaacctattttatgcttggatgccaccgatgaactactgtttaccggatccaaggataggtcttgcaagatgtggaatctggtaacaggccaggagatcgcagcactcaaaggacatcctaataatgtggtgtcaattaaatactgctcacattcaggattggttttctctgtgagcacaagctatatcaaagtttgggacatccgcgactctgccaagtgcatccggaccttaacatcctctggacaggtcatctccggagatgcatgcgctgctacctccacccgtgctatcacatccgcccagggggaacaccagatcaaccaaattgcactgtccccctccgggacaatgctgtacgcggcctctgggaacgctgttaggatctgggaactttctcgcttccaaccagtggggaaactcactgggcatattggacctgtgatgtgcttaacagtgactcagaccgcttcacagcacgacctcgttgttaccgggtctaaggatcattacgtaaaaatgttcgagctcggggagtgcgtgacaggcacaatcggacccacccataactttgagccgcctcattacgatggcatcgaatgtttggcaattcaaggggacattctgttcagcggatcaagagacaacggcattaagaagtgggacctggaccagcaagagctgatccaacagatcccaaacgcccacaaagactgggtatgcgctttagcattcatccccggtcggcccatgctcctcagcgcctgtcgggctggagtgatcaaagtctggaacgtcgacaactttactccaattggtgagattaagggacacgactcccctatcaacgcgatctgtaccaacgccaagcatatttttaccgcctcatctgattgccgagtgaaattgtggaactatgttccaggtcttaccccatgcctaccaaggcgcgttcttgcaataaaggggagagccactactttgccttag

SEQ ID NO: 88194 - DNA, 5007 bp, Artificial Sequence
  derived and/or modified sequence
atggcaggccagggtgactgctgtgtcaaggtggcggtccgcatacgaccacagctgagcaaggagaaaatcgaaggctgccacatctgcaccagcgtgactcctggggaaccacaagttctgctcgggaaggacaaggcctttacatacgattttgtgttcgacctggacacctggcaagagcagatttactcgacatgcgtgagtaagctgatcgaaggctgctttgagggatataacgccacagtactggcgtacggccagacaggcgctgggaagacctatacaatgggcacaggatttgacatggccacctcggaagaggaacaaggtatcatcccccgcgctatagcacatctctttggagggatcgccgaacggaagcgacgcgcacaggagcaaggtgtggccgggccagagtttaaggttagtgctcagtttctagagctctataacgaggaaattctcgatctgtttgattcaacacgggaccccgatacacggcatcggcggagtaatattaagattcacgaagatgcaaatggcggaatctacactaccggagtgacgagtcggctgattcactcccaggaagaactcattcagtgtctcaagcagggcgccctgagccggaccaccgcatctacacagatgaacgtccaatcatcccgcagccatgcaatcttcacaatccatctgtgccagatgcgcatgtgcacccagccagacctggtaaatgaggcagttaccggcctccctgatggcactcctccctcctctgagtacgaaacattgacggccaagttccacttcgtggatctggccgggagcgagcgcttaaagaggactggcgctacgggggagagggccaaggaagggatttccattaattgtggactactagctttggggaatgttatttcagcgctgggagaccagtcgaagaaagtggtacacgtaccttatagagatagcaagttgacccggctgctgcaggactcgttaggcggcaattcccaaacaatcatgattgcatgtgtgtcccctagcgacagggactttatggaaaccctaaatactctgaagtacgccaacagagccagaaacatcaagaacaaagtggttgtgaatcaggacaagacgtctcaacagatctctgctctgcgggccgagatcgcccggttacagatggaactcatggagtataaggctggcaaaagggtcataggtgaagacggggcggagggatactccgaccttttccgcgagaacgccatgcttcagaaggagaatggagcattaaggctgagagtcaaagccatgcaggaggccattgatgcgataaacaaccgcgtaactcagttgatgtctcaggaggcaaatctcttattagccaaggcaggcgatggcaacgaagcaattggcgctttgattcagaattatattagagagatcgaagagctccgcacaaagctactggagagcgaagccatgaacgagtctctgcgcaggtcccttagtagggcatccgccaggtcaccgtactcgctgggggcgtctcctgccgcccctgctttcgggggctcaccggcctcatcaatggaggatgcatcagaggtgattagaagagctaaacaggacttggagagattaaagaagaaagaggtgcgacagcgcaggaaatcccccgaaaaggaggcattcaaaaaacgggcgaaattacagcaggagaatagcgaagaaaccgacgagaacgaggcagaggaggaagaagaggagcgggacgagagcggctgcgaggaggaggaaggaagagaagatgaagacgaggactccggatctgaggaatccctggtcgattcagactccgatcccgaggaaaaggaagtaaactttcaagctgatctggcggatctgacctgcgagattgaaattaagcagaaattgattgatgaactggaaaattcccagaggcggcttcaaaccctcaaacaccaatatgaggagaaactaattctgctgcaaaacaaaatccgcgacacccagctggaacgggatagagtactgcagaatctatccaccatggaatgctatactgaggagaaggctaataaaatcaaggcggactatgagaaaaggctgcgggaaatgaacagggacttacagaagctccaggcagcacaaaaggaacatgcccggctgcttaaaaatcagagtaggtacgaacgtgaactgaagaaactccaggccgaagtggccgagatgaagaaagcaaaggtggctctaatgaaacagatgcgtgaagagcagcagcgtcgccgtctggttgaaaccaagaggaatcgagaaatcgcacaactgaaaaaagaacagcgccgtcaggagttccagattagggcgctagagtcccagaaacgccagcaggagatggtgcttcgcagaaaaacacaggaggtcagcgccttaagacgcctggccaaaccaatgagtgagagggtggccgggagagccggtctcaagccgccaatgctcgatagcggggctgaggtcagtgcctcaacaacttcaagtgaagccgagtctggcgcaaggagtgtgtcctctatagtgcgtcagtggaatcggaagatcaaccacttcctcggcgaccatccagctcctaccgtcaatggtactcggccggcacgcaaaaaattccagaagaaaggagcctctcagtctttcagtaaagccgccaggctgaagtggcaatcgttggagcgtaggattattgacatcgtgatgcaacggatgactatcgttaacctcgaagcagatatggagagattgattaaaaaacgggaggaactcttcctcctgcaggaggcactgcgtagaaaacgggagagactgcaggcagagagtccggaagaagagaaaggtctgcaagaacttgccgaggaaatcgaggtgttggcagcgaacatcgattatattaatgacggcatcaccgattgccaggctacaattgtgcaactggaagagaccaaagaggagttggatagcacagacacgtctgttgtgatttcctcatgctcactggcagaggcccgcctgctgctggataactttctaaaggcctcaatagacaaaggtctgcaagtggcccagaaagaagctcagatccggcttctcgagggacggctccggcaaaccgacatggcaggctcctcccagaaccacttgctgcttgacgccctcagggaaaaggctgaggctcaccccgaacttcaggccctaatctataatgtccagcaggaaaatgggtacgcatctacggatgaggagatctccgaattttccgagggctctttctcccagtcctttacaatgaaaggctcgacctcccacgacgatttcaaattcaaaagtgagccaaagttgtccgcacagatgaaagctgtatcggccgagtgcctggggccaccactggatattagcacgaaaaacattaccaaaagcctggcttccctggtcgagattaaagaggacggtgtggggttctcggtgcgggatccctactatcgagatcgggtgtcccgcaccgtgtctttgccaaccagaggcagcacctttcccaggcagtctagagccacggaaacaagcccattaactaggcgaaagtcctacgatagaggacagccaataaggtcaacggacgtcggttttactccaccctcatccccccccacgcgcccccggaacgacagaaatgtgttcagccgcttgacatcgaatcagtcccagggaagtgcattggacaaatccgacgactccgatagtagcctttctgaagttctgcgagggattatctcgcctgtgggtggcgccaagggtgccagaaccgcacctctgcagtgcgtgtcaatggcggaagggcacacaaagccaattctgtgtcttgatgccactgacgaacttctgttcaccggctctaaagatagatcgtgcaaaatgtggaacttggtgaccggccaggagatcgccgccttaaagggacacccaaacaacgtcgtatctatcaaatattgttcacactccggcctggtgtttagcgtgtctacttcttatatcaaagtttgggatattcgtgatagtgcgaaatgtatccggacactgacctcatccggacaggtcatatctggggacgcatgtgcagcgacatcaacgcgggcaattacttccgcccagggcgagcatcagatcaaccagatcgcactttccccctcaggcaccatgctgtacgcagcatccggaaatgcggtgcggatctgggagctaagtcggttccaacccgtggggaaactgacgggccatatcggccctgtgatgtgcctgaccgtcacccagaccgccagtcaacacgacctggtagtcaccggtagtaaagatcactacgttaagatgtttgaactgggggaatgcgttacaggtaccatcggaccaactcataacttcgagcctcctcactatgatggaatcgaatgtttggccatccaaggagatattctcttttctggctcacgggataacgggatcaagaagtgggacctggaccagcaggaactgattcagcagatccccaacgcacacaaggattgggtgtgcgccttggccttcatcccgggtcgcccgatgctgctgagcgcctgtcgggctggagtgattaaggtgtggaatgtcgataattttacaccaattggggagataaagggtcacgactctccgattaatgccatctgcacaaatgcaaaacacatatttaccgcttcatcagactgcagagtaaaattgtggaattatgtccccggcctgaccccttgcctgcctaggcgggtgctggctatcaaaggaagggccacgacttgccctgatccaccacagctgtccctgagtcctttaagtttcttccccagtttcttgttccccctcttcccccactttgacctgagctgcttcctcacctag

SEQ ID NO: 88195 - DNA, 5519 bp, Artificial Sequence
  derived and/or modified sequence
gggaggtggctgccgggtgggaggtgtgtgcgcgtgtgccgcgccgtagggagcggcgggtcgcgccgccggctgtcagctagctccgcgccgccgcccgatggcgcgaggaggcgcgcgggcccagccccggggggccggccgcgggtgagcccctcggcctgccgcccgcgagcatgtcacctccagccgccgccgccgcagcctccgccagccgcgcccgcgcccccgcctcccgcagccgcagccgctgcctcgggcattggcccccagacccccgcctctgatccacgcccagaccctagctccagagggccatggccggccagggggactgctgcgtcaaggtggccgtcaggatccggccccagctgtcgaaggagaagattgagggctgtcacatctgtacctctgttaccccgggagagccccaggtcctgctggggaaggacaaggccttcacctatgactttgtcttcgacctggacacctggcaagaacagatctattccacctgtgtgagcaagctcatcgagggctgcttcgagggctataatgccacggtgctggcctatgggcagacgggggccgggaagacgtacaccatgggcactggctttgacatggcaacgtcggaggaggagcagggcatcatcccgagggccatcgcacacctctttgggggcattgccgagcgcaagcgccgggcacaggagcagggcgtggctggacctgagttcaaagtcagcgcccagtttctggagctctacaacgaggagatccttgacctgtttgacagcacccgtgaccctgacacccgccaccgcaggtccaacatcaagatccacgaggacgcaaacggtggcatctacaccactggcgtcacttctcgcctcatccactcccaggaggagctgatccagtgcctgaagcagggggccctgtcccgcaccacagccagcacccagatgaacgtgcagagctcacgctcccacgccatcttcaccatccacctgtgccagatgcgcatgtgcacccagcccgacctggtgaatgaggcggtgactgggcttcctgatggtacacctccctcgagtgagtatgagacactcactgctaagtttcactttgtggacctggccggctcagagcggctgaagcggacaggggctactggcgagcgggccaaggagggcatctccatcaactgtggcctgctggccttgggcaatgtgatcagcgccttaggggaccagagcaagaaggtggtgcacgttccctacagggactccaagctcactcggctcctccaggattcgctggggggcaacagccagaccatcatgatcgcctgtgtgagcccctcagaccgagatttcatggagaccctcaacacactcaaatatgccaatcgggcccgcaacatcaagaacaaggtggtagtgaaccaggacaagaccagccagcaaatcagtgcactgcgggctgagattgctcggctgcagatggagctgatggagtataaggcgggcaagcgagtgataggagaggatggcgctgagggctatagtgatctgttccgagagaatgccatgctacagaaggagaatggggccctgcggctgcgggtgaaagccatgcaggaggccatcgatgccatcaacaaccgcgtcacccagctcatgagccaggaggccaacctgctgctagccaaggccggcgatggcaatgaggccattggtgcgctgatccagaactacatccgggagatcgaggagctacggactaagcttctagagagtgaagccatgaacgagtccctgcgccgcagcctctcacgggcctcggctaggagcccctactccctgggtgcttctccagccgccccggccttcgggggcagccctgccagctccatggaggatgcctcggaggtgatccgcagggccaagcaggacctggagcggctaaagaagaaggaggtcaggcagcggaggaagagccccgagaaggaagccttcaaaaagagggcaaaactccaacaggagaacagcgaggagacggatgagaacgaggcggaggaggaggaggaagagcgagacgagagtggctgtgaggaggaggaagggcgcgaggatgaagatgaggactcgggcagtgaagagagcctggtggactcagactcagaccccgaggagaaggaggtgaacttccaggcggacctggccgacctgacttgtgagatcgaaatcaagcagaagctgatcgacgagctggagaacagccagcggcggttgcagacgctcaagcaccagtatgaggaaaagctgattctgctgcagaacaagatccgagacacacagctggagcgcgaccgtgtgctgcagaacctcagcaccatggagtgctatactgaggagaaggccaacaagatcaaggcagactatgagaagaggctgcgggagatgaaccgggacctgcagaagctgcaggccgcccagaaagagcacgcccggctgcttaagaaccagtcgcgctacgagagggagctgaagaagctacaggccgaggtggctgagatgaagaaggccaaggtggccctgatgaagcagatgcgtgaggagcaacagcggcggcggctagtggagaccaagaggaaccgggagatcgcacagctcaagaaggagcagcggcgacaggagtttcagatccgagctctggagtcccagaagcggcagcaggagatggtcctgaggaggaagacccaggaggtttctgcactgaggcgcctggccaagcccatgtctgagcgggtggcagggcgtgcaggactaaagccacccatgctggactctggggctgaggtgtcggccagcactacctcatctgaggctgaatcaggggcccgctctgtctccagcatcgtgcgccagtggaaccgcaaaatcaaccacttcttgggggaccatcctgcgcccactgtcaatggcacccgtcctgcccgaaagaagttccagaagaagggggccagccagagcttcagtaaggcggcaaggctcaagtggcagtccctggagcgacggatcattgacatcgtcatgcagagaatgaccattgtcaacctggaggctgacatggagcggctcatcaagaaaagggaggagctgttcctcctgcaggaggcactgcggaggaagcgggagcggctgcaggctgagagccccgaggaagagaaggggctgcaggagctggctgaggagatcgaggtgctggcagccaacattgactacatcaatgacggcatcaccgactgccaggccaccatcgtgcagctggaggagaccaaggaggagctggactccacagacacatccgtggtcatcagctcctgctccctggctgaagcccgcctcctgctagacaacttcctcaaggcatccattgacaaggggctgcaagtggcacaaaaggaagcccagatccggctgttggagggccgactgaggcagacggatatggcaggctcctcccagaaccatctgctcctggacgccctgcgtgagaaggctgaagctcaccccgagctgcaggccctcatctacaatgtgcagcaggagaatggctacgccagcacagatgaggagatctcagagttctctgagggcagcttctcccagtcattcaccatgaaaggctccaccagccatgacgatttcaagttcaagagcgagcccaaactgtctgcccaaatgaaagctgtgtcggctgagtgcctgggccccccactggatatctccaccaagaacatcaccaagtccctggcctccctcgttgagatcaaagaggacggagtgggcttctctgtccgagacccctattaccgggacagggtctcgcgcaccgtcagtctgcctacccggggcagcactttccctaggcaatctcgagccacagagacgtccccgctgacgagaaggaagtcctacgaccgagggcagcccattaggtccacagatgtgggattcacacccccatcatcccctcccactcggccccgcaatgaccgcaatgtcttctctcgtctcaccagtaatcagagccaggggtcagcgctggacaagtctgatgacagcgactcctctttgtcggaggtcctgaggggcatcatctccccggttggaggagccaagggtgcacggacggccccactgcagtgtgtctccatggccgaaggccacaccaagcccatcctctgcctggatgccacagatgagttgctattcacagggtccaaagaccgaagctgcaagatgtggaacttggttacgggacaggagatcgcagctctaaagggccaccccaacaacgtggtctccatcaagtactgcagccactcggggcttgtgttctccgtgtccacctcctacatcaaggtgtgggacatccgggactcagccaagtgcattcggactctcacgtcctcgggccaggtgatctcaggggatgcctgtgccgccacatccacccgtgccatcaccagtgctcagggcgagcatcagatcaaccagatcgccctcagcccttcgggcaccatgctgtacgccgcctcgggcaatgccgtccgcatctgggagcttagcaggttccagcctgtcggcaagctgactggccacatcggccctgtgatgtgcctgacggtcacccagacggccagccagcatgacctcgtggtgactggctccaaggaccactacgttaagatgttcgagctgggcgagtgtgtgacgggcaccatcggccccactcacaacttcgagcccccgcactacgatggcatcgagtgtctcgccatccagggagacatcctgttcagtggctcccgagataacggcatcaagaagtgggacctagaccagcaggagctcatccagcaaatccccaatgcgcacaaggactgggtgtgcgccctggccttcatcccgggccgccccatgctgctcagcgcctgccgtgcgggtgtcatcaaggtctggaacgtggacaacttcacacccatcggtgagatcaagggccacgacagtcccatcaatgccatctgcaccaatgccaagcatatcttcacagcctccagtgactgccgggtaaagttgtggaattacgtccctggactcaccccctgccttcctcgccgagtcctggccataaagggccgcgccaccaccctgccctgaccctccccaactctccctgtctcctctttcattcttcccctctttccttttccctctctttccccacttcgatctgagctgcttcttaacggtatgagattattttactccttcttcttcctttcccttcctgtcctgcctggcctagagaggtgccctgcctgtccctcctgcacccaccgtccttttccaagcatgaacagtgggacaggccccaggagatgggtgccagggagcagaagggggagccttcaggcctggacaaaacgaaacacccccccaaaaaaa

SEQ ID NO: 88196 - DNA, 5004 bp, Artificial Sequence
  derived and/or modified sequence
atggccggccagggggactgctgcgtcaaggtggccgtcaggatccggccccagctgtcgaaggagaagattgagggctgtcacatctgtacctctgttaccccgggagagccccaggtcctgctggggaaggacaaggccttcacctatgactttgtcttcgacctggacacctggcaagaacagatctattccacctgtgtgagcaagctcatcgagggctgcttcgagggctataatgccacggtgctggcctatgggcagacgggggccgggaagacgtacaccatgggcactggctttgacatggcaacgtcggaggaggagcagggcatcatcccgagggccatcgcacacctctttgggggcattgccgagcgcaagcgccgggcacaggagcagggcgtggctggacctgagttcaaagtcagcgcccagtttctggagctctacaacgaggagatccttgacctgtttgacagcacccgtgaccctgacacccgccaccgcaggtccaacatcaagatccacgaggacgcaaacggtggcatctacaccactggcgtcacttctcgcctcatccactcccaggaggagctgatccagtgcctgaagcagggggccctgtcccgcaccacagccagcacccagatgaacgtgcagagctcacgctcccacgccatcttcaccatccacctgtgccagatgcgcatgtgcacccagcccgacctggtgaatgaggcggtgactgggcttcctgatggtacacctccctcgagtgagtatgagacactcactgctaagtttcactttgtggacctggccggctcagagcggctgaagcggacaggggctactggcgagcgggccaaggagggcatctccatcaactgtggcctgctggccttgggcaatgtgatcagcgccttaggggaccagagcaagaaggtggtgcacgttccctacagggactccaagctcactcggctcctccaggattcgctggggggcaacagccagaccatcatgatcgcctgtgtgagcccctcagaccgagatttcatggagaccctcaacacactcaaatatgccaatcgggcccgcaacatcaagaacaaggtggtagtgaaccaggacaagaccagccagcaaatcagtgcactgcgggctgagattgctcggctgcagatggagctgatggagtataaggcgggcaagcgagtgataggagaggatggcgctgagggctatagtgatctgttccgagagaatgccatgctacagaaggagaatggggccctgcggctgcgggtgaaagccatgcaggaggccatcgatgccatcaacaaccgcgtcacccagctcatgagccaggaggccaacctgctgctagccaaggccggcgatggcaatgaggccattggtgcgctgatccagaactacatccgggagatcgaggagctacggactaagcttctagagagtgaagccatgaacgagtccctgcgccgcagcctctcacgggcctcggctaggagcccctactccctgggtgcttctccagccgccccggccttcgggggcagccctgccagctccatggaggatgcctcggaggtgatccgcagggccaagcaggacctggagcggctaaagaagaaggaggtcaggcagcggaggaagagccccgagaaggaagccttcaaaaagagggcaaaactccaacaggagaacagcgaggagacggatgagaacgaggcggaggaggaggaggaagagcgagacgagagtggctgtgaggaggaggaagggcgcgaggatgaagatgaggactcgggcagtgaagagagcctggtggactcagactcagaccccgaggagaaggaggtgaacttccaggcggacctggccgacctgacttgtgagatcgaaatcaagcagaagctgatcgacgagctggagaacagccagcggcggttgcagacgctcaagcaccagtatgaggaaaagctgattctgctgcagaacaagatccgagacacacagctggagcgcgaccgtgtgctgcagaacctcagcaccatggagtgctatactgaggagaaggccaacaagatcaaggcagactatgagaagaggctgcgggagatgaaccgggacctgcagaagctgcaggccgcccagaaagagcacgcccggctgcttaagaaccagtcgcgctacgagagggagctgaagaagctacaggccgaggtggctgagatgaagaaggccaaggtggccctgatgaagcagatgcgtgaggagcaacagcggcggcggctagtggagaccaagaggaaccgggagatcgcacagctcaagaaggagcagcggcgacaggagtttcagatccgagctctggagtcccagaagcggcagcaggagatggtcctgaggaggaagacccaggaggtttctgcactgaggcgcctggccaagcccatgtctgagcgggtggcagggcgtgcaggactaaagccacccatgctggactctggggctgaggtgtcggccagcactacctcatctgaggctgaatcaggggcccgctctgtctccagcatcgtgcgccagtggaaccgcaaaatcaaccacttcttgggggaccatcctgcgcccactgtcaatggcacccgtcctgcccgaaagaagttccagaagaagggggccagccagagcttcagtaaggcggcaaggctcaagtggcagtccctggagcgacggatcattgacatcgtcatgcagagaatgaccattgtcaacctggaggctgacatggagcggctcatcaagaaaagggaggagctgttcctcctgcaggaggcactgcggaggaagcgggagcggctgcaggctgagagccccgaggaagagaaggggctgcaggagctggctgaggagatcgaggtgctggcagccaacattgactacatcaatgacggcatcaccgactgccaggccaccatcgtgcagctggaggagaccaaggaggagctggactccacagacacatccgtggtcatcagctcctgctccctggctgaagcccgcctcctgctagacaacttcctcaaggcatccattgacaaggggctgcaagtggcacaaaaggaagcccagatccggctgttggagggccgactgaggcagacggatatggcaggctcctcccagaaccatctgctcctggacgccctgcgtgagaaggctgaagctcaccccgagctgcaggccctcatctacaatgtgcagcaggagaatggctacgccagcacagatgaggagatctcagagttctctgagggcagcttctcccagtcattcaccatgaaaggctccaccagccatgacgatttcaagttcaagagcgagcccaaactgtctgcccaaatgaaagctgtgtcggctgagtgcctgggccccccactggatatctccaccaagaacatcaccaagtccctggcctccctcgttgagatcaaagaggacggagtgggcttctctgtccgagacccctattaccgggacagggtctcgcgcaccgtcagtctgcctacccggggcagcactttccctaggcaatctcgagccacagagacgtccccgctgacgagaaggaagtcctacgaccgagggcagcccattaggtccacagatgtgggattcacacccccatcatcccctcccactcggccccgcaatgaccgcaatgtcttctctcgtctcaccagtaatcagagccaggggtcagcgctggacaagtctgatgacagcgactcctctttgtcggaggtcctgaggggcatcatctccccggttggaggagccaagggtgcacggacggccccactgcagtgtgtctccatggccgaaggccacaccaagcccatcctctgcctggatgccacagatgagttgctattcacagggtccaaagaccgaagctgcaagatgtggaacttggttacgggacaggagatcgcagctctaaagggccaccccaacaacgtggtctccatcaagtactgcagccactcggggcttgtgttctccgtgtccacctcctacatcaaggtgtgggacatccgggactcagccaagtgcattcggactctcacgtcctcgggccaggtgatctcaggggatgcctgtgccgccacatccacccgtgccatcaccagtgctcagggcgagcatcagatcaaccagatcgccctcagcccttcgggcaccatgctgtacgccgcctcgggcaatgccgtccgcatctgggagcttagcaggttccagcctgtcggcaagctgactggccacatcggccctgtgatgtgcctgacggtcacccagacggccagccagcatgacctcgtggtgactggctccaaggaccactacgttaagatgttcgagctgggcgagtgtgtgacgggcaccatcggccccactcacaacttcgagcccccgcactacgatggcatcgagtgtctcgccatccagggagacatcctgttcagtggctcccgagataacggcatcaagaagtgggacctagaccagcaggagctcatccagcaaatccccaatgcgcacaaggactgggtgtgcgccctggccttcatcccgggccgccccatgctgctcagcgcctgccgtgcgggtgtcatcaaggtctggaacgtggacaacttcacacccatcggtgagatcaagggccacgacagtcccatcaatgccatctgcaccaatgccaagcatatcttcacagcctccagtgactgccgggtaaagttgtggaattacgtccctggactcaccccctgccttcctcgccgagtcctggccataaagggccgcgccaccacctgccctgaccctccccaactctccctgtctcctctttcattcttcccctctttccttttccctctctttccccacttcgatctgagctgcttcttaacg

SEQ ID NO: 88197 - DNA, 4914 bp, Artificial Sequence
  derived and/or modified sequence
atggccggccagggcgactgctgcgtgaaggtggccgtgcgcatccggccccagctgagcaaggagaagattgagggctgccacatctgcacctctgtgaccccaggagagccccaggtgctgctgggcaaggacaaggccttcacctatgactttgtgtttgacctggacacctggcaggagcagatctacagcacctgtgtgtccaagctgattgagggctgctttgagggctacaatgccaccgtgctggcctacggccagacaggagctgggaagacctacaccatgggcactggatttgacatggccaccagcgaggaggagcagggcatcatcccccgggccatcgcccacctgtttggaggcattgctgagaggaagagaagagcccaggagcagggcgtggccggccctgagttcaaggtgtctgcccagttcctggagctgtacaatgaggagatcctggacctgtttgacagcacccgggaccctgacaccaggcaccggcgcagcaacatcaagatccatgaagatgccaatggaggcatctacaccactggagtgaccagccgcctcatccacagccaggaggagctgatccagtgcctgaagcagggcgccctgagcaggaccacagccagcacccagatgaatgtgcagagcagccgcagccacgccatcttcaccatccacctgtgccagatgaggatgtgcacccagcctgacctggtgaatgaggccgtgacaggcctgcctgatggcaccccacccagcagtgaatatgagaccctgacagccaagttccactttgtggacctggccggcagcgagcggctgaagaggactggagccaccggggagcgggccaaggagggcatcagcatcaactgtggcctgctggccctgggcaatgtcatcagcgccctgggggaccagagcaagaaggtggtgcacgtgccctacagagacagcaagctgacccggctgctgcaggacagcctgggcggcaacagccagaccatcatgattgcctgtgtgagccccagcgaccgggacttcatggagaccctgaacaccctgaagtatgccaacagagccaggaacatcaagaacaaggtggtggtgaaccaggacaagaccagccagcagatcagcgccctgcgggcagagatcgcccggctgcagatggagctgatggagtacaaggccggcaagagggtgattggagaagatggagctgagggctacagcgacctcttcagagaaaatgccatgctgcagaaggaaaatggagccctgcggctgcgggtgaaggccatgcaggaggccattgatgccatcaacaacagagtgacccagctgatgagccaggaggccaacctgctgctggccaaggctggagatggaaatgaggccatcggggccctgatccagaactacatccgggagattgaggagctgcggaccaagctgctggagagcgaggccatgaatgaaagcctgcggcgcagcctgagccgggccagcgcccggagcccctacagcctgggcgccagccctgctgccccagccttcggcggcagccctgccagctccatggaggatgccagcgaggtgatccggcgggccaagcaggacctggagcggctgaagaagaaggaggtgcggcagaggaggaagagccctgagaaggaggccttcaagaagagggccaagctgcagcaggagaacagcgaggagacagatgaaaatgaagctgaggaggaggaggaggagagagatgaaagtggctgtgaggaggaggagggccgggaggatgaagatgaggacagcggcagcgaggagagcctggtggacagcgacagcgaccctgaggagaaggaggtgaacttccaggccgacctggccgacctgacctgtgaaattgagatcaagcagaagctgattgatgagctggagaacagccagaggcggctgcagaccctgaagcaccagtatgaggagaagctgatcctgctgcagaacaagatccgggacacccagctggagcgggacagagtgctgcagaacctgagcaccatggagtgctacacagaggagaaggccaacaagatcaaggctgactatgagaagaggctgcgggagatgaacagagacctgcagaagctgcaggccgcccagaaggagcacgcccggctgctgaagaaccagagccgctatgagcgggagctgaagaagctgcaggccgaggtggccgagatgaagaaggccaaggtggccctgatgaagcagatgagggaggagcagcagaggcggcggctggtggagaccaagaggaaccgggagatcgcccagctgaagaaggagcagaggcggcaggagttccagatccgggccctggagagccagaagaggcagcaggagatggtgctgcggaggaagacccaggaggtgtctgccctgcggcggctggccaagcccatgtctgagcgggtggccggccgggccggcctgaagccacccatgctggacagcggggctgaggtgtctgccagcaccaccagcagcgaggccgagagcggggcccggtctgtgagcagcatcgtgcggcagtggaacaggaagatcaaccacttcctgggggaccacccagcccccaccgtgaatggcaccaggcctgccaggaagaagttccagaagaagggggccagccagagcttcagcaaggccgcccggctgaagtggcagagcctggagcggcgcatcatcgacatcgtgatgcagaggatgaccatcgtgaacctggaggccgacatggagcggctcatcaagaagcgggaggagctgttcctgctgcaggaggccctgcggaggaagcgggagcggctgcaggccgagagccctgaggaggagaagggcctgcaggagctggccgaggagattgaggtgctggccgccaacatcgactacatcaatgatggcatcacagactgccaggccaccatcgtgcagctggaggagaccaaggaggagctggacagcacagacacctctgtggtgatcagcagctgcagcctggccgaggcccggctgctgctggacaacttcctgaaggccagcattgacaagggcctgcaggtggcccagaaggaggcccagatccggctgctggagggccgcctgcggcagacagacatggccggcagcagccagaaccacctgctgctggatgccctgcgggagaaggccgaggcccaccctgagctgcaggccctgatctacaacgtgcagcaggagaatggctacgccagcacagatgaggagatcagcgagttcagcgagggcagcttcagccagagcttcaccatgaagggcagcaccagccatgatgacttcaagttcaagtctgagcccaagctgagcgcccagatgaaggctgtgtctgcagaatgtctgggcccccccctggacatcagcaccaagaacatcaccaagagcctggccagcctggtggagatcaaggaggatggagtgggcttctctgtgcgggacccctactacagagacagagtgtccaggacagtgtccctgcccacccggggcagcaccttcccccggcagagccgggccacagagaccagccccctgaccaggaggaagagctatgaccggggccagcccatccgcagcacagatgtgggcttcaccccacccagcagcccccccacccggcccagaaatgacagaaatgtgttcagccggctgaccagcaaccagagccagggcagcgccctggacaagagtgatgacagcgacagcagcctgtctgaggtgctgcggggcatcatcagccctgtgggcggggccaagggggccaggacagcccccctgcagtgtgtgtccatggccgagggccacaccaagcccatcctgtgcctggatgccacagatgagctgctcttcaccggcagcaaggacaggagctgcaagatgtggaacctggtgacaggccaggagattgctgccctgaagggccaccccaacaacgtggtgtccatcaagtactgcagccacagcggcctggtgttttctgtgtccaccagctacatcaaggtgtgggacatccgggacagcgccaagtgcatccgcaccctgaccagcagcggccaggtgatctctggagatgcctgtgccgccaccagcacccgggccatcaccagcgcccagggcgagcaccagatcaaccagatcgccctgagccccagcggcaccatgctgtatgctgccagcggaaatgctgtgcgcatctgggagctgagccgcttccagcctgtgggcaagctgaccggccacatcggccctgtgatgtgcctgactgtgacccagacagccagccagcacgacctggtggtgacaggcagcaaggaccactacgtgaagatgtttgagctgggagaatgtgtgacaggcaccatcggccccacccacaactttgagcccccccactatgatggcatcgagtgcctggccatccagggcgacatcctcttcagcggcagccgggacaatggcatcaagaagtgggacctggaccagcaggagctgatccagcagatccccaatgcccacaaggactgggtgtgtgccctggccttcatccctggccggcccatgctgctgagcgcctgccgggccggggtcatcaaggtgtggaatgtggacaacttcacccccatcggggagatcaagggccatgacagccccatcaatgccatctgcaccaatgccaagcacatcttcaccgccagcagtgactgccgggtgaagctgtggaactacgtgcccggcctgaccccctgcctgccccggcgggtgctggccatcaagggccgggccaccaccctgccctag

SEQ ID NO: 88198 - DNA, 5007 bp, Artificial Sequence
  derived and/or modified sequence
atggccggccagggcgactgctgcgtgaaggtggccgtgcgcatccggccccagctgagcaaggagaagattgagggctgccacatctgcacctctgtgaccccaggagagccccaggtgctgctgggcaaggacaaggccttcacctatgactttgtgtttgacctggacacctggcaggagcagatctacagcacctgtgtgtccaagctgattgagggctgctttgagggctacaatgccaccgtgctggcctacggccagacaggagctgggaagacctacaccatgggcactggatttgacatggccaccagcgaggaggagcagggcatcatcccccgggccatcgcccacctgtttggaggcattgctgagaggaagagaagagcccaggagcagggcgtggccggccctgagttcaaggtgtctgcccagttcctggagctgtacaatgaggagatcctggacctgtttgacagcacccgggaccctgacaccaggcaccggcgcagcaacatcaagatccatgaagatgccaatggaggcatctacaccactggagtgaccagccgcctcatccacagccaggaggagctgatccagtgcctgaagcagggcgccctgagcaggaccacagccagcacccagatgaatgtgcagagcagccgcagccacgccatcttcaccatccacctgtgccagatgaggatgtgcacccagcctgacctggtgaatgaggccgtgacaggcctgcctgatggcaccccacccagcagtgaatatgagaccctgacagccaagttccactttgtggacctggccggcagcgagcggctgaagaggactggagccaccggggagcgggccaaggagggcatcagcatcaactgtggcctgctggccctgggcaatgtcatcagcgccctgggggaccagagcaagaaggtggtgcacgtgccctacagagacagcaagctgacccggctgctgcaggacagcctgggcggcaacagccagaccatcatgattgcctgtgtgagccccagcgaccgggacttcatggagaccctgaacaccctgaagtatgccaacagagccaggaacatcaagaacaaggtggtggtgaaccaggacaagaccagccagcagatcagcgccctgcgggcagagatcgcccggctgcagatggagctgatggagtacaaggccggcaagagggtgattggagaagatggagctgagggctacagcgacctcttcagagaaaatgccatgctgcagaaggaaaatggagccctgcggctgcgggtgaaggccatgcaggaggccattgatgccatcaacaacagagtgacccagctgatgagccaggaggccaacctgctgctggccaaggctggagatggaaatgaggccatcggggccctgatccagaactacatccgggagattgaggagctgcggaccaagctgctggagagcgaggccatgaatgaaagcctgcggcgcagcctgagccgggccagcgcccggagcccctacagcctgggcgccagccctgctgccccagccttcggcggcagccctgccagctccatggaggatgccagcgaggtgatccggcgggccaagcaggacctggagcggctgaagaagaaggaggtgcggcagaggaggaagagccctgagaaggaggccttcaagaagagggccaagctgcagcaggagaacagcgaggagacagatgaaaatgaagctgaggaggaggaggaggagagagatgaaagtggctgtgaggaggaggagggccgggaggatgaagatgaggacagcggcagcgaggagagcctggtggacagcgacagcgaccctgaggagaaggaggtgaacttccaggccgacctggccgacctgacctgtgaaattgagatcaagcagaagctgattgatgagctggagaacagccagaggcggctgcagaccctgaagcaccagtatgaggagaagctgatcctgctgcagaacaagatccgggacacccagctggagcgggacagagtgctgcagaacctgagcaccatggagtgctacacagaggagaaggccaacaagatcaaggctgactatgagaagaggctgcgggagatgaacagagacctgcagaagctgcaggccgcccagaaggagcacgcccggctgctgaagaaccagagccgctatgagcgggagctgaagaagctgcaggccgaggtggccgagatgaagaaggccaaggtggccctgatgaagcagatgagggaggagcagcagaggcggcggctggtggagaccaagaggaaccgggagatcgcccagctgaagaaggagcagaggcggcaggagttccagatccgggccctggagagccagaagaggcagcaggagatggtgctgcggaggaagacccaggaggtgtctgccctgcggcggctggccaagcccatgtctgagcgggtggccggccgggccggcctgaagccacccatgctggacagcggggctgaggtgtctgccagcaccaccagcagcgaggccgagagcggggcccggtctgtgagcagcatcgtgcggcagtggaacaggaagatcaaccacttcctgggggaccacccagcccccaccgtgaatggcaccaggcctgccaggaagaagttccagaagaagggggccagccagagcttcagcaaggccgcccggctgaagtggcagagcctggagcggcgcatcatcgacatcgtgatgcagaggatgaccatcgtgaacctggaggccgacatggagcggctcatcaagaagcgggaggagctgttcctgctgcaggaggccctgcggaggaagcgggagcggctgcaggccgagagccctgaggaggagaagggcctgcaggagctggccgaggagattgaggtgctggccgccaacatcgactacatcaatgatggcatcacagactgccaggccaccatcgtgcagctggaggagaccaaggaggagctggacagcacagacacctctgtggtgatcagcagctgcagcctggccgaggcccggctgctgctggacaacttcctgaaggccagcattgacaagggcctgcaggtggcccagaaggaggcccagatccggctgctggagggccgcctgcggcagacagacatggccggcagcagccagaaccacctgctgctggatgccctgcgggagaaggccgaggcccaccctgagctgcaggccctgatctacaacgtgcagcaggagaatggctacgccagcacagatgaggagatcagcgagttcagcgagggcagcttcagccagagcttcaccatgaagggcagcaccagccatgatgacttcaagttcaagtctgagcccaagctgagcgcccagatgaaggctgtgtctgcagaatgtctgggcccccccctggacatcagcaccaagaacatcaccaagagcctggccagcctggtggagatcaaggaggatggagtgggcttctctgtgcgggacccctactacagagacagagtgtccaggacagtgtccctgcccacccggggcagcaccttcccccggcagagccgggccacagagaccagccccctgaccaggaggaagagctatgaccggggccagcccatccgcagcacagatgtgggcttcaccccacccagcagcccccccacccggcccagaaatgacagaaatgtgttcagccggctgaccagcaaccagagccagggcagcgccctggacaagagtgatgacagcgacagcagcctgtctgaggtgctgcggggcatcatcagccctgtgggcggggccaagggggccaggacagcccccctgcagtgtgtgtccatggccgagggccacaccaagcccatcctgtgcctggatgccacagatgagctgctcttcaccggcagcaaggacaggagctgcaagatgtggaacctggtgacaggccaggagattgctgccctgaagggccaccccaacaacgtggtgtccatcaagtactgcagccacagcggcctggtgttttctgtgtccaccagctacatcaaggtgtgggacatccgggacagcgccaagtgcatccgcaccctgaccagcagcggccaggtgatctctggagatgcctgtgccgccaccagcacccgggccatcaccagcgcccagggcgagcaccagatcaaccagatcgccctgagccccagcggcaccatgctgtatgctgccagcggaaatgctgtgcgcatctgggagctgagccgcttccagcctgtgggcaagctgaccggccacatcggccctgtgatgtgcctgactgtgacccagacagccagccagcacgacctggtggtgacaggcagcaaggaccactacgtgaagatgtttgagctgggagaatgtgtgacaggcaccatcggccccacccacaactttgagcccccccactatgatggcatcgagtgcctggccatccagggcgacatcctcttcagcggcagccgggacaatggcatcaagaagtgggacctggaccagcaggagctgatccagcagatccccaatgcccacaaggactgggtgtgtgccctggccttcatccctggccggcccatgctgctgagcgcctgccgggccggggtcatcaaggtgtggaatgtggacaacttcacccccatcggggagatcaagggccatgacagccccatcaatgccatctgcaccaatgccaagcacatcttcaccgccagcagtgactgccgggtgaagctgtggaactacgtgcccggcctgaccccctgcctgccccggcgggtgctggccatcaagggccgggccaccacctgcccagaccccccccagctgagcctgagccccctgtccttcttccccagcttcctgttccccctcttcccccactttgacctgagctgcttcctgacctag

SEQ ID NO: 88199 - DNA, 4914 bp, Artificial Sequence
  derived and/or modified sequence
atggccggccagggcgactgctgcgtgaaggtggccgtgcggatcaggccccagcttagcaaagaaaagatagagggatgtcatatctgtacaagcgtcactcctggggaaccacaggtacttctgggaaaagataaagcctttacatacgacttcgtttttgatctggacacgtggcaagaacagatctactctacctgtgtgtccaagctcattgaagggtgcttcgaggggtataacgcaactgtcctcgcttacggacagacgggtgccggcaaaacatacactatgggtaccggcttcgacatggccacaagcgaagaggaacagggtattatcccccgcgccatcgctcatctcttcggcggcatcgctgagcgtaaaagaagggcgcaggaacagggggtggccggcccagagttcaaagtgagtgcacagttccttgagctctacaatgaggaaattctagacctgtttgatagcacacgcgacccagacacacgacaccggcggagcaatattaagatccatgaagacgccaacggagggatatatacaacaggagtgacaagtagactgatccacagccaggaagagttgatccagtgtttgaagcagggggctctgtcacggacaaccgccagtacacagatgaacgtgcaatcctcaagatctcacgcaatcttcaccattcatctgtgtcagatgcggatgtgcacgcagccggatctagtcaacgaagcggtgactggcctgcccgatggaactcccccaagcagtgagtatgaaaccctgaccgcaaaatttcactttgtagaccttgcaggctctgagcgactgaaaaggacgggtgcaactggcgagcgagccaaagaggggattagcattaattgtggcctgcttgcattgggaaacgtgatctccgccctgggggaccagagtaagaaggtagtgcacgttccctatagagattcaaaactgaccaggctactacaagacagcctgggcggtaattcccagaccatcatgatagcttgcgtgagcccctcagaccgagatttcatggagaccctcaatactctaaagtacgctaatcgggctaggaatataaagaataaggtagttgtgaatcaggacaagacgtcccagcagatcagcgctctgcgggccgaaatagcccgtcttcagatggagctgatggagtataaggccggcaaacgggtcattggggaagacggtgccgaaggctatagtgacctgttccgggaaaatgcaatgctccagaaggaaaatggcgccctgcggctgagggtcaaagccatgcaggaagccattgatgctatcaataaccgagtaacccagctaatgagccaagaggctaacctgcttttggccaaagccggtgacggaaatgaggcaatcggggcattgatccagaattatatacgcgagattgaggagctgaggaccaaattgctcgaatccgaagccatgaatgagtctctccggaggtctctgtcccgcgcttctgctagaagtccctatagtcttggggcaagcccggcagctccggcctttggagggagcccggcttcttcaatggaagatgcatccgaagtaataaggcgcgccaagcaggatctggaacgtctgaaaaagaaggaagtcaggcagagaaggaaaagtccagagaaggaagcctttaaaaaacgtgctaagctgcagcaggagaactcagaggagacagacgaaaacgaagctgaggaggaggaggaggaaagagacgaatcgggctgtgaggaagaggagggacgggaggatgaagacgaggactccggttcagaagagagtttggtggactctgactccgaccccgaggagaaggaagtgaatttccaggcagatcttgcagacctgacctgtgagatcgagatcaaacagaaactgatcgacgaattagaaaactcccagaggagactgcagacccttaagcatcagtacgaggaaaaattaatcctcctccagaataaaatcagagatacccaactcgagcgcgatcgggtgctgcagaatctcagtacgatggaatgttatacggaggaaaaggctaacaaaatcaaagctgactatgagaaacggctgcgggagatgaaccgcgatcttcagaaattacaagcagctcagaaggagcacgcgcgcttgctaaagaatcagtctagatacgaacgggagctcaagaagctgcaggcggaagtggcagaaatgaaaaaagcgaaggtcgccctgatgaaacagatgcgagaggagcagcagcgcagacgattagtggaaactaagaggaatagagagatcgcccaacttaaaaaagagcaacgcagacaggaatttcaaataagagccctcgaatcccagaaacggcagcaagagatggttctccgccgtaaaacacaggaagttagcgcacttcggcgactggctaagcccatgtccgagagggtggctggcagagcagggctgaagccccccatgctcgactccggggccgaagtgagtgccagtacaacctccagtgaagctgagagcggggctcggagcgtgagcagcatcgtccggcagtggaaccggaaaatcaaccattttcttggagaccatcctgccccaactgtgaacggcactagacccgctaggaaaaagttccagaagaagggcgccagtcaaagtttctctaaagctgcacggctgaagtggcagtccctggaaagaagaatcatagacattgtgatgcagaggatgaccatagtgaatctggaggccgacatggaaaggctgatcaagaagcgggaagagctttttctgctccaggaagccttgcgcaggaaaagggagcgccttcaagctgagtccccagaggaggaaaaaggactccaggagctggcagaggagatcgaagtgctggccgcgaatatcgattacatcaatgacgggatcaccgactgccaagccacaatcgtgcaactcgaagagacaaaggaggagttggattccaccgatacttctgtggtcatcagttcttgttcactggcagaagctcgcttgctcttagacaattttctcaaggctagcattgataagggactgcaggttgctcagaaggaagctcagatccgattattggagggccgactgagacaaacagatatggctgggagcagccagaaccatctgctgctcgacgctctgcgggagaaggccgaggcgcaccccgagctgcaggctctcatatataatgtccagcaggagaacggctatgcgtctacagatgaggagatatcagagtttagcgaaggcagcttcagtcaatcttttacaatgaagggtagtacttcccatgatgatttcaaattcaaatcagaaccaaaactatcagctcaaatgaaggcagtttctgctgagtgtctcggcccgcctctcgacatctctacgaagaacataacaaaatcgttggccagccttgttgagattaaagaggacggagtgggattttccgtgcgcgatccttactatcgagaccgcgttagccgtactgtgagccttcctacacgcggcagcacattccccagacagtcccgggctaccgaaactagccccctcaccaggcgcaagtcctatgacaggggacagcccattagaagtactgacgttggatttactcccccatcctctcctcccaccaggcctaggaacgacaggaatgtattttcacggctgactagcaaccagtctcagggtagcgcactcgacaagtcagacgattctgactcaagcctgtctgaggtactgcgtggcattatatcacctgtgggaggtgctaaaggagcccgcacagctcccctgcagtgtgtttccatggctgagggtcataccaagccaatactgtgcctggacgccaccgatgagctcctgttcacagggagcaaagaccgtagctgtaaaatgtggaatctagtgaccggtcaggaaatcgccgctctcaagggccacccaaacaatgtggtctccatcaaatactgtagccatagtggcctggttttctcagtctctacctcctacataaaggtttgggacattcgggattcagcaaaatgtatcagaacactgacctcatcagggcaagtcatcagcggagacgcctgcgccgctacatcaacacgggcgattacctcagcccagggagagcaccaaatcaaccagattgcactgtcaccttccggaaccatgctctatgccgcttctggaaatgctgtgagaatctgggaactgtcgagatttcagcccgtgggaaagctgacaggtcacatcgggcctgtgatgtgtttaaccgtcactcagaccgcctcccaacacgatctcgtcgtaactggttccaaggaccactacgtgaagatgtttgagctcggcgaatgcgtgactgggaccattggaccaacccacaattttgaacctccacactacgacggcatcgaatgtctggcaatccagggtgatattttattttctgggagcagagataacggcatcaagaaatgggacctcgaccagcaggagctgatacagcagattcccaatgcacataaagattgggtctgtgcccttgcttttattccaggccggcctatgcttctatctgcttgtagagccggtgtcattaaggtgtggaacgttgacaacttcacccccatcggtgaaattaagggacatgactctcccattaacgccatttgcacaaacgccaaacatattttcactgcaagctcggattgtagagtgaagctgtggaattatgtgccgggactaacaccctgtttgccccggagagtactggccatcaaaggtcgggccactaccctgccgtag

SEQ ID NO: 88200 - DNA, 5007 bp, Artificial Sequence
  derived and/or modified sequence
atggccggccagggcgactgctgcgtgaaggtggccgtgcggatcagaccacagctcagcaaagagaaaatcgaggggtgccatatatgtaccagcgtaacccctggggagcctcaagtactacttggtaaagataaagccttcacgtatgattttgtgtttgatctcgatacatggcaggaacaaatttattctacatgcgtctcaaagctgatcgaagggtgctttgaagggtataacgcgactgtattagcctacggccagacgggagctggtaaaacgtacacgatgggcacaggcttcgatatggctacctcagaggaagagcaaggcatcattccacgcgccatcgcacacttattcggggggatcgccgagcggaagaggagagcacaggaacagggcgtggctggccccgaatttaaagtgagcgcccaattcctcgaactgtacaatgaggaaatcctcgacctgttcgatagcacaagggacccagatacacgacatagaaggtctaacatcaagatccacgaagacgccaacggtggcatctataccactggtgtcactagccgactgatccacagccaggaggaactgatacagtgtctaaaacagggagccctcagtagaaccaccgcttcgacacagatgaacgttcagtccagccgctcacacgccatttttacgatacacctgtgccagatgcggatgtgtacccaacccgacctcgtgaacgaagccgtgaccgggctaccagatggtacaccaccttctagtgagtacgaaacactcactgctaagtttcacttcgttgatctggcgggcagtgagcgcctgaaacgcacaggagctaccggtgaacgggccaaagaaggaataagcatcaattgtggtcttctagccctagggaacgtgatttccgcgctgggggatcagagcaagaaggtagtgcatgtaccttatagagactcaaaactcaccaggctcctgcaggactcacttggcggcaactcacagacaatcatgatcgcttgcgtctccccatctgatcgcgatttcatggaaaccctgaacaccttgaaatatgctaacagagccagaaacataaaaaacaaggtcgtggtgaatcaagataagactagtcagcagatcagcgccctgcgggccgagatcgcacgcctgcagatggagttaatggagtataaagccggaaaaagggtcattggggaggatggagcggaaggctactcagacttgttccgggaaaacgcgatgctccaaaaggaaaacggggctctgcgcctgagagtcaaagcaatgcaggaggctattgacgccataaacaatagagtcactcagctgatgagccaagaagccaacctgttattggcaaaggccggagatggcaatgaggcaatcggggcccttatccagaactacatcagggagatcgaagaactgaggacaaagcttcttgaaagtgaggccatgaacgaatctcttcggagatctctgtcccgtgccagcgctaggtccccatacagcctgggcgcctcacctgcagccccggccttcggggggtccccagccagttcaatggaagatgcgagtgaggtgatcagacgggccaagcaggacctggagagactgaagaagaaggaggtgcggcaaaggaggaagtcgcctgagaaggaggcttttaagaagagagcaaagctacagcaggagaatagtgaggaaactgacgagaacgaagccgaggaggaggaggaagaacgcgatgagtccggatgcgaggaggaggaagggcgggaagacgaggacgaagactcaggctcagaagaatcactggttgactcggactccgatccagaggagaaggaagtgaacttccaggctgatctggcagacctgacttgcgaaattgaaattaagcagaagctgattgatgagctagaaaactcgcaaagacggttacagacccttaagcaccagtacgaagagaaactgatactcctgcagaataagatcagagacacccagctggaacgcgaccgagtactacagaatttgtcaacaatggagtgctatacagaggagaaagccaataaaatcaaggctgactatgagaaaagactgcgagaaatgaatagagacctgcagaagctgcaggcggcacagaaggagcacgcccgactcttaaagaatcagtccaggtatgagcgagaactaaaaaagctgcaggctgaagttgccgagatgaagaaagccaaagtagcccttatgaagcagatgcgggaggaacagcaacgcaggaggcttgtggaaactaaaagaaatagagagatcgcccagttgaagaaggagcagagaaggcaagaatttcagatcagagctctggagtctcagaaaaggcagcaggagatggtccttcgacgaaagacacaggaagtatccgctctgcgtcgactggcaaaacctatgagtgagagagttgctggtagggccggactgaagcctcccatgctcgactctggtgctgaagtgagtgcatctacaacctcatctgaggcggaaagcggagcccgctctgtgtcatcaatagtgagacaatggaaccgtaaaattaatcactttttgggcgatcaccccgcaccgactgttaacggcacacggccagcccggaaaaagttccaaaagaagggggcatcccaaagtttcagtaaagccgctcgactcaaatggcagtccctcgagaggcgcattattgacattgtaatgcagaggatgactatcgttaacctggaggctgacatggagcggctgatcaagaagcgggaggagttgtttttgctgcaggaggccctgaggcgcaaaagggaacgtcttcaggcagagtcccctgaggaggaaaaaggcctgcaggaactggcagaagagatagaggtccttgctgccaacattgactatatcaatgacgggatcacagactgtcaggcaaccatcgttcaacttgaagagaccaaagaagaattggactctacagacaccagcgtcgtgatctcatcctgttcactggcagaggccagattgctgcttgacaattttttgaaggccagcatagataaaggcctgcaggtggcacagaaagaagctcagattagactcctagaaggaagactccggcagaccgatatggccggatcttcacagaatcacctgctcctcgatgccctcagggagaaagctgaggctcatccagagctccaggcccttatctacaatgtgcaacaggagaatggctatgcctctactgatgaggagattagtgagttcagcgaggggagcttttcccagtcgttcaccatgaaaggtagtacaagtcatgacgactttaagtttaaaagcgagcctaaactgtctgcgcagatgaaagcagtgtcagccgagtgcttggggcctccactggatatatccactaaaaacatcaccaagagtctggcgagtctcgtcgaaattaaagaagatggggtaggattctcagtgcgcgatccttactaccgggaccgggtttcacgcacagtctccttgccgacaaggggtagcacattcccccgccagtctagagcaacagaaacaagcccactgactcgacgtaaaagttacgacaggggccagcccatcaggagtaccgatgtgggctttacaccccctagtagtcccccaactagacccaggaatgaccggaatgtcttcagtaggctcacatccaaccagtcccagggcagtgcgcttgataagagcgatgacagtgactcctcactcagcgaggtcctgcggggaatcatttcgcctgttggtggggccaagggagcaaggactgctccactgcagtgcgtaagcatggcagagggacatactaaaccaatcttatgtctggacgcaacagatgagctcctatttaccgggagcaaggaccggtcgtgtaagatgtggaatctggtgaccggacaagagattgctgcactgaaggggcatcccaacaacgtagtttctatcaaatattgctctcattcagggctggtcttctccgtttcgactagctatattaaggtctgggatatccgcgattctgctaagtgcattcgaacccttacatccagcgggcaggtgatatccggtgacgcctgcgccgcaaccagtacacgggccataacatcggctcagggcgagcatcaaattaatcaaatcgccctcagccctagcgggactatgctctacgccgcctccggcaacgctgtccgaatctgggaactgtctaggttccagcctgtcggtaaacttactgggcacatcggaccagtgatgtgcctgactgtaacccagacggcatcacagcacgatctggtcgtaacagggtcgaaggatcactacgtcaaaatgttcgagctcggcgaatgtgtgactggaactattggcccgacccacaacttcgagccccctcactatgacggaatcgagtgcctggccattcagggagatatcctatttagcggctccagagacaacggtatcaagaaatgggatctggatcagcaggagcttatacagcagatcccaaacgcgcacaaggactgggtctgcgccctcgccttcatccctggtaggcctatgctgctgagtgcgtgtagggctggggttataaaagtgtggaacgtggataatttcacaccaatcggagagatcaagggccatgactcgccaatcaacgccatatgtaccaacgcaaaacatatcttcactgcctcgtcagactgtcgggtgaagctgtggaattacgtgcccggcctcaccccatgtctgccacgccgagtcttagctatcaagggccgggcaacaacttgccccgacccaccacaactgtctctaagcccgctctcttttttccctagtttcctgttcccgctctttccccactttgatctttcttgcttcctgacatag

SEQ ID NO: 88201 - DNA, 4914 bp, Artificial Sequence
  derived and/or modified sequence
atggccggtcagggggactgctgcgtaaaagtcgcggtacgcatcaggcctcaactgtctaaagagaagattgaaggctgtcatatctgcacgtctgtcacccccggagaaccccaggtcctgctcggtaaagacaaagcctttacctacgatttcgtgtttgacctggacacctggcaggagcagatctactctacctgtgttagcaagctaatagagggatgttttgaaggttataatgcgaccgtccttgcatatggtcaaactggggctggcaagacctacaccatggggacaggttttgacatggcaacgagcgaggaggaacagggcattatcccccgagcaatagcacacctgttcggaggtatcgccgagagaaagcgccgagcgcaggagcagggcgttgccggtcccgaattcaaggtgagcgctcagtttttagagctctacaacgaggaaattctagatcttttcgatagcacacgagacccagacacgcgccacagaaggtccaacatcaaaatccacgaggacgctaatggcggaatttatacaacaggagttacctctaggctcatccactcacaggaagagctgatccagtgccttaaacaaggcgcattatcacggaccaccgcctcaacacagatgaatgtacagagcagccggtcacatgctatctttaccatccacttgtgtcagatgcgcatgtgcacccagcccgacctcgtcaacgaagccgtgacgggcttgcctgacggaacaccaccaagttctgagtatgagaccctgacggctaaattccatttcgtggatctcgcaggttccgaaagacttaagcgaacaggagctaccggagagcgggctaaagagggaatttccattaactgcgggcttttagcccttgggaacgttatttccgctttgggtgaccagagcaaaaaggttgtgcatgtcccgtatcgcgattcaaaattgactcggctgttacaggatagtctgggtgggaattcccagactattatgatcgcttgcgtgtcaccgtccgacagggatttcatggaaacactgaacaccctcaagtatgcaaatagggcacgtaatataaagaataaagtggttgtcaatcaggataagacttcacaacagatctcagcccttcgtgccgagatcgccaggttgcagatggagctgatggaatataaggcagggaagcgcgtaatcggggaggacggcgcagagggatattcggatctgttccgcgagaacgctatgctgcagaaagagaatggagctttacgcctaagggttaaagccatgcaagaagctattgatgcaatcaataacagagtcacgcaactgatgagccaagaggccaacctgctactggccaaagccggtgatggcaatgaagctatcggcgctctaatacagaactacattagagagatcgaggagctcagaaccaagttactggaatcagaggccatgaacgagagcctcagacgctcactttcaagagcctccgccaggagcccttattccctgggtgcttcgcctgctgcacccgctttcggaggatccccggctagctccatggaggatgcctcagaagtgatccgcagagccaaacaggatctggagcgccttaaaaagaaggaagttcgacagcgacggaagagccccgaaaaagaagcttttaaaaagagggcaaaactccagcaggaaaactccgaggaaacagacgaaaatgaggctgaggaagaggaggaagagagggatgagagtggttgtgaagaggaggagggacgagaagacgaagatgaagattcaggctctgaggaatccctggtggattccgatagcgatccagaggagaaggaggtgaacttccaagccgatctcgctgatctgacctgcgagatcgagatcaaacagaaactgatcgacgaacttgagaatagccaacggcgacttcagaccctcaaacaccagtatgaagagaaactgattcttctgcagaacaaaatccgggatactcagctggagagagatcgcgtgcttcagaacctcagtacaatggaatgctatactgaagaaaaggccaacaaaattaaggctgactatgaaaagcgtctgcgagagatgaaccgcgatctacagaagttgcaagccgctcaaaaggagcatgctcggctgctcaagaatcaatcacggtacgagcgggagctcaagaagctgcaggccgaagtggcagagatgaaaaaagccaaagtggcgctgatgaaacaaatgcgcgaagagcagcagaggcgccgactggtggaaacgaaacggaacagggaaatagcccagttaaagaaggaacagagaagacaggagtttcagattcgcgctcttgaaagccaaaagcggcagcaagaaatggtactgcggaggaaaacccaggaagtgagcgcattaagaagactggccaagcccatgtccgaaagggtcgctggcagggccggtttgaagccaccgatgctggattccggggctgaagtgtcggctagtacaaccagctccgaggccgagtctggcgcacggtccgtgagttcaattgtgagacagtggaacagaaaaattaatcattttttgggcgatcatccagccccaactgttaatggaactcggccagctaggaagaagtttcagaagaagggagcaagccagagtttctctaaggccgctagacttaagtggcagtccctcgaaagaagaatcattgacatcgttatgcaacggatgaccatcgtgaatctggaagctgacatggaacggctgattaagaaacgagaagaactgttcctgcttcaggaggctttacggcgaaagagagaacggctgcaagccgaatcaccagaggaagagaaaggcttacaagagttggctgaggagattgaagtccttgccgctaatatagattatatcaacgatgggattaccgactgccaagcgactattgtgcagctggaagagacgaaggaggagttagattccactgacacaagtgttgtgatttcgtcatgctcgctagccgaggcacgcctgcttctggacaactttctgaaggctagtatcgacaaaggtctgcaagtcgcccagaaggaggcccagattcgcctgctggaaggaagactgcgccaaactgacatggctgggtcatctcagaatcaccttcttctcgacgccctacgcgagaaagcagaggcccaccccgagctacaggctctgatctacaacgttcagcaagagaacggatatgcttccacagatgaagagatctctgagttctctgagggatcctttagccagagctttactatgaaggggtcaacatcccacgacgatttcaagttcaagtctgagccaaagttatcggcccagatgaaggccgtctccgctgagtgtctgggacctcctctcgatatcagcacaaagaacataaccaaaagcctagcaagcttagtggagatcaaagaggacggcgtcgggttttctgtcagggatccttactatcgagatagggtttctaggacagtttcactaccaactagaggatctacgtttcctcgccaaagccgcgcaactgagacgtccccccttacaaggaggaaatcatatgaccgcggtcagcctatcaggagcaccgacgttggattcacacctcctagctctcccccaacacgacccagaaatgatcggaatgttttcagtagactgacctctaaccagtcccaggggagtgcgctagataaaagtgacgactcagactcatcactctcggaggtgctgcggggtattatttccccagtcggaggagctaagggggctcgcactgctcctcttcaatgcgtctccatggctgaaggacacacaaagcctatcctgtgcttggacgcaacagacgagcttttgtttaccggttctaaggaccggagctgtaagatgtggaacctggttactggccaggagattgccgcactcaagggtcacccaaacaacgtcgtgagtattaagtactgcagtcacagcggccttgtattcagcgtcagcacttcatacatcaaagtgtgggacatccgcgactcagccaagtgtattaggaccctgacgtcaagcgggcaggtaatatctggagatgcctgcgctgctacttccacccgggctataactagcgctcagggagagcaccaaatcaaccagatagcactgagcccgtccggaacaatgctgtacgctgcaagcggtaatgctgtgagaatatgggaactgagcaggtttcagcccgtcggaaaactgacaggacatattggacccgtaatgtgcctgaccgtgacccaaactgccagccagcacgatctggtcgttactggttcaaaggatcattatgtgaagatgttcgaactgggcgagtgtgttacgggaacaatcggccctactcacaattttgagccaccccattacgatgggatcgaatgcttggctatccagggggacatcctctttagcggctctcgtgataacggtatcaaaaagtgggatctcgatcagcaggagctgattcagcagattcctaacgctcacaaagattgggtatgcgctctggctttcattccgggaaggccgatgttactgagcgcgtgtagagctggggtgatcaaagtttggaatgtagataatttcactcctattggcgaaatcaaggggcacgactccccaatcaacgcgatctgcacaaacgctaagcacatattcacagcatcaagcgactgccgtgtcaaactatggaattatgtaccagggcttaccccgtgcctacctagacgagtgctggccatcaaaggaagagcgaccactctcccatag

SEQ ID NO: 88202 - DNA, 5007 bp, Artificial Sequence
  derived and/or modified sequence
atggctgggcaaggagactgctgtgttaaagtcgctgtaaggatcaggcctcagctcagtaaggagaagatagaagggtgtcatatctgtacatcagtgacacccggagagccccaggtgctgcttgggaaggacaaggcgttcacatatgattttgtgttcgaccttgacacctggcaggagcagatatacagtacatgtgtgtctaagctgatcgagggctgttttgaggggtacaacgctacggtgcttgcatacggtcagactggtgccggaaaaacatacaccatgggcaccggcttcgacatggctaccagtgaagaggaacagggcatcattccacgtgcaatagcacacttgtttgggggtatcgccgaaaggaaacggagggcccaagagcagggcgtagccggacctgaatttaaggtgagcgcacagttcctcgagctttataacgaggagattttagatctcttcgattctactcgagaccctgatacccggcatcggaggtccaacatcaagatccatgaggatgctaatggtggcatctatactacaggagtgacttcccgtctgatccatagccaggaggagctcatccaatgtttgaaacagggcgcattatcacgaactacagccagtacccaaatgaatgtgcagagctcccgcagtcacgccatcttcacgattcatctgtgtcagatgcgcatgtgcacccagcccgacctcgtcaatgaggcagtgactggcctgccagatggtacccctccttcctccgaatacgaaacgttgacagctaaatttcattttgtagacctcgcagggtccgagcggctcaagaggaccggggctaccggcgagagagctaaagaaggcatctctatcaattgtgggctattggctctggggaacgtgatttctgcactgggggatcagagcaagaaagtggtgcatgtaccatatcgggactcaaagttgacccggctgctgcaggatagccttgggggaaactctcagactatcatgatcgcttgcgtaagccctagtgaccgggacttcatggaaaccctcaacaccctgaagtacgccaatagagccagaaatatcaagaataaggtggtggtgaaccaggataagacctcccaacagatctccgcattgcgggctgagatcgcccgactccagatggaactgatggagtataaggccggtaaaagagttatcggtgaggatggcgctgaggggtactcggatctgttccgggaaaatgcgatgttgcagaaagaaaacggggctctgagacttcgcgtcaaggccatgcaggaagctatcgacgccatcaataatcgggttacgcagctgatgagccaggaggctaacctcctcctcgctaaggctggagatggtaatgaggccatcggcgcactaatccagaactacatccgagagattgaggaactgcggaccaaactgctcgaatctgaagcaatgaatgaatcactccgtagaagcctgtctcgggcttcagctcgtagtccttactccctgggcgcttcccctgccgctcctgcattcggcggttctcccgcatccagcatggaggatgcatcagaggtcatcagaagagctaaacaggatcttgaacggcttaagaagaaggaggtcagacagagaagaaaaagccctgaaaaggaagcattcaagaaaagggccaagctgcaacaggagaactctgaagagaccgatgagaacgaagctgaggaagaggaggaggaaagggatgaatccggctgcgaggaggaagaaggccgtgaagatgaggacgaagactctggctccgaggagtctcttgttgacagtgatagtgatccagaagaaaaagaagttaactttcaggccgatttggcagatctcacctgcgagatagagatcaagcaaaaattgatcgacgaactggaaaactcacaaaggagactgcagacattaaagcaccagtatgaggagaagctgatcctactccagaacaagatccgcgatacacagttggagcgagatcgtgttctacaaaacttgagtactatggaatgttataccgaagagaaggccaacaagattaaagcggattatgagaagagattacgcgagatgaaccgagatctccaaaaacttcaagccgctcaaaaggagcacgcacggctcttaaagaatcagtcccggtatgagcgcgaactaaagaagctgcaggcagaagtggctgaaatgaaaaaggccaaagtcgccctgatgaaacagatgagagaagagcagcagcgcagaagactcgtggagaccaagcgcaaccgtgaaatcgctcagctgaagaaggaacagcggagacaggaattccaaatcagggccctggagtcccagaagaggcaacaggagatggtgctgagaagaaaaacccaggaggtctccgccctgcgtcgtttggctaaacccatgagcgagcgcgtggctggacgtgcgggactgaagccacccatgctagactccggcgctgaggtgtccgccagcaccaccagctctgaggctgaatctggcgctcgaagtgtctcaagtatagtccgacagtggaacagaaagattaaccatttcctcggggatcatcctgctccgacagtgaacgggacaaggcccgctaggaagaagttccagaagaaaggggcatctcagtctttctcaaaggcggctcgcctgaagtggcagtcactggaacggcgaatcatagacatcgtgatgcagagaatgacgatcgttaatctggaagcagatatggagcggttaatcaagaagcgtgaagagcttttcctgctgcaggaagcccttcgcaggaaaagagaaagactacaagcagaaagtcctgaagaagaaaagggcttgcaagagcttgccgaagagatcgaagtacttgccgctaacatcgactatattaacgatggaataaccgactgtcaggctactatcgtgcagctagaagagacaaaggaagaactggactctaccgacacatcggtggtaataagctcttgcagcctagccgaagcccgactcctcctggataacttcctcaaggcgagcattgacaagggattgcaagtcgcgcagaaagaggcccagatcaggctgctggagggcagactgcggcaaactgacatggccggaagctcacagaaccatctgctgctggacgcactccgggaaaaggcggaagcacaccccgaactccaagcactgatctacaatgttcagcaggagaacgggtatgcatccaccgatgaggagatctccgagttcagcgagggtagtttcagccagagttttacgatgaagggctcgacctcacacgatgattttaaattcaagagcgaacccaaactgagtgctcaaatgaaagccgtgagcgccgaatgtctggggccacctctcgatatcagtacgaaaaacattacgaaatcactggctagtcttgtggagatcaaggaagatggtgtgggattctccgttcgggatccctattatcgcgatagggtcagccggactgtgtccctgcctactcgtgggagcacatttccgaggcagagtagagcgacagagacctccccccttacccgcagaaaatcctatgataggggccagcctatccggtccactgacgtgggatttactcctcccagtagtccgcctactcgtccacgcaacgaccggaacgttttttcaagactgactagtaaccaaagtcaaggatcagcgctggataagtctgacgatagtgattcatccttgtccgaggtgttacgcggtatcattagcccagtgggaggcgctaaaggcgctcgaacagccccacttcagtgcgtgtcaatggctgaaggccacacaaagcctatcctgtgtctggacgcaacagatgaactgctatttaccggctccaaggacagatcctgtaaaatgtggaatttggtcacgggccaggagatcgccgctttgaaggggcaccccaataacgtggtctctatcaagtactgtagtcactccggtctggtgtttagcgtatccaccagttatattaaagtctgggatattcgtgattctgctaagtgtatccggactttaactagcagcggacaggtgattagcggcgacgcatgtgctgcaacaagtacccgcgcaattacttcagcgcagggagagcatcaaatcaaccagatcgcactgtcacctagcgggacaatgctgtacgccgcttctggaaatgctgtccggatctgggaactcagccgtttccaacccgttgggaaactcacgggacatattggcccagtgatgtgcttgacggtcacacaaaccgcatcacagcacgatctcgtggtcacaggctcaaaagaccactatgtcaaaatgttcgaactgggagagtgtgtgacaggcactatcggacctacacataatttcgaacctccacactatgatggaatcgaatgcctcgcgattcaaggggacattctgttttctggcagcagggataatgggatcaaaaaatgggaccttgatcagcaggaactgatccaacagatcccaaatgcgcataaagactgggtgtgtgctcttgcctttatcccagggcgaccaatgctgctgtccgcctgtcgggcaggcgtcatcaaggtctggaacgtggataatttcacccctattggcgaaattaagggacatgacagccccattaatgccatttgcacaaacgcaaagcatatatttactgcgagctccgattgccgagtcaaactttggaactacgtacccggattaactccctgcttacccagaagagttttggctatcaagggcagggccactacatgtcccgatccgccacagctgagcttatcaccattgagcttctttccctccttcctttttcctctgttcccccactttgatctctcctgttttctgacttag

SEQ ID NO: 88203 - DNA, 4914 bp, Artificial Sequence
  derived and/or modified sequence
atggccggccagggcgactgctgcgtgaaggtggccgtgagaatcagaccccagctgagcaaggagaagatcgagggctgccacatctgcaccagcgtgacccccggcgagccccaggtgctgctgggcaaggacaaggccttcacctacgacttcgtgttcgacctggacacctggcaggagcagatctacagcacctgcgtgagcaagctgatcgagggctgcttcgagggctacaacgccaccgtgctggcctacggccagaccggcgccggcaagacctacaccatgggcaccggcttcgacatggccaccagcgaggaggagcagggcatcatccccagagccatcgcccacctgttcggcggcatcgccgagagaaagagaagagcccaggagcagggcgtggccggccccgagttcaaggtgagcgcccagttcctggagctgtacaacgaggagatcctggacctgttcgacagcaccagagaccccgacaccagacacagaagaagcaacatcaagatccacgaggacgccaacggcggcatctacaccaccggcgtgaccagcagactgatccacagccaggaggagctgatccagtgcctgaagcagggcgccctgagcagaaccaccgccagcacccagatgaacgtgcagagcagcagaagccacgccatcttcaccatccacctgtgccagatgagaatgtgcacccagcccgacctggtgaacgaggccgtgaccggcctgcccgacggcaccccccccagcagcgagtacgagaccctgaccgccaagttccacttcgtggacctggccggcagcgagagactgaagagaaccggcgccaccggcgagagagccaaggagggcatcagcatcaactgcggcctgctggccctgggcaacgtgatcagcgccctgggcgaccagagcaagaaggtggtgcacgtgccctacagagacagcaagctgaccagactgctgcaggacagcctgggcggcaacagccagaccatcatgatcgcctgcgtgagccccagcgacagagacttcatggagaccctgaacaccctgaagtacgccaacagagccagaaacatcaagaacaaggtggtggtgaaccaggacaagaccagccagcagatcagcgccctgagagccgagatcgccagactgcagatggagctgatggagtacaaggccggcaagagagtgatcggcgaggacggcgccgagggctacagcgacctgttcagagagaacgccatgctgcagaaggagaacggcgccctgagactgagagtgaaggccatgcaggaggccatcgacgccatcaacaacagagtgacccagctgatgagccaggaggccaacctgctgctggccaaggccggcgacggcaacgaggccatcggcgccctgatccagaactacatcagagagatcgaggagctgagaaccaagctgctggagagcgaggccatgaacgagagcctgagaagaagcctgagcagagccagcgccagaagcccctacagcctgggcgccagccccgccgcccccgccttcggcggcagccccgccagcagcatggaggacgccagcgaggtgatcagaagagccaagcaggacctggagagactgaagaagaaggaggtgagacagagaagaaagagccccgagaaggaggccttcaagaagagagccaagctgcagcaggagaacagcgaggagaccgacgagaacgaggccgaggaggaggaggaggagagagacgagagcggctgcgaggaggaggagggcagagaggacgaggacgaggacagcggcagcgaggagagcctggtggacagcgacagcgaccccgaggagaaggaggtgaacttccaggccgacctggccgacctgacctgcgagatcgagatcaagcagaagctgatcgacgagctggagaacagccagagaagactgcagaccctgaagcaccagtacgaggagaagctgatcctgctgcagaacaagatcagagacacccagctggagagagacagagtgctgcagaacctgagcaccatggagtgctacaccgaggagaaggccaacaagatcaaggccgactacgagaagagactgagagagatgaacagagacctgcagaagctgcaggccgcccagaaggagcacgccagactgctgaagaaccagagcagatacgagagagagctgaagaagctgcaggccgaggtggccgagatgaagaaggccaaggtggccctgatgaagcagatgagagaggagcagcagagaagaagactggtggagaccaagagaaacagagagatcgcccagctgaagaaggagcagagaagacaggagttccagatcagagccctggagagccagaagagacagcaggagatggtgctgagaagaaagacccaggaggtgagcgccctgagaagactggccaagcccatgagcgagagagtggccggcagagccggcctgaagccccccatgctggacagcggcgccgaggtgagcgccagcaccaccagcagcgaggccgagagcggcgccagaagcgtgagcagcatcgtgagacagtggaacagaaagatcaaccacttcctgggcgaccaccccgcccccaccgtgaacggcaccagacccgccagaaagaagttccagaagaagggcgccagccagagcttcagcaaggccgccagactgaagtggcagagcctggagagaagaatcatcgacatcgtgatgcagagaatgaccatcgtgaacctggaggccgacatggagagactgatcaagaagagagaggagctgttcctgctgcaggaggccctgagaagaaagagagagagactgcaggccgagagccccgaggaggagaagggcctgcaggagctggccgaggagatcgaggtgctggccgccaacatcgactacatcaacgacggcatcaccgactgccaggccaccatcgtgcagctggaggagaccaaggaggagctggacagcaccgacaccagcgtggtgatcagcagctgcagcctggccgaggccagactgctgctggacaacttcctgaaggccagcatcgacaagggcctgcaggtggcccagaaggaggcccagatcagactgctggagggcagactgagacagaccgacatggccggcagcagccagaaccacctgctgctggacgccctgagagagaaggccgaggcccaccccgagctgcaggccctgatctacaacgtgcagcaggagaacggctacgccagcaccgacgaggagatcagcgagttcagcgagggcagcttcagccagagcttcaccatgaagggcagcaccagccacgacgacttcaagttcaagagcgagcccaagctgagcgcccagatgaaggccgtgagcgccgagtgcctgggcccccccctggacatcagcaccaagaacatcaccaagagcctggccagcctggtggagatcaaggaggacggcgtgggcttcagcgtgagagacccctactacagagacagagtgagcagaaccgtgagcctgcccaccagaggcagcaccttccccagacagagcagagccaccgagaccagccccctgaccagaagaaagagctacgacagaggccagcccatcagaagcaccgacgtgggcttcaccccccccagcagcccccccaccagacccagaaacgacagaaacgtgttcagcagactgaccagcaaccagagccagggcagcgccctggacaagagcgacgacagcgacagcagcctgagcgaggtgctgagaggcatcatcagccccgtgggcggcgccaagggcgccagaaccgcccccctgcagtgcgtgagcatggccgagggccacaccaagcccatcctgtgcctggacgccaccgacgagctgctgttcaccggcagcaaggacagaagctgcaagatgtggaacctggtgaccggccaggagatcgccgccctgaagggccaccccaacaacgtggtgagcatcaagtactgcagccacagcggcctggtgttcagcgtgagcaccagctacatcaaggtgtgggacatcagagacagcgccaagtgcatcagaaccctgaccagcagcggccaggtgatcagcggcgacgcctgcgccgccaccagcaccagagccatcaccagcgcccagggcgagcaccagatcaaccagatcgccctgagccccagcggcaccatgctgtacgccgccagcggcaacgccgtgagaatctgggagctgagcagattccagcccgtgggcaagctgaccggccacatcggccccgtgatgtgcctgaccgtgacccagaccgccagccagcacgacctggtggtgaccggcagcaaggaccactacgtgaagatgttcgagctgggcgagtgcgtgaccggcaccatcggccccacccacaacttcgagcccccccactacgacggcatcgagtgcctggccatccagggcgacatcctgttcagcggcagcagagacaacggcatcaagaagtgggacctggaccagcaggagctgatccagcagatccccaacgcccacaaggactgggtgtgcgccctggccttcatccccggcagacccatgctgctgagcgcctgcagagccggcgtgatcaaggtgtggaacgtggacaacttcacccccatcggcgagatcaagggccacgacagccccatcaacgccatctgcaccaacgccaagcacatcttcaccgccagcagcgactgcagagtgaagctgtggaactacgtgcccggcctgaccccctgcctgcccagaagagtgctggccatcaagggcagagccaccaccctgccctag

SEQ ID NO: 88204 - DNA, 5007 bp, Artificial Sequence
  derived and/or modified sequence
atggccggccagggcgactgctgcgtgaaggtggccgtgagaatcagaccccagctgagcaaggagaagatcgagggctgccacatctgcaccagcgtgacccccggcgagccccaggtgctgctgggcaaggacaaggccttcacctacgacttcgtgttcgacctggacacctggcaggagcagatctacagcacctgcgtgagcaagctgatcgagggctgcttcgagggctacaacgccaccgtgctggcctacggccagaccggcgccggcaagacctacaccatgggcaccggcttcgacatggccaccagcgaggaggagcagggcatcatccccagagccatcgcccacctgttcggcggcatcgccgagagaaagagaagagcccaggagcagggcgtggccggccccgagttcaaggtgagcgcccagttcctggagctgtacaacgaggagatcctggacctgttcgacagcaccagagaccccgacaccagacacagaagaagcaacatcaagatccacgaggacgccaacggcggcatctacaccaccggcgtgaccagcagactgatccacagccaggaggagctgatccagtgcctgaagcagggcgccctgagcagaaccaccgccagcacccagatgaacgtgcagagcagcagaagccacgccatcttcaccatccacctgtgccagatgagaatgtgcacccagcccgacctggtgaacgaggccgtgaccggcctgcccgacggcaccccccccagcagcgagtacgagaccctgaccgccaagttccacttcgtggacctggccggcagcgagagactgaagagaaccggcgccaccggcgagagagccaaggagggcatcagcatcaactgcggcctgctggccctgggcaacgtgatcagcgccctgggcgaccagagcaagaaggtggtgcacgtgccctacagagacagcaagctgaccagactgctgcaggacagcctgggcggcaacagccagaccatcatgatcgcctgcgtgagccccagcgacagagacttcatggagaccctgaacaccctgaagtacgccaacagagccagaaacatcaagaacaaggtggtggtgaaccaggacaagaccagccagcagatcagcgccctgagagccgagatcgccagactgcagatggagctgatggagtacaaggccggcaagagagtgatcggcgaggacggcgccgagggctacagcgacctgttcagagagaacgccatgctgcagaaggagaacggcgccctgagactgagagtgaaggccatgcaggaggccatcgacgccatcaacaacagagtgacccagctgatgagccaggaggccaacctgctgctggccaaggccggcgacggcaacgaggccatcggcgccctgatccagaactacatcagagagatcgaggagctgagaaccaagctgctggagagcgaggccatgaacgagagcctgagaagaagcctgagcagagccagcgccagaagcccctacagcctgggcgccagccccgccgcccccgccttcggcggcagccccgccagcagcatggaggacgccagcgaggtgatcagaagagccaagcaggacctggagagactgaagaagaaggaggtgagacagagaagaaagagccccgagaaggaggccttcaagaagagagccaagctgcagcaggagaacagcgaggagaccgacgagaacgaggccgaggaggaggaggaggagagagacgagagcggctgcgaggaggaggagggcagagaggacgaggacgaggacagcggcagcgaggagagcctggtggacagcgacagcgaccccgaggagaaggaggtgaacttccaggccgacctggccgacctgacctgcgagatcgagatcaagcagaagctgatcgacgagctggagaacagccagagaagactgcagaccctgaagcaccagtacgaggagaagctgatcctgctgcagaacaagatcagagacacccagctggagagagacagagtgctgcagaacctgagcaccatggagtgctacaccgaggagaaggccaacaagatcaaggccgactacgagaagagactgagagagatgaacagagacctgcagaagctgcaggccgcccagaaggagcacgccagactgctgaagaaccagagcagatacgagagagagctgaagaagctgcaggccgaggtggccgagatgaagaaggccaaggtggccctgatgaagcagatgagagaggagcagcagagaagaagactggtggagaccaagagaaacagagagatcgcccagctgaagaaggagcagagaagacaggagttccagatcagagccctggagagccagaagagacagcaggagatggtgctgagaagaaagacccaggaggtgagcgccctgagaagactggccaagcccatgagcgagagagtggccggcagagccggcctgaagccccccatgctggacagcggcgccgaggtgagcgccagcaccaccagcagcgaggccgagagcggcgccagaagcgtgagcagcatcgtgagacagtggaacagaaagatcaaccacttcctgggcgaccaccccgcccccaccgtgaacggcaccagacccgccagaaagaagttccagaagaagggcgccagccagagcttcagcaaggccgccagactgaagtggcagagcctggagagaagaatcatcgacatcgtgatgcagagaatgaccatcgtgaacctggaggccgacatggagagactgatcaagaagagagaggagctgttcctgctgcaggaggccctgagaagaaagagagagagactgcaggccgagagccccgaggaggagaagggcctgcaggagctggccgaggagatcgaggtgctggccgccaacatcgactacatcaacgacggcatcaccgactgccaggccaccatcgtgcagctggaggagaccaaggaggagctggacagcaccgacaccagcgtggtgatcagcagctgcagcctggccgaggccagactgctgctggacaacttcctgaaggccagcatcgacaagggcctgcaggtggcccagaaggaggcccagatcagactgctggagggcagactgagacagaccgacatggccggcagcagccagaaccacctgctgctggacgccctgagagagaaggccgaggcccaccccgagctgcaggccctgatctacaacgtgcagcaggagaacggctacgccagcaccgacgaggagatcagcgagttcagcgagggcagcttcagccagagcttcaccatgaagggcagcaccagccacgacgacttcaagttcaagagcgagcccaagctgagcgcccagatgaaggccgtgagcgccgagtgcctgggcccccccctggacatcagcaccaagaacatcaccaagagcctggccagcctggtggagatcaaggaggacggcgtgggcttcagcgtgagagacccctactacagagacagagtgagcagaaccgtgagcctgcccaccagaggcagcaccttccccagacagagcagagccaccgagaccagccccctgaccagaagaaagagctacgacagaggccagcccatcagaagcaccgacgtgggcttcaccccccccagcagcccccccaccagacccagaaacgacagaaacgtgttcagcagactgaccagcaaccagagccagggcagcgccctggacaagagcgacgacagcgacagcagcctgagcgaggtgctgagaggcatcatcagccccgtgggcggcgccaagggcgccagaaccgcccccctgcagtgcgtgagcatggccgagggccacaccaagcccatcctgtgcctggacgccaccgacgagctgctgttcaccggcagcaaggacagaagctgcaagatgtggaacctggtgaccggccaggagatcgccgccctgaagggccaccccaacaacgtggtgagcatcaagtactgcagccacagcggcctggtgttcagcgtgagcaccagctacatcaaggtgtgggacatcagagacagcgccaagtgcatcagaaccctgaccagcagcggccaggtgatcagcggcgacgcctgcgccgccaccagcaccagagccatcaccagcgcccagggcgagcaccagatcaaccagatcgccctgagccccagcggcaccatgctgtacgccgccagcggcaacgccgtgagaatctgggagctgagcagattccagcccgtgggcaagctgaccggccacatcggccccgtgatgtgcctgaccgtgacccagaccgccagccagcacgacctggtggtgaccggcagcaaggaccactacgtgaagatgttcgagctgggcgagtgcgtgaccggcaccatcggccccacccacaacttcgagcccccccactacgacggcatcgagtgcctggccatccagggcgacatcctgttcagcggcagcagagacaacggcatcaagaagtgggacctggaccagcaggagctgatccagcagatccccaacgcccacaaggactgggtgtgcgccctggccttcatccccggcagacccatgctgctgagcgcctgcagagccggcgtgatcaaggtgtggaacgtggacaacttcacccccatcggcgagatcaagggccacgacagccccatcaacgccatctgcaccaacgccaagcacatcttcaccgccagcagcgactgcagagtgaagctgtggaactacgtgcccggcctgaccccctgcctgcccagaagagtgctggccatcaagggcagagccaccacctgccccgaccccccccagctgagcctgagccccctgagcttcttccccagcttcctgttccccctgttcccccacttcgacctgagctgcttcctgacctag

SEQ ID NO: 88205 - protein, 1623 aa, Artificial Sequence
  derived and/or modified sequence
MAGQGDCCVKVAVRIRPQLSKEKIEGCHICTSVTPGEPQVLLGKDKAFTYDFVFDLDTWQEQIYSTCVSKLIEGCFEGYNATVLAYGQTGAGKTYTMGTGFDMATSEEEQGIIPRAIAHLFGGIAERKRRAQEQGVAGPEFKVSAQFLELYNEEILDLFDSTRDPDTRHRRSNIKIHEDANGGIYTTGVTSRLIHSQEELIQCLKQGALSRTTASTQMNVQSSRSHAIFTIHLCQMRMCTQPDLVNEAVTGLPDGTPPSSEYETLTAKFHFVDLAGSERLKRTGATGERAKEGISINCGLLALGNVISALGDQSKKVVHVPYRDSKLTRLLQDSLGGNSQTIMIACVSPSDRDFMETLNTLKYANRARNIKNKVVVNQDKTSQQISALRAEIARLQMELMEYKAGKRVIGEDGAEGYSDLFRENAMLQKENGALRLRVKAMQEAIDAINNRVTQLMSQEANLLLAKAGDGNEAIGALIQNYIREIEELRTKLLESEAMNESLRRSLSRASARSPYSLGASPAAPAFGGSPASSMEDASEVIRRAKQDLERLKKKEVRQRRKSPEKEAFKKRAKLQQENSEETDENEAEEEEEERDESGCEEEEGREDEDEDSGSEESLVDSDSDPEEKEVNFQADLADLTCEIEIKQKLIDELENSQRRLQTLKHQYEEKLILLQNKIRDTQLERDRVLQNLSTMECYTEEKANKIKADYEKRLREMNRDLQKLQAAQKEHARLLKNQSRYERELKKLQAEVAEMKKAKVALMKQMREEQQRRRLVETKRNREIAQLKKEQRRQEFQIRALESQKRQQEMVLRRKTQEVSALRRLAKPMSERVAGRAGLKPPMLDSGAEVSASTTSSEAESGARSVSSIVRQWNRKINHFLGDHPAPTVNGTRPARKKFQKKGASQSFSKAARLKWQSLERRIIDIVMQRMTIVNLEADMERLIKKREELFLLQEALRRKRERLQAESPEEEKGLQELAEEIEVLAANIDYINDGITDCQATIVQLEETKEELDSTDTSVVISSCSLAEARLLLDNFLKASIDKGLQVAQKEAQIRLLEGRLRQTDMAGSSQNHLLLDALREKAEAHPELQALIYNVQQENGYASTDEEISEFSEGSFSQSFTMKGSTSHDDFKFKSEPKLSAQMKAVSAECLGPPLDISTKNITKSLASLVEIKEDGVGFSVRDPYYRDRVSRTVSLPTRGSTFPRQSRATETSPLTRRKSYDRGQPIRSTDVGFTPPSSPPTRPRNDRNVFSRLTSNQSQGSALDKSDDSDSSLSEVLRGIISPVGGAKGARTAPLQCVSMAEGHTKPILCLDATDELLFTGSKDRSCKMWNLVTGQEIAALKGHPNNVVSIKYCSHSGLVFSVSTSYIKVWDIRDSAKCIRTLTSSGQVISGDACAATSTRAITSAQGEHQINQIALSPSGTMLYAASGNAVRIWELSRFQPVGKLTGHIGPVMCLTVTQTASQHDLVVTGSKDHYVKMFELGECVTGTIGPTHNFEPPHYDGIECLAIQGDILFSGSRDNGIKKWDLDQQELIQQIPNAHKDWVCALAFIPGRPMLLSACRAGVIKVWNVDNFTPIGEIKGHDSPINAICTNAKHIFTASSDLTVKFWSVRRLPHSGPP

SEQ ID NO: 88206 - DNA, 4872 bp, Artificial Sequence
  derived and/or modified sequence
atggctggtcagggggattgctgtgtcaaggtagcagtgaggatccgcccccagctgagcaaggagaaaattgaggggtgtcacatttgcacaagtgtgacccctggggaaccccaagtcctgttaggcaaggataaggcttttacgtatgactttgtctttgatctggatacttggcaggagcagatctactccacatgcgtgtctaaactgatcgaaggttgtttcgagggatataacgcaacagtcctcgcctacggccagactggcgctgggaaaacctacacaatggggaccgggttcgacatggccaccagcgaggaggagcagggaattatcccacgcgcgatcgcacacttgtttggaggaatcgcagagcgaaagagacgtgctcaggaacagggggtggccggacctgagttcaaagttagtgcccaatttctagagctgtataatgaagaaattctcgatctgtttgactccactagagatcccgacactcgtcaccgacggtcaaatatcaagattcacgaggatgctaatggaggcatttataccaccggggtcacctcacggctaattcactcccaggaggagcttattcaatgtctgaagcagggcgctctgagtcggaccacagcctctacgcagatgaatgttcagagctctcgatctcacgccattttcacaatccacctctgccaaatgcgaatgtgcactcaacccgacctcgtgaatgaggcagtgaccggtctgcccgacggcaccccgccgtcttccgagtatgagaccttgactgccaagttccactttgttgatctggctgggagcgaacgtctcaagaggaccggggccacaggtgagagggccaaggaggggataagcattaactgtggactgctcgccctcggcaatgttatatctgctctgggggatcagtcaaagaaggtggtgcatgtaccataccgcgactccaagttaacccgcctcttgcaggactctctcggtggcaacagccagaccattatgatcgcttgcgtgtcgcccagcgaccgagacttcatggagaccctgaatactctcaagtacgcgaaccgggccagaaatataaagaacaaggtggtcgtaaaccaggacaagacaagccagcagatatctgctctgagagcggaaattgctcgtctgcaaatggagctgatggagtacaaagccggaaagcgggtgataggtgaagatggggcggagggatatagtgacctcttccgtgaaaatgctatgctacagaaggaaaatggggcattaagactgcgggtgaaggcaatgcaggaggcgatagatgctatcaacaaccgcgtcacgcagttgatgtcccaggaagcaaatctgctccttgccaaggccggcgatgggaacgaagcaattggcgccctcatacagaactacatccgagagattgaggaactacggacgaagcttcttgagagtgaagctatgaacgagagtctcaggcgcagcttgagcagagcgtcagcacgctccccatactcattgggagcctctcctgcagctccagcttttggaggcagccctgcctccagcatggaagacgcttcggaagtcatcagacgggcgaaacaggatctagagcggttaaagaaaaaggaggttcggcagcgacgcaagagccccgaaaaggaggcgtttaagaaacgcgcaaagctgcaacaggaaaatagcgaggagacggacgagaacgaggccgaggaggaagaggaagagagagacgaaagcggttgcgaggaagaggagggccgcgaggatgaagacgaggatagcggttccgaggagagccttgtagactccgacagcgatccggaggaaaaggaggtgaactttcaggcggatcttgcggacttgacctgtgaaattgagattaagcaaaaacttatagacgaattggaaaatagtcagagaaggctgcagactcttaaacatcagtatgaagaaaagctcattctgctgcagaacaagatccgcgacacacagctcgagcgggaccgggtcctgcagaacctctctaccatggagtgctacaccgaggagaaagccaataaaattaaagccgattatgagaaacgattgcgtgagatgaatagggacttacagaagctgcaggccgcccaaaaggagcacgccagactgcttaaaaaccagtcacgctacgaacgtgaactgaagaaactgcaggcagaagttgccgaaatgaagaaagccaaggtcgcactgatgaaacagatgagagaagagcagcagcgcagaaggctggtcgagactaaaaggaatagagagattgcccagcttaaaaaggaacagcgccgccaagaatttcaaatccgagcgctcgaaagtcaaaaacgacaacaggagatggtgttgaggcggaaaacacaggaggtttcagccctccggcggctggcgaaacctatgtctgagcgggtggccggccgcgctggcctgaagcctccaatgctggacagcggggctgaggtcagtgcatccaccacatctagcgaggctgaaagtggcgcccgcagcgttagcagcatcgtccgacagtggaaccggaaaattaatcactttctgggagaccatcccgcccctactgttaatggtactcgccctgcaagaaaaaaatttcagaagaagggcgcatcacagtccttctcaaaagcggcacgcctgaagtggcagtcactggaacggcggatcatagatatcgtcatgcagagaatgacgatagtcaacttggaggctgacatggagcgtcttattaaaaagagggaggagctgttcctgctccaagaagctctgcgccgaaagagggaacgtctgcaggccgaatcgccagaggaggaaaagggcctacaggagctggcggaggagattgaagtgctcgcagccaacattgattacattaacgacggaattacagactgccaggctacaatcgtgcagctggaagagactaaagaagaactggacagcaccgacaccagtgtcgtcatctcaagttgctcactggcagaagcccggttacttctcgacaacttcctgaaggcaagcatcgacaaaggcttacaggtggcacagaaagaagctcagatacgcctgttggaaggccgtctgcgccagacagatatggccggcagctcccagaatcatttgctcctggatgcccttcgagaaaaggccgaggcacacccagaactgcaggccctgatctataatgttcagcaagaaaacggttacgcaagcactgacgaggagatttccgagttctccgaaggcagcttcagccagagtttcacgatgaagggatctacctcacatgacgacttcaagtttaaaagcgaacccaagctgtccgctcaaatgaaggccgtttccgccgagtgcctcgggccgccactcgacattagtaccaagaacatcaccaaatcactagcatctctcgtcgaaattaaggaagatggggtcggctttagtgtgcgggacccctactacagagatcgggtcagcaggaccgtgtcactccctacgagaggatctaccttccctaggcagtccagggctaccgagactagccctttgactagaaggaaatcctatgaccggggccagcccatccgtagtaccgatgtgggctttacccctccctcctcacctccaaccaggcctaggaacgacaggaatgtattttcgcgcctgacatccaatcagtcacaggggagtgccctggataaatcagatgacagtgactcttctctgagcgaagtcttaagagggatcatatcacctgttggaggcgccaagggggctcgcaccgcgccactgcagtgtgtatctatggcagagggccatacaaagcccatcctgtgtttggatgccactgacgagctactgttcaccggctccaaagacagaagttgtaaaatgtggaaccttgtgactggccaagagatcgccgccctgaagggccaccccaataacgtcgtgtcaataaaatactgctcacactctggcctcgtgttctctgtgagcactagttacataaaggtgtgggacattcgcgactctgcgaagtgtatacggacactaacctcatctgggcaagtaatctcgggggacgcctgcgccgcaactagcacccgggctataacttccgcacagggagaacaccagatcaatcagatcgcactgtccccttccggaactatgctctatgcggcttcgggaaatgctgttcggatctgggagcttagtcgattccagcctgtggggaagctgactggtcacattggcccagtgatgtgtctgactgtgactcagacagcttcccagcacgatctggtggtgaccgggtctaaggatcactatgtgaaaatgttcgaactgggtgagtgcgttacaggaaccatcgggccaacgcacaacttcgaaccgccacattatgacggcatagagtgcctggccattcagggtgatattctgtttagcggctcaagggacaacggcatcaaaaaatgggatctggaccagcaggaactgatacagcaaatccctaacgctcacaaggattgggtgtgtgctctggcgttcatacccgggcggcccatgctcttaagtgcatgccgggccggggtgataaaggtatggaacgttgacaactttacccctattggggagataaaggggcatgactcacccataaatgccatttgcaccaacgctaagcacatctttaccgccagctcggatttgaccgtgaagttttggtcggtacgcaggctcccgcactcaggtcccccttag

SEQ ID NO: 88207 - DNA, 5428 bp, Artificial Sequence
  derived and/or modified sequence
gcccagaccctagctccagagggccatggccggccagggggactgctgcgtcaaggtggccgtcaggatccggccccagctgtcgaaggagaagattgagggctgtcacatctgtacctctgttaccccgggagagccccaggtcctgctggggaaggacaaggccttcacctatgactttgtcttcgacctggacacctggcaagaacagatctattccacctgtgtgagcaagctcatcgagggctgcttcgagggctataatgccacggtgctggcctatgggcagacgggggccgggaagacgtacaccatgggcactggctttgacatggcaacgtcggaggaggagcagggcatcatcccgagggccatcgcacacctctttgggggcattgccgagcgcaagcgccgggcacaggagcagggcgtggctggacctgagttcaaagtcagcgcccagtttctggagctctacaacgaggagatccttgacctgtttgacagcacccgtgaccctgacacccgccaccgcaggtccaacatcaagatccacgaggacgcaaacggtggcatctacaccactggcgtcacttctcgcctcatccactcccaggaggagctgatccagtgcctgaagcagggggccctgtcccgcaccacagccagcacccagatgaacgtgcagagctcacgctcccacgccatcttcaccatccacctgtgccagatgcgcatgtgcacccagcccgacctggtgaatgaggcggtgactgggcttcctgatggtacacctccctcgagtgagtatgagacactcactgctaagtttcactttgtggacctggccggctcagagcggctgaagcggacaggggctactggcgagcgggccaaggagggcatctccatcaactgtggcctgctggccttgggcaatgtgatcagcgccttaggggaccagagcaagaaggtggtgcacgttccctacagggactccaagctcactcggctcctccaggattcgctggggggcaacagccagaccatcatgatcgcctgtgtgagcccctcagaccgagatttcatggagaccctcaacacactcaaatatgccaatcgggcccgcaacatcaagaacaaggtggtagtgaaccaggacaagaccagccagcaaatcagtgcactgcgggctgagattgctcggctgcagatggagctgatggagtataaggcgggcaagcgagtgataggagaggatggcgctgagggctatagtgatctgttccgagagaatgccatgctacagaaggagaatggggccctgcggctgcgggtgaaagccatgcaggaggccatcgatgccatcaacaaccgcgtcacccagctcatgagccaggaggccaacctgctgctagccaaggccggcgatggcaatgaggccattggtgcgctgatccagaactacatccgggagatcgaggagctacggactaagcttctagagagtgaagccatgaacgagtccctgcgccgcagcctctcacgggcctcggctaggagcccctactccctgggtgcttctccagccgccccggccttcgggggcagccctgccagctccatggaggatgcctcggaggtgatccgcagggccaagcaggacctggagcggctaaagaagaaggaggtcaggcagcggaggaagagccccgagaaggaagccttcaaaaagagggcaaaactccaacaggagaacagcgaggagacggatgagaacgaggcggaggaggaggaggaagagcgagacgagagtggctgtgaggaggaggaagggcgcgaggatgaagatgaggactcgggcagtgaagagagcctggtggactcagactcagaccccgaggagaaggaggtgaacttccaggcggacctggccgacctgacttgtgagatcgaaatcaagcagaagctgatcgacgagctggagaacagccagcggcggttgcagacgctcaagcaccagtatgaggaaaagctgattctgctgcagaacaagatccgagacacacagctggagcgcgaccgtgtgctgcagaacctcagcaccatggagtgctatactgaggagaaggccaacaagatcaaggcagactatgagaagaggctgcgggagatgaaccgggacctgcagaagctgcaggccgcccagaaagagcacgcccggctgcttaagaaccagtcgcgctacgagagggagctgaagaagctacaggccgaggtggctgagatgaagaaggccaaggtggccctgatgaagcagatgcgtgaggagcaacagcggcggcggctagtggagaccaagaggaaccgggagatcgcacagctcaagaaggagcagcggcgacaggagtttcagatccgagctctggagtcccagaagcggcagcaggagatggtcctgaggaggaagacccaggaggtttctgcactgaggcgcctggccaagcccatgtctgagcgggtggcagggcgtgcaggactaaagccacccatgctggactctggggctgaggtgtcggccagcactacctcatctgaggctgaatcaggggcccgctctgtctccagcatcgtgcgccagtggaaccgcaaaatcaaccacttcttgggggaccatcctgcgcccactgtcaatggcacccgtcctgcccgaaagaagttccagaagaagggggccagccagagcttcagtaaggcggcaaggctcaagtggcagtccctggagcgacggatcattgacatcgtcatgcagagaatgaccattgtcaacctggaggctgacatggagcggctcatcaagaaaagggaggagctgttcctcctgcaggaggcactgcggaggaagcgggagcggctgcaggctgagagccccgaggaagagaaggggctgcaggagctggctgaggagatcgaggtgctggcagccaacattgactacatcaatgacggcatcaccgactgccaggccaccatcgtgcagctggaggagaccaaggaggagctggactccacagacacatccgtggtcatcagctcctgctccctggctgaagcccgcctcctgctagacaacttcctcaaggcatccattgacaaggggctgcaagtggcacaaaaggaagcccagatccggctgttggagggccgactgaggcagacggatatggcaggctcctcccagaaccatctgctcctggacgccctgcgtgagaaggctgaagctcaccccgagctgcaggccctcatctacaatgtgcagcaggagaatggctacgccagcacagatgaggagatctcagagttctctgagggcagcttctcccagtcattcaccatgaaaggctccaccagccatgacgatttcaagttcaagagcgagcccaaactgtctgcccaaatgaaagctgtgtcggctgagtgcctgggccccccactggatatctccaccaagaacatcaccaagtccctggcctccctcgttgagatcaaagaggacggagtgggcttctctgtccgagacccctattaccgggacagggtctcgcgcaccgtcagtctgcctacccggggcagcactttccctaggcaatctcgagccacagagacgtccccgctgacgagaaggaagtcctacgaccgagggcagcccattaggtccacagatgtgggattcacacccccatcatcccctcccactcggccccgcaatgaccgcaatgtcttctctcgtctcaccagtaatcagagccaggggtcagcgctggacaagtctgatgacagcgactcctctttgtcggaggtcctgaggggcatcatctccccggttggaggagccaagggtgcacggacggccccactgcagtgtgtctccatggccgaaggccacaccaagcccatcctctgcctggatgccacagatgagttgctattcacagggtccaaagaccgaagctgcaagatgtggaacttggttacgggacaggagatcgcagctctaaagggccaccccaacaacgtggtctccatcaagtactgcagccactcggggcttgtgttctccgtgtccacctcctacatcaaggtgtgggacatccgggactcagccaagtgcattcggactctcacgtcctcgggccaggtgatctcaggggatgcctgtgccgccacatccacccgtgccatcaccagtgctcagggcgagcatcagatcaaccagatcgccctcagcccttcgggcaccatgctgtacgccgcctcgggcaatgccgtccgcatctgggagcttagcaggttccagcctgtcggcaagctgactggccacatcggccctgtgatgtgcctgacggtcacccagacggccagccagcatgacctcgtggtgactggctccaaggaccactacgttaagatgttcgagctgggcgagtgtgtgacgggcaccatcggccccactcacaacttcgagcccccgcactacgatggcatcgagtgtctcgccatccagggagacatcctgttcagtggctcccgagataacggcatcaagaagtgggacctagaccagcaggagctcatccagcaaatccccaatgcgcacaaggactgggtgtgcgccctggccttcatcccgggccgccccatgctgctcagcgcctgccgtgcgggtgtcatcaaggtctggaacgtggacaacttcacacccatcggtgagatcaagggccacgacagtcccatcaatgccatctgcaccaatgccaagcatatcttcacagcctccagtgacctgacggtgaagttctggagtgtccggcggttaccccacagcggcccaccctaggagtgaggtcagagggatgcccccggaccctcgaccccagcagcctggacaccatggaagggaagctgtgacccggccgatggggccagctgctctggggacagagggcgtggccccctctcctgccctcctccctctcccttggccttcccacaggacactgttccctcatccctcccctgcctctcaggagcctctgggtgagagagaggctggggaggaaattaagctgtgaagccaaagggcattatcccttcttgttcccctcctggcagtcgtggccacattgtctcctgctgaaccggctctgcccctttctcaggcctttggcccagtggtggagccctgtggggaggtgcagcagcctggccccatcccacccttccgaggagctggcctccccgcttctcccagcccagcctctagagccactgcacctgcctctgagcccaaaaagataagtcctcaggtagctaaggaaaccaggtgtgggcggctgggccttgcagctaacccttaaccctctggcaa

SEQ ID NO: 88208 - DNA, 4872 bp, Artificial Sequence
  derived and/or modified sequence
atggccggccagggcgactgctgcgtgaaggtggccgtgcgcatccggccccagctgagcaaggagaagattgagggctgccacatctgcacctctgtgaccccaggagagccccaggtgctgctgggcaaggacaaggccttcacctatgactttgtgtttgacctggacacctggcaggagcagatctacagcacctgtgtgtccaagctgattgagggctgctttgagggctacaatgccaccgtgctggcctacggccagacaggagctgggaagacctacaccatgggcactggatttgacatggccaccagcgaggaggagcagggcatcatcccccgggccatcgcccacctgtttggaggcattgctgagaggaagagaagagcccaggagcagggcgtggccggccctgagttcaaggtgtctgcccagttcctggagctgtacaatgaggagatcctggacctgtttgacagcacccgggaccctgacaccaggcaccggcgcagcaacatcaagatccatgaagatgccaatggaggcatctacaccactggagtgaccagccgcctcatccacagccaggaggagctgatccagtgcctgaagcagggcgccctgagcaggaccacagccagcacccagatgaatgtgcagagcagccgcagccacgccatcttcaccatccacctgtgccagatgaggatgtgcacccagcctgacctggtgaatgaggccgtgacaggcctgcctgatggcaccccacccagcagtgaatatgagaccctgacagccaagttccactttgtggacctggccggcagcgagcggctgaagaggactggagccaccggggagcgggccaaggagggcatcagcatcaactgtggcctgctggccctgggcaatgtcatcagcgccctgggggaccagagcaagaaggtggtgcacgtgccctacagagacagcaagctgacccggctgctgcaggacagcctgggcggcaacagccagaccatcatgattgcctgtgtgagccccagcgaccgggacttcatggagaccctgaacaccctgaagtatgccaacagagccaggaacatcaagaacaaggtggtggtgaaccaggacaagaccagccagcagatcagcgccctgcgggcagagatcgcccggctgcagatggagctgatggagtacaaggccggcaagagggtgattggagaagatggagctgagggctacagcgacctcttcagagaaaatgccatgctgcagaaggaaaatggagccctgcggctgcgggtgaaggccatgcaggaggccattgatgccatcaacaacagagtgacccagctgatgagccaggaggccaacctgctgctggccaaggctggagatggaaatgaggccatcggggccctgatccagaactacatccgggagattgaggagctgcggaccaagctgctggagagcgaggccatgaatgaaagcctgcggcgcagcctgagccgggccagcgcccggagcccctacagcctgggcgccagccctgctgccccagccttcggcggcagccctgccagctccatggaggatgccagcgaggtgatccggcgggccaagcaggacctggagcggctgaagaagaaggaggtgcggcagaggaggaagagccctgagaaggaggccttcaagaagagggccaagctgcagcaggagaacagcgaggagacagatgaaaatgaagctgaggaggaggaggaggagagagatgaaagtggctgtgaggaggaggagggccgggaggatgaagatgaggacagcggcagcgaggagagcctggtggacagcgacagcgaccctgaggagaaggaggtgaacttccaggccgacctggccgacctgacctgtgaaattgagatcaagcagaagctgattgatgagctggagaacagccagaggcggctgcagaccctgaagcaccagtatgaggagaagctgatcctgctgcagaacaagatccgggacacccagctggagcgggacagagtgctgcagaacctgagcaccatggagtgctacacagaggagaaggccaacaagatcaaggctgactatgagaagaggctgcgggagatgaacagagacctgcagaagctgcaggccgcccagaaggagcacgcccggctgctgaagaaccagagccgctatgagcgggagctgaagaagctgcaggccgaggtggccgagatgaagaaggccaaggtggccctgatgaagcagatgagggaggagcagcagaggcggcggctggtggagaccaagaggaaccgggagatcgcccagctgaagaaggagcagaggcggcaggagttccagatccgggccctggagagccagaagaggcagcaggagatggtgctgcggaggaagacccaggaggtgtctgccctgcggcggctggccaagcccatgtctgagcgggtggccggccgggccggcctgaagccacccatgctggacagcggggctgaggtgtctgccagcaccaccagcagcgaggccgagagcggggcccggtctgtgagcagcatcgtgcggcagtggaacaggaagatcaaccacttcctgggggaccacccagcccccaccgtgaatggcaccaggcctgccaggaagaagttccagaagaagggggccagccagagcttcagcaaggccgcccggctgaagtggcagagcctggagcggcgcatcatcgacatcgtgatgcagaggatgaccatcgtgaacctggaggccgacatggagcggctcatcaagaagcgggaggagctgttcctgctgcaggaggccctgcggaggaagcgggagcggctgcaggccgagagccctgaggaggagaagggcctgcaggagctggccgaggagattgaggtgctggccgccaacatcgactacatcaatgatggcatcacagactgccaggccaccatcgtgcagctggaggagaccaaggaggagctggacagcacagacacctctgtggtgatcagcagctgcagcctggccgaggcccggctgctgctggacaacttcctgaaggccagcattgacaagggcctgcaggtggcccagaaggaggcccagatccggctgctggagggccgcctgcggcagacagacatggccggcagcagccagaaccacctgctgctggatgccctgcgggagaaggccgaggcccaccctgagctgcaggccctgatctacaacgtgcagcaggagaatggctacgccagcacagatgaggagatcagcgagttcagcgagggcagcttcagccagagcttcaccatgaagggcagcaccagccatgatgacttcaagttcaagtctgagcccaagctgagcgcccagatgaaggctgtgtctgcagaatgtctgggcccccccctggacatcagcaccaagaacatcaccaagagcctggccagcctggtggagatcaaggaggatggagtgggcttctctgtgcgggacccctactacagagacagagtgtccaggacagtgtccctgcccacccggggcagcaccttcccccggcagagccgggccacagagaccagccccctgaccaggaggaagagctatgaccggggccagcccatccgcagcacagatgtgggcttcaccccacccagcagcccccccacccggcccagaaatgacagaaatgtgttcagccggctgaccagcaaccagagccagggcagcgccctggacaagagtgatgacagcgacagcagcctgtctgaggtgctgcggggcatcatcagccctgtgggcggggccaagggggccaggacagcccccctgcagtgtgtgtccatggccgagggccacaccaagcccatcctgtgcctggatgccacagatgagctgctcttcaccggcagcaaggacaggagctgcaagatgtggaacctggtgacaggccaggagattgctgccctgaagggccaccccaacaacgtggtgtccatcaagtactgcagccacagcggcctggtgttttctgtgtccaccagctacatcaaggtgtgggacatccgggacagcgccaagtgcatccgcaccctgaccagcagcggccaggtgatctctggagatgcctgtgccgccaccagcacccgggccatcaccagcgcccagggcgagcaccagatcaaccagatcgccctgagccccagcggcaccatgctgtatgctgccagcggaaatgctgtgcgcatctgggagctgagccgcttccagcctgtgggcaagctgaccggccacatcggccctgtgatgtgcctgactgtgacccagacagccagccagcacgacctggtggtgacaggcagcaaggaccactacgtgaagatgtttgagctgggagaatgtgtgacaggcaccatcggccccacccacaactttgagcccccccactatgatggcatcgagtgcctggccatccagggcgacatcctcttcagcggcagccgggacaatggcatcaagaagtgggacctggaccagcaggagctgatccagcagatccccaatgcccacaaggactgggtgtgtgccctggccttcatccctggccggcccatgctgctgagcgcctgccgggccggggtcatcaaggtgtggaatgtggacaacttcacccccatcggggagatcaagggccatgacagccccatcaatgccatctgcaccaatgccaagcacatcttcaccgccagcagtgacctgactgtgaagttctggagcgtgcggcggctgccccacagcggccccccatag

SEQ ID NO: 88209 - DNA, 4872 bp, Artificial Sequence
  derived and/or modified sequence
atggccggccagggcgactgctgcgtgaaggtggccgtgcggatccgcccccaactcagtaaagagaaaattgagggctgccacatttgtacatccgtgactccaggggagccacaggtgctacttggtaaggacaaagcatttacttatgatttcgtgtttgatctggacacttggcaggagcagatctattctacttgcgtgagtaagcttatagagggatgctttgagggctacaatgcgaccgtgctggcatatggccagaccggggcaggtaagacctacacgatgggcacaggattcgatatggccactagcgaggaagagcaagggatcattccaagagcaatagctcatctgttcggaggcatcgccgaaagaaaacggagagctcaggaacaaggcgtcgccgggcctgagtttaaggtctctgcccaatttttagaactgtataatgaggagatcctggatcttttcgacagcacccgggaccccgatactcgccatcgccgatcaaacatcaaaatacacgaggatgccaacggaggcatttatacaactggcgtgacctcacggcttatccactcccaggaggaactgattcagtgcctaaagcagggggccctgagccgtacaacggcatccacacaaatgaacgtgcagtcctcgcgaagtcatgccatctttacgatacatctttgtcagatgagaatgtgcacacagccagaccttgtgaatgaagcggtgacaggcctgccagacggcacaccgcctagctctgaatatgaaacacttactgccaaattccactttgttgacctggccggctctgagcggctaaagagaaccggggcgactggagagcgggctaaggagggaatttccatcaactgcggcttgttggcgttgggcaacgtcatcagtgccctgggtgaccagagtaagaaggtcgtgcatgtcccatatagagattccaagctgacacgtttgcttcaggacagcttaggaggcaatagccagactattatgattgcttgtgtttcaccctccgaccgtgacttcatggaaactcttaatactctgaaatatgcaaacagagcgcgcaatatcaaaaacaaggttgtggtcaatcaggataaaacctctcagcaaatatctgctctgcgtgctgagattgctagattgcagatggaactcatggagtataaggcaggtaaacgggtgatcggcgaggatggcgccgaaggctacagtgacttgtttagagaaaacgccatgttacagaaggagaacggggccctcagattacgggttaaagctatgcaagaagctatcgatgctatcaacaatcgggtcacacagctgatgtctcaggaggctaacctgctcctggctaaggctggggatggcaacgaggccatcggggctctcattcagaactatattagggaaatcgaggaattgcgaacaaagctcctggaaagcgaagctatgaatgagagcctacgcagaagcctgtcccgcgcaagtgcgaggtcaccttacagcttgggtgcatctcctgcagctcctgctttcggtggctcaccggctagtagtatggaagatgcatccgaggtgatccggagagcaaaacaagacctagaaagactcaagaaaaaagaagttagacagcggagaaaaagtcctgaaaaagaagcgtttaagaaaagggccaagttgcagcaggagaactcagaggagacggatgaaaatgaggctgaagaagaggaagaggaacgggacgagagcggttgcgaggaagaggaaggccgagaggatgaagatgaggatagtggcagcgaagaaagtctggtggatagtgactcggatcctgaagaaaaggaagtaaatttccaggcagacttggctgacctcacttgtgagattgagatcaaacagaagttgatcgatgagctggaaaactcccagcgccgcctgcagaccctcaagcatcagtatgaggaaaaactcatattactccaaaataaaattagggatactcaacttgaacgagatagagttcttcaaaacttatcaacaatggagtgctatactgaggaaaaggcaaacaagataaaagccgattacgaaaagcgactgcgagagatgaatagagacctccagaagctgcaggcagcccagaaagagcatgcacggctgctgaagaatcagtcccgttatgagagagagctgaagaaactgcaagctgaggtcgccgagatgaagaaagcaaaggtagcgctcatgaaacaaatgagggaggagcagcagcgacgacggctggtggagacaaagcgtaacagagaaatcgcccaactgaagaaggagcagcgccgacaggaattccaaatccgggctctggaatctcagaagcgtcaacaggagatggtgctacgccggaagacccaggaagtttctgccctgcgccgattggctaagccaatgagcgaacgggtagctggtagggcagggttgaagccaccgatgttagactctggtgctgaggtctccgcctccaccacctcatctgaagctgagagcggcgctcggtctgtcagctctatcgtgagacagtggaaccggaaaatcaatcactttttgggggaccaccccgcgccgaccgtgaatggcaccaggcctgcgcggaagaaattccagaaaaagggtgcttcacagtccttcagcaaagcagcacgactaaagtggcagtctttagagcgcaggattattgatattgtaatgcaaaggatgactattgttaacttggaggcagacatggaacgactcattaagaaacgcgaggagctgttcctactgcaggaggccctgcgcagaaagagagagcgcctccaggccgagagccccgaagaggaaaaaggcctacaggagctggccgaggagatagaagtcctcgctgctaatatcgactacatcaacgatggaatcacagattgccaggcaacaatcgtgcagctcgaggaaaccaaagaggaacttgattccacagacacaagcgtggttatttcatcgtgcagtctggccgaagcccgccttctcctcgacaacttcctcaaagccagcatcgacaaagggctgcaagtggcccagaaggaggcccagatccgcctcctagagggccgcctgcgccagacggatatggccggaagttcccagaaccatctactcctagatgcactcagagagaaggctgaggcacacccagaactgcaggcgcttatctacaacgttcagcaagagaatggatacgcctcaaccgacgaggagatttctgaattttccgaaggttcgttttcccagtccttcactatgaaagggtctacttcacatgatgactttaaattcaaaagcgagccaaaactctcagcccagatgaaagccgtttccgcggagtgtttaggcccacctctggatatctctacgaagaatatcactaagagcctcgctagtctggttgagatcaaagaagatggagtggggtttagtgtgagggatccttactacagggatagggtctctcggactgtgagtctaccaacccgaggaagcacattccctcgtcagtctagggctacggagacgtccccactcacccgacggaagtcttacgatcgtggtcagccaatcaggagcaccgacgtggggtttactccaccctcatccccccccacacggcctagaaacgatcgaaatgtctttagccggctgacatccaaccagagtcaaggctcagcgctagacaaaagcgacgattctgacagttcattgtcagaggtgctccggggtattatcagccccgtggggggcgccaagggggctcgcacagcgcccttgcagtgcgtgagcatggcggaagggcatacgaagccgattctatgcctagacgccaccgatgaacttctgttcacaggctcaaaggaccgcagctgtaagatgtggaatttggtgactgggcaggaaattgctgccctcaaggggcatcctaacaatgtggtcagcattaaatattgttcccacagtggacttgtgttcagtgtaagtacaagctacataaaggtgtgggacattcgggactccgcaaaatgtataaggacactgacttcatccggacaagtaatctccggcgatgcctgcgcggctaccagcacgcgggctatcacctctgcgcagggcgaacaccaaataaatcaaatcgccttgagccccagcggaaccatgttatacgccgccagcggtaatgccgtgagaatctgggagctctcaagatttcagcctgtcggcaagcttactggccatatagggcccgtcatgtgtctgactgtaacacagactgcttctcagcatgacctggtcgtgaccggtagcaaggaccactatgtgaagatgtttgaactaggggagtgcgtgacaggcacaattggtccaacccacaacttcgagcctccacactacgatgggatcgagtgtcttgctatccagggcgacatcttattcagtggcagcagggacaacggaattaaaaagtgggatctggaccagcaggaactgatccagcagatcccgaatgcacataaagattgggtgtgtgcgctggcctttattccagggaggcctatgttgcttagcgcttgtagagccggtgtcatcaaggtctggaacgttgataacttcacaccgatcggagagataaaggggcatgattctccaatcaatgcaatctgcactaacgccaagcatatcttcactgctagctcagatcttactgtgaaattctggtcagttcggaggctgccccacagtggcccgccctag

SEQ ID NO: 88210 - DNA, 4872 bp, Artificial Sequence
  derived and/or modified sequence
atggcagggcaaggggactgttgcgtcaaagtggctgtgcggattcgccctcaactgtcaaaggagaagattgaaggatgtcatatctgtacatccgtgacacccggagagccacaagtgctgttaggcaaggacaaggcctttacttacgatttcgtgtttgatttggacacctggcaggaacagatatattcaacctgtgtttctaagcttattgagggctgcttcgagggctacaatgctactgtgctcgcgtacggtcaaaccggcgcaggcaaaacctatactatgggcacagggttcgacatggctaccagcgaggaggaacaaggcatcatcccacgagctatcgctcatttgtttggcggaatcgcagagcggaagcgcagagcgcaggagcaaggtgttgcaggacctgaattcaaagtgtctgcacaattcctcgagctatataacgaggagatcctggacctcttcgactcaacacgagaccccgacacacgacaccgcaggtccaacattaaaattcacgaggacgccaatgggggaatctataccaccggtgtcactagtagactcattcacagtcaagaggagctcattcaatgcctcaagcagggcgctttgtcacgtaccacagccagcactcaaatgaatgttcagagttcacggtcacatgcaatttttactattcatctgtgccagatgcgcatgtgcacccagcctgatctggtgaacgaagcagttaccgggctgccggacggtacccctccatcttccgagtacgaaactctgacggctaaattccacttcgtggacttagccggaagcgagcgcctgaagcgcaccggtgctacgggcgagagggcaaaagaaggaatctccatcaactgtggattgctggccttagggaacgtcattagcgctctgggggaccagtccaaaaaagtggtccatgtgccataccgggactcaaaactcacccggctgctccaagattcgcttggcggtaactcccagaccatcatgatcgcttgtgtgagtccctccgacagagactttatggagaccttaaatactcttaaatacgcgaaccgcgcacgtaacataaagaataaggtagtcgtgaatcaggacaagaccagtcagcagattagtgccctgcgagccgagatcgccaggttgcagatggaattgatggagtacaaggcaggaaagagggttataggcgaggatggagccgaaggatattccgacctatttagagagaatgccatgcttcagaaggagaacggagcactgaggctgcgagtcaaagctatgcaggaggccatcgacgccataaacaatagggttacccagctcatgtcccaggaggccaatctgctgctggcgaaagcgggagacgggaatgaggccatcggagcactgatacagaactatatccgagagattgaagagcttcggaccaaactgctggagagtgaagctatgaacgagtcacttcggcgtagcctgtcaagagcgagcgcacgcagtccgtactccctgggcgcttcccctgcagcgccagcattcgggggaagtccagcctcctcaatggaagacgcttcggaggtcattagaagggccaaacaggacttagaaaggctgaagaagaaggaagtacgccagcggaggaagtcgccggagaaagaagcttttaaaaagcgggctaagctgcaacaggaaaattctgaggaaactgacgaaaacgaggctgaagaagaggaggaggagcgggacgaatctggatgtgaggaagaagagggcagagaggatgaagatgaggattcaggatctgaggagagcttggtggacagcgactcggatccagaggagaaggaagtcaatttccaggctgatctggccgacctgacatgcgagattgagatcaagcagaagctcatagatgaattagagaactctcagaggcggctccagacgctgaaacatcagtacgaggagaagctaatcttactccagaacaaaattcgcgacacccagttagaaagggatcgggtactgcagaatctgagcacaatggagtgttatactgaagaaaaagctaacaaaattaaagctgactatgaaaagaggttgagggagatgaatagggacttgcaaaaactccaggccgctcagaaagaacacgcaaggctgctaaagaaccagtcgcgctacgagagggaattgaagaaattgcaggcagaagtggcggagatgaaaaaagctaaggtcgctctgatgaaacaaatgagggaggagcagcagagaaggcgtctagtggaaaccaaacggaatagggagatcgcccaacttaagaaagagcagcgaaggcaagagttccagatccgtgccttggaatcccagaaacgccagcaggaaatggttttacgacggaagactcaggaagtctccgctttgcgtagacttgccaaaccgatgtctgaacgggtggcaggcagagccggactgaaacctccaatgttggacagtggcgctgaggttagcgcaagtaccacaagctcagaggccgagtccggtgccagatctgtgtccagtatcgttcgccaatggaatagaaagatcaaccactttctgggggatcacccagctcccacagtcaacgggactcgacccgctcggaagaagttccagaaaaagggagcgagtcagtctttctctaaagcagctaggctgaaatggcaatctctggagcggcgtataatcgacatcgtgatgcaacgcatgacaatcgtgaatctcgaggcagacatggaacgcttaatcaagaagagagaagaactcttcttgctccaagaagctcttagacggaaaagggaaaggcttcaggctgagtctcccgaggaggaaaaggggctccaggagctcgccgaagagattgaagtgttggccgcaaacattgactacatcaacgacgggattaccgattgccaagccaccatcgttcagttggaagagaccaaggaggagttggatagtacagataccagtgtcgtcatttcttcttgtagccttgcagaagccagactgctgttagacaacttcctaaaagcaagcatagataaaggcttacaggttgcccagaaggaggctcagattcggttgctcgaagggaggctgagacagaccgacatggcgggtagcagccaaaaccatctgctactggatgcacttcgtgagaaagcagaggctcatcccgagctccaggctctcatatataatgtgcaacaggagaatggctacgctagcaccgatgaggaaatctccgaattcagcgagggtagcttcagtcagagtttcaccatgaaaggcagtactagtcacgacgatttcaagttcaaatcagaaccgaagctgtcggcacagatgaaggcagtatccgctgagtgcctcgggccacccctggacattagcaccaagaacatcaccaagtcccttgcgtcactggtggaaataaaagaggatggcgtgggcttttctgtgagagatccctactaccgtgaccgcgtttctcggacagtgagcctccccaccagagggtcaaccttccccagacagagtagggcaactgagaccagcccgctcacccgtcgcaaaagttatgatagaggacagccgattcgcagtaccgacgtcggtttcactcccccttccagtccgccaacccggccacggaacgaccggaacgtgttttccaggctgacatctaatcagagccaaggctccgccctcgataaaagtgacgactccgactcctcactgagtgaagtgcttcggggtattatcagtccggtgggcggtgctaagggcgctcgcactgcacctctgcagtgcgtgtccatggctgagggacatacaaaaccgatactgtgtctagacgccacggacgaactgctttttacaggcagcaaagacagatcatgtaaaatgtggaatctagttactggccaggagatagccgctctgaaggggcatcctaataacgtagtatctatcaagtactgtagtcattcaggcctggttttcagcgtcagtacctcctacattaaggtgtgggacatcagagattctgccaagtgcatacgaacccttacaagcagtggtcaggtgatctccggcgacgcttgcgcagcaacttctactcgggctatcacatctgctcaaggcgagcaccagatcaaccaaatcgcactttccccatcaggcacaatgctatatgctgcaagtggtaacgccgtgcgtatttgggagctgagccgcttccagccagtgggaaaacttaccggtcatatcggacccgtaatgtgtctgactgtgacacagaccgcctcccagcacgacctggtggtgaccgggtccaaggatcattatgtcaagatgttcgaactcggtgagtgtgtgacgggaacgatcggacccacacataacttcgaacctccccactatgacggtatcgagtgcctggccatccagggcgacattttgttctccggatctcgcgacaatggtattaaaaaatgggacctcgatcagcaggaactgatccagcagattccaaatgcccacaaagattgggtttgcgctttggccttcatcccaggaagaccaatgcttctttcagcctgccgtgctggagttatcaaggtctggaacgtagacaacttcaccccaatcggcgagataaaaggtcacgacagcccaatcaacgcaatttgtactaatgctaagcatattttcactgcgtcctctgacctgacggtgaagttttggagcgttagacgactgccacattccggtccaccctag

SEQ ID NO: 88211 - DNA, 4872 bp, Artificial Sequence
  derived and/or modified sequence
atggccggccagggcgactgctgcgtgaaggtggccgtgagaatcagaccccagctgagcaaggagaagatcgagggctgccacatctgcaccagcgtgacccccggcgagccccaggtgctgctgggcaaggacaaggccttcacctacgacttcgtgttcgacctggacacctggcaggagcagatctacagcacctgcgtgagcaagctgatcgagggctgcttcgagggctacaacgccaccgtgctggcctacggccagaccggcgccggcaagacctacaccatgggcaccggcttcgacatggccaccagcgaggaggagcagggcatcatccccagagccatcgcccacctgttcggcggcatcgccgagagaaagagaagagcccaggagcagggcgtggccggccccgagttcaaggtgagcgcccagttcctggagctgtacaacgaggagatcctggacctgttcgacagcaccagagaccccgacaccagacacagaagaagcaacatcaagatccacgaggacgccaacggcggcatctacaccaccggcgtgaccagcagactgatccacagccaggaggagctgatccagtgcctgaagcagggcgccctgagcagaaccaccgccagcacccagatgaacgtgcagagcagcagaagccacgccatcttcaccatccacctgtgccagatgagaatgtgcacccagcccgacctggtgaacgaggccgtgaccggcctgcccgacggcaccccccccagcagcgagtacgagaccctgaccgccaagttccacttcgtggacctggccggcagcgagagactgaagagaaccggcgccaccggcgagagagccaaggagggcatcagcatcaactgcggcctgctggccctgggcaacgtgatcagcgccctgggcgaccagagcaagaaggtggtgcacgtgccctacagagacagcaagctgaccagactgctgcaggacagcctgggcggcaacagccagaccatcatgatcgcctgcgtgagccccagcgacagagacttcatggagaccctgaacaccctgaagtacgccaacagagccagaaacatcaagaacaaggtggtggtgaaccaggacaagaccagccagcagatcagcgccctgagagccgagatcgccagactgcagatggagctgatggagtacaaggccggcaagagagtgatcggcgaggacggcgccgagggctacagcgacctgttcagagagaacgccatgctgcagaaggagaacggcgccctgagactgagagtgaaggccatgcaggaggccatcgacgccatcaacaacagagtgacccagctgatgagccaggaggccaacctgctgctggccaaggccggcgacggcaacgaggccatcggcgccctgatccagaactacatcagagagatcgaggagctgagaaccaagctgctggagagcgaggccatgaacgagagcctgagaagaagcctgagcagagccagcgccagaagcccctacagcctgggcgccagccccgccgcccccgccttcggcggcagccccgccagcagcatggaggacgccagcgaggtgatcagaagagccaagcaggacctggagagactgaagaagaaggaggtgagacagagaagaaagagccccgagaaggaggccttcaagaagagagccaagctgcagcaggagaacagcgaggagaccgacgagaacgaggccgaggaggaggaggaggagagagacgagagcggctgcgaggaggaggagggcagagaggacgaggacgaggacagcggcagcgaggagagcctggtggacagcgacagcgaccccgaggagaaggaggtgaacttccaggccgacctggccgacctgacctgcgagatcgagatcaagcagaagctgatcgacgagctggagaacagccagagaagactgcagaccctgaagcaccagtacgaggagaagctgatcctgctgcagaacaagatcagagacacccagctggagagagacagagtgctgcagaacctgagcaccatggagtgctacaccgaggagaaggccaacaagatcaaggccgactacgagaagagactgagagagatgaacagagacctgcagaagctgcaggccgcccagaaggagcacgccagactgctgaagaaccagagcagatacgagagagagctgaagaagctgcaggccgaggtggccgagatgaagaaggccaaggtggccctgatgaagcagatgagagaggagcagcagagaagaagactggtggagaccaagagaaacagagagatcgcccagctgaagaaggagcagagaagacaggagttccagatcagagccctggagagccagaagagacagcaggagatggtgctgagaagaaagacccaggaggtgagcgccctgagaagactggccaagcccatgagcgagagagtggccggcagagccggcctgaagccccccatgctggacagcggcgccgaggtgagcgccagcaccaccagcagcgaggccgagagcggcgccagaagcgtgagcagcatcgtgagacagtggaacagaaagatcaaccacttcctgggcgaccaccccgcccccaccgtgaacggcaccagacccgccagaaagaagttccagaagaagggcgccagccagagcttcagcaaggccgccagactgaagtggcagagcctggagagaagaatcatcgacatcgtgatgcagagaatgaccatcgtgaacctggaggccgacatggagagactgatcaagaagagagaggagctgttcctgctgcaggaggccctgagaagaaagagagagagactgcaggccgagagccccgaggaggagaagggcctgcaggagctggccgaggagatcgaggtgctggccgccaacatcgactacatcaacgacggcatcaccgactgccaggccaccatcgtgcagctggaggagaccaaggaggagctggacagcaccgacaccagcgtggtgatcagcagctgcagcctggccgaggccagactgctgctggacaacttcctgaaggccagcatcgacaagggcctgcaggtggcccagaaggaggcccagatcagactgctggagggcagactgagacagaccgacatggccggcagcagccagaaccacctgctgctggacgccctgagagagaaggccgaggcccaccccgagctgcaggccctgatctacaacgtgcagcaggagaacggctacgccagcaccgacgaggagatcagcgagttcagcgagggcagcttcagccagagcttcaccatgaagggcagcaccagccacgacgacttcaagttcaagagcgagcccaagctgagcgcccagatgaaggccgtgagcgccgagtgcctgggcccccccctggacatcagcaccaagaacatcaccaagagcctggccagcctggtggagatcaaggaggacggcgtgggcttcagcgtgagagacccctactacagagacagagtgagcagaaccgtgagcctgcccaccagaggcagcaccttccccagacagagcagagccaccgagaccagccccctgaccagaagaaagagctacgacagaggccagcccatcagaagcaccgacgtgggcttcaccccccccagcagcccccccaccagacccagaaacgacagaaacgtgttcagcagactgaccagcaaccagagccagggcagcgccctggacaagagcgacgacagcgacagcagcctgagcgaggtgctgagaggcatcatcagccccgtgggcggcgccaagggcgccagaaccgcccccctgcagtgcgtgagcatggccgagggccacaccaagcccatcctgtgcctggacgccaccgacgagctgctgttcaccggcagcaaggacagaagctgcaagatgtggaacctggtgaccggccaggagatcgccgccctgaagggccaccccaacaacgtggtgagcatcaagtactgcagccacagcggcctggtgttcagcgtgagcaccagctacatcaaggtgtgggacatcagagacagcgccaagtgcatcagaaccctgaccagcagcggccaggtgatcagcggcgacgcctgcgccgccaccagcaccagagccatcaccagcgcccagggcgagcaccagatcaaccagatcgccctgagccccagcggcaccatgctgtacgccgccagcggcaacgccgtgagaatctgggagctgagcagattccagcccgtgggcaagctgaccggccacatcggccccgtgatgtgcctgaccgtgacccagaccgccagccagcacgacctggtggtgaccggcagcaaggaccactacgtgaagatgttcgagctgggcgagtgcgtgaccggcaccatcggccccacccacaacttcgagcccccccactacgacggcatcgagtgcctggccatccagggcgacatcctgttcagcggcagcagagacaacggcatcaagaagtgggacctggaccagcaggagctgatccagcagatccccaacgcccacaaggactgggtgtgcgccctggccttcatccccggcagacccatgctgctgagcgcctgcagagccggcgtgatcaaggtgtggaacgtggacaacttcacccccatcggcgagatcaagggccacgacagccccatcaacgccatctgcaccaacgccaagcacatcttcaccgccagcagcgacctgaccgtgaagttctggagcgtgagaagactgccccacagcggccccccctag

SEQ ID NO: 88212 - protein, 1610 aa, Artificial Sequence
  derived and/or modified sequence
MAGQGDCCVKVAVRIRPQLSKEKIEGCHICTSVTPGEPQVLLGKDKAFTYDFVFDLDTWQEQIYSTCVSKLIEGCFEGYNATVLAYGQTGAGKTYTMGTGFDMATSEEEQGIIPRAIAHLFGGIAERKRRAQEQGVAGPEFKVSAQFLELYNEEILDLFDSTRDPDTRHRRSNIKIHEDANGGIYTTGVTSRLIHSQEELIQCLKQGALSRTTASTQMNVQSSRSHAIFTIHLCQMRMCTQPDLVNEAVTGLPDGTPPSSEYETLTAKFHFVDLAGSERLKRTGATGERAKEGISINCGLLALGNVISALGDQSKKVVHVPYRDSKLTRLLQDSLGGNSQTIMIACVSPSDRDFMETLNTLKYANRARNIKNKVVVNQDKTSQQISALRAEIARLQMELMEYKAGKRVIGEDGAEGYSDLFRENAMLQKENGALRLRVKAMQEAIDAINNRVTQLMSQEANLLLAKAGDGNEAIGALIQNYIREIEELRTKLLESEAMNESLRRSLSRASARSPYSLGASPAAPAFGGSPASSMEDASEVIRRAKQDLERLKKKEVRQRRKSPEKEAFKKRAKLQQENSEETDENEAEEEEEERDESGCEEEEGREDEDEDSGSEESLVDSDSDPEEKEVNFQADLADLTCEIEIKQKLIDELENSQRRLQTLKHQYEEKLILLQNKIRDTQLERDRVLQNLSTMECYTEEKANKIKADYEKRLREMNRDLQKLQAAQKEHARLLKNQSRYERELKKLQAEVAEMKKAKVALMKQMREEQQRRRLVETKRNREIAQLKKEQRRQEFQIRALESQKRQQEMVLRRKTQEVSALRRLAKPMSERVAGRAGLKPPMLDSGAEVSASTTSSEAESGARSVSSIVRQWNRKINHFLGDHPAPTVNGTRPARKKFQKKGASQSFSKAARLKWQSLERRIIDIVMQRMTIVNLEADMERLIKKREELFLLQEALRRKRERLQAESPEEEKGLQELAEEIEVLAANIDYINDGITDCQATIVQLEETKEELDSTDTSVVISSCSLAEARLLLDNFLKASIDKGLQVAQKEAQIRLLEGRLRQTDMAGSSQNHLLLDALREKAEAHPELQALIYNVQQENGYASTDEEISEFSEGSFSQSFTMKGSTSHDDFKFKSEPKLSAQMKAVSAECLGPPLDISTKNITKSLASLVEIKEDGVGFSVRDPYYRDRVSRTVSLPTRGSTFPRQSRATETSPLTRRKSYDRGQPIRSTDVGFTPPSSPPTRPRNDRNVFSRLTSNQSQGSALDKGIISPVGGAKGARTAPLQCVSMAEGHTKPILCLDATDELLFTGSKDRSCKMWNLVTGQEIAALKGHPNNVVSIKYCSHSGLVFSVSTSYIKVWDIRDSAKCIRTLTSSGQVISGDACAATSTRAITSAQGEHQINQIALSPSGTMLYAASGNAVRIWELSRFQPVGKLTGHIGPVMCLTVTQTASQHDLVVTGSKDHYVKMFELGECVTGTIGPTHNFEPPHYDGIECLAIQGDILFSGSRDNGIKKWDLDQQELIQQIPNAHKDWVCALAFIPGRPMLLSACRAGVIKVWNVDNFTPIGEIKGHDSPINAICTNAKHIFTASSDLTVKFWSVRRLPHSGPP

SEQ ID NO: 88213 - DNA, 4833 bp, Artificial Sequence
  derived and/or modified sequence
atggcgggccagggagattgttgtgtgaaggttgcagttcggatcagacctcagctctccaaagagaaaatcgagggatgtcatatatgtactagtgtgactccgggggagcctcaggtcttactggggaaagacaaagcctttacatatgacttcgtattcgacttagatacctggcaggagcagatctactcaacctgcgtgagtaagctaatagaggggtgctttgagggctataacgcaacagtactggcttatggacaaactggagcaggaaagacctacaccatggggacgggcttcgatatggcaacctcagaagaggagcagggtatcatacctcgagcaatcgcgcacttgtttggagggattgccgagagaaagcgacgtgcacaggagcaaggtgtcgccgggcccgaatttaaagtttctgcccagttcctggagctgtacaacgaagagattttggacttgtttgactccacaagggatcccgacactagacacaggagaagtaatatcaaaattcatgaagacgcgaacggcggcatttacactacaggggttactagtcggcttatccatagccaagaagagctcatccagtgcttgaaacaaggcgccctgtctcgaacgaccgcgtcaactcagatgaatgtgcagtctagccgttctcatgccatctttaccatccatctgtgccagatgaggatgtgcacccaaccggatctggtgaacgaggcagtcacgggtctgcctgatgggacgcctcctagcagcgaatacgaaactttgacagcaaagttccacttcgtcgacctcgcggggtcagagagactcaaaaggaccggcgccactggcgagcgcgccaaagagggaatcagtattaactgcgggctgctggccctgggtaatgtgattagcgccctgggcgatcaaagcaagaaggtggtgcacgtgccgtatcgtgacagcaagcttacccgtctgctccaggactcccttggggggaattcccagacaattatgatcgcctgcgtgtccccctcagatagagacttcatggagacccttaatacacttaagtatgctaacagagcccggaatattaaaaataaagtcgtggtgaatcaagacaagacttcccagcagattagcgctctacgggcagaaattgcccggttacaaatggagcttatggagtacaaggcggggaagagagtgattggggaagacggtgccgagggatatagcgatctatttcgcgagaacgctatgttacagaaggagaacggcgccttgagattaagagtcaaagcaatgcaggaagccattgacgccattaacaaccgggtaacccagcttatgagtcaggaggccaacctcctgctcgctaaggccggcgacggaaatgaggcgattggcgcattgatacagaactatatccgggaaattgaggaactcaggaccaagctgctggaatcagaggccatgaatgaaagtctgaggagaagcctatcacgtgccagcgccaggagcccgtactcgttgggcgcgagtccagctgccccagccttcggagggtctccagccagttccatggaagatgcatctgaggtgatccgccgcgcgaaacaggatctggaacggctcaaaaaaaaggaggtccggcaacgaaggaagtctcccgagaaagaagcttttaaaaagcgggctaagctccaacaagaaaacagtgaggaaactgatgagaatgaggctgaggaagaagaagaggagagagacgagagtggctgtgaggaggaggaaggaagggaggatgaagacgaggactcaggaagcgaggaaagcctggtggattcagattctgaccccgaggagaaggaggttaacttccaggctgacctcgcggatctgacatgcgagatcgagatcaaacagaagctcatcgatgagctcgagaattctcaacgtcgacttcaaaccctcaagcatcagtacgaggagaagctcatcctgttgcagaataagatccgcgacacccagttagagagagacagagtcctgcagaatctctcaacaatggaatgctatacagaggagaaagccaacaagatcaaggccgattacgaaaagaggcttcgggagatgaatagggacctccagaaacttcaggcagctcagaaagagcatgcccgtctgctcaagaatcagtctcggtacgagcgcgaactgaagaaactacaagctgaggtggcagaaatgaagaaggcaaaggttgcattgatgaaacagatgcgcgaggagcagcaaagacggcgcctcgtggagacgaaacgaaatagggagatcgcacagctcaagaaggagcagcggcgacaggaatttcaaatccgcgcactggaatcacaaaaacgccagcaggagatggtgctgagaagaaagacccaggaggtctccgccttacgccgacttgctaaacctatgtctgagcgggtcgcaggtagagcaggacttaaacccccgatgttggatagcggggccgaggtgagtgcctcaaccacgtcttcagaggcagaatccggcgccagatccgtatcatcaattgtccggcagtggaacaggaagatcaatcacttcctgggcgatcaccctgccccgaccgtgaatggcactcgtcccgctaggaagaaatttcagaagaagggcgcatctcaatcctttagtaaggccgcacgccttaagtggcagtccctggaacggagaatcattgacatagtgatgcagaggatgaccatcgtgaacctagaagcggacatggagcggctgattaagaagcgggaggagctgtttctgcttcaggaagcgctgcgtagaaagcgggagagactccaggcggaatcacccgaagaagaaaagggactgcaggagctcgctgaggagatcgaggtgctggcagccaacattgactatattaacgatggaataactgactgccaagcaactattgtgcaactggaggaaacaaaagaggaattggacagcactgacacgagcgtggtcataagttcttgcagcttggccgaagctcgtttgctcttagataactttttaaaagcctcgattgacaaaggactgcaggttgctcaaaaagaggcgcaaattcgtctgcttgagggtaggctccgtcagactgatatggccggatcatcccagaatcatctacttcttgatgctctccgcgagaaggccgaggcgcatcctgagcttcaggccctgatctacaatgtgcaacaggagaacggttacgcctctaccgatgaggagatctctgaattctccgagggcagctttagtcagagtttcaccatgaagggtagcacatcacacgatgatttcaagtttaagtcagagcctaaactttccgcgcaaatgaaggccgtcagtgctgagtgtttagggcctccgctcgatatcagcacaaaaaatataacaaagtccctggcgagcctcgtggaaattaaagaagacggcgtggggttctcagttagagatccttactaccgggaccgggtttctcgaacagtcagtctgcctactcgaggcagtacattccctcgccagagtagggctaccgagacatctcctttaactcggcgaaagagttacgaccgaggacagccaatccgtagcacagacgtgggcttcacccccccttctagccctccaacccggcccaggaatgacaggaacgtttttagcagactgacttcgaatcagtctcaagggtccgccctggataaggggattattagccctgtaggaggagccaaaggcgcccggacggcaccactgcagtgcgtatccatggctgaggggcacacaaagccaattctatgcctggacgccactgatgagttgctctttacagggtccaaagatcgatcatgcaagatgtggaatctggtgacaggccaggagattgctgcgttgaaaggccatcctaacaacgtcgtaagcattaaatattgctcccactcaggtctcgtgttttcagtgagtaccagctatattaaggtgtgggatatccgggactcagcaaaatgtatacggacccttacgtcatccgggcaggtgatttccggcgacgcctgcgcagccacaagcactagggctattacgtccgcacagggggagcaccagatcaaccaaatcgcgctcagcccgtctgggaccatgttatacgcagcatcaggcaatgctgtgcgaatctgggagctgtccagattccaacctgtcggaaagctcaccggtcacatcggaccagtgatgtgtctgaccgtgactcagaccgcttcacagcacgatcttgtggttacaggatcgaaagatcactacgtcaagatgtttgagctgggtgagtgtgtcacaggtaccataggacccactcacaactttgagccccctcactatgacggaatcgagtgtctcgctatccagggcgatattcttttcagcggttcaagagataacggcattaaaaaatgggatctggatcagcaagaactcatccagcagatccctaacgcccataaggattgggtgtgcgctctagcgttcatcccgggcagaccaatgcttctgagtgcctgccgggccggggtgataaaggtgtggaatgtggacaacttcactcccatcggtgagatcaagggccacgattctcctataaatgcaatatgcactaatgcaaaacacatattcacagcctccagcgatctgactgtgaagttttggagcgtgagacggctaccgcacagtgggcctccatag

SEQ ID NO: 88214 - DNA, 5389 bp, Artificial Sequence
  derived and/or modified sequence
gcccagaccctagctccagagggccatggccggccagggggactgctgcgtcaaggtggccgtcaggatccggccccagctgtcgaaggagaagattgagggctgtcacatctgtacctctgttaccccgggagagccccaggtcctgctggggaaggacaaggccttcacctatgactttgtcttcgacctggacacctggcaagaacagatctattccacctgtgtgagcaagctcatcgagggctgcttcgagggctataatgccacggtgctggcctatgggcagacgggggccgggaagacgtacaccatgggcactggctttgacatggcaacgtcggaggaggagcagggcatcatcccgagggccatcgcacacctctttgggggcattgccgagcgcaagcgccgggcacaggagcagggcgtggctggacctgagttcaaagtcagcgcccagtttctggagctctacaacgaggagatccttgacctgtttgacagcacccgtgaccctgacacccgccaccgcaggtccaacatcaagatccacgaggacgcaaacggtggcatctacaccactggcgtcacttctcgcctcatccactcccaggaggagctgatccagtgcctgaagcagggggccctgtcccgcaccacagccagcacccagatgaacgtgcagagctcacgctcccacgccatcttcaccatccacctgtgccagatgcgcatgtgcacccagcccgacctggtgaatgaggcggtgactgggcttcctgatggtacacctccctcgagtgagtatgagacactcactgctaagtttcactttgtggacctggccggctcagagcggctgaagcggacaggggctactggcgagcgggccaaggagggcatctccatcaactgtggcctgctggccttgggcaatgtgatcagcgccttaggggaccagagcaagaaggtggtgcacgttccctacagggactccaagctcactcggctcctccaggattcgctggggggcaacagccagaccatcatgatcgcctgtgtgagcccctcagaccgagatttcatggagaccctcaacacactcaaatatgccaatcgggcccgcaacatcaagaacaaggtggtagtgaaccaggacaagaccagccagcaaatcagtgcactgcgggctgagattgctcggctgcagatggagctgatggagtataaggcgggcaagcgagtgataggagaggatggcgctgagggctatagtgatctgttccgagagaatgccatgctacagaaggagaatggggccctgcggctgcgggtgaaagccatgcaggaggccatcgatgccatcaacaaccgcgtcacccagctcatgagccaggaggccaacctgctgctagccaaggccggcgatggcaatgaggccattggtgcgctgatccagaactacatccgggagatcgaggagctacggactaagcttctagagagtgaagccatgaacgagtccctgcgccgcagcctctcacgggcctcggctaggagcccctactccctgggtgcttctccagccgccccggccttcgggggcagccctgccagctccatggaggatgcctcggaggtgatccgcagggccaagcaggacctggagcggctaaagaagaaggaggtcaggcagcggaggaagagccccgagaaggaagccttcaaaaagagggcaaaactccaacaggagaacagcgaggagacggatgagaacgaggcggaggaggaggaggaagagcgagacgagagtggctgtgaggaggaggaagggcgcgaggatgaagatgaggactcgggcagtgaagagagcctggtggactcagactcagaccccgaggagaaggaggtgaacttccaggcggacctggccgacctgacttgtgagatcgaaatcaagcagaagctgatcgacgagctggagaacagccagcggcggttgcagacgctcaagcaccagtatgaggaaaagctgattctgctgcagaacaagatccgagacacacagctggagcgcgaccgtgtgctgcagaacctcagcaccatggagtgctatactgaggagaaggccaacaagatcaaggcagactatgagaagaggctgcgggagatgaaccgggacctgcagaagctgcaggccgcccagaaagagcacgcccggctgcttaagaaccagtcgcgctacgagagggagctgaagaagctacaggccgaggtggctgagatgaagaaggccaaggtggccctgatgaagcagatgcgtgaggagcaacagcggcggcggctagtggagaccaagaggaaccgggagatcgcacagctcaagaaggagcagcggcgacaggagtttcagatccgagctctggagtcccagaagcggcagcaggagatggtcctgaggaggaagacccaggaggtttctgcactgaggcgcctggccaagcccatgtctgagcgggtggcagggcgtgcaggactaaagccacccatgctggactctggggctgaggtgtcggccagcactacctcatctgaggctgaatcaggggcccgctctgtctccagcatcgtgcgccagtggaaccgcaaaatcaaccacttcttgggggaccatcctgcgcccactgtcaatggcacccgtcctgcccgaaagaagttccagaagaagggggccagccagagcttcagtaaggcggcaaggctcaagtggcagtccctggagcgacggatcattgacatcgtcatgcagagaatgaccattgtcaacctggaggctgacatggagcggctcatcaagaaaagggaggagctgttcctcctgcaggaggcactgcggaggaagcgggagcggctgcaggctgagagccccgaggaagagaaggggctgcaggagctggctgaggagatcgaggtgctggcagccaacattgactacatcaatgacggcatcaccgactgccaggccaccatcgtgcagctggaggagaccaaggaggagctggactccacagacacatccgtggtcatcagctcctgctccctggctgaagcccgcctcctgctagacaacttcctcaaggcatccattgacaaggggctgcaagtggcacaaaaggaagcccagatccggctgttggagggccgactgaggcagacggatatggcaggctcctcccagaaccatctgctcctggacgccctgcgtgagaaggctgaagctcaccccgagctgcaggccctcatctacaatgtgcagcaggagaatggctacgccagcacagatgaggagatctcagagttctctgagggcagcttctcccagtcattcaccatgaaaggctccaccagccatgacgatttcaagttcaagagcgagcccaaactgtctgcccaaatgaaagctgtgtcggctgagtgcctgggccccccactggatatctccaccaagaacatcaccaagtccctggcctccctcgttgagatcaaagaggacggagtgggcttctctgtccgagacccctattaccgggacagggtctcgcgcaccgtcagtctgcctacccggggcagcactttccctaggcaatctcgagccacagagacgtccccgctgacgagaaggaagtcctacgaccgagggcagcccattaggtccacagatgtgggattcacacccccatcatcccctcccactcggccccgcaatgaccgcaatgtcttctctcgtctcaccagtaatcagagccaggggtcagcgctggacaagggcatcatctccccggttggaggagccaagggtgcacggacggccccactgcagtgtgtctccatggccgaaggccacaccaagcccatcctctgcctggatgccacagatgagttgctattcacagggtccaaagaccgaagctgcaagatgtggaacttggttacgggacaggagatcgcagctctaaagggccaccccaacaacgtggtctccatcaagtactgcagccactcggggcttgtgttctccgtgtccacctcctacatcaaggtgtgggacatccgggactcagccaagtgcattcggactctcacgtcctcgggccaggtgatctcaggggatgcctgtgccgccacatccacccgtgccatcaccagtgctcagggcgagcatcagatcaaccagatcgccctcagcccttcgggcaccatgctgtacgccgcctcgggcaatgccgtccgcatctgggagcttagcaggttccagcctgtcggcaagctgactggccacatcggccctgtgatgtgcctgacggtcacccagacggccagccagcatgacctcgtggtgactggctccaaggaccactacgttaagatgttcgagctgggcgagtgtgtgacgggcaccatcggccccactcacaacttcgagcccccgcactacgatggcatcgagtgtctcgccatccagggagacatcctgttcagtggctcccgagataacggcatcaagaagtgggacctagaccagcaggagctcatccagcaaatccccaatgcgcacaaggactgggtgtgcgccctggccttcatcccgggccgccccatgctgctcagcgcctgccgtgcgggtgtcatcaaggtctggaacgtggacaacttcacacccatcggtgagatcaagggccacgacagtcccatcaatgccatctgcaccaatgccaagcatatcttcacagcctccagtgacctgacggtgaagttctggagtgtccggcggttaccccacagcggcccaccctaggagtgaggtcagagggatgcccccggaccctcgaccccagcagcctggacaccatggaagggaagctgtgacccggccgatggggccagctgctctggggacagagggcgtggccccctctcctgccctcctccctctcccttggccttcccacaggacactgttccctcatccctcccctgcctctcaggagcctctgggtgagagagaggctggggaggaaattaagctgtgaagccaaagggcattatcccttcttgttcccctcctggcagtcgtggccacattgtctcctgctgaaccggctctgcccctttctcaggcctttggcccagtggtggagccctgtggggaggtgcagcagcctggccccatcccacccttccgaggagctggcctccccgcttctcccagcccagcctctagagccactgcacctgcctctgagcccaaaaagataagtcctcaggtagctaaggaaaccaggtgtgggcggctgggccttgcagctaacccttaaccctctggcaa

SEQ ID NO: 88215 - DNA, 4833 bp, Artificial Sequence
  derived and/or modified sequence
atggccggccagggcgactgctgcgtgaaggtggccgtgcgcatccggccccagctgagcaaggagaagattgagggctgccacatctgcacctctgtgaccccaggagagccccaggtgctgctgggcaaggacaaggccttcacctatgactttgtgtttgacctggacacctggcaggagcagatctacagcacctgtgtgtccaagctgattgagggctgctttgagggctacaatgccaccgtgctggcctacggccagacaggagctgggaagacctacaccatgggcactggatttgacatggccaccagcgaggaggagcagggcatcatcccccgggccatcgcccacctgtttggaggcattgctgagaggaagagaagagcccaggagcagggcgtggccggccctgagttcaaggtgtctgcccagttcctggagctgtacaatgaggagatcctggacctgtttgacagcacccgggaccctgacaccaggcaccggcgcagcaacatcaagatccatgaagatgccaatggaggcatctacaccactggagtgaccagccgcctcatccacagccaggaggagctgatccagtgcctgaagcagggcgccctgagcaggaccacagccagcacccagatgaatgtgcagagcagccgcagccacgccatcttcaccatccacctgtgccagatgaggatgtgcacccagcctgacctggtgaatgaggccgtgacaggcctgcctgatggcaccccacccagcagtgaatatgagaccctgacagccaagttccactttgtggacctggccggcagcgagcggctgaagaggactggagccaccggggagcgggccaaggagggcatcagcatcaactgtggcctgctggccctgggcaatgtcatcagcgccctgggggaccagagcaagaaggtggtgcacgtgccctacagagacagcaagctgacccggctgctgcaggacagcctgggcggcaacagccagaccatcatgattgcctgtgtgagccccagcgaccgggacttcatggagaccctgaacaccctgaagtatgccaacagagccaggaacatcaagaacaaggtggtggtgaaccaggacaagaccagccagcagatcagcgccctgcgggcagagatcgcccggctgcagatggagctgatggagtacaaggccggcaagagggtgattggagaagatggagctgagggctacagcgacctcttcagagaaaatgccatgctgcagaaggaaaatggagccctgcggctgcgggtgaaggccatgcaggaggccattgatgccatcaacaacagagtgacccagctgatgagccaggaggccaacctgctgctggccaaggctggagatggaaatgaggccatcggggccctgatccagaactacatccgggagattgaggagctgcggaccaagctgctggagagcgaggccatgaatgaaagcctgcggcgcagcctgagccgggccagcgcccggagcccctacagcctgggcgccagccctgctgccccagccttcggcggcagccctgccagctccatggaggatgccagcgaggtgatccggcgggccaagcaggacctggagcggctgaagaagaaggaggtgcggcagaggaggaagagccctgagaaggaggccttcaagaagagggccaagctgcagcaggagaacagcgaggagacagatgaaaatgaagctgaggaggaggaggaggagagagatgaaagtggctgtgaggaggaggagggccgggaggatgaagatgaggacagcggcagcgaggagagcctggtggacagcgacagcgaccctgaggagaaggaggtgaacttccaggccgacctggccgacctgacctgtgaaattgagatcaagcagaagctgattgatgagctggagaacagccagaggcggctgcagaccctgaagcaccagtatgaggagaagctgatcctgctgcagaacaagatccgggacacccagctggagcgggacagagtgctgcagaacctgagcaccatggagtgctacacagaggagaaggccaacaagatcaaggctgactatgagaagaggctgcgggagatgaacagagacctgcagaagctgcaggccgcccagaaggagcacgcccggctgctgaagaaccagagccgctatgagcgggagctgaagaagctgcaggccgaggtggccgagatgaagaaggccaaggtggccctgatgaagcagatgagggaggagcagcagaggcggcggctggtggagaccaagaggaaccgggagatcgcccagctgaagaaggagcagaggcggcaggagttccagatccgggccctggagagccagaagaggcagcaggagatggtgctgcggaggaagacccaggaggtgtctgccctgcggcggctggccaagcccatgtctgagcgggtggccggccgggccggcctgaagccacccatgctggacagcggggctgaggtgtctgccagcaccaccagcagcgaggccgagagcggggcccggtctgtgagcagcatcgtgcggcagtggaacaggaagatcaaccacttcctgggggaccacccagcccccaccgtgaatggcaccaggcctgccaggaagaagttccagaagaagggggccagccagagcttcagcaaggccgcccggctgaagtggcagagcctggagcggcgcatcatcgacatcgtgatgcagaggatgaccatcgtgaacctggaggccgacatggagcggctcatcaagaagcgggaggagctgttcctgctgcaggaggccctgcggaggaagcgggagcggctgcaggccgagagccctgaggaggagaagggcctgcaggagctggccgaggagattgaggtgctggccgccaacatcgactacatcaatgatggcatcacagactgccaggccaccatcgtgcagctggaggagaccaaggaggagctggacagcacagacacctctgtggtgatcagcagctgcagcctggccgaggcccggctgctgctggacaacttcctgaaggccagcattgacaagggcctgcaggtggcccagaaggaggcccagatccggctgctggagggccgcctgcggcagacagacatggccggcagcagccagaaccacctgctgctggatgccctgcgggagaaggccgaggcccaccctgagctgcaggccctgatctacaacgtgcagcaggagaatggctacgccagcacagatgaggagatcagcgagttcagcgagggcagcttcagccagagcttcaccatgaagggcagcaccagccatgatgacttcaagttcaagtctgagcccaagctgagcgcccagatgaaggctgtgtctgcagaatgtctgggcccccccctggacatcagcaccaagaacatcaccaagagcctggccagcctggtggagatcaaggaggatggagtgggcttctctgtgcgggacccctactacagagacagagtgtccaggacagtgtccctgcccacccggggcagcaccttcccccggcagagccgggccacagagaccagccccctgaccaggaggaagagctatgaccggggccagcccatccgcagcacagatgtgggcttcaccccacccagcagcccccccacccggcccagaaatgacagaaatgtgttcagccggctgaccagcaaccagagccagggcagcgccctggacaagggcatcatcagccctgtgggcggggccaagggggccaggacagcccccctgcagtgtgtgtccatggccgagggccacaccaagcccatcctgtgcctggatgccacagatgagctgctcttcaccggcagcaaggacaggagctgcaagatgtggaacctggtgacaggccaggagattgctgccctgaagggccaccccaacaacgtggtgtccatcaagtactgcagccacagcggcctggtgttttctgtgtccaccagctacatcaaggtgtgggacatccgggacagcgccaagtgcatccgcaccctgaccagcagcggccaggtgatctctggagatgcctgtgccgccaccagcacccgggccatcaccagcgcccagggcgagcaccagatcaaccagatcgccctgagccccagcggcaccatgctgtatgctgccagcggaaatgctgtgcgcatctgggagctgagccgcttccagcctgtgggcaagctgaccggccacatcggccctgtgatgtgcctgactgtgacccagacagccagccagcacgacctggtggtgacaggcagcaaggaccactacgtgaagatgtttgagctgggggagtgtgtgacaggcaccatcggccccacccacaactttgagcccccccactatgatggcattgaatgtctggccatccagggcgacatcctcttcagcggcagccgggacaatggcatcaagaagtgggacctggaccagcaggagctgatccagcagatccccaatgcccacaaggactgggtgtgtgccctggccttcatccctggccggcccatgctgctgagcgcctgcagagctggggtcatcaaggtgtggaatgtggacaacttcacccccatcggggagatcaagggccatgacagccccatcaatgccatctgcaccaatgccaagcacatcttcaccgccagcagtgacctgactgtgaagttctggagcgtgcggcggctgccccacagcggccccccatag

SEQ ID NO: 88216 - DNA, 4833 bp, Artificial Sequence
  derived and/or modified sequence
atggccggccagggcgactgctgcgtgaaggtggccgtgcggatccgccctcaactgtctaaggagaagatcgaaggctgtcatatctgtaccagcgtgaccccaggcgaaccccaagtgctgctggggaaagataaggcgttcacatacgacttcgtatttgatcttgatacatggcaggagcaaatctatagcacctgtgtgagtaagctgattgaaggctgctttgagggatataacgcaaccgtgctggcctatggtcagaccggagctggaaagacttacaccatgggcacgggcttcgacatggcaacaagtgaggaggaacagggcatcattccccgtgccatcgcacacctgttcggggggattgccgagaggaaaagacgggctcaggagcagggagtcgccggccccgaattcaaagtatcagcccaatttcttgagctgtataatgaagaaattctggatctgttcgacagtacgcgtgatcccgataccagacacaggcgcagtaatatcaagattcatgaggacgcaaatggcggtatttacactacaggggtgacttcccgccttatccatagtcaggaggagctgatccagtgcctgaagcagggcgcattgagcagaaccactgcctcaacccagatgaacgtgcagagcagcaggtcacacgccatctttaccattcacttgtgccagatgagaatgtgcacacagcccgacctcgtgaacgaggccgttactggactccctgacggcactcccccatcaagcgagtacgagacccttacagcaaagtttcactttgtggatctggccgggagcgaaagactgaaacggacaggggctactggcgaaagggcaaaggagggtatatctattaattgtggtctattagcactcggcaacgttatcagtgctctgggcgaccaaagtaaaaaggtcgtgcacgtgccatatagagattccaagctcactaggctactgcaggatagtcttgggggcaattcccagacgatcatgatcgcctgcgtctctcccagcgacagggattttatggagactttgaatacacttaaatacgccaaccgggcccgcaatataaagaataaggtggtggtgaatcaggataaaaccagccagcagatctctgctctgcgcgccgagattgcgcggctgcagatggagctcatggaatacaaggccggaaagcgggtgatcggagaggacggcgcggaaggttacagcgacctgttcagggagaacgccatgctccagaaagagaacggcgctttacgactcagggtcaaagccatgcaggaggcaattgatgccatcaacaaccgtgtgacacagcttatgtcacaagaggccaatctcctgctggccaaggccggcgacggaaatgaggcgatcggggctctgatccagaactatatcagagagattgaggagctcaggaccaaactgctcgaatccgaagctatgaatgaatccttaaggcggtcattgtctcgagcaagtgcacgctctccctattctctcggcgcctccccagccgccccggcctttggcgggtcacccgcgtcctcgatggaagacgcatcagaggtcattaggcgagctaaacaggacctggaacgcctgaagaagaaagaggtgaggcagagaaggaagagcccagagaaagaggcttttaaaaagcgagccaagctgcagcaggagaacagcgaggagaccgacgaaaacgaagctgaagaagaagaggaggaaagagacgagagcggctgcgaagaggaagaagggcgtgaggatgaggatgaagattccggcagcgaggaaagtttggtggacagcgatagcgatcccgaagaaaaggaagtgaattttcaggctgacctggccgacctcacctgtgagatcgagatcaaacagaagctgatagatgaactggaaaattcacagcgcaggttacagaccttgaagcaccagtacgaagaaaagctgatccttctgcagaacaaaatacgcgacacgcagctggagcgcgaccgcgttctgcagaatctgagcacaatggagtgctacactgaggagaaggcaaataagattaaagcagattacgaaaaaagactgcgggaaatgaaccgagaccttcagaagttacaagctgcgcaaaaggagcatgcgcggctgctcaaaaatcagagcagatatgaaagagagctaaagaaacttcaggccgaggtggctgaaatgaagaaggcaaaggtggcactgatgaaacagatgcgagaagaacaacagcgtcggcggctcgtggagaccaaaaggaatcgcgagatagctcagcttaaaaaagaacagcgtaggcaggaattccagatccgggccctggagagccagaagcgacagcaggaaatggtcttacggagaaaaacccaggaggtttccgctctgcgtaggctggccaaaccaatgtccgaaagggtggcggggagggctgggctcaaaccaccaatgctcgattccggcgccgaggtgtcagcttcaacgacttcttctgaggccgaaagcggggctcggtctgtgtccagcattgtgcgccagtggaatagaaagataaatcacttcttgggagatcaccctgcccctacggtgaatgggactcggcctgcccgcaaaaaatttcagaagaaaggcgcctcccagtcgttctcaaaggcggcccgcttaaaatggcaatccctggaacggcgtattatcgacatcgtcatgcaacggatgactattgtgaatctggaggctgatatggaacgtcttattaagaagagagaggagcttttcctcctacaggaagccctgcggcgtaagcgggagagactgcaggcagagagcccagaggaggaaaaaggactccaagaactggccgaggagatagaagtgcttgcagcaaatattgattacatcaacgatggaatcaccgactgtcaggccacaattgtgcagttggaagaaacgaaggaggaactggatagtaccgacacctccgttgtgattagcagctgctccttagccgaggcgagattgttgctagacaacttcttgaaggcttccatcgataagggcttgcaggtggcccagaaggaagcccaaatcaggttactggaaggccgactgaggcagacggacatggctggtagctctcagaaccacttgctgcttgatgcccttcgggaaaaagcagaggcccaccccgaactacaggctctaatttacaacgtacagcaagagaacgggtacgccagcaccgatgaagagattagcgagtttagtgaagggtctttctcacaatctttcacaatgaagggctccacctctcacgatgattttaaatttaagagtgagcccaaacttagcgctcagatgaaagctgttagcgccgagtgtctagggcctcctttagacatttctacaaaaaatattactaagtcccttgcgtcactcgtggagattaaggaggatggagtcggcttcagtgtccgagatccgtactatagggacagagtgtccagaaccgtgtcccttccgacacggggatccacgttcccacggcaatcaagggctaccgaaacatccccccttacccgcaggaagagctatgaccgcggtcagccaatccgctctactgacgtaggtttcaccccgccaagttcaccgcccacgcgccctagaaacgatcgaaatgtcttctcccgattaacaagcaaccagagtcagggctcagctctggacaagggaataatcagccccgtcggtggggctaaaggcgcccggaccgcccctttgcagtgcgtaagcatggcagagggtcacacaaagccaattctttgcctggatgctacagatgagctgctgttcactgggtccaaggatcgctcctgcaagatgtggaatctggtgaccggccaagaaatcgcagctctgaagggacatcctaacaatgtggtgtccatcaagtattgcagccactcaggtttggtattcagcgtgagcacatcttacattaaagtttgggacattcgcgatagcgctaagtgcatccgtactttaacatcatccggacaggtgatcagcggcgatgcatgtgcagccactagcacacgagccatcacaagtgctcaaggggagcatcagataaatcaaatcgccctttctcccagcggtacgatgctgtatgccgcatctggcaatgctgtgcgtatttgggagctgtccaggtttcaacccgttggcaaactcacaggacatatcggtccagtgatgtgcctgaccgtgacacagaccgcatcacaacatgacctcgtggtgaccggatcaaaagaccattatgttaaaatgtttgagctcggagaatgcgtcacaggcacaataggccccacacacaatttcgagcccccgcactacgatggcatcgaatgcctggctatccagggcgacatattattctcaggaagcagagacaatgggatcaaaaaatgggatctcgaccagcaagagttgatacagcagatccctaatgctcataaggattgggtgtgcgctctggccttcatcccaggccgacccatgctccttagtgcatgccgagctggcgtgatcaaggtgtggaacgttgacaactttactcccatcggcgagatcaagggccatgatagccctatcaacgccatctgtaccaacgcaaaacatatctttaccgcctctagcgatctgacagttaaattttggtccgttcggaggcttccacactctggcccgccatag

SEQ ID NO: 88217 - DNA, 4833 bp, Artificial Sequence
  derived and/or modified sequence
atggccggtcaaggagactgctgtgttaaggtggccgttcgaatccgccctcaacttagcaaggaaaaaatcgaaggatgccacatttgcacttctgtgacccccggtgaaccgcaggtgctcctgggcaaggacaaagctttcacctacgatttcgtcttcgacttggatacttggcaggagcagatctatagcacttgtgtgtctaagctgatcgagggctgctttgaaggttacaatgcaactgtgctcgcttatggtcagacaggagccggtaagacctatacgatgggcacaggatttgacatggcaactagcgaggaggaacagggcatcattcctagagcaatcgcgcacttgtttggtggcatcgcagagaggaagcggcgtgctcaggagcagggcgttgctggacccgagttcaaggtgtcggcccagtttctcgagctgtacaatgaagagatattggatttatttgactccactcgcgaccctgacacgcggcatcgcagatcaaacataaagattcatgaggatgctaacggaggcatctacactactggcgttacctctcggcttatccacagccaggaggaactcattcaatgcctaaagcagggcgctttaagcagaactacagcatctactcagatgaacgtccagagctctcggtctcacgcaattttcactatacacttgtgccagatgcgcatgtgcacccagccagatctcgtgaacgaggccgtcactggcctgccagacgggacgccaccgtcctcagagtatgagaccctgacagccaaattccattttgttgatctagcaggttccgagcggctcaaaaggacgggcgcaacaggcgagagagccaaagagggaatttccattaattgtggcttgctggcactcgggaacgtgatctcagcattgggagatcagtccaaaaaagtggtccacgtgccatatcgagattctaaactgacgcgcctgctccaagactcacttggtggaaactcccaaacaattatgatagcctgtgtgagcccctcagatcgggattttatggagactctgaacactctaaagtacgcaaatcgagcgaggaacattaaaaacaaagtggtagtgaatcaggataagacctcgcaacagattagcgcgctgcgggctgagatagccagactccagatggaactgatggagtataaggccggtaagcgcgtaataggcgaggacggggcagaggggtactcggacctcttcagagagaatgcgatgttgcaaaaggagaacggcgctctgcggttgcgggtgaaggctatgcaggaagcaattgacgccatcaacaatagggtcacccaactcatgagtcaggaagctaacttgctactggccaaggcgggtgacggcaacgaggcaattggcgcactgattcagaactatattcgcgaaattgaagaactgagaactaaactgttagagtctgaggccatgaacgagtctctcaggcggtccctctcccgtgcttccgctcgcagcccctatagtctcggagcttctccagccgcacccgcttttggtggatctcccgcttcctccatggaggacgccagcgaagtgattcgccgagctaagcaagaccttgaaagactaaagaaaaaggaggtcaggcagaggcgcaagagtccagagaaggaagctttcaaaaagagagccaagcttcagcaagagaactcagaggaaacagacgagaacgaggctgaggaggaggaagaggaacgcgatgaatctggctgcgaggaagaagaagggagggaggatgaagacgaagactcggggtctgaagagtcactcgtagactcagactctgacccggaggaaaaggaagttaactttcaggctgacctggccgacttaacatgtgagatcgagatcaaacagaaactgatcgatgagctggagaacagtcagagaaggctgcagaccctgaagcaccagtatgaggaaaagctgatcctattgcagaacaaaatccgcgacacccagctggaaagagatagggtgctgcagaatttatcaactatggagtgttataccgaagagaaagccaacaagatcaaagctgactatgagaagcggcttagggagatgaaccgggatttacagaaactccaggctgcccagaaggagcacgcacgactcttgaaaaaccagtccagatatgagcgggagctcaagaagctgcaagctgaagtggcagagatgaagaaggccaaagtcgccctaatgaagcagatgagagaagagcaacagcggagacgcctggtggagaccaagaggaatagagaaatcgctcagctgaagaaagagcaaagaaggcaggagtttcaaatccgagcattagaatcccagaagagacagcaagagatggtgctacgccgaaaaacccaagaagtttcagcactccggagactcgcaaagcctatgtcagaaagagtggccggaagggcaggcttaaagcccccaatgctcgattccggcgctgaagtgagtgcttcaacaacgtcttctgaagctgagtccggggcacgcagcgtgtctagcatcgtacgccagtggaaccgcaaaatcaatcatttccttggcgatcacccagccccaaccgtcaacggaacaagacccgctcgaaagaagttccagaaaaagggcgcaagtcagtcctttagtaaggctgctcgactgaaatggcaatcactcgaacggaggatcatcgatatcgtcatgcagagaatgactatcgtgaaccttgaggccgacatggagcgcctgatcaagaagagggaggaactgtttctcctccaagaagcactccgacgaaaacgggagagacttcaggcagagagcccagaggaggaaaaaggcctccaggagctggccgaagagattgaagtgctggctgccaatattgactacatcaacgatggcatcaccgactgtcaggcaacaatcgtgcagctcgaagaaaccaaggaggaactggatagtacagacacaagcgtcgtgattagtagctgcagcttggccgaagcccgtcttctcctcgataattttctgaaagcttccattgataagggcctgcaggttgcacaaaaggaggctcaaatccgcctgctggaaggccgactgagacaaacggacatggccggatccagtcagaaccatctactcctagatgccctaagagaaaaggcagaagcacaccccgagctccaggctctcatctataatgtgcaacaggaaaacgggtatgcttcaactgacgaagaaatttcagaattcagcgaaggatccttctctcaatcgtttacgatgaaaggaagcacttcacacgatgattttaagttcaagagcgagccaaagttgtcggcacaaatgaaggcagtctcagccgagtgtctcggaccaccgctggacataagcacgaagaatatcaccaagtccttggccagcttggttgagataaaggaggacggcgtgggcttctctgtgcgcgatccctattacagggaccgtgtgagccggactgtgagcctccccacccgtgggtcaaccttccctcggcagagccgggctacagagacttccccactgacccgtcggaagagctatgatcgcggtcagcccatccgaagcactgatgtcggctttacacctccgagcagtcctccaactcgccctcggaatgatagaaacgtcttttcccggttgacttcaaaccagagccagggctctgcccttgacaagggcatcattagccccgtggggggagccaagggtgccagaactgcccctctgcagtgcgtatcaatggcagagggtcacaccaagccaatcttgtgtcttgacgctaccgatgaactcttatttactggttctaaggaccggagctgtaaaatgtggaatttggtgacgggccaggagattgccgcattaaaaggccacccaaataatgtggtttccatcaagtactgctcccattccggacttgtgttttcagtttccaccagttatatcaaagtgtgggatattcgcgattctgctaagtgcatacgcaccctgacgagttcaggccaagtgatatccggggacgcgtgcgcagcaaccagtaccagagcaatcacctcagcacagggtgaacatcagatcaaccagatcgcccttagcccctcgggcactatgctgtatgctgcatcaggcaacgcagtgcggatctgggagcttagtcgctttcagcccgtgggcaagctcactggccacatcggtccagtgatgtgcctaacagtgactcagactgctagtcagcatgatctagtcgttactggttccaaggaccattatgtcaagatgttcgaactgggagaatgcgtcaccgggaccataggccctactcataactttgaacccccacattacgatggaatcgagtgtctggctatacagggcgacatcttgttctcggggtccagggacaatggaattaagaaatgggatctcgaccaacaggagctgattcagcaaattcccaacgcccataaggattgggtctgcgccctcgctttcattcctgggagacctatgttactctccgcatgcagggcaggtgtcatcaaagtgtggaacgtcgataacttcacccctattggggagatcaaaggccacgactcccctatcaatgcgatctgcaccaacgcaaagcacatcttcaccgcatcctccgatctaaccgtgaagttctggtctgttcggcgactgccacactctggcccaccatag

SEQ ID NO: 88218 - DNA, 4833 bp, Artificial Sequence
  derived and/or modified sequence
atggccggccagggcgactgctgcgtgaaggtggccgtgagaatcagaccccagctgagcaaggagaagatcgagggctgccacatctgcaccagcgtgacccccggcgagccccaggtgctgctgggcaaggacaaggccttcacctacgacttcgtgttcgacctggacacctggcaggagcagatctacagcacctgcgtgagcaagctgatcgagggctgcttcgagggctacaacgccaccgtgctggcctacggccagaccggcgccggcaagacctacaccatgggcaccggcttcgacatggccaccagcgaggaggagcagggcatcatccccagagccatcgcccacctgttcggcggcatcgccgagagaaagagaagagcccaggagcagggcgtggccggccccgagttcaaggtgagcgcccagttcctggagctgtacaacgaggagatcctggacctgttcgacagcaccagagaccccgacaccagacacagaagaagcaacatcaagatccacgaggacgccaacggcggcatctacaccaccggcgtgaccagcagactgatccacagccaggaggagctgatccagtgcctgaagcagggcgccctgagcagaaccaccgccagcacccagatgaacgtgcagagcagcagaagccacgccatcttcaccatccacctgtgccagatgagaatgtgcacccagcccgacctggtgaacgaggccgtgaccggcctgcccgacggcaccccccccagcagcgagtacgagaccctgaccgccaagttccacttcgtggacctggccggcagcgagagactgaagagaaccggcgccaccggcgagagagccaaggagggcatcagcatcaactgcggcctgctggccctgggcaacgtgatcagcgccctgggcgaccagagcaagaaggtggtgcacgtgccctacagagacagcaagctgaccagactgctgcaggacagcctgggcggcaacagccagaccatcatgatcgcctgcgtgagccccagcgacagagacttcatggagaccctgaacaccctgaagtacgccaacagagccagaaacatcaagaacaaggtggtggtgaaccaggacaagaccagccagcagatcagcgccctgagagccgagatcgccagactgcagatggagctgatggagtacaaggccggcaagagagtgatcggcgaggacggcgccgagggctacagcgacctgttcagagagaacgccatgctgcagaaggagaacggcgccctgagactgagagtgaaggccatgcaggaggccatcgacgccatcaacaacagagtgacccagctgatgagccaggaggccaacctgctgctggccaaggccggcgacggcaacgaggccatcggcgccctgatccagaactacatcagagagatcgaggagctgagaaccaagctgctggagagcgaggccatgaacgagagcctgagaagaagcctgagcagagccagcgccagaagcccctacagcctgggcgccagccccgccgcccccgccttcggcggcagccccgccagcagcatggaggacgccagcgaggtgatcagaagagccaagcaggacctggagagactgaagaagaaggaggtgagacagagaagaaagagccccgagaaggaggccttcaagaagagagccaagctgcagcaggagaacagcgaggagaccgacgagaacgaggccgaggaggaggaggaggagagagacgagagcggctgcgaggaggaggagggcagagaggacgaggacgaggacagcggcagcgaggagagcctggtggacagcgacagcgaccccgaggagaaggaggtgaacttccaggccgacctggccgacctgacctgcgagatcgagatcaagcagaagctgatcgacgagctggagaacagccagagaagactgcagaccctgaagcaccagtacgaggagaagctgatcctgctgcagaacaagatcagagacacccagctggagagagacagagtgctgcagaacctgagcaccatggagtgctacaccgaggagaaggccaacaagatcaaggccgactacgagaagagactgagagagatgaacagagacctgcagaagctgcaggccgcccagaaggagcacgccagactgctgaagaaccagagcagatacgagagagagctgaagaagctgcaggccgaggtggccgagatgaagaaggccaaggtggccctgatgaagcagatgagagaggagcagcagagaagaagactggtggagaccaagagaaacagagagatcgcccagctgaagaaggagcagagaagacaggagttccagatcagagccctggagagccagaagagacagcaggagatggtgctgagaagaaagacccaggaggtgagcgccctgagaagactggccaagcccatgagcgagagagtggccggcagagccggcctgaagccccccatgctggacagcggcgccgaggtgagcgccagcaccaccagcagcgaggccgagagcggcgccagaagcgtgagcagcatcgtgagacagtggaacagaaagatcaaccacttcctgggcgaccaccccgcccccaccgtgaacggcaccagacccgccagaaagaagttccagaagaagggcgccagccagagcttcagcaaggccgccagactgaagtggcagagcctggagagaagaatcatcgacatcgtgatgcagagaatgaccatcgtgaacctggaggccgacatggagagactgatcaagaagagagaggagctgttcctgctgcaggaggccctgagaagaaagagagagagactgcaggccgagagccccgaggaggagaagggcctgcaggagctggccgaggagatcgaggtgctggccgccaacatcgactacatcaacgacggcatcaccgactgccaggccaccatcgtgcagctggaggagaccaaggaggagctggacagcaccgacaccagcgtggtgatcagcagctgcagcctggccgaggccagactgctgctggacaacttcctgaaggccagcatcgacaagggcctgcaggtggcccagaaggaggcccagatcagactgctggagggcagactgagacagaccgacatggccggcagcagccagaaccacctgctgctggacgccctgagagagaaggccgaggcccaccccgagctgcaggccctgatctacaacgtgcagcaggagaacggctacgccagcaccgacgaggagatcagcgagttcagcgagggcagcttcagccagagcttcaccatgaagggcagcaccagccacgacgacttcaagttcaagagcgagcccaagctgagcgcccagatgaaggccgtgagcgccgagtgcctgggcccccccctggacatcagcaccaagaacatcaccaagagcctggccagcctggtggagatcaaggaggacggcgtgggcttcagcgtgagagacccctactacagagacagagtgagcagaaccgtgagcctgcccaccagaggcagcaccttccccagacagagcagagccaccgagaccagccccctgaccagaagaaagagctacgacagaggccagcccatcagaagcaccgacgtgggcttcaccccccccagcagcccccccaccagacccagaaacgacagaaacgtgttcagcagactgaccagcaaccagagccagggcagcgccctggacaagggcatcatcagccccgtgggcggcgccaagggcgccagaaccgcccccctgcagtgcgtgagcatggccgagggccacaccaagcccatcctgtgcctggacgccaccgacgagctgctgttcaccggcagcaaggacagaagctgcaagatgtggaacctggtgaccggccaggagatcgccgccctgaagggccaccccaacaacgtggtgagcatcaagtactgcagccacagcggcctggtgttcagcgtgagcaccagctacatcaaggtgtgggacatcagagacagcgccaagtgcatcagaaccctgaccagcagcggccaggtgatcagcggcgacgcctgcgccgccaccagcaccagagccatcaccagcgcccagggcgagcaccagatcaaccagatcgccctgagccccagcggcaccatgctgtacgccgccagcggcaacgccgtgagaatctgggagctgagcagattccagcccgtgggcaagctgaccggccacatcggccccgtgatgtgcctgaccgtgacccagaccgccagccagcacgacctggtggtgaccggcagcaaggaccactacgtgaagatgttcgagctgggcgagtgcgtgaccggcaccatcggccccacccacaacttcgagcccccccactacgacggcatcgagtgcctggccatccagggcgacatcctgttcagcggcagcagagacaacggcatcaagaagtgggacctggaccagcaggagctgatccagcagatccccaacgcccacaaggactgggtgtgcgccctggccttcatccccggcagacccatgctgctgagcgcctgcagagccggcgtgatcaaggtgtggaacgtggacaacttcacccccatcggcgagatcaagggccacgacagccccatcaacgccatctgcaccaacgccaagcacatcttcaccgccagcagcgacctgaccgtgaagttctggagcgtgagaagactgccccacagcggccccccctag

SEQ ID NO: 88219 - protein, 1330 aa, Artificial Sequence
  derived and/or modified sequence
MEDGGLTAFEEDQRCLSQSLPLPVSAEGPAAQTTAEPSRSFSSAHRHLSRRNGLSRLCQSRTALSEDRWSSYCLSSLAAQNICTSKLHCPAAPEHTDPSEPRGSVSCCSLLRGLSSGWSSPLLPAPVCNPNKAIFTVDAKTTEILVANDKACGLLGYSSQDLIGQKLTQFFLRSDSDVVEALSEEHMEADGHAAVVFGTVVDIISRSGEKIPVSVWMKRMRQERRLCCVVVLEPVERVSTWVAFQSDGTVTSCDSLFAHLHGYVSGEDVAGQHITDLIPSVQLPPSGQHIPKNLKIQRSVGRARDGTTFPLSLKLKSQPSSEEATTGEAAPVSGYRASVWVFCTISGLITLLPDGTIHGINHSFALTLFGYGKTELLGKNITFLIPGFYSYMDLAYNSSLQLPDLASCLDVGNESGCGERTLDPWQGQDPAEGGQDPRINVVLAGGHVVPRDEIRKLMESQDIFTGTQTELIAGGQLLSCLSPQPAPGVDNVPEGSLPVHGEQALPKDQQITALGREEPVAIESPGQDLLGESRSEPVDVKPFASCEDSEAPVPAEDGGSDAGMCGLCQKAQLERMGVSGPSGSDLWAGAAVAKPQAKGQLAGGSLLMHCPCYGSEWGLWWRSQDLAPSPSGMAGLSFGTPTLDEPWLGVENDREELQTCLIKEQLSQLSLAGALDVPHAELVPTECQAVTAPVSSCDLGGRDLCGGCTGSSSACYALATDLPGGLEAVEAQEVDVNSFSWNLKELFFSDQTDQTSSNCSCATSELRETPSSLAVGSDPDVGSLQEQGSCVLDDRELLLLTGTCVDLGQGRRFRESCVGHDPTEPLEVCLVSSEHYAASDRESPGHVPSTLDAGPEDTCPSAEEPRLNVQVTSTPVIVMRGAAGLQREIQEGAYSGSCYHRDGLRLSIQFEVRRVELQGPTPLFCCWLVKDLLHSQRDSAARTRLFLASLPGSTHSTAAELTGPSLVEVLRARPWFEEPPKAVELEGLAACEGEYSQKYSTMSPLGSGAFGFVWTAVDKEKNKEVVVKFIKKEKVLEDCWIEDPKLGKVTLEIAILSRVEHANIIKVLDIFENQGFFQLVMEKHGSGLDLFAFIDRHPRLDEPLASYIFRQVRAGQSRLVSAVGYLRLKDIIHRDIKDENIVIAEDFTIKLIDFGSAAYLERGKLFYTFCGTIEYCAPEVLMGNPYRGPELEMWSLGVTLYTLVFEENPFCELEETVEAAIHPPYLVSKELMSLVSGLLQPVPERRTTLEKLVTDPWVTQPVNLADYTWEEVFRVNKPESGVLSAASLEMGNRSLSDVAQAQELCGGPVPGEAPNGQGCLHPGDPRLLTS

SEQ ID NO: 88220 - DNA, 3993 bp, Artificial Sequence
  derived and/or modified sequence
atggaagacggagggctaacagcctttgaggaggatcagaggtgcctgtcccagtctctcccgctgccagtgagcgccgagggcccagcagcccagactacggcagagccaagccgtagcttctcctccgcacacagacacttgtcaaggcgtaatggtttgtcacggttgtgccaaagtagaacagccctttctgaggaccgctggagcagttattgtttgtcgtccctggccgcacagaacatttgcacctctaagctccactgtccggctgctcctgagcacactgatccaagcgaacctagaggatcagtcagttgttgcagcctgttgcgtggccttagttcagggtggtcaagccccctcctacccgcccctgtatgcaacccaaataaagcgatctttaccgtggatgcaaagacaacagagattcttgtcgctaatgataaagcctgcggactgctgggctacagctctcaggatctgattggccaaaagctcacccagttctttctgcggtcagactccgacgtggtggaggccttgtcagaagaacatatggaagctgacggccacgcagccgtggtatttggtacagtggtggatatcatctctcggagtggcgaaaagataccagtctcggtgtggatgaagcgcatgagacaggaacgacggctttgctgtgttgtcgtcctggaacctgtcgagagggtaagcacgtgggtggcattccagagcgacggcacagtcacatcctgcgacagcctgtttgcgcacctccacggttacgtctccggcgaagatgttgccggacaacatatcaccgatcttatcccgagcgtgcagcttccaccatctgggcagcacatcccaaagaatctgaagattcagcgcagcgttgggagggcaagagatggcacaacgttcccactcagtctgaagctcaagtctcagcctagttccgaagaggcgaccaccggtgaggctgcccccgtgagcggctaccgagcaagcgtctgggtattctgcacaatctctggactcatcacccttctgcctgatggcaccatccacgggattaaccactcatttgccctgacattgtttggctacggcaaaacagaactgctgggtaaaaatataacattcctgattcccggattctatagctatatggatctggcttacaattcaagcctgcagttacctgacctggcatcatgccttgatgtagggaatgagtccgggtgcggcgagagaacgttggatccctggcaaggacaagaccctgccgaaggtggccaggatccacgcatcaacgtggtactggctggtggccacgtggttcctagagacgagattcgcaagctcatggaatcccaggacatctttacaggaacacaaaccgagttgatcgcaggtggtcaacttctcagttgcctgagcccacagcctgcaccaggcgtagataatgtgccggaagggagccttccggtgcacggtgaacaggcgctgcccaaggaccaacagatcacagcgctgggtcgcgaagagcccgtggcaattgaatctccaggccaggatttactgggcgagtctaggtccgagcctgtggacgtgaagcctttcgctagctgcgaagactcagaggcacctgtacccgccgaggacggaggtagcgacgcagggatgtgcggcctttgtcaaaaggcccagctcgagcgcatgggggtttcagggccttctgggagtgacctgtgggcgggagcagcggtggccaaacctcaggcaaagggtcaactagcaggtgggtcactccttatgcattgtccctgttatggtagcgagtgggggctctggtggaggtcgcaggatctcgcgccgtctccttccggaatggcaggactgtcatttgggacccccacacttgacgaaccttggctcggggtggagaacgatcgggaggaactgcagacttgcctgatcaaagaacaattatctcaactctctttagccggtgccttggatgtccctcatgctgaactcgtccccacggagtgccaagctgtcaccgctcccgtgtcctcttgtgaccttgggggcagagatctctgcggaggctgtacgggcagctccagtgcctgctatgccctcgccacagacttgcctggaggactggaagccgtagaggctcaggaagtggatgtgaacagtttcagctggaatcttaaggagctgtttttttccgatcagaccgatcaaacatcttcgaattgcagttgcgctacctcagagctgcgagagactccatcatctctggccgtcggaagcgaccccgatgttggttcactgcaagagcaaggcagctgtgtgctagacgatcgtgaactcctcctgttgacaggtacttgcgtggacttaggacaggggagaagatttagggaatcttgcgtgggtcacgatccaaccgaacctctggaggtttgcctggtgtcctcagagcattatgccgccagtgacagagaatcccccggccacgttccttccacactggatgccgggcctgaggacacgtgcccatcagccgaagaaccgcgactgaatgtgcaggtgacttccactcctgtaatcgttatgagaggtgccgcaggactgcagcgggagatccaggagggcgcctacagcggtagctgctaccacagagatggattgcgcctgagcattcaattcgaggtccggcgtgtcgagcttcaggggcccacgccactgttctgctgctggctggtcaaggacctgctgcacagccaacgcgactcagcagctcgtactcgacttttcctggcgtctctacctgggagtacccatagtaccgcggccgagctcacaggccccagtcttgtggaggtactgcgcgcacggccctggtttgaggaaccacccaaagccgtggagctggaggggctggccgcatgcgagggcgaatattcccagaaatacagcactatgagccctctagggtccggagcatttgggtttgtctggaccgcagtggacaaagaaaaaaacaaggaagttgtcgtgaaattcattaaaaaagagaaggttctggaggattgttggatcgaggaccctaagctgggcaaggtaacgctcgagatcgctatcttgtcccgcgtggagcacgcaaacatcattaaggtcttggacatcttcgagaaccagggtttctttcagctggttatggagaaacacggtagtggcctcgatctgtttgcctttatagacagacatccacggctggatgagcccctggcgtcctatatttttagacaagtccgcgcgggacagtctcgattagtatctgcagtaggctacctgaggctgaaagacatcatacaccgggatatcaaggatgagaatatcgtgatcgccgaagatttcactattaagctgattgactttggaagcgctgcctacttagagcggggtaagcttttctacacattttgtgggacgatcgaatattgtgcgccagaggtcttgatgggcaatccctacaggggtcccgaactggagatgtggtccctgggagtcacattatacaccctggtgtttgaagaaaaccccttctgtgagctggaagagaccgtggaggctgctatccatccgccgtacttggtcagtaaggaactgatgagcctggtgtccggcctgttacagcccgtgcccgagcgcaggaccacactggagaagttagtgactgatccctgggtgacgcaaccagtgaatctggccgactacacctgggaggaggtgtttcgcgtgaacaagccagaatctggtgtgctcagcgccgctagcctagagatggggaaccggtcccttagtgatgttgctcaggctcaggaactgtgtggaggacccgttccgggcgaggctcccaatggtcagggctgtttacatcccggggacccgcggttattaacatcttag

SEQ ID NO: 88221 - DNA, 3993 bp, Artificial Sequence
  derived and/or modified sequence
atggaggatggcggcctgacagcctttgaggaggaccagcgctgcctgagccagagcctgcccctgcctgtgtctgctgagggccctgctgcccagaccacagctgagcccagccgctccttcagcagcgcccaccgccacctgagcagaagaaatggcctgagccggctgtgccagagcaggacagccctgtctgaggaccgctggagcagctactgcctgagcagcctggccgcccagaacatctgcaccagcaagctgcactgcccagctgcccctgagcacacagaccccagcgagccccggggctctgtgtcctgctgcagcctgctgcggggcctgagcagcggctggagcagccccctgctgcctgcccctgtgtgcaaccccaacaaggccatcttcaccgtggatgccaagaccacagagatcctggtggccaatgacaaggcctgtggcctgctgggctacagcagccaggacctgattggccagaagctgacccagttcttcctgcggagtgacagtgatgtggtggaggccctgtctgaggagcacatggaggctgatggccatgctgctgtggtgtttggaacagtggtggacatcatcagccgctctggagagaagatccctgtgtctgtgtggatgaagaggatgaggcaggagcggcggctgtgctgcgtggtggtgctggagcctgtggagcgggtgtccacctgggtggccttccagagtgatggcaccgtgaccagctgtgacagcctgtttgcccacctgcacggctacgtgtctggagaagatgtggccggccagcacatcacagacctgatccccagcgtgcagctgccccccagcggccagcacatccccaagaacctgaagatccagaggtctgtgggccgggccagagatggcaccaccttccccctgagcctgaagctgaagagccagcccagcagcgaggaggccaccaccggggaggccgcccctgtgtctggctaccgggcctctgtgtgggtgttctgcaccatcagcggcctcatcaccctgctgcctgatggcaccatccacggcatcaaccacagctttgccctgaccctgtttggctacggcaagacagagctgctgggcaagaacatcaccttcctgatccctggcttctacagctacatggacctggcctacaacagcagcctgcagctgcctgacctggccagctgcctggatgtgggcaatgaaagtggctgtggggagaggaccctggacccctggcagggccaggaccctgctgagggcggccaggacccccgcatcaacgtggtgctggccggcggccacgtggtgcccagagatgagatcaggaagctgatggagagccaggacatcttcaccggcacccagacagagctgattgctgggggccagctgctgagctgcctgagcccccagcctgcccctggggtggacaacgtgcctgagggcagcctgcctgtgcacggggagcaggccctgcccaaggaccagcagatcacagccctgggccgggaggagcctgtggccatcgagagccctggccaggacctgctgggggagagccgctctgagcctgtggatgtgaagccctttgccagctgtgaagattctgaggcccctgtgcctgcagaagatggcggcagtgatgctggcatgtgtggcctgtgccagaaggcccagctggagaggatgggcgtgtctggccccagcggcagtgacctgtgggccggggctgctgtggccaagccccaggccaagggccagctggccggcggcagcctgctgatgcactgcccctgctacggcagcgagtggggcctgtggtggaggagccaggacctggcccccagccccagcggcatggccggcctgagctttggcacccccaccctggatgagccctggctgggcgtggagaatgaccgggaggagctgcagacctgcctgatcaaggagcagctgagccagctgagcctggccggggccctggatgtgccccacgccgagctggtgcccacagagtgccaggccgtgacagcccctgtgagcagctgtgacctgggcggccgggacctgtgtggcggctgcaccggcagcagcagcgcctgctacgccctggccacagacctgcccggcggcctggaggccgtggaggcccaggaggtggatgtgaacagcttctcctggaacctgaaggagctgttcttcagtgaccagacagaccagaccagcagcaactgcagctgtgccaccagcgagctgcgggagacccccagcagcctggccgtgggcagtgaccctgatgtgggcagcctgcaggagcagggcagctgtgtgctggatgaccgggagctgctgctgctgaccggcacctgtgtggacctgggccagggccgccgcttccgggagagctgtgtgggccatgaccccacagagcccctggaggtgtgcctggtgtcctctgagcactatgctgccagtgaccgggagagccctggccacgtgcccagcaccctggatgctggccctgaggacacctgccccagcgctgaggagccccggctgaatgtgcaggtgaccagcacccctgtgattgtgatgagaggagctgctggcctgcagcgggagatccaggagggcgcctacagcggcagctgctaccacagagatggcctgcggctgagcatccagtttgaggtgagaagagtggagctgcagggccccacccccctcttctgctgctggctggtgaaggacctgctgcacagccagagggacagcgctgcccggaccaggctcttcctggccagcctgcccggcagcacccacagcacagctgctgagctgaccggccccagcctggtggaggtgctgcgggcccggccctggtttgaggagccccccaaggctgtggagctggagggcctggccgcctgtgagggggagtacagccagaagtacagcaccatgagccccctgggcagcggggccttcggctttgtgtggacagctgtggacaaggagaagaacaaggaggtggtggtgaagttcatcaagaaggagaaggtgctggaggactgctggattgaggaccccaagctgggcaaggtgaccctggagatcgccatcctgagccgggtggagcacgccaacatcatcaaggtgctggacatctttgagaaccagggcttcttccagctggtgatggagaagcacggcagcggcctggacctgtttgccttcatcgacagacacccccggctggatgagcccctggccagctacatcttccggcaggtgcgggccggccagagccggctggtgtctgctgtgggctacctgcggctgaaggacatcatccaccgggacatcaaggatgaaaatattgtgattgctgaggacttcaccatcaagctgattgactttggcagcgctgcctacctggagcggggcaagctgttctacaccttctgtggcaccatcgagtactgtgcccctgaggtgctgatgggcaacccctaccggggccctgagctggagatgtggagcctgggcgtgaccctgtacaccctggtgtttgaggagaaccccttctgtgagctggaggagaccgtggaggccgccatccaccccccctacctggtgtccaaggagctgatgagcctggtgtctggcctgctgcagcctgtgcctgagaggaggaccaccctggagaagctggtgacagacccctgggtgacccagcctgtgaacctggccgactacacctgggaggaggtgttccgggtgaacaagccagagagcggcgtgctgtctgctgccagcctggagatgggcaacagaagcctgagtgatgtggcccaggcccaggagctgtgtggcggccctgtgcctggagaggccccaaatggccagggctgcctgcaccctggggacccccggctgctgaccagctag

SEQ ID NO: 88222 - DNA, 3993 bp, Artificial Sequence
  derived and/or modified sequence
atggaggacggcggcctgaccgccttcgaggaggaccagcggtgcttgtcccagtccctgcccctcccagtgtctgccgagggacctgctgctcagaccactgccgaaccttcccgttcgttctccagtgcacaccgacacctttccagaaggaacggactgtcccgtttatgccaaagcagaaccgcactgtcagaggaccgctggtcctcatattgcttatccagtctggcggctcagaacatttgcacaagcaagctgcattgtccggccgcacctgagcacaccgaccctagcgaacctcgcggatccgtcagttgctgttcactcctcagaggactctcttcaggatggtccagtcccctactgcctgcgcctgtctgcaatccaaataaggctatcttcacagtcgacgccaaaactaccgagatcctcgtggcaaacgataaggcttgcgggttgctgggctattcaagccaagatctgatcgggcagaaactgacccagttcttccttcggagcgactcagatgtagtggaagctctatctgaagaacacatggaagccgatggtcacgccgctgtggttttcggaacagtggttgatatcatcagtcgcagtggagaaaagatccctgtgagtgtttggatgaagcgaatgcgccaggagcgcagattgtgctgcgtggtcgtactggaacctgttgaaagagttagcacatgggtcgccttccaatctgatgggaccgtgacatcctgtgacagcctttttgcacacctccatgggtacgtgtctggcgaagacgtcgccggccaacatatcaccgatctcatccccagcgttcagctgcccccttccgggcaacacattccgaagaacctgaagatacagcgctcagtcggacgcgcacgggatgggacaacctttccattgagtttgaagctgaaatcacaaccatcttctgaagaggctaccacaggggaagcggccccagtatccggctaccgggcgagcgtgtgggtgttttgtaccataagcggactgatcacgcttctacccgacggcacgattcatggtatcaaccattcattcgcactcacgctgtttggttacggcaaaaccgaactactgggcaaaaatatcaccttcctgatcccaggattctactcatacatggaccttgcctacaactcctcgttacagctccccgacctggctagctgcttggacgttgggaacgagagcgggtgtggtgagaggaccctggatccctggcaaggacaggatcctgccgaaggggggcaggaccctcgaattaatgtggtcttggcaggcggacacgtggtgcctagggatgagatcagaaaactaatggagtcacaggatatattcacagggacacagaccgagctcatagcaggcgggcagctgttaagttgcctgtcacctcagcctgccccaggcgtggacaatgtcccagagggctctttgcctgtccatggcgagcaggcactgcctaaggatcagcaaatcacagccctgggccgtgaggagcccgtggctatcgagtctccggggcaggatctgctaggagagagtcgctctgaacccgttgatgttaaacctttcgcctcctgcgaagattccgaagcaccagttccagcagaggacggcggcagtgatgcaggaatgtgcggcttatgtcagaaggcacaattggaaagaatgggggtctctggaccatcaggatccgatctgtgggcaggagccgccgtggcaaagccccaggcaaagggacaactggccgggggaagtttgctcatgcattgtccttgttacggttccgaatggggactgtggtggagatctcaggatctcgcaccaagcccatcgggtatggccgggctctcgttcgggacaccgacactcgatgagccttggctgggagtagaaaatgatcgagaggagctgcagacatgtcttatcaaagaacagctgtcccaactatcacttgccggggccctggacgtgcctcatgcggagttagtacctacagagtgtcaggccgtgaccgccccggtgtcatcctgcgatttgggcggcagagacttgtgcggtggctgcactggttcctcctctgcctgttatgctctagcaaccgatctgcccggcggcctggaagctgtggaggcgcaagaagttgacgtcaattccttcagctggaatctgaaagaactgttcttcagcgaccagacagaccagacgagctcaaactgcagttgcgccacctctgagttacgcgagacaccatccagcttggctgtgggatctgatccagatgtgggcagcctgcaggagcaggggagttgtgtgctggatgatcgagaattgcttctgctaacgggcacgtgcgtggatctcggccagggtcgacgctttcgcgagtcctgcgttgggcacgacccaacagagcctctggaggtgtgcctggtgtcttcagagcactatgctgcgtccgatcgtgaatctcctggacacgttccctccactttagatgccggtcccgaagacacttgcccctccgccgaggagccaagactcaatgtgcaggtgacctccacccctgtcatagtgatgcggggcgccgccggcttacagcgcgagattcaggagggggcatacagcgggtcctgttaccatcgcgatggccttaggctgtccatccagttcgaggtgagaagggtcgaacttcagggaccaactcccttgttttgttgctggctggttaaggacctgttgcattcccagcgggattcagccgcgaggacacgtctgtttttggcatcactcccgggctccacgcattcaacggccgccgagctgacagggcctagcctcgtagaagttctgagggccagaccttggtttgaggagccccccaaggccgtggaattggagggcctcgctgcatgtgagggagagtattctcaaaaatactcaactatgagccctctgggatccggcgcgttcggatttgtctggaccgcagttgacaaagagaaaaataaagaggtagttgtgaagtttattaaaaaagaaaaagttctggaagactgttggatcgaggacccaaaactgggtaaagtgactcttgagattgctattctttcgcgcgtcgagcacgctaatatcattaaagtactggacatttttgaaaaccaaggatttttccagctggtcatggaaaagcacgggagcggacttgatttatttgcgttcatcgataggcatcccagactggacgaacctctagccagctatatatttcgccaagtgagagctggacagtcccgacttgtgagtgccgttggctatctcaggctgaaggatatcatacaccgcgacatcaaggacgaaaacatcgtcatagcagaagactttactatcaaactgatagatttcggaagcgccgcttatctggagagaggcaaattgttctataccttttgcggaactattgaatactgtgcccccgaggttctgatggggaatccctacagaggccccgaactcgaaatgtggtctctcggggtgaccctctacactctggtgtttgaggagaaccccttttgcgaactggaggaaactgtcgaggccgcaatccatcccccttacctcgtctcaaaggaactgatgtccctggtgagtggtctgctgcagcccgtacctgaaaggagaacaaccttagagaaactggtgaccgatccctgggtgacgcagcctgtaaacctggcggattacacttgggaagaggtctttcgcgtgaataagcccgaatctggcgtcctgtctgccgcatccttggagatgggaaacaggtctctttctgacgtggctcaagctcaggagctgtgcggaggaccagtgccaggagaagcacccaacggacagggctgcctgcaccccggcgacccacgactcttgactagttag

SEQ ID NO: 88223 - DNA, 3993 bp, Artificial Sequence
  derived and/or modified sequence
atggaagacggagggctgacagccttcgaagaagatcagaggtgtctgtcgcaaagtcttccgctaccagtgtctgcagagggacctgctgcacaaactaccgcagaacctagtaggagtttttctagcgcccaccgtcatctgtcgcgtcggaatgggttgagtcgcctttgccagagccggactgcactgtctgaagaccggtggtcctcttattgtctgtcttcccttgcagctcagaacatctgtacgtccaaacttcattgtcccgctgcgccagaacacaccgacccctcagaacctcgcggaagtgtgagctgctgttcccttctacggggtctgtcatcaggctggtctagtccactcttgccagccccagtttgtaatccaaacaaggctatcttcaccgtcgacgctaagactacagagatcctggtggctaacgacaaggcttgcggtctgctgggttattcaagtcaggatttgatcgggcaaaagttgacacagttctttttgcgtagcgacagcgatgtagtcgaggccttgagtgaggagcacatggaagcagatgggcacgcagccgtggtctttggaacagttgtcgatatcatcagcaggtccggagagaaaatccccgtgtcggtgtggatgaagcggatgaggcaagaacgcagactgtgctgcgtcgtcgtccttgagcccgttgaaagagtgagcacatgggtggcctttcagtcagatgggaccgtcacctcctgcgactcattattcgcacacctgcacggatatgtatccggagaagatgtggccggacagcatattaccgacctgatcccctccgttcagctcccaccctccggccagcacattccaaagaacctgaaaattcagagatcggtaggccgagcacgagacggcacaaccttccctctctcactcaagctgaagtcacagccttccagcgaagaagcgacaactggcgaggcagcccctgtcagcgggtaccgcgctagcgtgtgggttttttgtactataagcgggttaatcacactgctgccagatggcacgattcatggcattaaccattccttcgccctgacactttttggttacggcaagacagagctgttaggaaagaacattacattccttatccctggtttttattcctacatggatttagcttacaattcttcgcttcagttgccagacctggcgagctgtcttgatgtcggcaatgagtccgggtgcggagagcgaactctcgatccctggcaaggacaagatcccgcagagggcggacaggatccgagaattaacgtagttctggccggaggccacgtcgttcccagggacgaaattcggaagctcatggaatcccaggacatattcacaggcacccagactgaacttatcgctggaggtcagctgctgtcttgtctgtctcctcaaccagcccctggtgtagataatgtcccagagggctcgcttcccgtgcacggagaacaggctctgccaaaagatcaacagatcaccgcgctgggcagggaagaaccagtggctattgagtcacctggacaggacctgcttggcgagtcaagaagcgaacctgtggatgtgaagcctttcgctagctgcgaagacagtgaggctcctgtaccagcggaagacggcggttccgacgcaggaatgtgtggactttgccagaaggcccaactcgaacggatgggggtttccggaccatcagggagtgacctctgggccggagccgcagtggccaagcctcaggcaaaaggacagctcgccggtggttcgctgttgatgcactgcccctgttatggttcagaatggggattgtggtggaggtctcaggacttggctcctagccccagcggcatggctggcctcagttttggtacccccacgctcgacgagccatggctgggggttgaaaacgatagagaggaactccaaacctgcttaataaaggaacagctgtcacagttgtctcttgctggcgctctggacgttccccatgcagagcttgtccccacggagtgtcaggccgtaactgcgccagtcagctcgtgcgacctgggtggtagagacttatgcggcggatgtaccgggtcttcaagcgcttgttacgccctggcaaccgatctgcccggaggtcttgaggccgtcgaagctcaggaggttgatgttaacagtttttcttggaacctgaaggaactgttcttttccgaccagactgaccaaacatccagcaattgcagctgcgcgacctccgagttacgggaaactccgtcgtccctcgcggtgggcagtgatccagacgtgggctccctgcaagaacagggcagttgtgttctggatgacagggagctgctcctcttgaccggaacgtgcgttgatttagggcaagggaggcgctttcgggagtcttgtgtgggccacgatccaactgaaccgctggaagtctgtctggtgtcatcagaacattacgcagcctcagatagggagtctccgggacatgtcccctctaccctggacgcaggcccagaagacacatgcccatccgctgaagaaccacggctgaatgttcaagtgacatcaaccccagtcatcgtgatgcggggagccgctggactccagcgtgagatacaagaaggagcctactccggaagttgctaccatagggatggcttgaggctcagtattcagtttgaagtgagaagggtggagctccaaggcccaacccccctgttctgctgctggctggtgaaagatttgctgcactctcagagagacagcgctgcccgaaccagactctttttggcaagcctgccgggatcaactcattcaaccgctgctgagctgacgggcccaagtctggtcgaggttttgcgtgctcgcccatggttcgaagagccacccaaagctgtggagctcgaaggtctggccgcatgcgaaggggaatacagccagaagtacagcactatgtctcctctgggctccggcgctttcggttttgtctggacggcagtggacaaagagaagaacaaggaggtcgttgttaagttcattaaaaaagagaaggttctggaggactgttggatagaggaccccaagctgggaaaagtgaccctggaaatcgcgatactctcaagggtcgagcacgcgaatataataaaggtcctggatattttcgagaaccagggatttttccaactggtgatggagaagcacggcagcggtctggatctcttcgcgttcattgaccggcatcctcgcctggacgagcccctggccagctatatcttcaggcaagttagggccggtcagagcaggctcgtgtccgcagtgggctatttaaggttgaaggacattattcatagggatataaaggacgagaatatagttattgcagaggactttacgattaagctcatcgattttggaagcgccgcatacttggaacggggtaaactattctacacattctgcggtacgatcgagtactgcgcacccgaagtgttgatggggaacccttaccggggaccagaacttgaaatgtggtcactgggagtcaccctgtacactctcgtatttgaagaaaacccattctgtgaacttgaagagaccgttgaagccgctatccacccgccatacttggtgagcaaagaactgatgagcctagtctctggactgctccagcctgtccccgagagacgaactaccctggaaaagctggtcacggacccttgggttacacagccagtgaacctggctgattatacttgggaggaggtcttccgggtgaacaagcctgaaagcggagtgctttcagccgctagtctggaaatgggtaatcgctctctgagcgatgtggcccaagcccaggaattgtgtgggggaccagtcccaggagaagctccaaatggccagggttgccttcatcccggagatccccgacttctcacatcttag

SEQ ID NO: 88224 - DNA, 3993 bp, Artificial Sequence
  derived and/or modified sequence
atggaggacggcggcctgaccgccttcgaggaggaccagagatgcctgagccagagcctgcccctgcccgtgagcgccgagggccccgccgcccagaccaccgccgagcccagcagaagcttcagcagcgcccacagacacctgagcagaagaaacggcctgagcagactgtgccagagcagaaccgccctgagcgaggacagatggagcagctactgcctgagcagcctggccgcccagaacatctgcaccagcaagctgcactgccccgccgcccccgagcacaccgaccccagcgagcccagaggcagcgtgagctgctgcagcctgctgagaggcctgagcagcggctggagcagccccctgctgcccgcccccgtgtgcaaccccaacaaggccatcttcaccgtggacgccaagaccaccgagatcctggtggccaacgacaaggcctgcggcctgctgggctacagcagccaggacctgatcggccagaagctgacccagttcttcctgagaagcgacagcgacgtggtggaggccctgagcgaggagcacatggaggccgacggccacgccgccgtggtgttcggcaccgtggtggacatcatcagcagaagcggcgagaagatccccgtgagcgtgtggatgaagagaatgagacaggagagaagactgtgctgcgtggtggtgctggagcccgtggagagagtgagcacctgggtggccttccagagcgacggcaccgtgaccagctgcgacagcctgttcgcccacctgcacggctacgtgagcggcgaggacgtggccggccagcacatcaccgacctgatccccagcgtgcagctgccccccagcggccagcacatccccaagaacctgaagatccagagaagcgtgggcagagccagagacggcaccaccttccccctgagcctgaagctgaagagccagcccagcagcgaggaggccaccaccggcgaggccgcccccgtgagcggctacagagccagcgtgtgggtgttctgcaccatcagcggcctgatcaccctgctgcccgacggcaccatccacggcatcaaccacagcttcgccctgaccctgttcggctacggcaagaccgagctgctgggcaagaacatcaccttcctgatccccggcttctacagctacatggacctggcctacaacagcagcctgcagctgcccgacctggccagctgcctggacgtgggcaacgagagcggctgcggcgagagaaccctggacccctggcagggccaggaccccgccgagggcggccaggaccccagaatcaacgtggtgctggccggcggccacgtggtgcccagagacgagatcagaaagctgatggagagccaggacatcttcaccggcacccagaccgagctgatcgccggcggccagctgctgagctgcctgagcccccagcccgcccccggcgtggacaacgtgcccgagggcagcctgcccgtgcacggcgagcaggccctgcccaaggaccagcagatcaccgccctgggcagagaggagcccgtggccatcgagagccccggccaggacctgctgggcgagagcagaagcgagcccgtggacgtgaagcccttcgccagctgcgaggacagcgaggcccccgtgcccgccgaggacggcggcagcgacgccggcatgtgcggcctgtgccagaaggcccagctggagagaatgggcgtgagcggccccagcggcagcgacctgtgggccggcgccgccgtggccaagccccaggccaagggccagctggccggcggcagcctgctgatgcactgcccctgctacggcagcgagtggggcctgtggtggagaagccaggacctggcccccagccccagcggcatggccggcctgagcttcggcacccccaccctggacgagccctggctgggcgtggagaacgacagagaggagctgcagacctgcctgatcaaggagcagctgagccagctgagcctggccggcgccctggacgtgccccacgccgagctggtgcccaccgagtgccaggccgtgaccgcccccgtgagcagctgcgacctgggcggcagagacctgtgcggcggctgcaccggcagcagcagcgcctgctacgccctggccaccgacctgcccggcggcctggaggccgtggaggcccaggaggtggacgtgaacagcttcagctggaacctgaaggagctgttcttcagcgaccagaccgaccagaccagcagcaactgcagctgcgccaccagcgagctgagagagacccccagcagcctggccgtgggcagcgaccccgacgtgggcagcctgcaggagcagggcagctgcgtgctggacgacagagagctgctgctgctgaccggcacctgcgtggacctgggccagggcagaagattcagagagagctgcgtgggccacgaccccaccgagcccctggaggtgtgcctggtgagcagcgagcactacgccgccagcgacagagagagccccggccacgtgcccagcaccctggacgccggccccgaggacacctgccccagcgccgaggagcccagactgaacgtgcaggtgaccagcacccccgtgatcgtgatgagaggcgccgccggcctgcagagagagatccaggagggcgcctacagcggcagctgctaccacagagacggcctgagactgagcatccagttcgaggtgagaagagtggagctgcagggccccacccccctgttctgctgctggctggtgaaggacctgctgcacagccagagagacagcgccgccagaaccagactgttcctggccagcctgcccggcagcacccacagcaccgccgccgagctgaccggccccagcctggtggaggtgctgagagccagaccctggttcgaggagccccccaaggccgtggagctggagggcctggccgcctgcgagggcgagtacagccagaagtacagcaccatgagccccctgggcagcggcgccttcggcttcgtgtggaccgccgtggacaaggagaagaacaaggaggtggtggtgaagttcatcaagaaggagaaggtgctggaggactgctggatcgaggaccccaagctgggcaaggtgaccctggagatcgccatcctgagcagagtggagcacgccaacatcatcaaggtgctggacatcttcgagaaccagggcttcttccagctggtgatggagaagcacggcagcggcctggacctgttcgccttcatcgacagacaccccagactggacgagcccctggccagctacatcttcagacaggtgagagccggccagagcagactggtgagcgccgtgggctacctgagactgaaggacatcatccacagagacatcaaggacgagaacatcgtgatcgccgaggacttcaccatcaagctgatcgacttcggcagcgccgcctacctggagagaggcaagctgttctacaccttctgcggcaccatcgagtactgcgcccccgaggtgctgatgggcaacccctacagaggccccgagctggagatgtggagcctgggcgtgaccctgtacaccctggtgttcgaggagaaccccttctgcgagctggaggagaccgtggaggccgccatccaccccccctacctggtgagcaaggagctgatgagcctggtgagcggcctgctgcagcccgtgcccgagagaagaaccaccctggagaagctggtgaccgacccctgggtgacccagcccgtgaacctggccgactacacctgggaggaggtgttcagagtgaacaagcccgagagcggcgtgctgagcgccgccagcctggagatgggcaacagaagcctgagcgacgtggcccaggcccaggagctgtgcggcggccccgtgcccggcgaggcccccaacggccagggctgcctgcaccccggcgaccccagactgctgaccagctag

SEQ ID NO: 88225 - protein, 1323 aa, Artificial Sequence
  derived and/or modified sequence
MEDGGLTAFEEDQRCLSQSLPLPVSAEGPAAQTTAEPSRSFSSAHRHLSRRNGLSRLCQSRTALSEDRWSSYCLSSLAAQNICTSKLHCPAAPEHTDPSEPRGSVSCCSLLRGLSSGWSSPLLPAPVCNPNKAIFTVDAKTTEILVANDKACGLLGYSSQDLIGQKLTQFFLRSDSDVVEALSEEHMEADGHAAVVFGTVVDIISRSGEKIPVSVWMKRMRQERRLCCVVVLEPVERVSTWVAFQSDGTVTSCDSLFAHLHGYVSGEDVAGQHITDLIPSVQLPPSGQHIPKNLKIQRSVGRARDGTTFPLSLKLKSQPSSEEATTGEAAPVSGYRASVWVFCTISGLITLLPDGTIHGINHSFALTLFGYGKTELLGKNITFLIPGFYSYMDLAYNSSLQLPDLASCLDVGNESGCGERTLDPWQGQDPAEGGQDPRINVVLAGGHVVPRDEIRKLMESQDIFTGTQTELIAGGQLLSCLSPQPAPGVDNVPEGSLPVHGEQALPKDQQITALGREEPVAIESPGQDLLGESRSEPVDVKPFASCEDSEAPVPAEDGGSDAGMCGLCQKAQLERMGVSGPSGSDLWAGAAVAKPQAKGQLAGGSLLMHCPCYGSEWGLWWRSQDLAPSPSGMAGLSFGTPTLDEPWLGVENDREELQTCLIKEQLSQLSLAGALDVPHAELVPTECQAVTAPVSSCDLGGRDLCGGCTGSSSACYALATDLPGGLEAVEAQEVDVNSFSWNLKELFFSDQTDQTSSNCSCATSELRETPSSLAVGSDPDVGSLQEQGSCVLDDRELLLLTGTCVDLGQGRRFRESCVGHDPTEPLEVCLVSSEHYAASDRESPGHVPSTLDAGPEDTCPSAEEPRLNVQVTSTPVIVMRGAAGLQREIQEGAYSGSCYHRDGLRLSIQFEVRRVELQGPTPLFCCWLVKDLLHSQRDSAARTRLFLASLPGSTHSTAAELTGPSLVEVLRARPWFEEPPKAVELEGLAACEGEYSQKYSTMSPLGSGAFGFVWTAVDKEKNKEVVVKFIKKEKVLEDCWIEDPKLGKVTLEIAILSRVEHANIIKVLDIFENQGFFQLVMEKHGSGLDLFAFIDRHPRLDEPLASYIFRQLVSAVGYLRLKDIIHRDIKDENIVIAEDFTIKLIDFGSAAYLERGKLFYTFCGTIEYCAPEVLMGNPYRGPELEMWSLGVTLYTLVFEENPFCELEETVEAAIHPPYLVSKELMSLVSGLLQPVPERRTTLEKLVTDPWVTQPVNLADYTWEEVFRVNKPESGVLSAASLEMGNRSLSDVAQAQELCGGPVPGEAPNGQGCLHPGDPRLLTS

SEQ ID NO: 88226 - protein, 125 aa, Artificial Sequence
  derived and/or modified sequence
MEDGGLTAFEEDQRCLSQSLPLPVSAEGPAAQTTAEPSRSFSSAHRHLSRRNGLSRLCQSRTALSEDRWSSYCLSSLAAQNICTSKLHCPAAPEHTDPSEPRGSVSCCSLLRGLSSGWSSPLLPA

SEQ ID NO: 88227 - DNA, 3972 bp, Artificial Sequence
  derived and/or modified sequence
atggaggacggcggcctgaccgccttcgaggaggaccagagatgcctgagccagagcctgcccctgcccgtgagcgccgagggccccgccgcccagaccaccgccgagcccagcagaagcttcagcagcgcccacagacacctgagcagaagaaacggcctgagcagactgtgccagagcagaaccgccctgagcgaggacagatggagcagctactgcctgagcagcctggccgcccagaacatctgcaccagcaagctgcactgccccgccgcccccgagcacaccgaccccagcgagcccagaggcagcgtgagctgctgcagcctgctgagaggcctgagcagcggctggagcagccccctgctgcccgcccccgtgtgcaaccccaacaaggccatcttcaccgtggacgccaagaccaccgagatcctggtggccaacgacaaggcctgcggcctgctgggctacagcagccaggacctgatcggccagaagctgacccagttcttcctgagaagcgacagcgacgtggtggaggccctgagcgaggagcacatggaggccgacggccacgccgccgtggtgttcggcaccgtggtggacatcatcagcagaagcggcgagaagatccccgtgagcgtgtggatgaagagaatgagacaggagagaagactgtgctgcgtggtggtgctggagcccgtggagagagtgagcacctgggtggccttccagagcgacggcaccgtgaccagctgcgacagcctgttcgcccacctgcacggctacgtgagcggcgaggacgtggccggccagcacatcaccgacctgatccccagcgtgcagctgccccccagcggccagcacatccccaagaacctgaagatccagagaagcgtgggcagagccagagacggcaccaccttccccctgagcctgaagctgaagagccagcccagcagcgaggaggccaccaccggcgaggccgcccccgtgagcggctacagagccagcgtgtgggtgttctgcaccatcagcggcctgatcaccctgctgcccgacggcaccatccacggcatcaaccacagcttcgccctgaccctgttcggctacggcaagaccgagctgctgggcaagaacatcaccttcctgatccccggcttctacagctacatggacctggcctacaacagcagcctgcagctgcccgacctggccagctgcctggacgtgggcaacgagagcggctgcggcgagagaaccctggacccctggcagggccaggaccccgccgagggcggccaggaccccagaatcaacgtggtgctggccggcggccacgtggtgcccagagacgagatcagaaagctgatggagagccaggacatcttcaccggcacccagaccgagctgatcgccggcggccagctgctgagctgcctgagcccccagcccgcccccggcgtggacaacgtgcccgagggcagcctgcccgtgcacggcgagcaggccctgcccaaggaccagcagatcaccgccctgggcagagaggagcccgtggccatcgagagccccggccaggacctgctgggcgagagcagaagcgagcccgtggacgtgaagcccttcgccagctgcgaggacagcgaggcccccgtgcccgccgaggacggcggcagcgacgccggcatgtgcggcctgtgccagaaggcccagctggagagaatgggcgtgagcggccccagcggcagcgacctgtgggccggcgccgccgtggccaagccccaggccaagggccagctggccggcggcagcctgctgatgcactgcccctgctacggcagcgagtggggcctgtggtggagaagccaggacctggcccccagccccagcggcatggccggcctgagcttcggcacccccaccctggacgagccctggctgggcgtggagaacgacagagaggagctgcagacctgcctgatcaaggagcagctgagccagctgagcctggccggcgccctggacgtgccccacgccgagctggtgcccaccgagtgccaggccgtgaccgcccccgtgagcagctgcgacctgggcggcagagacctgtgcggcggctgcaccggcagcagcagcgcctgctacgccctggccaccgacctgcccggcggcctggaggccgtggaggcccaggaggtggacgtgaacagcttcagctggaacctgaaggagctgttcttcagcgaccagaccgaccagaccagcagcaactgcagctgcgccaccagcgagctgagagagacccccagcagcctggccgtgggcagcgaccccgacgtgggcagcctgcaggagcagggcagctgcgtgctggacgacagagagctgctgctgctgaccggcacctgcgtggacctgggccagggcagaagattcagagagagctgcgtgggccacgaccccaccgagcccctggaggtgtgcctggtgagcagcgagcactacgccgccagcgacagagagagccccggccacgtgcccagcaccctggacgccggccccgaggacacctgccccagcgccgaggagcccagactgaacgtgcaggtgaccagcacccccgtgatcgtgatgagaggcgccgccggcctgcagagagagatccaggagggcgcctacagcggcagctgctaccacagagacggcctgagactgagcatccagttcgaggtgagaagagtggagctgcagggccccacccccctgttctgctgctggctggtgaaggacctgctgcacagccagagagacagcgccgccagaaccagactgttcctggccagcctgcccggcagcacccacagcaccgccgccgagctgaccggccccagcctggtggaggtgctgagagccagaccctggttcgaggagccccccaaggccgtggagctggagggcctggccgcctgcgagggcgagtacagccagaagtacagcaccatgagccccctgggcagcggcgccttcggcttcgtgtggaccgccgtggacaaggagaagaacaaggaggtggtggtgaagttcatcaagaaggagaaggtgctggaggactgctggatcgaggaccccaagctgggcaaggtgaccctggagatcgccatcctgagcagagtggagcacgccaacatcatcaaggtgctggacatcttcgagaaccagggcttcttccagctggtgatggagaagcacggcagcggcctggacctgttcgccttcatcgacagacaccccagactggacgagcccctggccagctacatcttcagacagctggtgagcgccgtgggctacctgagactgaaggacatcatccacagagacatcaaggacgagaacatcgtgatcgccgaggacttcaccatcaagctgatcgacttcggcagcgccgcctacctggagagaggcaagctgttctacaccttctgcggcaccatcgagtactgcgcccccgaggtgctgatgggcaacccctacagaggccccgagctggagatgtggagcctgggcgtgaccctgtacaccctggtgttcgaggagaaccccttctgcgagctggaggagaccgtggaggccgccatccaccccccctacctggtgagcaaggagctgatgagcctggtgagcggcctgctgcagcccgtgcccgagagaagaaccaccctggagaagctggtgaccgacccctgggtgacccagcccgtgaacctggccgactacacctgggaggaggtgttcagagtgaacaagcccgagagcggcgtgctgagcgccgccagcctggagatgggcaacagaagcctgagcgacgtggcccaggcccaggagctgtgcggcggccccgtgcccggcgaggcccccaacggccagggctgcctgcaccccggcgaccccagactgctgaccagctag

SEQ ID NO: 88228 - DNA, 3972 bp, Artificial Sequence
  derived and/or modified sequence
atggaagacggcggtcttactgcttttgaagaggatcagagatgcctttcacagagtctgcctctccctgtatcggccgagggacctgccgctcagacaactgctgagccctccaggtcattttcatcagctcacagacacctctcccgccgcaatggccttagtcgtctgtgtcaaagccgcaccgcgctatcagaggataggtggtcatcctactgtctgagctcccttgccgcccagaacatctgcacctctaagttgcattgccccgcagcacctgagcacacagacccatctgagcctcggggatctgtcagttgctgtagtctccttagggggctgtctagtgggtggtcttccccccttctgccagccccggtgtgcaatcccaacaaagccatctttactgtcgacgccaaaaccactgaaatcctggtagctaacgataaggcttgcggcttgctgggttacagcagccaagacctcatcgggcagaagctaacccaattctttctgcgcagcgacagcgatgtcgttgaagcactctcagaagaacacatggaagctgacggccacgcggctgtggtattcggtaccgtggtggacattatcagccgttcaggagaaaagataccagtgtccgtgtggatgaagagaatgaggcaggagcgacggctgtgctgcgtggtggtccttgagccagtggaacgggtatctacctgggtcgctttccagtctgacgggactgttacttcctgtgattccctttttgctcatctccatgggtacgtgagtggtgaggatgtggccggtcagcacataacagacctgattcctagcgtgcagctaccccccagtggccagcacatccctaagaatttgaagatccagcgtagtgtcgggcgtgctcgtgatggtactacttttcccctgagccttaaattaaagagtcagcccagcagcgaggaagctaccaccggagaagccgcccctgtgagcggttatcgggcatccgtttgggtgttttgcactatcagtggcctgataacactgctcccggatgggacaatccacggaattaatcactcgtttgctcttaccctgttcggatatgggaaaaccgagctgctgggcaaaaacattacttttctgatccccgggttctatagttatatggacctggcctacaactcttctctgcaactgcccgatttagcatcttgtctcgatgttggcaatgaaagcggttgcggcgagcggactctggacccctggcagggacaagacccagccgagggtgggcaggacccacggatcaatgtcgtactagctggcggacatgtggtccctagggacgaaatcagaaaactcatggagtcacaagatattttcacaggaacacagacagagctcatagcaggtggtcaactactgagctgcttatcaccacaacccgctccaggcgtggataacgtcccagagggctctttaccagtgcacggtgagcaagctcttcccaaggatcagcaaatcacagcgcttgggcgagaagagcccgtggccatcgaatcaccggggcaggatctgcttggagagagtcggtctgaacccgttgacgttaaaccattcgctagctgcgaggactcagaggctcctgtgcccgctgaagacggcggctctgatgccggcatgtgtggcttgtgtcagaaagcccagcttgaaaggatgggtgtaagcggaccctctggctccgacctgtgggccggagcagcagtggcgaagccgcaggctaagggtcagctggcaggtggcagtctattgatgcactgcccatgttatggctcagaatggggtctgtggtggcgtagccaagatctggccccctctccctctggaatggctggtctgagtttcgggacccccaccctggacgaaccctggcttggcgtggaaaacgatagagaggagcttcagacttgcctcatcaaggagcagttgtcccagctgtctctcgccggcgccctggacgtgcctcacgcagaactcgttcctaccgagtgtcaggccgtgactgctcctgtgtccagctgcgacctgggaggacgtgatctatgtggtgggtgcaccggctcctcctccgcctgctacgcactagccacagatttgcctggcggactggaggctgtagaggctcaagaggtagatgtcaattccttcagctggaatctgaaggagctcttcttttccgaccagaccgatcagactagtagcaattgctcatgcgccacatctgaactgagagagaccccatcctccttggccgttggatctgacccagacgtcgggtccttgcaggagcaagggtcttgcgtgctggacgatagggaattgttactcctgacgggtacctgcgtagacctgggtcagggcagacgtttccgagagtcctgcgttggtcatgaccccaccgaacctttggaagtgtgcctagtgtcttccgaacattacgcggcctctgacagggaatcccccggccacgtgccttccactctcgatgctgggcctgaagatacctgtccttcagcggaggaacctcgcttgaatgtgcaggtcacttctacaccagttattgtaatgaggggagcagcgggtctccagcgtgagattcaggagggcgcatactccggctcctgctaccatcgggacgggctgaggcttagcattcagttcgaagtgcgccgggtagaacttcaaggccccacccccctgttctgctgttggcttgtgaaggacttgctccactcccagagagacagtgcagcccgcacccgtctgtttctcgccagcctgcccggcagcacccactccaccgctgccgagctcacgggacctagtctagtcgaagtgctccgagcacggccctggtttgaggagcctcccaaagcagtagaattggagggtctcgctgcctgcgagggcgagtactcccaaaagtactccaccatgtctccactcggcagcggggcattcggcttcgtgtggaccgcggtggacaaggagaagaacaaggaggtcgtcgtcaaattcataaaaaaggagaaagtactggaagattgttggatcgaggatcccaagttaggcaaggtgacgttagaaatagcaattctctccagggtagaacacgccaacatcatcaaagtcctggacatctttgaaaaccaagggttcttccaactcgtgatggaaaaacatgggagcggcttagatctttttgccttcattgatcggcacccccgactggacgaaccacttgcttcctatattttccgacagctggtgtctgcagtcggatatctgcgtctgaaagacataatacacagggacattaaggacgaaaacatcgtgattgcagaagactttacaattaagctgattgatttcgggtccgcagcatacttggagcgtgggaagctgttttacacattctgtgggaccattgagtactgcgcccctgaggtgctgatgggaaacccatacagaggtcctgagctagaaatgtggagcctgggagtcaccctatacactctggtttttgaggagaacccattttgcgagctcgaagagacagtcgaggccgctatacatccaccttacctagtatctaaggaacttatgtctcttgtcagcggcttactgcagcctgttccagaaagacgaaccaccctagagaagcttgtgaccgatccctgggttactcagccagttaatctcgccgactacacctgggaggaagtcttcagggtgaacaaacccgaatccggcgtcttgagcgctgcaagcttagaaatggggaaccggagtctttcagacgtggcacaggcccaagagctatgtggaggccccgttcctggcgaggcacctaatggccaagggtgcctccacccgggcgatcctcgactcttaaccagctag

SEQ ID NO: 88229 - DNA, 3972 bp, Artificial Sequence
  derived and/or modified sequence
atggaggatggcggcctgacagcctttgaggaggaccagcgctgcctgagccagagcctgcccctgcctgtgtctgctgagggccctgctgcccagaccacagctgagcccagccgctccttcagcagcgcccaccgccacctgagcagaagaaatggcctgagccggctgtgccagagcaggacagccctgtctgaggaccgctggagcagctactgcctgagcagcctggccgcccagaacatctgcaccagcaagctgcactgcccagctgcccctgagcacacagaccccagcgagccccggggctctgtgtcctgctgcagcctgctgcggggcctgagcagcggctggagcagccccctgctgcctgcccctgtgtgcaaccccaacaaggccatcttcaccgtggatgccaagaccacagagatcctggtggccaatgacaaggcctgtggcctgctgggctacagcagccaggacctgattggccagaagctgacccagttcttcctgcggagtgacagtgatgtggtggaggccctgtctgaggagcacatggaggctgatggccatgctgctgtggtgtttggaacagtggtggacatcatcagccgctctggagagaagatccctgtgtctgtgtggatgaagaggatgaggcaggagcggcggctgtgctgcgtggtggtgctggagcctgtggagcgggtgtccacctgggtggccttccagagtgatggcaccgtgaccagctgtgacagcctgtttgcccacctgcacggctacgtgtctggagaagatgtggccggccagcacatcacagacctgatccccagcgtgcagctgccccccagcggccagcacatccccaagaacctgaagatccagaggtctgtgggccgggccagagatggcaccaccttccccctgagcctgaagctgaagagccagcccagcagcgaggaggccaccaccggggaggccgcccctgtgtctggctaccgggcctctgtgtgggtgttctgcaccatcagcggcctcatcaccctgctgcctgatggcaccatccacggcatcaaccacagctttgccctgaccctgtttggctacggcaagacagagctgctgggcaagaacatcaccttcctgatccctggcttctacagctacatggacctggcctacaacagcagcctgcagctgcctgacctggccagctgcctggatgtgggcaatgaaagtggctgtggggagaggaccctggacccctggcagggccaggaccctgctgagggcggccaggacccccgcatcaacgtggtgctggccggcggccacgtggtgcccagagatgagatcaggaagctgatggagagccaggacatcttcaccggcacccagacagagctgattgctgggggccagctgctgagctgcctgagcccccagcctgcccctggggtggacaacgtgcctgagggcagcctgcctgtgcacggggagcaggccctgcccaaggaccagcagatcacagccctgggccgggaggagcctgtggccatcgagagccctggccaggacctgctgggggagagccgctctgagcctgtggatgtgaagccctttgccagctgtgaagattctgaggcccctgtgcctgcagaagatggcggcagtgatgctggcatgtgtggcctgtgccagaaggcccagctggagaggatgggcgtgtctggccccagcggcagtgacctgtgggccggggctgctgtggccaagccccaggccaagggccagctggccggcggcagcctgctgatgcactgcccctgctacggcagcgagtggggcctgtggtggaggagccaggacctggcccccagccccagcggcatggccggcctgagctttggcacccccaccctggatgagccctggctgggcgtggagaatgaccgggaggagctgcagacctgcctgatcaaggagcagctgagccagctgagcctggccggggccctggatgtgccccacgccgagctggtgcccacagagtgccaggccgtgacagcccctgtgagcagctgtgacctgggcggccgggacctgtgtggcggctgcaccggcagcagcagcgcctgctacgccctggccacagacctgcccggcggcctggaggccgtggaggcccaggaggtggatgtgaacagcttctcctggaacctgaaggagctgttcttcagtgaccagacagaccagaccagcagcaactgcagctgtgccaccagcgagctgcgggagacccccagcagcctggccgtgggcagtgaccctgatgtgggcagcctgcaggagcagggcagctgtgtgctggatgaccgggagctgctgctgctgaccggcacctgtgtggacctgggccagggccgccgcttccgggagagctgtgtgggccatgaccccacagagcccctggaggtgtgcctggtgtcctctgagcactatgctgccagtgaccgggagagccctggccacgtgcccagcaccctggatgctggccctgaggacacctgccccagcgctgaggagccccggctgaatgtgcaggtgaccagcacccctgtgattgtgatgagaggagctgctggcctgcagcgggagatccaggagggcgcctacagcggcagctgctaccacagagatggcctgcggctgagcatccagtttgaggtgagaagagtggagctgcagggccccacccccctcttctgctgctggctggtgaaggacctgctgcacagccagagggacagcgctgcccggaccaggctcttcctggccagcctgcccggcagcacccacagcacagctgctgagctgaccggccccagcctggtggaggtgctgcgggcccggccctggtttgaggagccccccaaggctgtggagctggagggcctggccgcctgtgagggggagtacagccagaagtacagcaccatgagccccctgggcagcggggccttcggctttgtgtggacagctgtggacaaggagaagaacaaggaggtggtggtgaagttcatcaagaaggagaaggtgctggaggactgctggattgaggaccccaagctgggcaaggtgaccctggagatcgccatcctgagccgggtggagcacgccaacatcatcaaggtgctggacatctttgagaaccagggcttcttccagctggtgatggagaagcacggcagcggcctggacctgtttgccttcatcgacagacacccccggctggatgagcccctggccagctacatcttccggcagctggtgtctgctgtgggctacctgcggctgaaggacatcatccaccgggacatcaaggatgagaacatcgtgattgctgaggacttcaccatcaagctgattgactttggatctgctgcctacctggagcggggcaagctgttctacaccttctgtggcaccatcgagtactgtgcccctgaggtgctgatgggcaacccctaccggggccctgagctggagatgtggagcctgggcgtgaccctgtacaccctggtgtttgaggagaaccccttctgtgagctggaggagaccgtggaggccgccatccaccccccctacctggtgtccaaggagctgatgagcctggtgtctggcctgctgcagcctgtgcctgagaggaggaccaccctggagaagctggtgacagacccctgggtgacccagcctgtgaacctggccgactacacctgggaggaggtgttccgggtgaacaagccagagagcggcgtgctgtctgctgccagcctggagatgggcaacagaagcctgagtgatgtggcccaggcccaggagctgtgtggcggccctgtgcctggagaggcccccaacggccagggctgcctgcaccctggggacccccggctgctgaccagctag

SEQ ID NO: 88230 - DNA, 3972 bp, Artificial Sequence
  derived and/or modified sequence
atggaggacggcggcctgaccgccttcgaggaggaccagcggtgcctgagccaatccctcccacttcctgtctccgccgaaggacccgcagcacagaccacagctgagccttctcgatcttttagcagtgctcatcggcaccttagccgaagaaacggactttcgagactgtgccagtccaggacagccctttctgaggaccgctggtctagctactgcttgtccagccttgcagcacagaacatctgtacatcgaaattacactgtcccgcggcaccagagcatacggatccttccgaaccacggggatcagtttcatgttgctccctgctacggggcctcagtagcggatggtcttcgccactgctgccagcgccggtttgcaatcccaacaaggcaatcttcaccgtggatgccaagactacagaaatcctggtggccaatgacaaggcttgtggactactgggttactcatctcaggatctgattggacagaaactgacccaattctttctgagatcggatagcgatgttgtcgaggccctgagtgaggagcatatggaagctgacgggcacgcagcggttgtattcgggactgttgtggacatcatcagtcggtctggggaaaaaattccagtgagcgtatggatgaaaagaatgcgccaggagcgcagactttgttgtgttgtggtcttggaaccagttgagcgggtatctacctgggtggctttccagagtgatggcaccgtgacatcctgcgattccttgttcgcccatctccatggctatgtatcgggtgaggacgtggctgggcagcatatcactgatctaatcccatccgtccaactgccgccatctgggcagcatattccaaagaatctgaaaattcagaggtcagtcggccgcgcacgggatggaacgacattccctctctccctgaaactgaaatcccagccgagttctgaggaagcgactactggcgaggcagctccggtatccggatatcgcgcatctgtctgggtgttctgtactatcagcgggttaattaccttgctgccagacgggactattcacggcatcaaccacagtttcgctctgaccctgtttggctatggcaagacggaactccttggcaaaaacatcacttttctgatccctggcttctacagctatatggacctcgcttataactctagcttacagcttcccgatctggcttcatgccttgacgtgggcaatgagagcggctgtggagaacggacgctcgacccttggcagggccaggaccccgccgaaggcggccaggaccccaggatcaacgttgttttggccggtggtcatgtagtcccaagggacgagatacgaaagctaatggagagccaagacatattcacaggcactcagaccgaactgatagccggcggccagctgttgtcatgcttatccccacagcccgcacctggcgtggataacgtcccagaggggtctcttccagtgcatggtgaacaagccctgcctaaggaccagcagattaccgccctcggaagagaggaacccgtcgctatagaaagcccaggccaggacctcctgggagagagtcgtagtgagcctgtcgacgttaaacccttcgcgtcatgtgaagatagcgaagcacctgtgccggccgaggacggaggcagtgatgcagggatgtgtgggctgtgccagaaagctcagcttgaacgcatgggggtcagtggacccagcggttccgacttgtgggccggggctgctgtcgcgaagcctcaagcaaaaggccaactggctggtggctctctgcttatgcattgtccctgttacggtagcgagtgggggctgtggtggcgtagccaggacttggccccttcgccaagtggaatggctggcttgtcgtttggcacgcctactctggatgagccatggctgggggtggagaatgatcgggaggaactgcagacctgcctgatcaaggaacagctgagccaactgtctttagccggggcattggacgttccgcatgcagagctcgttcccaccgaatgccaagctgtcacagcgccggtgtcatcatgtgacctcggggggcgagacctgtgtgggggatgcaccggatcgagctctgcctgctacgccctggccaccgatctgcccgggggcctggaagctgtggaagctcaggaagtggacgttaatagtttttcttggaacttgaaagagctgtttttttctgatcagactgatcagaccagctcaaactgctcctgcgctactagcgagttaagggagacaccttccagcctcgctgttgggtctgaccccgacgttggttcactgcaagagcaaggcagctgcgtcctcgatgaccgagaactgctcctgctcacaggtacgtgcgtcgacctcgggcagggccggcgcttccgcgaaagttgcgtcggacacgacccaactgaaccactggaagtatgtctggtgtccagtgagcattatgccgctagtgatagagagagcccaggacatgtcccctctactctggatgccggtcctgaggacacttgccctagcgctgaggagccccgtttaaatgttcaggtcacctcaacacccgtgatcgtcatgagaggcgccgctggtcttcagagagagatccaggagggcgcctacagcggaagctgctaccacagagacggactgcgcttgtccattcagttcgaggtgcgaagagtggagctgcagggtcccacccccctgttctgttgttggcttgttaaagatctcctgcatagccaaagggattctgccgcccgcaccaggctgttccttgctagcttaccaggctcgactcactccaccgccgcggaactaacagggccgtcactggttgaggtgctccgtgccagaccttggttcgaggaaccacccaaagctgtggagttggagggcctggccgcatgcgagggggaatacagccaaaaatactcaacaatgtctccacttgggtccggcgcctttggattcgtgtggaccgcagtggataaggaaaaaaacaaggaggtagtggtcaaatttatcaagaaagaaaaagtgcttgaagactgttggattgaggaccctaagctgggaaaagtgactctcgaaatcgcaatcttgagtagagttgagcatgcaaacattataaaggtcctggatatcttcgaaaaccagggctttttccagctggtcatggagaagcacggctctggcctggacttgtttgcttttattgaccgtcatccccgcttagacgagcccctggcgtcatatatcttccgccagctggtgagtgcagtgggctatctgcgactgaaggacattattcaccgggacattaaggatgagaacatcgtcattgctgaagacttcactatcaagctcattgattttggatctgctgcttacctcgagcgcggtaagttgttctatacattttgcggcacaatcgagtattgcgctcccgaagttttgatgggcaacccatatagaggccctgaactggagatgtggtcactgggggtgaccctgtatacgctggtgttcgaagagaacccgttttgtgaattagaggagactgtcgaagcggcgatccatccaccttatctcgtatcaaaggagctcatgagcctggtgtctggattgctgcagcccgtcccagagcgccggacgaccctggagaagttggttaccgatccttgggttactcagcccgtcaacttagccgattatacatgggaagaggtgttccgagtcaacaagccggagtccggagtcctttcagccgccagcctggaaatgggcaataggtcacttagtgacgtcgcccaggcccaggagctctgcggtggccctgtgccgggcgaagcccccaacggacaagggtgtctgcaccccggggaccctagacttctgactagctag

SEQ ID NO: 88231 - DNA, 3972 bp, Artificial Sequence
  derived and/or modified sequence
atggaagatgggggattaaccgcctttgaggaggaccagaggtgtttgtcccagtccctcccgctgcctgtgtctgccgaaggccctgccgcacagacaacagcggaaccgagtcgcagttttagcagcgcccacaggcacttgtcacggcgtaacggcttgtcccgcctctgccagtctcgaactgccctctcagaggatcggtggtcttcctattgcctatcttcactggccgcacaaaatatctgcactagcaaacttcattgccctgccgcacctgagcataccgatccttctgagcctagaggcagtgtgagctgttgctcacttctgcgaggtctgtcgtcaggctggagctctcccctcctgcctgcacctgtatgcaaccctaataaagctatattcacggtggatgctaagacgacagagatactcgtggccaatgataaagcctgtgggctgctgggatatagttctcaggatctgattgggcagaaactaactcagtttttcctgcgcagcgactcagacgtcgtcgaagctctgtctgaagagcatatggaggctgacggtcacgccgctgtggtgtttggaactgttgtggacataatttctcggtcaggagaaaagatcccagtgtctgtctggatgaaacgcatgcgccaggagaggagactgtgctgtgttgtggtactggagcctgtagagcgggtgtctacttgggtggccttccagagcgacgggaccgtcactagctgtgattctcttttcgcacatttgcacggttacgttagcggcgaggatgtagccggtcagcacattacggacctgatacccagcgtgcagctgccacctagtggccagcacattccaaaaaacttaaagattcaaaggtctgtgggcagagctagagacggtaccacttttccactgtcactcaaactgaagagccagccgagctctgaagaggctaccacaggagaggcagctcctgtttcagggtacagagcaagcgtttgggtgttctgtactatttcaggattgatcacactcctgccagacggaaccattcatgggattaatcactcgtttgccctcacattattcggctatggaaaaacagagcttttgggtaaaaacattacttttttgattccagggttctactcctacatggatctcgcatataatagcagcctgcagctgcccgatcttgctagctgcttggacgtaggtaacgagtctggctgcggggagcgcactttggacccctggcagggccaggaccctgccgaaggaggccaagatcctagaataaatgtggttctcgccggagggcacgtggtaccacgggatgaaataagaaaactgatggagtcccaggatatttttaccggaacgcaaactgagttaatcgctggcggacaactgttgtcctgcctgtccccccagcctgctccaggtgtggacaacgtccctgagggaagcctgccggtacacggcgaacaggccttgcctaaggatcaacagataaccgcgctcggccgtgaggagcctgtggccatcgagagtcccggacaggatttactcggggagtcaagaagtgaaccagttgacgtgaagccgttcgcatcctgcgaggacagcgaagccccagtgccggctgaagacggtggctctgatgctggaatgtgcgggttgtgccagaaagctcagcttgagcgaatgggtgtatctggtccgtctgggtccgatctgtgggccggtgcagctgtcgccaaacctcaggccaaggggcagcttgcaggaggaagtctgctaatgcattgtccctgctacgggagcgaatggggcttgtggtggcggtcacaagatttggccccatccccctccggaatggcaggtttatccttcggaacacctaccttagatgaaccatggttaggggtcgagaacgatcgcgaagagctccagacttgcttgatcaaagaacagctctctcagttgagcctggctggggctttagacgtgccacacgccgaacttgtcccgactgaatgtcaggccgtgacagctcctgtttcatcctgtgacctagggggaagggatctttgcgggggttgcactgggtccagcagtgcctgctacgccctggctactgacctacccggagggctggaagctgtagaagcccaggaagttgatgtcaatagcttctcctggaatctgaaggagttattcttctcagatcagacggatcagacctcgtcaaactgcagttgcgctacctccgagctcagagagactccttcctccctggcggtgggaagcgaccccgacgtggggagcctgcaagagcagggttcctgcgtgctggatgacagagaactcttgcttctgactgggacctgcgtggatcttgggcaaggtagacggttcagggaaagctgtgtgggtcatgaccctactgagcccctggaggtctgcctagtcagcagcgagcattatgctgcttctgacagggagagcccaggacatgtcccatccaccctggacgcaggtcccgaggatacatgccctagcgccgaggaacctcgccttaatgtgcaagtcaccagtacaccagtcattgttatgcggggagccgcaggtctgcagcgggaaatccaggagggcgcttatagcggatcttgttatcatcgagacggcctgaggttgtccattcaattcgaggtgcgcagggtcgagttacaggggccaacaccattattctgttgctggctggttaaggacctgttacacagccagcgcgactcggcagcaaggacccgcctgttcctcgccagcttacccggatcaacccactctaccgctgcagagctcaccggtccctctcttgtcgaagtgcttcgagccagaccatggtttgaagaaccaccgaaggctgtggaattagagggtttggctgcatgcgaaggtgagtattcacagaagtatagcacgatgtcaccccttggatccggagccttcggcttcgtttggaccgcagtcgacaaggaaaaaaataaggaagttgtggtgaagtttattaaaaaagagaaggtccttgaggactgctggatcgaagatcccaagctggggaaagtgacgctggaaatagccatcctctcccgggttgaacatgccaacattatcaaagtcctcgatatttttgaaaaccagggatttttccagctcgtgatggaaaagcatggcagcggcctggacttgttcgccttcattgataggcacccacgtttagatgagccattggcttcttacatttttcgccaactagtttccgccgtcggctatctgaggctgaaagatattatccacagggacataaaggatgagaatatagtcattgcagaggactttacaataaagttaatcgacttcgggagcgctgcttatctcgagaggggcaaattgttctacacattttgcgggacaatcgagtattgtgctccagaggtgttgatgggaaatccatatagaggacccgaactggaaatgtggagcctaggtgttactttatacacattggtctttgaagagaatcctttttgtgagctcgaagagaccgtggaagcagctatacacccaccttatctcgtgagtaaggaactcatgtccttggttagtgggctgttgcagcctgtacccgagaggcggaccaccctggagaagctcgttacagatccctgggtgactcagccagtgaatctggccgactatacttgggaggaggtgttcagggtgaataagccggagtctggagtactttcagctgcctcactagagatgggcaacaggagcctcagtgacgtcgcccaggcgcaggaattatgcggtggccctgtgcccggagaagccccaaatggacaggggtgccttcaccctggagaccccaggttactcacttcttag

SEQ ID NO: 88232 - DNA, 3972 bp, Artificial Sequence
  derived and/or modified sequence
atggaggatggagggttgaccgcctttgaggaagaccaacggtgcctctcacaatctctgccactgcccgttagcgccgaggggcccgctgcgcaaaccaccgctgaacctagcagatccttcagcagtgcccacaggcacctctctcgacggaatggattgagccgcttgtgccagtcacgcacggctctgtcagaggataggtggagctcatattgcttgagttcattagccgctcagaacatatgcacctccaaactccactgtccagcagcccccgagcacaccgaccccagcgaaccaagagggtccgttagctgttgcagtctgctccggggcttgtcttcaggatggagtagcccactgctgcctgcgcccgtgtgtaacccgaataaagccattttcaccgtggacgcgaaaaccactgaaattctcgtggcaaatgacaaggcttgcggcctgctcggatattcaagtcaggatttgattggtcagaaactgactcagttttttctcaggtctgattccgacgtggttgaggcactgtcggaggaacacatggaagcagatggccatgctgcggtcgtctttggcaccgtggtggacattatttccaggagcggtgagaagatccctgtgagtgtgtggatgaagaggatgaggcaagagaggaggctttgttgtgttgtagtgctggagccagttgagagagtctcaacctgggtcgcttttcaaagcgacggaactgttacgtcttgcgattctctgtttgcccacttacatgggtacgtgagtggggaggatgtggctggacagcatataacagacctgatcccaagcgtgcaactcccgccatcggggcaacatatcccaaaaaatttgaaaatccagaggtccgtggggcgagccagagacggtactacattccccctgtccctcaagctcaagtcccagcccagttccgaggaggcaacaacgggcgaagcggcccccgtgagcgggtaccgggcttccgtgtgggtgttttgcacaatctccggccttattacactgctgcctgacggcaccatccatggaatcaaccattcgtttgccctgacactgttcgggtatggaaaaactgagctcctggggaaaaatataacattcttgatacccgggttctactcctacatggatttggcctacaactcctccctgcagctacctgacctggcctcctgcctggacgttggtaatgaaagtgggtgtggtgaaaggaccttggacccatggcaggggcaagatcctgccgagggagggcaagatccaagaatcaatgtggtactggccggagggcacgtagttccaagagacgaaatcaggaagttgatggagtctcaagatatcttcactggaacccagaccgaactcattgcgggcggccaacttctttcttgtttgtctccccagcctgcccccggcgtggataatgtgcccgaagggagcctgccagttcacggggaacaagccttgcccaaggaccagcaaatcacagccctaggcagggaggaaccggtggctatcgaatctcctgggcaggacttactcggtgagagtcgatccgagcccgtcgacgtgaagccatttgcgagctgtgaggacagcgaagcacccgtcccagccgaagacgggggatcggatgccggtatgtgcggcctctgtcagaaagcacagcttgagagaatgggtgtctctggtccctcaggaagcgacctgtgggctggcgctgccgtcgctaagccccaagcaaaggggcagctggccggaggtagccttctcatgcactgtccatgctatgggtccgaatggggtctttggtggagatctcaggatttagcgcctagtcctagtggcatggctggcctctctttcgggactcctacactcgatgaaccttggctgggcgtcgaaaacgacagggaggagcttcaaacttgcctgatcaaagagcagctgtcccaactatccctcgctggcgccctggacgtcccccatgctgaactggtgcccactgagtgccaggctgtgaccgcccctgtgtcctcctgtgacctcggtggtagagacttgtgtggagggtgcaccggcagctctagcgcttgttatgccttggctacagacctgccgggaggtctggaggctgtcgaggcccaggaggtagacgtcaactcgttttcgtggaacctcaaggagctgttctttagtgatcagacagatcagacctcttctaattgttcttgtgctacatccgaactgagagagaccccttccagcctcgccgtgggctctgaccctgacgtgggaagtttgcaggagcagggcagttgtgtcctggacgatagggagctgttgcttctgactgggacctgtgtggatctcggacaaggccgacgttttagggaatcctgcgttgggcacgatcccacagagccgcttgaggtgtgtttggtgtcctcagagcactacgccgcaagtgaccgagagagccctgggcacgtgcctagcacgttagatgcggggcccgaggacacctgcccgtccgcggaagagccgcggctgaacgtccaggttactagcactccggtgattgtgatgcgtggcgcagccgggctccaaagagagatccaggagggtgcctactcaggaagttgctatcaccgcgacgggcttagactatccatccaattcgaggtgcgccgggtggaactgcaaggccccacgcctctcttctgctgctggctagtgaaagacctcctccatagccagcgtgatagcgcagcccgcactagactgtttttggcctccctccccggcagtacccatagcacggccgctgaactcactgggccttcacttgtggaagtgctgcgagcacggccttggtttgaggagcctccaaaagctgtggaattggaggggctggccgcttgtgaaggtgaatattctcagaagtacagtaccatgtcacccctaggctcgggtgcttttggctttgtgtggacggccgtggacaaggagaaaaacaaagaggttgtggtcaaattcataaaaaaggagaaggtcctcgaagattgctggatagaggacccaaaactgggcaaggtgaccctcgaaattgcaatcctgagccgagttgagcacgctaacattattaaggtgctggacatctttgaaaaccagggcttttttcaacttgttatggagaaacatggatctggtttggaccttttcgcttttattgataggcacccgcgcctggatgagcctctggcttcctacatcttccgccagctagtgtcagctgtgggctatctccgtctcaaagatataatccacagggacattaaagacgaaaatatcgtcattgctgaggactttacaatcaagctaatcgacttcggcagcgccgcctatctggagaggggaaaactattctacacattctgcggtaccattgagtattgtgcgccagaggttctgatggggaacccttatcgtgggcccgaactggaaatgtggagcctgggtgtaacgctctacaccctggtgtttgaggagaaccctttctgcgaactagaggaaacagttgaagccgcaattcacccaccttacctggtgtcgaaagaacttatgagccttgtctcaggattgctgcagcccgtccctgaacggagaaccacactcgagaagctcgtgacagacccttgggtgacccaacctgtcaacttagctgattacacatgggaggaggtgttcagggtgaacaagcccgagtcaggagtgctctcagccgcctccctggagatgggaaaccgttcacttagcgacgtggcccaggcgcaggaactctgcgggggccctgtgccaggagaggcacccaatggacagggatgtttacacccgggcgatccacgtctgcttacctcatag

SEQ ID NO: 88233 - DNA, 3324 bp, Artificial Sequence
  derived and/or modified sequence
atgaagcgcatgcgtcaggaacgaagattatgttgtgtggtcgtgcttgaacccgttgagcgggtaagcacctgggtggcctttcagtccgatggcaccgttacttcctgcgattcgctcttcgctcacttacacgggtacgttagcggagaggacgtggctggccaacacattaccgatttgattcccagtgtacagctgccaccctcaggccagcacattcctaagaacttgaaaattcaacgcagtgtggggagagcccgcgatggaactacttttccattgtccctaaagctgaagtcacagcccagtagtgaggaggccactaccggggaagctgcgcccgtctcaggttaccgcgccagcgtttgggtgttttgtacaattagcggactgatcactctgctcccagacggcacaattcacggtatcaatcactcctttgccctgactttgttcggatacggcaaaactgaactgctaggcaagaacataaccttcctgattcccggattttacagctatatggatttggcctataactccagcctgcagctgccagacctcgccagctgtctcgatgtggggaatgagagcggctgtggggagaggacgttggatccatggcaaggacaagatccagccgagggtggtcaggacccacgaatcaacgtggtgctggcaggagggcacgtggtgcctagggacgagatccggaaactgatggagtcccaggacatctttaccggtacgcagacagagcttatagccggaggccaactgttgtcttgtctgtcgccgcagccagcgccaggggtggacaatgttccagaaggcagtctccccgttcatggggaacaagcactgccaaaagaccagcagattacagccctgggaagagaggaaccggttgctatcgagagccctggccaggacctgctgggggagtctcggagtgaacccgtagacgtcaaacctttcgcctcctgtgaggacagcgaggcgccagtccctgcggaggatgggggttccgatgccggcatgtgtggtctctgtcagaaggcccagctggagcggatgggggtgagcggcccatccggatccgatctatgggccggggccgctgtggctaaaccccaagcaaagggacagctggccggtgggagtctgttaatgcattgcccctgctacggctccgagtggggcctgtggtggaggtctcaagaccttgcaccctctcctagcggcatggccgggttaagtttcggaacacccactctggatgaaccctggctgggagtcgagaatgatcgggaggagcttcagacttgcctcatcaaggagcagctgagtcagctgagtctggcaggggcgctcgatgttccgcatgcagagctagtgccgacagaatgtcaggccgttactgctcctgtcagttcttgtgatctcggtgggagagacctgtgcggcggctgcaccgggagtagttccgcgtgttatgcccttgcgacggacctgcctggaggtctggaggccgttgaggcacaagaagtggacgtcaatagtttctcttggaatctcaaggaactgttcttttccgaccaaactgaccaaaccagttctaattgctcttgtgccacatccgagcttagggaaacccccagttcactggcggtcggcagcgatccagacgtgggttcgttacaggaacaagggtcttgtgtgctggacgatagagagttactgctcctgaccgggacttgtgtggacctcggacagggaaggaggtttagggaatcttgcgtggggcatgatcccactgagcctctcgaagtctgtttagtctcttccgagcactacgccgcttccgatagagagtctccgggccacgtaccgagcacgctggacgcaggccctgaggatacttgtccttctgctgaggagcctagactaaacgttcaagtaacttctacaccggtaattgtcatgaggggcgcggcagggttgcaacgtgagatccaagagggagcttatagtggatcctgttaccatagggacgggctccggctgtccatccagttcgaagtaagacgcgtagagctgcaggggcccacacccctcttctgttgttggttggttaaggacctcttacacagccaaagggactcggcagcccgtactcggttgttcctggcaagtttgccgggcagcacccactccaccgctgctgagctgacaggaccatcactcgtggaggtgctgagggcacggccatggtttgaggagccacccaaagccgtcgagctcgagggcctcgccgcttgtgaaggagaatatagtcaaaaatactcaaccatgagtccacttggaagcggtgccttcggttttgtctggaccgctgtcgacaaagagaagaataaggaggtcgtcgtcaagttcatcaagaaagagaaggtgcttgaagactgctggatagaggatcccaaactggggaaagtgacccttgagattgcaattcttagtcgcgtcgagcatgcaaacataataaaggtgctggatatattcgagaaccagggtttttttcagctagtcatggagaaacacggttccggcttggacctgttcgcctttatcgatcgacatccacgactggacgaacccttggcttcatatatcttccgccagctggtatcagctgtggggtatctgagactcaaggatataatccatcgcgacatcaaagacgagaatatagtaattgctgaggacttcaccattaaactaatcgactttggatccgccgcttacctggaacgggggaagctgttttatacattttgcggaactatcgaatattgtgctcccgaggtgctgatgggcaatccatatcgaggaccagagctagaaatgtggtcactcggcgtcacgctgtacacgcttgtgtttgaggagaacccgttctgcgaactggaggagactgtggaggcagcgatccatccaccctatttagtatcaaaggagctgatgtccctagtgagcggcctccttcagcccgtgccagagcgccgtaccactctggagaagctggtgacagatccctgggtgactcagcccgtaaatctagcggattacacttgggaagaagttttcagagtcaacaaacccgaaagcggcgtgctctctgcggccagtttggaaatgggcaataggtccctatcggatgttgctcaggcacaggagctgtgtgggggtcctgtacctggtgaggcacctaatggccagggctgcctccaccctggtgatccacgcttactgacatcctag

SEQ ID NO: 88234 - DNA, 3324 bp, Artificial Sequence
  derived and/or modified sequence
atgaagaggatgaggcaggagcggcggctgtgctgcgtggtggtgctggagcctgtggagcgggtgtccacctgggtggccttccagagtgatggcaccgtgaccagctgtgacagcctgtttgcccacctgcacggctacgtgtctggagaagatgtggccggccagcacatcacagacctgatccccagcgtgcagctgccccccagcggccagcacatccccaagaacctgaagatccagaggtctgtgggccgggccagagatggcaccaccttccccctgagcctgaagctgaagagccagcccagcagcgaggaggccaccaccggggaggccgcccctgtgtctggctaccgggcctctgtgtgggtgttctgcaccatcagcggcctcatcaccctgctgcctgatggcaccatccacggcatcaaccacagctttgccctgaccctgtttggctacggcaagacagagctgctgggcaagaacatcaccttcctgatccctggcttctacagctacatggacctggcctacaacagcagcctgcagctgcctgacctggccagctgcctggatgtgggcaatgaaagtggctgtggggagaggaccctggacccctggcagggccaggaccctgctgagggcggccaggacccccgcatcaacgtggtgctggccggcggccacgtggtgcccagagatgagatcaggaagctgatggagagccaggacatcttcaccggcacccagacagagctgattgctgggggccagctgctgagctgcctgagcccccagcctgcccctggggtggacaacgtgcctgagggcagcctgcctgtgcacggggagcaggccctgcccaaggaccagcagatcacagccctgggccgggaggagcctgtggccatcgagagccctggccaggacctgctgggggagagccgctctgagcctgtggatgtgaagccctttgccagctgtgaagattctgaggcccctgtgcctgcagaagatggcggcagtgatgctggcatgtgtggcctgtgccagaaggcccagctggagaggatgggcgtgtctggccccagcggcagtgacctgtgggccggggctgctgtggccaagccccaggccaagggccagctggccggcggcagcctgctgatgcactgcccctgctacggcagcgagtggggcctgtggtggaggagccaggacctggcccccagccccagcggcatggccggcctgagctttggcacccccaccctggatgagccctggctgggcgtggagaatgaccgggaggagctgcagacctgcctgatcaaggagcagctgagccagctgagcctggccggggccctggatgtgccccacgccgagctggtgcccacagagtgccaggccgtgacagcccctgtgagcagctgtgacctgggcggccgggacctgtgtggcggctgcaccggcagcagcagcgcctgctacgccctggccacagacctgcccggcggcctggaggccgtggaggcccaggaggtggatgtgaacagcttctcctggaacctgaaggagctgttcttcagtgaccagacagaccagaccagcagcaactgcagctgtgccaccagcgagctgcgggagacccccagcagcctggccgtgggcagtgaccctgatgtgggcagcctgcaggagcagggcagctgtgtgctggatgaccgggagctgctgctgctgaccggcacctgtgtggacctgggccagggccgccgcttccgggagagctgtgtgggccatgaccccacagagcccctggaggtgtgcctggtgtcctctgagcactatgctgccagtgaccgggagagccctggccacgtgcccagcaccctggatgctggccctgaggacacctgccccagcgctgaggagccccggctgaatgtgcaggtgaccagcacccctgtgattgtgatgagaggagctgctggcctgcagcgggagatccaggagggcgcctacagcggcagctgctaccacagagatggcctgcggctgagcatccagtttgaggtgagaagagtggagctgcagggccccacccccctcttctgctgctggctggtgaaggacctgctgcacagccagagggacagcgctgcccggaccaggctcttcctggccagcctgcccggcagcacccacagcacagctgctgagctgaccggccccagcctggtggaggtgctgcgggcccggccctggtttgaggagccccccaaggctgtggagctggagggcctggccgcctgtgagggggagtacagccagaagtacagcaccatgagccccctgggcagcggggccttcggctttgtgtggacagctgtggacaaggagaagaacaaggaggtggtggtgaagttcatcaagaaggagaaggtgctggaggactgctggattgaggaccccaagctgggcaaggtgaccctggagatcgccatcctgagccgggtggagcacgccaacatcatcaaggtgctggacatctttgagaaccagggcttcttccagctggtgatggagaagcacggcagcggcctggacctgtttgccttcatcgacagacacccccggctggatgagcccctggccagctacatcttccggcagctggtgtctgctgtgggctacctgcggctgaaggacatcatccaccgggacatcaaggatgagaacatcgtgattgctgaggacttcaccatcaagctgattgactttggatctgctgcctacctggagcggggcaagctgttctacaccttctgtggcaccatcgagtactgtgcccctgaggtgctgatgggcaacccctaccggggccctgagctggagatgtggagcctgggcgtgaccctgtacaccctggtgtttgaggagaaccccttctgtgagctggaggagaccgtggaggccgccatccaccccccctacctggtgtccaaggagctgatgagcctggtgtctggcctgctgcagcctgtgcctgagaggaggaccaccctggagaagctggtgacagacccctgggtgacccagcctgtgaacctggccgactacacctgggaggaggtgttccgggtgaacaagccagagagcggcgtgctgtctgctgccagcctggagatgggcaacagaagcctgagtgatgtggcccaggcccaggagctgtgtggcggccctgtgcctggagaggcccccaacggccagggctgcctgcaccctggggacccccggctgctgaccagctag

SEQ ID NO: 88235 - DNA, 3972 bp, Artificial Sequence
  derived and/or modified sequence
atggaggacggcggcctgaccgccttcgaggaggaccagcggtgcctgagccagtccctgcccctgcctgtgagtgccgagggtcccgctgcacagactacagccgagccatcccggtcattttctagcgcacatagacatctgagccggaggaacggcctgtcaagactgtgtcagtctagaaccgcccttagcgaagaccgatggagctcttattgcctcagttcattagccgctcagaacatctgcacgtctaaactccactgccccgcagcccccgaacacacagatcctagcgaacctcggggctcagtcagttgctgttccctgctccgaggattgtcaagcgggtggtcctccccgctattgccagcccctgtttgcaatccgaacaaggcaatcttcactgtcgatgcaaagacaaccgaaatcttggtagcaaacgataaagcttgcggcttgctgggctatagttctcaggaccttattggccaaaagttaacccagttcttcctgcgatcagactcagatgtagtggaggcccttagtgaggagcatatggaggcagatgggcatgccgcggtggtgtttggaactgtcgtcgatattatctcacgtagcggcgagaagattccagtcagtgtttggatgaagaggatgcgtcaggagaggcgactgtgctgtgtggttgtgttggagcccgtcgaacgtgtctccacatgggtggcgtttcaatctgatggcacagtgaccagctgtgactctctgtttgcacacctgcatggttatgtgtctggtgaagacgttgcaggccagcatatcacagacctcatccctagtgtccaactgccaccttctgggcagcacatacccaaaaatctgaaaatacaacggagcgtcggacgggctcgagacggtaccacttttccattgtctctcaagcttaagagccagccgtccagcgaggaggctactacgggcgaggcagcccctgtgtccggatacagagcttccgtatgggtcttttgtactatatccggacttatcactctcttacccgacgggactattcacggcattaaccattcttttgctctgactttgttcggctatggtaagacggagttgctagggaagaacataaccttcctgattccggggttttattcatacatggaccttgcctacaacagcagcctccaactacctgatctagccagctgtctcgacgtagggaatgaaagcggctgtggcgagcgcaccctcgatccatggcagggccaggatcccgccgaggggggccaagaccccagaattaatgtggtactggctgggggtcacgtggttccaagagatgagatacgcaaactcatggagtcgcaggatatcttcacaggtacacagactgagctgattgctgggggacagctgctgagctgtcttagcccacagcctgcccctggtgtagacaatgtgcccgagggctctctccctgtccatggcgagcaggctctcccaaaggatcagcaaattacagccctcggacgtgaggaacccgttgccatcgagtcgcccgggcaagatctgctcggcgaatcaaggagtgagccagtggacgttaagccattcgcctcatgcgaggacagtgaggctccagtcccggcagaagacggggggtcggatgcaggcatgtgcggactgtgtcagaaggctcagttagagagaatgggcgtatccgggccatccggctccgatttgtgggccggggccgcggttgccaagcctcaagcaaaaggtcagctagccggcggctctcttttgatgcattgtccttgctacggctccgaatggggcctttggtggcgcagccaagacctagctccttcgccaagtgggatggctggactgagcttcggcacaccgaccctggacgagccctggctgggcgttgaaaatgatcgggaagagttacagacctgtctgattaaggaacaattgtctcaattgtccctggctggtgccctcgacgtccctcacgcagagctggtgccgaccgagtgtcaggctgtcacagccccagttagtagttgcgatcttgggggacgagatctgtgtggcgggtgtacaggatcatcctccgcttgctatgccctggccacagatctgcccggaggcctggaggccgtagaggctcaagaggtggacgttaactctttttcctggaatttgaaggagctctttttttcggaccagacggatcaaacttctagtaattgcagctgtgcaacctccgagctcagggagaccccctcaagcctggctgttgggagtgacccagatgtgggcagcctgcaggagcagggttcctgcgttctggacgacagggaactgttactgttgaccggcacttgtgtggatctgggccagggaagacggtttcgggagtcttgcgtgggccacgaccctacagaacccctggaggtttgcttggtctcctctgaacactatgcggcaagtgacagggagtctcccggtcatgtccccagcaccctggatgccggccctgaggacacatgtcctagcgcagaggaaccccggctcaacgtccaggtcacttccaccccagtcatcgtgatgagaggagccgcgggtttgcagagagaaattcaggaaggcgcatactccggatcatgttaccatagagatggcttgagactctccattcaattcgaggttcgacgagtggaactccaaggcccaacgccacttttctgttgctggttggtgaaggacctcctgcactctcagagggattcagcggctcgcacaaggctgtttttagccagtctgcctggctctacgcatagcacagctgccgagcttactggcccgtcactggtggaagtcttgcgggccagaccttggtttgaagaaccccccaaagcggtagaactcgaaggcctggccgcttgtgagggagagtactcacagaagtatagtacaatgtcccccctcggctcgggcgctttcggtttcgtctggacagctgtggacaaggaaaaaaacaaggaagttgtggtgaaattcatcaagaaggaaaaggtactggaagactgctggatagaagaccccaaactggggaaggtcaccctcgaaattgcaattctgtccagagtagaacatgccaacatcattaaggttttagatatctttgagaatcagggatttttccagctcgtgatggaaaagcatggatccggcctggacttgttcgctttcattgatcgccacccacgcctcgacgagccccttgcgtcttacatatttaggcagttagtgagcgccgtgggctatcttagattgaaggatatcattcaccgcgacataaaggacgagaatatagttattgcagaggactttacaataaagctcattgattttggctctgctgcgtacctggagcgggggaagcttttctacactttctgcggtacgatcgagtactgcgcaccggaggtgctgatgggaaacccttaccgaggcccagagctggagatgtggtctctgggagtcaccctgtacacactcgtttttgaggagaacccattttgtgagctggaggagactgtagaggcagccattcaccccccttatctggtgagtaaggaattgatgagcctagtatctgggttgctgcaaccagtgcccgaacggcgcaccaccctggaaaagttagtgacagatccttgggtgacacagcccgtgaaccttgcagactacacatgggaagaggtgtttcgagttaataaaccggagagcggcgtgctatcagcagccagcctggaaatgggcaatcggagtctttcagacgttgctcaggctcaggaactttgtggaggaccagttccaggagaagctcctaacggacaggggtgtctgcaccccggggatcctagactcctgaccagctag

SEQ ID NO: 88236 - DNA, 3324 bp, Artificial Sequence
  derived and/or modified sequence
atgaagcggatgcggcaggagcggcggctgtgctgcgtggtggtgctggagcctgtggaacgagtctctacttgggttgcattccagagtgacggaacagttacctcctgcgatagcttatttgcccacctgcacggttacgtaagtggagaggatgttgccggacagcacatcaccgatttgatcccgagcgtacagctccctccgagtggacaacacattccaaaaaatctgaagattcagcggtcagtcggtcgggctagggatggcactaccttccccctgagtctgaagctcaaatcccaaccctcttctgaagaggctactacgggcgaggctgcccctgtgtccggatatagagcatccgtctgggtgttctgcacaataagtggactgattacgctgttgcccgatggcaccatccacggcatcaaccatagtttcgcgctcaccttgttcggttatgggaagactgagctgctagggaagaatattaccttcctgataccgggattctactcatatatggacctggcctataattcaagcttgcaactacctgacctggcttcctgtctggatgtgggtaatgagagcggttgcggtgagaggaccctggacccctggcagggtcaggacccagccgagggagggcaagacccaagaatcaacgtcgtacttgctggcggccacgtggtgcccagagatgaaatcagaaagttgatggagtcacaagatattttcactggaactcagaccgagctgatcgccggaggacaacttctctcctgtctctcccctcagccagcccccggtgttgataatgtacccgaggggtcattacccgtacacggagagcaagcgcttcctaaagatcagcagatcacagcccttggtagggaggagccagtcgctatcgagtcacctggacaggatctgctaggggaatctaggagtgaacccgtggatgtgaagccctttgcttcttgcgaggattccgaggccccagtgccagcagaagatggaggctccgatgcaggcatgtgcggcctctgtcaaaaggctcagctggaaaggatgggtgtgagcggcccctcaggctccgacctgtgggccggagcagctgttgccaaaccacaggcaaaaggtcaactggccggcggctccctcctgatgcattgtccgtgttatgggtctgagtggggcctttggtggcgaagccaggaccttgcaccctcgcccagtggtatggcaggactttcttttggtactcccactctggatgaaccatggctgggcgtggaaaatgacagagaggagttgcagacttgtctcatcaaggagcaactttcacaattatctctcgctggggcgctggacgtccctcatgccgaactggtgccgaccgagtgtcaggctgtgacagcgcccgtaagttcttgcgatttaggtgggagggacttgtgcggcgggtgcacaggcagcagctcggcctgctacgcattggccacagacttgcccggggggctggaagcagtggaagctcaggaggtcgatgtgaactcttttagttggaatctcaaggagctgtttttctctgaccagacagatcagacttccagtaattgctcctgtgcaacatcggagctgcgggagacgcccagttctttggccgtgggtagcgacccagatgtgggaagccttcaggagcagggatcgtgtgtgctggatgacagagaactgctcctgcttacaggaacttgcgtggatttgggccaaggaaggagattcagagagtcctgcgtgggtcacgaccctaccgaacccttggaagtgtgtctagtgtcctctgaacattacgccgcctcggacagagaaagccccgggcacgtgccctccactctggacgccggacccgaggacacatgtccctccgcggaagagccgagacttaatgtgcaagtcacttccacaccagttattgtgatgcggggagctgcagggctgcaaagggaaattcaggagggagcatatagcggttcgtgttatcacagagacggcctcagattgagtatccagttcgaggtgaggcgggtggagttgcaaggcccaactcccctattctgctgctggcttgtgaaggacctccttcattctcagagggacagcgccgccaggacgcgcttgtttttggcttcattgccaggctctactcactctaccgccgcggaactgacaggccccagcctggtggaggttttgcgcgcccgcccttggttcgaggaaccccctaaagctgtcgagctggagggcctggccgcttgtgagggggaatactcccagaagtacagtaccatgtctcccctgggcagtggagcattcggattcgtgtggactgccgttgataaggaaaaaaacaaggaggtcgtggtaaagtttatcaaaaaggaaaaggtgcttgaagattgctggatcgaggaccctaaattgggcaaggtcacgctcgaaattgccattctctcaagagtggaacatgcaaacatcatcaaggtcctggacatttttgagaaccaggggttcttccagctggttatggagaagcatggttcaggactagacctgttcgcatttatcgatagacatccacggctcgatgaacctctagccagctacatctttcgtcagctggtgtcagcggttggttatctccgcctgaaggacataatccatcgcgacattaaagatgaaaacatcgtcattgcggaggacttcactattaaattgatagactttggatcagctgcctatctggagcggggtaagctcttttacactttctgcggaaccattgagtactgtgcccccgaagttcttatgggaaatccttacagaggaccggagctcgaaatgtggtctctgggcgtgaccctctatacattggtgttcgaggaaaaccctttttgcgagctggaagagacagtcgaggccgcgatccaccctccatatctagtctcaaaagaacttatgtccctggtgagtgggttgttacagccggtgcctgaacggaggaccaccctggaaaagttagtaaccgacccgtgggtgacccagcctgtcaaccttgcagattacacctgggaggaggtgttccgggtcaataagccagagtctggagtcctgtccgctgcttctctggagatggggaaccgctcactgagcgacgtcgcacaggcccaagaattgtgcggaggacctgtgcccggcgaggctccgaacggccagggctgcctgcatccaggagacccccggcttctcacatcttag

SEQ ID NO: 88237 - DNA, 3652 bp, Artificial Sequence
  derived and/or modified sequence
gataaaagcgcggaagggctcctttccgtggtgtgtagccggcttggcgtgaccctcgcctgatccaggtggacatcatcagccgtagtggggagaagattccagtgtctgtgtggatgaagaggatgcggcaggagcgccgcctatgctgcgtggtggtcctggagcccgtggagagggtctcgacctgggtcgctttccagagcgatggcaccgtcacgtcatgtgacagtctctttgctcatcttcacgggtacgtgtctggggaggacgtggctgggcagcatatcacagacctgatcccttctgtgcagctccctccttctggccagcacatcccaaagaatctcaagattcagaggtctgttggaagagccagggacggtaccaccttccctctgagcttaaagctgaaatcccaacccagcagcgaggaggcgaccaccggtgaggcggcccctgtgagcggctaccgggcatctgtctgggtgttctgcaccatcagtggcctcatcaccctcctgccggatgggaccatccacggcatcaaccacagcttcgcgctgacactgtttggttacggaaagacggagctcctgggcaagaatatcactttcctgattcctggtttctacagctacatggaccttgcgtacaacagctcattacagctcccagacctggccagctgcctggacgtcggcaatgagagtgggtgtggggagagaaccttggacccgtggcagggccaggacccagctgaggggggccaggatccaaggattaatgtcgtgcttgctggtggccacgttgtgccccgagatgagatccggaagctgatggaaagccaagacatcttcaccgggactcagactgagctgattgctggaggccagctcctttcctgcctctcacctcagcctgctccaggggtggacaatgtcccagaaggaagcctgccagtgcacggtgaacaggcgctgcccaaggaccagcaaatcactgccttggggagagaggaacctgtggcaatagagagccccggacaggatcttctgggagaaagcaggtctgaaccagtggatgtgaagccatttgcttcctgcgaagattctgaagctccagtcccagctgaggatgggggcagtgatgctggcatgtgtggcctgtgtcagaaggcccagctagagcggatgggagtcagtggtcccagcggttcagacctttgggctggggctgccgtggccaagccccaggccaagggtcagctggcggggggcagcctcctgatgcactgcccttgctatgggagtgaatggggcttgtggtggcgaagccaggacttggcccccagcccctctgggatggcaggcctctcgtttgggacacctactctagatgagccgtggctgggagtggaaaacgaccgagaagagctgcagacctgcttgattaaggagcagctgtcccagttgagccttgcaggagccctggatgtcccccacgccgaactcgttccgacagagtgccaggctgtcaccgctcctgtgtcgtcctgcgatctgggaggcagagacctgtgcggtggctgcacgggcagctcctcagcctgctatgccttggccacggacctccctgggggcctggaagcagtggaggcccaggaggttgatgtgaattcgttttcctggaacctcaaggaactctttttcagtgaccagacagaccaaacgtcatcaaattgttcctgtgctacgtctgaactcagagagacaccctcttccttggcagtgggctccgatccagatgtaggcagtctccaggaacaggggtcgtgtgtcctggatgacagggagctgttactactgaccggcacctgtgttgaccttggccaaggccgacggttccgggagagctgtgtgggacatgatccaacagaaccgcttgaggtttgtttggtgtcctctgagcattatgcagcaagcgacagagaaagcccaggacacgttccttccacgttggatgctggccctgaggacacgtgcccatcagcagaggagccaaggctgaacgtccaggtcacctccacgcccgtgatcgtgatgcgcggggctgctggcctgcagcgggagatccaggagggtgcctactccgggagctgctaccatcgagatggcttacggctgagtatacagtttgaggtgaggcgggtggagctccagggccccacacctctgttctgctgctggctggtgaaagacctcctccacagccaacgcgactcagccgccaggacccgcctgttccttgccagcctgcccggctccacccactctaccgctgctgagctcaccggacccagcctggtggaagtgctcagagccagaccctggtttgaggagccccccaaggctgtggaactggaggggttggcggcctgtgagggcgagtactcccaaaagtacagtaccatgagcccgctgggcagtggggccttcggcttcgtgtggactgctgtggacaaggaaaaaaacaaggaggtggtggtgaagtttattaagaaggagaaggtcttggaggattgttggattgaggatcccaaacttgggaaagttactttagagatcgcaattctatccagggtggagcacgccaatatcatcaaggtattggatatatttgaaaaccaagggttcttccagcttgtgatggagaagcacggctccggcctagacctcttcgctttcatcgaccgccaccccaggctggatgagcccctggcgagctacatcttccgacaactagtgtcagcagtgggatacctgcgcttgaaggacatcatccaccgtgacatcaaggatgagaacatcgtgatcgccgaggacttcacaatcaagctgatagactttggctcggccgcctacttggaaaggggaaaattattttatactttttgtgggaccatcgagtactgtgcaccggaagttctcatggggaatccctacagagggccggagctggagatgtggtctctgggagtcactctgtacacgctggtctttgaggagaaccccttctgtgagctggaggagaccgtggaggctgccatacacccgccatacctggtgtccaaagaactcatgagccttgtgtctgggctgctgcagccagtccctgagagacgcaccaccttggagaagctggtgacagacccgtgggtaacacagcctgtgaatcttgctgactatacatgggaagaggtgtttcgagtaaacaagccagaaagtggagttctgtccgctgcgagcctggagatggggaacaggagcctgagtgatgtggcccaggctcaggagctttgtgggggccccgttccaggcgaggctcctaatggccaaggctgtttgcatcccggggatccccgtctgctgaccagctaaacaccaatttcttcctgcttttctccacttggtttggaaaatcacacagttttcaggctccatctgtttggagaaaatacattctgaagcatccccaattcaccttctaaaaactcatgtgcaggtttgataaacaccagaacagaagacagtgatgctgtattattttagatttattacatagatttggaattcacttttttcatgaccta

SEQ ID NO: 88238 - DNA, 3972 bp, Artificial Sequence
  derived and/or modified sequence
atggaagacgggggacttacagccttcgaagaggatcaaaggtgcctgagtcagtcgctccccttgcccgtgtccgctgaaggtcccgctgctcagaccaccgctgagccgtctcgtagcttctcaagtgcccacagacacctgagccgacgcaatggactgagtcgcctctgtcagtctcgcactgctttgagtgaggatcgctggagtagctattgcctctctagtctggccgcacagaatatatgcacctcaaaactacattgcccggctgcacccgaacatacagacccaagtgaaccacgaggttccgtgtcttgttgtagcctgctgagggggctgtcttcaggctggtcatccccactcttgccagcccctgtctgtaaccccaataaggcaattttcaccgtagacgccaagacaaccgagattctggtggctaatgacaaggcctgtggcctgctgggctattcttcacaggatctcattgggcagaaactgacgcaattcttcctgagaagcgacagcgacgtcgtcgaagcactctctgaagagcacatggaagctgacgggcacgctgcggtagtgtttggaacagtcgtcgacatcatctcgagatcaggagaaaagatccctgtcagcgtctggatgaagcggatgaggcaggaaaggagactttgctgcgtagttgttttggagcctgtggagagggtgtcaacatgggtggccttccagagtgacggcaccgtcacgtcttgcgacagtctgtttgcgcatttgcatggatacgtcagtggagaggacgtagccggacagcacatcacagacctgatcccttcggtccaactgcccccttcagggcaacacatccccaagaatttaaagatacagcggtccgtcggccgagcaagagacgggacgacatttcctctttcccttaaactgaagtcccagccgtcgagcgaagaggccacaactggagaagccgcaccagtttccggatatcgggcttcggtctgggttttctgtactatcagtggactgataaccctcctgcctgatggtaccattcatggaattaaccattcctttgccctgaccctcttcggatatgggaagacggagctgctcgggaaaaacatcacttttttgattcctggattctattcctacatggatctggcatacaactcctccctgcagcttcccgatttggcaagctgcctggacgtcggaaacgagtcgggttgtggtgagagaaccttagacccgtggcagggtcaggatccagctgagggcggacaggatccccgaataaatgtcgtcctggcaggcggacacgtcgtgccccgtgatgagattcggaaactgatggagagccaggatatatttaccggaacccagactgagctgatcgccggaggacagctcctgtcctgcctgtctccgcagccagcccctggggttgacaacgtgcccgaggggagtctgcccgttcacggggagcaggccctgcctaaagaccagcagatcaccgctttgggcagggaggagccagttgccatcgagagcccaggacaggacttgctaggcgagagccggtcagaacctgtggatgtgaaaccttttgccagttgtgaggatagcgaggccccagttccagcggaggacggcggatccgatgccggtatgtgcggcctgtgtcagaaagctcagctggagcggatgggtgtatccggacccagtggcagcgacctgtgggccggtgcggctgtggcaaagccccaggctaaggggcagttggcgggtgggtcactgttaatgcactgtccctgttacgggtccgaatggggactctggtggcgttcccaggatttggccccttcaccaagtgggatggccggtctgtccttcggcactccaacattggacgaaccctggttgggggtagaaaatgatcgggaggaacttcagacctgtttaatcaaagagcagctgagccaactttctctggccggtgccctcgatgtgccccatgctgagctggtgcccactgagtgccaagcagtaacagcgcctgtgtccagttgcgatctagggggacgggacttgtgcggcggatgtaccggaagctcttctgcctgctacgctttagcaacagacttacctggcggtctggaagccgtggaagcacaggaagttgacgtaaacagcttctcctggaacctcaaggagctattctttagcgatcagacagatcaaacaagcagcaactgtagttgtgccacgagcgaattgcgcgagaccccgagcagccttgctgtggggtcagatcccgacgttggatcgttacaggagcaaggatcttgcgtgttagatgaccgggaactgttgctgctgacgggaacttgcgtggatctggggcagggtagacggtttcgtgagtcctgtgtgggccatgatccaacagagcctttagaagtgtgcctagtttcctcagaacactatgctgcttcagatagggagtctccaggccatgttcctagtacccttgacgctggacctgaagacacctgcccgtccgcagaggagccccgactgaatgttcaggtgacctcgacacccgtcattgtcatgagaggcgcagcaggattgcagcgagaaatacaggagggagcatactccgggtcctgctaccacagggacgggttgcgcctttctatccagtttgaggtgcggagagtggagctacaaggcccaacacctctgttctgctgttggctcgtcaaagacctccttcactctcagcgggatagcgccgcacggacaagacttttcctcgccagcctgcccggatcaacgcacagcacagctgcggaactcactggaccatctttggtcgaggtgctcagggcccgtccatggttcgaggagcctcctaaagcggtggagctggaaggactggctgcgtgcgagggagagtacagccagaaatacagcaccatgtcccctttgggctctggcgcattcgggttcgtgtggaccgccgtggacaaagagaaaaataaagaggtcgttgtgaaattcataaaaaaagagaaggtcctcgaggattgctggattgaagatccaaagctcgggaaggtgacactggagattgctatactctcaagagtggagcacgccaacatcatcaaggtgcttgatattttcgagaatcagggcttcttccaactcgttatggaaaagcatggctccggcttggacctgttcgccttcatcgaccggcacccacgtttagacgagcctctggctagttatatctttcggcagcttgtatccgcggtgggatacttacgcctgaaagacattatccatcgtgacatcaaggacgaaaatatcgtcatcgccgaagactttaccattaagcttatcgattttgggtcggcggcttacctcgaaagaggcaaactgttttacaccttctgcgggaccattgaatactgtgcaccggaggtgttgatgggaaacccatacagggggccagaattggaaatgtggagcctgggtgtgaccctgtatactttggtgttcgaagaaaaccctttctgcgaactggaggagaccgtggaagccgctatccatccaccatatctcgtatccaaagagctgatgagcctggtctctggactgcttcaaccagttcccgaacgtcgaacaacactggaaaagttagtgaccgatccctgggtgactcagcccgtgaacctggccgactatacctgggaagaggtgttccgagtgaacaagccagagagcggcgtattgtccgcggcatcgctggaaatggggaatcgatctcttagtgatgtggcacaggcccaggagctttgtggtgggccagtgccaggtgaggcccctaatggtcaaggctgtctccatcccggagatccgagacttctgacttcttag

SEQ ID NO: 88239 - DNA, 3324 bp, Artificial Sequence
  derived and/or modified sequence
atgaagcgcatgcgccaggagaggaggttgtgctgcgttgttgtgctcgagcctgtggagagagtcagtacttgggttgcttttcagagtgatggaaccgtgacgagctgtgactcactgtttgcacacttgcatgggtacgtgtccggcgaagatgtggccggacagcacatcaccgacctgattccgagcgtgcagctacctcctagtggtcagcacattcctaaaaacttgaagatccagcggagtgtaggacgcgctcgcgatggaacaacttttccactgagcctaaagctgaaatcgcagccaagttctgaagaggctacgaccggggaggccgcacccgtgtccggatatagagctagtgtctgggtattttgtactatctctgggctgattaccctcctgcccgacggcactattcatggtattaaccatagcttcgcccttaccctgtttggctatgggaagacagaactcttagggaagaacatcacttttttaattcctggcttttattcgtatatggacttagcgtataattcatcgctacagctgcccgacttggcgagttgtcttgatgtcggtaacgagagcgggtgtggagaacgtaccctggacccctggcaggggcaggatcccgcagagggaggacaggaccctcggattaacgtggtcttagccggtgggcacgtagtcccacgagatgagatccggaaattgatggaaagccaggacatctttaccgggacacagaccgaactcatagcgggaggccagctgctcagttgtctgtcccctcagcccgctcccggtgtagataacgtgcccgaagggtctctgcctgtgcacggcgagcaggccctgcccaaagatcagcaaataactgctcttggccgagaggagccagtggccatcgagtcccccggacaggacctactgggagagtcacgctctgaacctgtcgacgtcaaaccttttgcatcctgtgaagactcagaggcccctgtgcctgctgaggacggcggaagtgatgccggtatgtgcggcctgtgccagaaggctcagttggaacggatgggggtgagtggtcctagcgggtctgacttatgggccggagctgctgtcgccaagccccaagccaagggacagcttgcgggaggctctctgctaatgcactgtccatgttatggctctgagtggggcctatggtggcgctcgcaggacctcgccccttccccctcaggcatggcgggtctgagttttggcactcctacactcgacgaaccatggcttggggtcgagaacgatcgcgaagaactgcagacttgcttaatcaaggagcagctcagccagcttagcttagccggagccctggatgtgcctcatgctgagttagtgcccacagagtgtcaggccgtgacagctcctgtgagcagttgcgatctcggaggtagagatctgtgtgggggatgcacaggcagcagtagcgcctgctatgccctggccaccgatctgccagggggtctggaggctgtggaggcccaggaggtcgacgtaaatagtttcagttggaaccttaaggagctgttcttttctgaccagacagaccagacttcaagcaattgctcttgtgccacatccgaactcagagagacccccagcagccttgctgtgggcagcgatcccgacgttggctcactgcaagagcagggctcatgcgtgttagatgatcgcgaactgctactgttgactggcacctgcgttgacctgggtcaaggaagaagatttagggagtcctgtgtgggccacgaccctaccgaaccactcgaagtctgcctcgtcagttccgagcattatgctgcaagtgatagagagtctcccggacacgtaccatccacactcgacgcagggcctgaagacacatgtccaagcgccgaggaaccacgattgaacgttcaggttacatcaacgcccgtgatcgtcatgagaggagccgctggattacagagagagatccaggagggcgcttatagtggaagctgttaccatcgcgacgggcttaggctctccatacagttcgaggtgcgtcgggtggagcttcagggaccgaccccattgttttgctgttggctggtcaaagatcttctgcattcccaacgggatagtgccgctcgcaccagactgttcctggcctccttaccgggatccacccactctacagcagcggaattgaccgggcctagcctagttgaggtgctgcgcgctagaccttggttcgaggaaccgccaaaagcagtggagctggaaggactcgcagcttgtgaaggagagtacagccaaaagtatagtacaatgtcccccctggggagcggggctttcggatttgtgtggacagctgtcgataaagaaaaaaacaaggaggtggtagtaaagtttatcaaaaaagagaaggtccttgaagactgctggatagaggacccaaagctaggaaaagtgaccttggaaatcgccatactgtcaagggttgagcacgcaaatattataaaggtgctggatatcttcgagaaccaggggtttttccagttggtgatggagaaacatggcagcggactggacctctttgcctttattgataggcaccctcgtttagacgagcctcttgcttcctacatatttcggcagctagtgtccgcggtgggatatctgagactcaaagacatcatccatagggacattaaagacgagaatatcgtgatcgcggaagacttcaccatcaagcttattgatttcggctctgccgcatacctggaaaggggtaagctgttctacaccttctgtgggaccattgagtactgcgctccagaagtgcttatgggtaatccttaccggggtcccgaactcgaaatgtggagcctgggcgtgactctgtacactctggtatttgaggaaaatcccttttgtgagctggaagagactgtcgaagccgcaattcaccctccctatttggtgtctaaggaactcatgtcgctcgtttcaggactgctgcagccggtaccagaacggcgaactacactggaaaagttggtgactgatccttgggtgacacaacctgtaaacctggccgattacacatgggaggaagtgttccgggtgaataagcccgagtccggggtgctaagcgccgcttccctggagatggggaaccggtctctgtcagacgttgcgcaggcccaggagctgtgcggcggtccagtgcctggcgaggccccaaacggtcaggggtgtctgcacccaggcgatccgcgtctcttgacttcttag

SEQ ID NO: 88240 - DNA, 3324 bp, Artificial Sequence
  derived and/or modified sequence
atgaagagaatgagacaggagagaagactgtgctgcgtggtggtgctggagcccgtggagagagtgagcacctgggtggccttccagagcgacggcaccgtgaccagctgcgacagcctgttcgcccacctgcacggctacgtgagcggcgaggacgtggccggccagcacatcaccgacctgatccccagcgtgcagctgccccccagcggccagcacatccccaagaacctgaagatccagagaagcgtgggcagagccagagacggcaccaccttccccctgagcctgaagctgaagagccagcccagcagcgaggaggccaccaccggcgaggccgcccccgtgagcggctacagagccagcgtgtgggtgttctgcaccatcagcggcctgatcaccctgctgcccgacggcaccatccacggcatcaaccacagcttcgccctgaccctgttcggctacggcaagaccgagctgctgggcaagaacatcaccttcctgatccccggcttctacagctacatggacctggcctacaacagcagcctgcagctgcccgacctggccagctgcctggacgtgggcaacgagagcggctgcggcgagagaaccctggacccctggcagggccaggaccccgccgagggcggccaggaccccagaatcaacgtggtgctggccggcggccacgtggtgcccagagacgagatcagaaagctgatggagagccaggacatcttcaccggcacccagaccgagctgatcgccggcggccagctgctgagctgcctgagcccccagcccgcccccggcgtggacaacgtgcccgagggcagcctgcccgtgcacggcgagcaggccctgcccaaggaccagcagatcaccgccctgggcagagaggagcccgtggccatcgagagccccggccaggacctgctgggcgagagcagaagcgagcccgtggacgtgaagcccttcgccagctgcgaggacagcgaggcccccgtgcccgccgaggacggcggcagcgacgccggcatgtgcggcctgtgccagaaggcccagctggagagaatgggcgtgagcggccccagcggcagcgacctgtgggccggcgccgccgtggccaagccccaggccaagggccagctggccggcggcagcctgctgatgcactgcccctgctacggcagcgagtggggcctgtggtggagaagccaggacctggcccccagccccagcggcatggccggcctgagcttcggcacccccaccctggacgagccctggctgggcgtggagaacgacagagaggagctgcagacctgcctgatcaaggagcagctgagccagctgagcctggccggcgccctggacgtgccccacgccgagctggtgcccaccgagtgccaggccgtgaccgcccccgtgagcagctgcgacctgggcggcagagacctgtgcggcggctgcaccggcagcagcagcgcctgctacgccctggccaccgacctgcccggcggcctggaggccgtggaggcccaggaggtggacgtgaacagcttcagctggaacctgaaggagctgttcttcagcgaccagaccgaccagaccagcagcaactgcagctgcgccaccagcgagctgagagagacccccagcagcctggccgtgggcagcgaccccgacgtgggcagcctgcaggagcagggcagctgcgtgctggacgacagagagctgctgctgctgaccggcacctgcgtggacctgggccagggcagaagattcagagagagctgcgtgggccacgaccccaccgagcccctggaggtgtgcctggtgagcagcgagcactacgccgccagcgacagagagagccccggccacgtgcccagcaccctggacgccggccccgaggacacctgccccagcgccgaggagcccagactgaacgtgcaggtgaccagcacccccgtgatcgtgatgagaggcgccgccggcctgcagagagagatccaggagggcgcctacagcggcagctgctaccacagagacggcctgagactgagcatccagttcgaggtgagaagagtggagctgcagggccccacccccctgttctgctgctggctggtgaaggacctgctgcacagccagagagacagcgccgccagaaccagactgttcctggccagcctgcccggcagcacccacagcaccgccgccgagctgaccggccccagcctggtggaggtgctgagagccagaccctggttcgaggagccccccaaggccgtggagctggagggcctggccgcctgcgagggcgagtacagccagaagtacagcaccatgagccccctgggcagcggcgccttcggcttcgtgtggaccgccgtggacaaggagaagaacaaggaggtggtggtgaagttcatcaagaaggagaaggtgctggaggactgctggatcgaggaccccaagctgggcaaggtgaccctggagatcgccatcctgagcagagtggagcacgccaacatcatcaaggtgctggacatcttcgagaaccagggcttcttccagctggtgatggagaagcacggcagcggcctggacctgttcgccttcatcgacagacaccccagactggacgagcccctggccagctacatcttcagacagctggtgagcgccgtgggctacctgagactgaaggacatcatccacagagacatcaaggacgagaacatcgtgatcgccgaggacttcaccatcaagctgatcgacttcggcagcgccgcctacctggagagaggcaagctgttctacaccttctgcggcaccatcgagtactgcgcccccgaggtgctgatgggcaacccctacagaggccccgagctggagatgtggagcctgggcgtgaccctgtacaccctggtgttcgaggagaaccccttctgcgagctggaggagaccgtggaggccgccatccaccccccctacctggtgagcaaggagctgatgagcctggtgagcggcctgctgcagcccgtgcccgagagaagaaccaccctggagaagctggtgaccgacccctgggtgacccagcccgtgaacctggccgactacacctgggaggaggtgttcagagtgaacaagcccgagagcggcgtgctgagcgccgccagcctggagatgggcaacagaagcctgagcgacgtggcccaggcccaggagctgtgcggcggccccgtgcccggcgaggcccccaacggccagggctgcctgcaccccggcgaccccagactgctgaccagctag

SEQ ID NO: 88241 - protein, 1143 aa, Artificial Sequence
  derived and/or modified sequence
MEDGGLTAFEEDQRCLSQSLPLPVSAEGPAAQTTAEPSRSFSSAHRHLSRRNGLSRLCQSRTALSEDRWSSYCLSSLAAQNICTSKLHCPAAPEHTDPSEPRGSVSCCSLLRGLSSGWSSPLLPAPVCNPNKAIFTVDAKTTEILVANDKACGLLGYSSQDLIGQKLTQFFLRSDSDVVEALSEEHMEADGHAAVVFGTVVDIISRSGEKIPVSVWMKRMRQERRLCCVVVLEPVERVSTWVAFQSDGTVTSCDSLFAHLHGYVSGEDVAGQHITDLIPSVQLPPSGQHIPKNLKIQRSVGRARDGTTFPLSLKLKSQPSSEEATTGEAAPVSGYRASVWVFCTISGLITLLPDGTIHGINHSFALTLFGYGKTELLGKNITFLIPGFYSYMDLAYNSSLQLPDLASCLDVGNESGCGERTLDPWQGQDPAEGGQDPRINVVLAGGHVVPRDEIRKLMESQDIFTGTQTELIAGGQLLSCLSPQPAPGVDNVPEGSLPVHGEQALPKDQQITALGREEPVAIESPGQDLLGESRSEPVDVKPFASCEDSEAPVPAEDGGSDAGMCGLCQKAQLERMGVSGPSGSDLWAGAAVAKPQAKGQLAGGSLLMHCPCYGSEWGLWWRSQDLAPSPSGMAGLSFGTPTLDEPWLGVENDREELQTCLIKEQLSQLSLAGALDVPHAELVPTECQAVTAPVSSCDLGGRDLCGGCTGSSSACYALATDLPGGLEAVEAQEVDVNSFSWNLKELFFSDQTDQTSSNCSCATSELRETPSSLAVGSDPDVGSLQEQGSCVLDDRELLLLTGTCVDLGQGRRFRESCVGHDPTEPLEVCLVSSEHYAASDRESPGHVPSTLDAGPEDTCPSAEEPRLNVQVTSTPVIVMRGAAGLQREIQEGAYSGSCYHRDGLRLSIQFEVRRVELQGPTPLFCCWLVKDLLHSQRDSAARTRLFLASLPGSTHSTAAELTGPSLVEVLRARPWFEEPPKAVELEGLAACEGEYSQKYSTMSPLGSGAFGFVWTAVDKEKNKEVVVKFIKKEKVLEDCWIEDPKLGKVTLEIAILSRVEHANIIKVLDIFENQGFFQLVMEKHGSGLDLFAFIDRHPRLDEPLASYIFRQVRAGQSRVSVNAGLGAWVRWLQRSVIHTRFSL

SEQ ID NO: 88242 - DNA, 378 bp, Artificial Sequence
  derived and/or modified sequence
atggaggacggcgggcttactgctttcgaagaagatcagaggtgccttagtcagtctttgccactgcccgtctcagctgaaggaccagccgcccagacaacagccgaacccagtcgctctttttcgagcgctcatagacatctcagtcgtcgcaatggcttatcgaggttgtgccagtcgagaacggcactttccgaggaccggtggagttcttactgcctgtctagcctagctgcccagaacatttgtacatcaaagctgcactgccccgcggcccccgagcatacagacccctccgagcctagaggctctgtgagttgctgcagcctgctgagggggctaagctcaggctggtcatcacctctcctgcctgcgtag

SEQ ID NO: 88243 - DNA, 3432 bp, Artificial Sequence
  derived and/or modified sequence
atggaagatggcggcttgaccgcctttgaggaggatcagaggtgtctgagtcaatctctgccactgccagttagtgctgaaggcccagcggcacagaccaccgcagagccatcccggtcgttctcctcggcccatcgccacctgtcccggcggaacggtctcagcagactgtgccagtctcgaacagctctgtctgaagataggtggtcgtcctactgcctatctagcttagccgctcagaatatctgcacctcaaagctccactgccccgcagcaccagagcacacagacccctcagaacccagggggagcgtgtcctgctgctccctcttacgcggattgtccagcggatggtcctcccctttactgccagcccctgtgtgcaatcccaataaggcgatattcactgtcgatgcaaaaacaaccgaaatacttgtggcaaatgataaggcatgcggattattaggctactcctcacaggatctcatcgggcagaaactgacccaattcttcctgaggagcgattccgatgtggttgaagccttaagtgaggaacatatggaggccgatgggcacgctgccgtggtattcgggaccgtagttgacatcatctcccggagcggtgagaagataccagtgtcagtttggatgaagcgaatgagacaggagcgccgactctgctgcgtcgtggtgttggagccagtggaaagagtgagcacctgggttgcattccagtcagatggaactgtcacttcttgcgactctctttttgctcaccttcatggatatgtgagcggagaggatgtggccggccagcatatcactgacttgattccgagtgttcaactgccaccaagcggtcaacatattccgaaaaatcttaaaatccaaagatccgtcggccgcgcaagggatggcaccacatttcctttaagtttgaagttaaagtcccagccatcaagcgaggaggctacaactggggaggccgcccccgtctccggataccgagccagtgtgtgggtgttttgtaccatttctggcctgattacgctcctgcctgatggcactattcatgggataaaccattcattcgccctgactttattcggatatggcaagacagagctactgggcaaaaacatcaccttcttaatccccggtttctactcatacatggatctggcatacaacagtagcctacaactccctgacttggcttcttgccttgacgtgggcaatgagtctggctgtggagagcggacactcgacccttggcaaggacaggacccggccgaaggcgggcaagacccacgcattaatgtggtgctggcaggcggtcacgtggtgccaagagacgaaattcgtaagctcatggagagccaagacatttttaccggaacacagacagaacttatagccggaggccagctcctctcttgcttgtcacctcaaccagctcccggtgttgacaacgtccccgaggggtcgctacctgtgcatggggagcaagcactgccgaaggaccaacaaattactgccctaggacgggaagagcctgtggccatcgagtcacccggtcaggatctgctgggggagagcaggagtgaaccagtggatgtgaagccgttcgcgtcctgtgaagacagtgaagcccctgttccggccgaggacggcggatcagacgccgggatgtgcggtctctgccagaaagcccaactggaacgcatgggggtgtcgggaccatcaggctccgacctgtgggccggggccgccgtggctaagcctcaggccaagggacaactggcaggcggtagtcttctgatgcattgcccctgttatggctcagaatggggactgtggtggcgctcacaggacttggccccatcacctagtggaatggctggactgagctttggtactcctaccctcgacgagccctggctaggcgtcgaaaacgatcgagaggagctccaaacttgccttattaaagaacagttaagtcagctgtcactcgcaggcgctctggatgtgcctcacgccgagctcgttcccaccgaatgccaggctgtaacagcacccgtctcttcatgcgacctgggtggtagggacctgtgcggcgggtgcaccgggtcctctagtgcctgttatgccctggccaccgaccttcctggcggcctggaggccgtggaggcccaggaggtggatgtgaattctttcagctggaatctcaaggagctgttcttttctgatcagaccgaccaaaccagcagtaactgttcgtgtgccacatctgagctcagagagactccaagttcactcgccgttggctccgatccggatgttggaagccttcaagagcaggggagctgcgttctcgatgaccgcgagctcctgcttttgacaggaacctgtgtggatctcggccaggggaggaggtttcgagagagttgtgtgggccacgatccgacagaaccactggaagtttgtcttgtttcatcagaacactacgccgcctctgatcgagagtccccggggcacgtccccagcacgctggacgccggcccagaagacacctgcccctcagcagaagagccccgactcaacgtacaagtgacctcaacgccagtgatagtgatgcgaggcgctgccggcctgcaaagagaaatccaagagggggcctattccggatcgtgctaccatagagacggtctgcgcctcagtattcagttcgaggtgcggagggtggagttgcaggggccaacaccactgttttgttgctggttagtgaaggacctactgcactctcaaagggactctgccgcacgtacgcggcttttcttagcatctttgcctggctcaacacactcaaccgcggccgaactgactggtccgagtctggtggaggtgctccgcgcccggccatggttcgaggaacctcctaaggcagtcgagctggagggcctggctgcttgtgaaggcgagtatagccagaagtactcgacaatgtcaccactaggatcaggcgccttcggatttgtctggacggccgtcgacaaggagaagaataaggaagtggtagtgaagtttatcaaaaaggagaaggtgctggaggactgctggatagaggatcctaagcttggaaaagtgaccctggagattgcgattctcagcagagtcgagcacgccaatattataaaagttctggacattttcgaaaatcaaggcttctttcagttggtgatggagaagcacggttcagggcttgacctatttgccttcatcgatagacatcctagattggatgagcctttggctagctacattttcagacaggtgcgcgcaggccagagccgggtgtctgtaaacgccggcctgggagcttgggtgcggtggctgcaacgcagcgtcattcatacgcgtttcagtctgtag

SEQ ID NO: 88244 - DNA, 378 bp, Artificial Sequence
  derived and/or modified sequence
atggaggatggcggcctgacagcctttgaggaggaccagcgctgcctgagccagagcctgcccctgcctgtgtctgctgagggccctgctgcccagaccacagctgagcccagccgctccttcagcagcgcccaccgccacctgagcagaagaaatggcctgagccggctgtgccagagcaggacagccctgtctgaggaccgctggagcagctactgcctgagcagcctggccgcccagaacatctgcaccagcaagctgcactgcccagctgcccctgagcacacagaccccagcgagccccggggctctgtgtcctgctgcagcctgctgcggggcctgagcagcggctggagcagccccctgctgcctgcctag

SEQ ID NO: 88245 - DNA, 3432 bp, Artificial Sequence
  derived and/or modified sequence
atggaggatggcggcctgacagcctttgaggaggaccagcgctgcctgagccagagcctgcccctgcctgtgtctgctgagggccctgctgcccagaccacagctgagcccagccgctccttcagcagcgcccaccgccacctgagcagaagaaatggcctgagccggctgtgccagagcaggacagccctgtctgaggaccgctggagcagctactgcctgagcagcctggccgcccagaacatctgcaccagcaagctgcactgcccagctgcccctgagcacacagaccccagcgagccccggggctctgtgtcctgctgcagcctgctgcggggcctgagcagcggctggagcagccccctgctgcctgcccctgtgtgcaaccccaacaaggccatcttcaccgtggatgccaagaccacagagatcctggtggccaatgacaaggcctgtggcctgctgggctacagcagccaggacctgattggccagaagctgacccagttcttcctgcggagtgacagtgatgtggtggaggccctgtctgaggagcacatggaggctgatggccatgctgctgtggtgtttggaacagtggtggacatcatcagccgctctggagagaagatccctgtgtctgtgtggatgaagaggatgaggcaggagcggcggctgtgctgcgtggtggtgctggagcctgtggagcgggtgtccacctgggtggccttccagagtgatggcaccgtgaccagctgtgacagcctgtttgcccacctgcacggctacgtgtctggagaagatgtggccggccagcacatcacagacctgatccccagcgtgcagctgccccccagcggccagcacatccccaagaacctgaagatccagaggtctgtgggccgggccagagatggcaccaccttccccctgagcctgaagctgaagagccagcccagcagcgaggaggccaccaccggggaggccgcccctgtgtctggctaccgggcctctgtgtgggtgttctgcaccatcagcggcctcatcaccctgctgcctgatggcaccatccacggcatcaaccacagctttgccctgaccctgtttggctacggcaagacagagctgctgggcaagaacatcaccttcctgatccctggcttctacagctacatggacctggcctacaacagcagcctgcagctgcctgacctggccagctgcctggatgtgggcaatgaaagtggctgtggggagaggaccctggacccctggcagggccaggaccctgctgagggcggccaggacccccgcatcaacgtggtgctggccggcggccacgtggtgcccagagatgagatcaggaagctgatggagagccaggacatcttcaccggcacccagacagagctgattgctgggggccagctgctgagctgcctgagcccccagcctgcccctggggtggacaacgtgcctgagggcagcctgcctgtgcacggggagcaggccctgcccaaggaccagcagatcacagccctgggccgggaggagcctgtggccatcgagagccctggccaggacctgctgggggagagccgctctgagcctgtggatgtgaagccctttgccagctgtgaagattctgaggcccctgtgcctgcagaagatggcggcagtgatgctggcatgtgtggcctgtgccagaaggcccagctggagaggatgggcgtgtctggccccagcggcagtgacctgtgggccggggctgctgtggccaagccccaggccaagggccagctggccggcggcagcctgctgatgcactgcccctgctacggcagcgagtggggcctgtggtggaggagccaggacctggcccccagccccagcggcatggccggcctgagctttggcacccccaccctggatgagccctggctgggcgtggagaatgaccgggaggagctgcagacctgcctgatcaaggagcagctgagccagctgagcctggccggggccctggatgtgccccacgccgagctggtgcccacagagtgccaggccgtgacagcccctgtgagcagctgtgacctgggcggccgggacctgtgtggcggctgcaccggcagcagcagcgcctgctacgccctggccacagacctgcccggcggcctggaggccgtggaggcccaggaggtggatgtgaacagcttctcctggaacctgaaggagctgttcttcagtgaccagacagaccagaccagcagcaactgcagctgtgccaccagcgagctgcgggagacccccagcagcctggccgtgggcagtgaccctgatgtgggcagcctgcaggagcagggcagctgtgtgctggatgaccgggagctgctgctgctgaccggcacctgtgtggacctgggccagggccgccgcttccgggagagctgtgtgggccatgaccccacagagcccctggaggtgtgcctggtgtcctctgagcactatgctgccagtgaccgggagagccctggccacgtgcccagcaccctggatgctggccctgaggacacctgccccagcgctgaggagccccggctgaatgtgcaggtgaccagcacccctgtgattgtgatgagaggagctgctggcctgcagcgggagatccaggagggcgcctacagcggcagctgctaccacagagatggcctgcggctgagcatccagtttgaggtgagaagagtggagctgcagggccccacccccctcttctgctgctggctggtgaaggacctgctgcacagccagagggacagcgctgcccggaccaggctcttcctggccagcctgcccggcagcacccacagcacagctgctgagctgaccggccccagcctggtggaggtgctgcgggcccggccctggtttgaggagccccccaaggctgtggagctggagggcctggccgcctgtgagggggagtacagccagaagtacagcaccatgagccccctgggcagcggggccttcggctttgtgtggacagctgtggacaaggagaagaacaaggaggtggtggtgaagttcatcaagaaggagaaggtgctggaggactgctggattgaggaccccaagctgggcaaggtgaccctggagatcgccatcctgagccgggtggagcacgccaacatcatcaaggtgctggacatctttgagaaccagggcttcttccagctggtgatggagaagcacggcagcggcctggacctgtttgccttcatcgacagacacccccggctggatgagcccctggccagctacatcttccggcaggtgcgggccggccagagccgggtgtctgtgaatgccggcctgggcgcctgggtgcgctggctgcagaggagcgtcatccacacccgcttcagcctgtag

SEQ ID NO: 88246 - DNA, 378 bp, Artificial Sequence
  derived and/or modified sequence
atggaggacggcggcctgaccgccttcgaggaggaccagcggtgcctgtcccagagtctgcccctgcccgtgtccgcagagggtccggccgcccaaactacagccgagccttcccgaagcttcagctcagctcacagacacctttcgaggaggaacggtctgtctagactgtgccaaagtaggaccgctttgtctgaggatcgctggagcagctattgcctgtcatctcttgcagcccagaatatttgtacatccaagctgcattgccccgctgcgccggaacatactgacccctccgagccacggggtagcgtgtcatgttgctcacttctgcgtggactgtccagcggctggagttccccccttttacctgcatag

SEQ ID NO: 88247 - DNA, 3432 bp, Artificial Sequence
  derived and/or modified sequence
atggaggacggcggcctgaccgccttcgaggaggaccagcggtgccttagtcagagcttgcctctgcctgtgtctgccgaaggaccagctgcccagacgacggccgagccttccaggagttttagtagcgcacataggcacttgtctagaaggaacggtttatctcgactgtgtcagagccggaccgcactttctgaggaccgctggtcatcatactgcctctcctcactggctgcacagaacatttgtaccagtaagctgcattgccctgccgcccctgagcacacagatccctccgagccaaggggctctgtttcatgctgtagtctgctgcgcggcctatcctcgggatggtcttcccccctgctgcctgcaccagtgtgtaatcccaataaggccatctttacagtagacgcgaaaacgaccgagatcctcgtggcaaatgacaaggcctgcggattgcttggatactcttcccaggatctcataggtcaaaagctcactcagttcttcctgaggtcagattccgatgtagtcgaggctctgtcagaagaacatatggaagccgacggtcacgcagccgttgttttcggcacggtcgtcgacattatttcccggagtggagaaaagatacctgttagcgtatggatgaagcgtatgaggcaggagcgtcgactgtgttgtgttgtggtgctggaaccagtggagcgtgtaagcacctgggtggcctttcagtcagacggcaccgtgacctcgtgcgattccctcttcgcacatctgcatggatacgtatccggcgaggatgtcgctggacaacacatcactgaccttattccttccgttcagctgccaccgtcaggtcaacatatccctaaaaatctgaaaatccagcggtccgtcggcagggctagagatggtacaacctttccactgtctctgaaactgaaatcgcagccatcctctgaggaagcgacaacgggggaagccgcacccgtgtccggatacagggccagcgtgtgggttttctgcacaatttccggccttattaccttgttacccgacggcacgattcacgggatcaaccattcatttgccctgacccttttcggctatggcaaaactgaattattggggaagaacattacattcctcatcccagggttctatagctatatggacctcgcctacaactctagcctgcagcttccagacctggccagttgtctcgatgtaggaaatgagtctggttgtggcgagaggacactcgatccttggcaggggcaggatccagccgaaggaggacaagatccaaggatcaacgtcgttctagctggcggacatgtcgtgcccagagacgagattagaaagctgatggaatcacaggatatctttactggaacacagacagaattgattgctgggggtcagttattgagctgcttaagcccacaacctgcgcctggagtagacaatgtacctgagggtagcctgcccgtccacggagaacaagccctcccaaaagaccagcagataactgctctcggacgcgaggagccagtcgccatcgaaagcccaggacaggacttgctgggcgaatcccggtcagaacctgtggatgtgaagcccttcgcaagttgcgaagacagcgaagcacccgttcccgccgaggacggcgggtccgacgcagggatgtgcgggctctgtcagaaagcacagctagagcgaatgggggtttctgggccttccgggtcggatttatgggcaggcgccgcagtagccaaaccacaggctaaaggccagctggctggaggatctcttctgatgcactgcccttgttacggctcggaatggggactgtggtggaggtcacaggatctggcaccttcaccaagtgggatggcgggcctttccttcggtacccccaccctcgatgaaccttggttaggggttgagaatgaccgggaagaactgcaaacttgcctgataaaggagcaattgtcgcagctgtcattggccggcgcactagacgtgccccacgccgaactggtaccaaccgaatgtcaagctgtaaccgcgccagtgtctagctgcgatctgggaggccgggatctttgtggcggatgcacaggaagtagcagtgcatgttacgctctggccacagacttgcccggcggactggaggcggtggaggcccaggaagttgacgtgaattcgttctcctggaacctgaaagagctcttcttcagtgaccaaaccgatcagacatcttccaattgcagctgcgccacctccgagcttagagagactccaagctcattggccgttggatctgatcctgacgttggaagccttcaagagcagggttcatgcgttctggatgatcgggagctgttgttgctgacaggtacatgcgtcgacctcgggcagggacgtcgctttagagaatcgtgcgtggggcacgaccccaccgaacctttagaagtgtgcctcgtgagctccgagcactacgccgcgagtgacagggaatcgcccggacatgtgccttcaactctggacgctggtcccgaggatacctgtccgtccgccgaggagcccaggctgaatgttcaggtgacatctacaccagtgatcgtgatgagaggagccgcaggccttcaaagagagatacaggaaggggcgtactctggctcttgctatcatagagacggcttgaggctgtcaatacagtttgaagtccgccgcgtggagctccagggccccactcctctgttctgctgttggcttgtgaaggatcttttgcactcgcagagagactctgcggccaggactagactcttcttggcttctttacctggatcaacccactctaccgcagctgagctcacaggcccaagcctcgtagaggtgctgagggcccgaccctggtttgaagaacctccaaaggccgtcgagcttgaaggccttgccgcctgtgagggcgaatactcacaaaaatactccaccatgagccccctggggagcggagcattcggtttcgtttggaccgctgtcgataaagagaagaacaaagaagtcgtggtcaaatttatcaaaaaggaaaaggtgctggaagactgttggatagaggaccccaaactcggcaaagtcactttagaaatcgccatcctctctcgggtggagcatgctaacattattaaggtcctcgatatttttgaaaatcaaggcttctttcaactggtaatggaaaaacacggctctggcctggacttgttcgcgtttattgacaggcacccacgactcgatgagccccttgccagttacatattcagacaggtgcgcgcaggccaatctagggtcagcgtgaacgccggcctgggagcctgggtgagatggctccagaggtctgtcattcacacaagattctctctctag

SEQ ID NO: 88248 - DNA, 5161 bp, Artificial Sequence
  derived and/or modified sequence
ctcctttccgtggtgtgtagccggcttggcgtgaccctcgcctgatccagttgttagagttggaagcttggcagttggcctcccttcttcccatggaggacgggggcttaacagcctttgaagaggaccagagatgcctttcccagagcctccccttgccagtgtcagcagagggcccagctgcacagaccactgctgagcccagcaggtcgttttcctcagcccacagacacctgagcagaaggaatgggctttccagactctgccagagcaggacagcgctctctgaagacagatggagctcctattgtctatcatcactggctgcccagaatatttgtacaagtaaactgcactgccctgctgcccctgagcacacggacccgtccgaaccgcggggcagtgtgtcctgctgctccctgctgcggggactgtcctcagggtggtcctcacctctgcttccggcccctgtgtgcaaccctaacaaggccatcttcacggtggatgccaagaccacagagatcctggttgctaacgacaaagcttgcgggctcctggggtacagcagccaggacctgattggccagaagctcacgcagttctttctgaggtcagattctgatgtggtggaggccctcagcgaggagcacatggaggccgacggccacgctgcggtggtgtttggcacggtggtggacatcatcagccgtagtggggagaagattccagtgtctgtgtggatgaagaggatgcggcaggagcgccgcctatgctgcgtggtggtcctggagcccgtggagagggtctcgacctgggtcgctttccagagcgatggcaccgtcacgtcatgtgacagtctctttgctcatcttcacgggtacgtgtctggggaggacgtggctgggcagcatatcacagacctgatcccttctgtgcagctccctccttctggccagcacatcccaaagaatctcaagattcagaggtctgttggaagagccagggacggtaccaccttccctctgagcttaaagctgaaatcccaacccagcagcgaggaggcgaccaccggtgaggcggcccctgtgagcggctaccgggcatctgtctgggtgttctgcaccatcagtggcctcatcaccctcctgccggatgggaccatccacggcatcaaccacagcttcgcgctgacactgtttggttacggaaagacggagctcctgggcaagaatatcactttcctgattcctggtttctacagctacatggaccttgcgtacaacagctcattacagctcccagacctggccagctgcctggacgtcggcaatgagagtgggtgtggggagagaaccttggacccgtggcagggccaggacccagctgaggggggccaggatccaaggattaatgtcgtgcttgctggtggccacgttgtgccccgagatgagatccggaagctgatggaaagccaagacatcttcaccgggactcagactgagctgattgctggaggccagctcctttcctgcctctcacctcagcctgctccaggggtggacaatgtcccagaaggaagcctgccagtgcacggtgaacaggcgctgcccaaggaccagcaaatcactgccttggggagagaggaacctgtggcaatagagagccccggacaggatcttctgggagaaagcaggtctgaaccagtggatgtgaagccatttgcttcctgcgaagattctgaagctccagtcccagctgaggatgggggcagtgatgctggcatgtgtggcctgtgtcagaaggcccagctagagcggatgggagtcagtggtcccagcggttcagacctttgggctggggctgccgtggccaagccccaggccaagggtcagctggcggggggcagcctcctgatgcactgcccttgctatgggagtgaatggggcttgtggtggcgaagccaggacttggcccccagcccctctgggatggcaggcctctcgtttgggacacctactctagatgagccgtggctgggagtggaaaacgaccgagaagagctgcagacctgcttgattaaggagcagctgtcccagttgagccttgcaggagccctggatgtcccccacgccgaactcgttccgacagagtgccaggctgtcaccgctcctgtgtcgtcctgcgatctgggaggcagagacctgtgcggtggctgcacgggcagctcctcagcctgctatgccttggccacggacctccctgggggcctggaagcagtggaggcccaggaggttgatgtgaattcgttttcctggaacctcaaggaactctttttcagtgaccagacagaccaaacgtcatcaaattgttcctgtgctacgtctgaactcagagagacaccctcttccttggcagtgggctccgatccagatgtaggcagtctccaggaacaggggtcgtgtgtcctggatgacagggagctgttactactgaccggcacctgtgttgaccttggccaaggccgacggttccgggagagctgtgtgggacatgatccaacagaaccgcttgaggtttgtttggtgtcctctgagcattatgcagcaagcgacagagaaagcccaggacacgttccttccacgttggatgctggccctgaggacacgtgcccatcagcagaggagccaaggctgaacgtccaggtcacctccacgcccgtgatcgtgatgcgcggggctgctggcctgcagcgggagatccaggagggtgcctactccgggagctgctaccatcgagatggcttacggctgagtatacagtttgaggtgaggcgggtggagctccagggccccacacctctgttctgctgctggctggtgaaagacctcctccacagccaacgcgactcagccgccaggacccgcctgttccttgccagcctgcccggctccacccactctaccgctgctgagctcaccggacccagcctggtggaagtgctcagagccagaccctggtttgaggagccccccaaggctgtggaactggaggggttggcggcctgtgagggcgagtactcccaaaagtacagtaccatgagcccgctgggcagtggggccttcggcttcgtgtggactgctgtggacaaggaaaaaaacaaggaggtggtggtgaagtttattaagaaggagaaggtcttggaggattgttggattgaggatcccaaacttgggaaagttactttagagatcgcaattctatccagggtggagcacgccaatatcatcaaggtattggatatatttgaaaaccaagggttcttccagcttgtgatggagaagcacggctccggcctagacctcttcgctttcatcgaccgccaccccaggctggatgagcccctggcgagctacatcttccgacaagtgagagcaggccagagccgtgttagtgtgaacgcaggcctgggtgcctgggtccggtggctgcaaagatcagtgatccatactcggttctctctctgagctggatctagccttctgtgtggggatttcatggagtaggatatatattttgagaagaaaattctatgattgaagtagagaaagtgaggttgggaaggaaggatgaggccagatacagtcctggaatgactgagaaagtatgtttaatggttaaggtttatttacatacataaaatatccacaacaatcataaaaattaaccagtaagggttaggatgcagccagagagcgtctcaaaggcatgtgtgcggcacagcggcctgcaggttgtaagtgcccactaaatggtggctgttgaggtaattaaccagcaaaactgagatcctgacattctcacttttcagtaagtatttgtcttgatctgtttcgtgtctaattacatattgaacttcggccattattttattggaatgggagagtgatgatccaaataggaaggcaccctagcagagggacagggggaagaaacggtaactcgtgttgggttttaaggagagggtggcggttccatcctgtactgctcccagctcccccagaagaactggagaaataccagcaaagggctgtgtagacaactcacatttgctcttggattgtttgctggggacaactcgatttctaatgacagcttccgtgaatcaacatttcttccttaaagctacacactctcgggttgttgggtttccgaagtttagtttctcaggctcctacttgtaagtttcagatattatggttctgcaaaaaagggtcacctctctccctcttcctgtgttggaaggtgacgtcctccctttagtttgtggccaacacttgtttctgaaactttttacagcaaacagagtatctgtatgaggttatgttgagggtcgcttgttaaaagctgctgcctgacagctgttaattctggggctagtgagacacataattatggtgtttatactctaaaatttttgccaaaagaatctctaccccttttgtaaatatatagacataaatgttattctatgtaaatacagatgcacaattttataaagtatatgatcgcacatcaatgtatgtaggaatcatgctggttctcagggcattgcctgtcagctccagattcatcaggacctgctcagcagcggggtcggggagctgggcctgggaacagccctggcttggttcaggccgctccagggcagcatggccagtccagggcacagaagcatctgcaggaagagcagctttcttcaagtcgctctttagccctttgtggttaatctctcagtactagttaataaatcttaatgaaactttccatgttcaagttcatgtgtgatttctgtctcctgattggatcctgactgatttgtatatatctacatatatatgtaagtatgtatgcatgcatgcttgtatatgtgtatttatgtgtgtacctatgtacaagtatatgttatgtgtataggtatgcacacgtgtgtatgcaggtgtgtatatatgtgcacatgtatgtatctaaatgtatgtataaatatgcaggtatgtatatataaatatgcaggtatgtatatataaatatgcaggtatgtatatgtttgtatatatgtgtataaatatgcgtatatttattaaatgtaagttaatcgggctta

SEQ ID NO: 88249 - DNA, 378 bp, Artificial Sequence
  derived and/or modified sequence
atggaggatggtgggcttaccgcttttgaagaagaccagcgctgtctttcccagtccctgccccttcccgtgtcagcagaggggcctgctgcacagacaaccgcagagcccagccgctccttctctagcgcccatagacatctcagtcggaggaatgggctatctcgtttgtgtcaaagcagaacagccctttccgaggaccggtggtcaagttactgtctctcgagcctggctgcccagaacatttgtactagcaagctacattgcccggcagcacccgaacacaccgacccttctgaaccaagaggaagcgtcagctgctgtagcctgttgcggggacttagcagtggatggtcttctcctcttttgccagcctag

SEQ ID NO: 88250 - DNA, 3432 bp, Artificial Sequence
  derived and/or modified sequence
atggaggatggcggtctgaccgcctttgaggaagaccagcgctgtttgagtcagtctttaccacttcccgtcagtgccgaggggcctgccgctcagactacggctgagccttccagatccttttcttcagcgcaccggcacctctcccggcgaaacggacttagccggctgtgtcaaagccggacggctttatcagaagaccggtggtctagttactgtctctcctctcttgcggcacagaatatatgtaccagcaagctccactgtcctgctgccccagaacataccgaccccagtgagccacgcggtagtgtgagctgctgttcactactcaggggactgagcagcggctggtcctcccctcttctgcctgcccctgtctgcaatcctaacaaagccattttcaccgtggacgccaagactacagaaattttggttgctaatgataaggcttgcggactcctggggtacagtagccaggaccttatcggtcagaaactgacccagttttttctgagatccgacagtgacgtggtggaggctctgagtgaggagcatatggaagccgacgggcatgccgcagtagttttcgggacagtggtggacataatctcccgttccggagaaaaaattcccgtatctgtttggatgaaaaggatgagacaagaacgcaggctgtgttgcgtggttgtccttgaacccgtcgaacgagtgtcaacttgggttgcatttcagagcgacgggacggttacaagctgtgactctttgtttgcccacctgcacggatatgtgtccggggaggacgtggccggtcaacacattaccgacttaatcccatcagttcaactacctccatctggacagcatattccgaaaaacttgaagattcagcgctccgtgggacgggcacgtgatgggaccaccttccccttgagcctgaagctcaagagccagccgagttccgaagaagctaccactggcgaggcggcacctgtgagtggctatagggcttccgtatgggtcttctgtaccatctcagggctgattactctgctgcccgacggtacaattcacggaatcaatcactctttcgctcttacgctgttcggttatgggaaaacagagttgctggggaagaatattactttcctgattcctggtttttatagttatatggatcttgcctataatagctccctccagctccctgatctagctagctgcctggatgtgggcaacgaaagtggatgtggggagcggaccctggacccttggcagggccaggaccccgcagagggcggtcaagacccaaggattaatgtggtgctagccggaggtcacgtggttccgcgtgacgagattaggaagctgatggagagtcaagacatctttactggaactcagaccgaactaatcgcagggggacagctcttgagctgtctgtcccctcagcctgcacctggcgtagataatgtgcccgaagggtcgctccccgtgcacggtgaacaggcccttccaaaggatcagcagatcacagctctgggacgtgaggagccagtagcaatcgaatccccaggacaggatctcctgggcgaatcccgaagcgagcctgtggatgtcaaacctttcgccagttgcgaggactctgaggcccctgtcccagcggaagacggcggttccgatgccggaatgtgtggactgtgtcaaaaagcccaactcgagcggatgggggtgtctgggcctagcggctctgacctgtgggccggagcagcagtggcgaaaccacaggccaagggacagctggcaggcggatcactgctcatgcattgcccgtgctatgggagtgaatggggactgtggtggcggtctcaagatttggctccctcacctagtgggatggccggactgagctttggcacgcctacgctggacgagccatggttgggtgtggaaaacgaccgggaggagcttcagacatgcctcatcaaagaacaactaagccaactctctctggccggagcattggacgttcctcatgcagagctggtgccaactgagtgccaagctgttaccgcaccagtgtcatcgtgcgatcttggcggacgggacctttgcggcggatgtactggctcttcatctgcctgctacgctctggcaaccgatttaccagggggtctagaggcggtggaggcccaagaggttgacgtaaatagcttctcctggaatttgaaagaactcttcttctcagatcaaaccgaccagacgtctagtaattgttcttgtgctaccagtgagttaagagagactccaagttccttggctgtgggctccgatcccgacgtcggatccctgcaggagcagggatcatgcgtgcttgatgatcgcgagctgctgctactgaccggcacctgtgtggacctaggacagggtaggcgtttccgagagtcctgcgtgggacatgatccgacggagcccctggaggtgtgtctggtcagcagtgagcattacgcagcatccgaccgtgaatcgccagggcacgtgccttccaccctggatgccggacctgaagacacgtgtcccagtgccgaggagccaaggctaaatgtccaagtaacttccactcccgtgatcgttatgagaggagcagccggactccagcgagagatccaagagggcgcttatagtgggagctgctaccaccgtgacggtctcaggctgagtatccagttcgaagtcaggcgagtagagctgcaagggcctactcctctattctgttgctggctggtaaaggacctgttgcactcccagcgggactccgccgctaggactcggttgttcctagcttcgcttcctggttcaacacactccaccgccgcagagctcacaggtcccagtctagtggaggtattgagggccagaccctggttcgaggagcccccaaaggcagtggagctcgaaggattagcagcttgcgaaggtgagtactcccaaaagtattcaaccatgtcacctttaggaagtggcgcattcggctttgtgtggaccgctgttgacaaagagaaaaataaggaagtcgtggtgaagtttattaagaaggagaaggttctggaggattgttggatagaggaccccaaactaggaaaggtcaccctggagattgctattcttagccgagttgaacacgcaaacatcatcaaggtgctggacatcttcgagaaccagggcttctttcagctcgtgatggaaaaacatggaagcggcctcgacctcttcgcttttatcgaccgccaccccagactggatgaacctctcgcaagttatattttccgacaagtaagagctggacagagtagagtgtcggtgaatgctgggttaggtgcgtgggtcaggtggttgcaacggtccgtgattcacacccgcttttcactatag

SEQ ID NO: 88251 - DNA, 378 bp, Artificial Sequence
  derived and/or modified sequence
atggaggacggcggcctgaccgccttcgaggaggaccagagatgcctgagccagagcctgcccctgcccgtgagcgccgagggccccgccgcccagaccaccgccgagcccagcagaagcttcagcagcgcccacagacacctgagcagaagaaacggcctgagcagactgtgccagagcagaaccgccctgagcgaggacagatggagcagctactgcctgagcagcctggccgcccagaacatctgcaccagcaagctgcactgccccgccgcccccgagcacaccgaccccagcgagcccagaggcagcgtgagctgctgcagcctgctgagaggcctgagcagcggctggagcagccccctgctgcccgcctag

SEQ ID NO: 88252 - DNA, 3432 bp, Artificial Sequence
  derived and/or modified sequence
atggaggacggcggcctgaccgccttcgaggaggaccagagatgcctgagccagagcctgcccctgcccgtgagcgccgagggccccgccgcccagaccaccgccgagcccagcagaagcttcagcagcgcccacagacacctgagcagaagaaacggcctgagcagactgtgccagagcagaaccgccctgagcgaggacagatggagcagctactgcctgagcagcctggccgcccagaacatctgcaccagcaagctgcactgccccgccgcccccgagcacaccgaccccagcgagcccagaggcagcgtgagctgctgcagcctgctgagaggcctgagcagcggctggagcagccccctgctgcccgcccccgtgtgcaaccccaacaaggccatcttcaccgtggacgccaagaccaccgagatcctggtggccaacgacaaggcctgcggcctgctgggctacagcagccaggacctgatcggccagaagctgacccagttcttcctgagaagcgacagcgacgtggtggaggccctgagcgaggagcacatggaggccgacggccacgccgccgtggtgttcggcaccgtggtggacatcatcagcagaagcggcgagaagatccccgtgagcgtgtggatgaagagaatgagacaggagagaagactgtgctgcgtggtggtgctggagcccgtggagagagtgagcacctgggtggccttccagagcgacggcaccgtgaccagctgcgacagcctgttcgcccacctgcacggctacgtgagcggcgaggacgtggccggccagcacatcaccgacctgatccccagcgtgcagctgccccccagcggccagcacatccccaagaacctgaagatccagagaagcgtgggcagagccagagacggcaccaccttccccctgagcctgaagctgaagagccagcccagcagcgaggaggccaccaccggcgaggccgcccccgtgagcggctacagagccagcgtgtgggtgttctgcaccatcagcggcctgatcaccctgctgcccgacggcaccatccacggcatcaaccacagcttcgccctgaccctgttcggctacggcaagaccgagctgctgggcaagaacatcaccttcctgatccccggcttctacagctacatggacctggcctacaacagcagcctgcagctgcccgacctggccagctgcctggacgtgggcaacgagagcggctgcggcgagagaaccctggacccctggcagggccaggaccccgccgagggcggccaggaccccagaatcaacgtggtgctggccggcggccacgtggtgcccagagacgagatcagaaagctgatggagagccaggacatcttcaccggcacccagaccgagctgatcgccggcggccagctgctgagctgcctgagcccccagcccgcccccggcgtggacaacgtgcccgagggcagcctgcccgtgcacggcgagcaggccctgcccaaggaccagcagatcaccgccctgggcagagaggagcccgtggccatcgagagccccggccaggacctgctgggcgagagcagaagcgagcccgtggacgtgaagcccttcgccagctgcgaggacagcgaggcccccgtgcccgccgaggacggcggcagcgacgccggcatgtgcggcctgtgccagaaggcccagctggagagaatgggcgtgagcggccccagcggcagcgacctgtgggccggcgccgccgtggccaagccccaggccaagggccagctggccggcggcagcctgctgatgcactgcccctgctacggcagcgagtggggcctgtggtggagaagccaggacctggcccccagccccagcggcatggccggcctgagcttcggcacccccaccctggacgagccctggctgggcgtggagaacgacagagaggagctgcagacctgcctgatcaaggagcagctgagccagctgagcctggccggcgccctggacgtgccccacgccgagctggtgcccaccgagtgccaggccgtgaccgcccccgtgagcagctgcgacctgggcggcagagacctgtgcggcggctgcaccggcagcagcagcgcctgctacgccctggccaccgacctgcccggcggcctggaggccgtggaggcccaggaggtggacgtgaacagcttcagctggaacctgaaggagctgttcttcagcgaccagaccgaccagaccagcagcaactgcagctgcgccaccagcgagctgagagagacccccagcagcctggccgtgggcagcgaccccgacgtgggcagcctgcaggagcagggcagctgcgtgctggacgacagagagctgctgctgctgaccggcacctgcgtggacctgggccagggcagaagattcagagagagctgcgtgggccacgaccccaccgagcccctggaggtgtgcctggtgagcagcgagcactacgccgccagcgacagagagagccccggccacgtgcccagcaccctggacgccggccccgaggacacctgccccagcgccgaggagcccagactgaacgtgcaggtgaccagcacccccgtgatcgtgatgagaggcgccgccggcctgcagagagagatccaggagggcgcctacagcggcagctgctaccacagagacggcctgagactgagcatccagttcgaggtgagaagagtggagctgcagggccccacccccctgttctgctgctggctggtgaaggacctgctgcacagccagagagacagcgccgccagaaccagactgttcctggccagcctgcccggcagcacccacagcaccgccgccgagctgaccggccccagcctggtggaggtgctgagagccagaccctggttcgaggagccccccaaggccgtggagctggagggcctggccgcctgcgagggcgagtacagccagaagtacagcaccatgagccccctgggcagcggcgccttcggcttcgtgtggaccgccgtggacaaggagaagaacaaggaggtggtggtgaagttcatcaagaaggagaaggtgctggaggactgctggatcgaggaccccaagctgggcaaggtgaccctggagatcgccatcctgagcagagtggagcacgccaacatcatcaaggtgctggacatcttcgagaaccagggcttcttccagctggtgatggagaagcacggcagcggcctggacctgttcgccttcatcgacagacaccccagactggacgagcccctggccagctacatcttcagacaggtgagagccggccagagcagagtgagcgtgaacgccggcctgggcgcctgggtgagatggctgcagagaagcgtgatccacaccagattcagcctgtag

SEQ ID NO: 88253 - protein, 232 aa, Artificial Sequence
  derived and/or modified sequence
MDDFISISLLSLAMLVGCYVAGIIPLAVNFSEERLKLVTVLGAGLLCGTALAVIVPEGVHALYEDILEGKHHQASETHNVIASDKAAEKSVVHEHEHSHDHTQLHAYIGVSLVLGFVFMLLVDQIGNSHVHSTDDPEAARSSNSKITTTLGLVVHAAADGVALGAAASTSQTSVQLIVFVAIMLHKAPAAFGLVSFLMHAGLERNRIRKHLLVFALAAPVMSMVTYLGLSKD

SEQ ID NO: 88254 - DNA, 699 bp, Artificial Sequence
  derived and/or modified sequence
atggacgacttcatcagcatcagcctgctgagcctggccatgctggtgggctgctacgtggccggcatcatccccctggccgtgaacttcagcgaggagagactgaagctggtgaccgtgctgggcgccggcctgctgtgcggcaccgccctggccgtgatcgtgcccgagggcgtgcacgccctgtacgaggacatcctggagggcaagcaccaccaggccagcgagacccacaacgtgatcgccagcgacaaggccgccgagaagagcgtggtgcacgagcacgagcacagccacgaccacacccagctgcacgcctacatcggcgtgagcctggtgctgggcttcgtgttcatgctgctggtggaccagatcggcaacagccacgtgcacagcaccgacgaccccgaggccgccagaagcagcaacagcaagatcaccaccaccctgggcctggtggtgcacgccgccgccgacggcgtggccctgggcgccgccgccagcaccagccagaccagcgtgcagctgatcgtgttcgtggccatcatgctgcacaaggcccccgccgccttcggcctggtgagcttcctgatgcacgccggcctggagagaaacagaatcagaaagcacctgctggtgttcgccctggccgcccccgtgatgagcatggtgacctacctgggcctgagcaaggactag

SEQ ID NO: 88255 - DNA, 699 bp, Artificial Sequence
  derived and/or modified sequence
atggacgactttatttccatcagcctgttgtcgctggccatgttggttggctgctacgtcgccggaattatccccttggccgtcaattttagtgaggaaagacttaagctcgtcactgtcttgggtgctgggctgctttgcgggacagccctcgccgtaatcgtgcccgaaggggtgcacgccttgtacgaagatatccttgaagggaagcaccaccaggcctctgaaacccataatgtgatcgccagcgacaaggccgcagagaaatccgtggtgcacgaacatgaacattcacatgaccacacccagctgcatgcctacattggcgtcagccttgttctcgggtttgtgttcatgcttctggtagatcagatcggaaacagccacgtgcatagcaccgacgaccctgaggctgcccggtcgagtaactcaaaaattacaactaccttgggtctcgtcgtccacgccgcggcagacggggtagcactgggggccgcagcctctacttcccagactagtgtacaattgatcgttttcgttgcaattatgcttcacaaggcccccgcggctttcgggctggtttcttttttgatgcacgccgggttggagcggaatagaatcagaaagcaccttttggtcttcgctctggccgcccctgtcatgtcgatggtgacttacctcggtctatccaaggattag

SEQ ID NO: 88256 - DNA, 699 bp, Artificial Sequence
  derived and/or modified sequence
atggatgacttcatcagcatcagcctgctgagcctggccatgctggtgggctgctacgtggccggcatcatccccctggccgtgaacttcagcgaggagcggctgaagctggtgacagtgctgggcgccggcctgctgtgtggcacagccctggccgtcatcgtgcctgagggcgtgcacgccctgtatgaggacatcctggagggcaagcaccaccaggccagcgagacccacaacgtgattgccagtgacaaggctgctgagaagtctgtggtgcatgaacatgagcacagccatgaccacacccagctgcacgcctacatcggcgtgtccctggtgctgggctttgtgttcatgctgctggtggaccagatcggcaacagccacgtgcacagcacagatgatcctgaggccgcccggagcagcaacagcaagatcaccaccaccctgggcctggtggtgcacgccgctgctgatggagtggccctgggcgccgccgccagcaccagccagacctctgtgcagctgattgtgtttgtggccatcatgctgcacaaggccccagctgccttcggcctggtgtccttcctgatgcacgccggcctggagaggaaccgcatcaggaagcacctgctggtgtttgccctggccgcccctgtgatgtccatggtgacctacctgggcctgagcaaggactag

SEQ ID NO: 88257 - DNA, 699 bp, Artificial Sequence
  derived and/or modified sequence
atggacgacttcatcagcatcagcctgctgagcctggccatgctggtgggctgctacgtggccggaatcattccactcgccgtcaatttctccgaagaacgactcaaactggttacagttttaggtgccggcttgctctgcggaacagctctggctgtcattgtgcctgagggcgtgcacgccctctacgaagacattcttgagggtaagcaccatcaagcatcggaaacacataacgtcatcgccagtgacaaggcagcggagaagagtgtggtgcatgagcatgaacacagtcacgaccacacccagctacatgcatatattggagtgagcttggtcctggggttcgtgtttatgctgctggtggatcagattggtaattcccacgtacactcgactgacgaccccgaggctgctaggagtagtaatagtaagattactacaacattgggtttggtggtgcacgcggccgctgacggagtggccttgggcgctgccgcctcaacgagtcagactagcgtgcagcttattgtattcgtggccattatgctccacaaggctcccgccgcttttgggcttgtgtcttttctaatgcacgccggcctggagagaaataggatccgcaagcatctgctcgtgttcgcattggcagctccagtaatgagtatggtaacatacttggggctctctaaagactag

SEQ ID NO: 88258 - DNA, 699 bp, Artificial Sequence
  derived and/or modified sequence
atggacgatttcatcagcatcagtctgttgagtctcgccatgctggttggatgttatgtagctggcatcatccccctggccgttaacttctcagaggaaagattgaaactggttaccgtcctgggcgctggcttgctttgtggtactgctctggctgtcatcgtcccagagggcgtgcatgccctctacgaagacatcctggagggcaagcatcaccaggcctctgaaactcacaatgtaattgcgtctgataaggcagctgaaaagtctgttgtccatgagcacgaacattcacacgatcacactcagcttcatgcttacattggtgtgagccttgtcctcggatttgtgtttatgctacttgtcgatcaaatcggaaactcacatgttcacagcactgacgaccccgaggccgctcgtagcagcaatagtaagatcaccacaacccttggattggttgttcatgccgctgctgacggggtggccctcggcgctgccgcttcaacatctcagacgagcgtccagcttattgtatttgttgccataatgctgcacaaggcacctgctgcgtttgggcttgtcagcttcctgatgcacgcaggattagagcggaataggatcaggaaacacctgctcgtcttcgccctggctgccccagtgatgagtatggtgacataccttgggctctcaaaggattag

SEQ ID NO: 88259 - DNA, 2065 bp, Artificial Sequence
  derived and/or modified sequence
atgaagagatgccacttggcggccatggcagctgtagtatcggcgactccgggtcaaggcccggtcgagtgcagtaccatgggcagcaccgggtatagggcagagacagctttgtgtcaactttgctgctgaacccctaggacccatcgttagagacctgcaggactcctttcctcatcccaggctcggaggagagtttgctgggactggtgggctggtttcctgctctggggggcggatcaccttcggggccgcctcttggagacaggggcgcctagggaacgaacaggttcgcttgagtcacttacccgccgccgcctaagacattgtgccaccctcaatccgacaatcgaagaaatcgatcattcgcacattttccccattgacttttcccatctctgttaacccacgagaatctaatgactggcatctgagaacccagagcctgggaccttagattgctgtaagctttctctggtgctaatatcagcaaaaagggtctgttgccgggtacgttcaagaggaaggtgcctcgtgaacacatctgctggtgggaaggcctaaagaactggaaagcccactctcttggaaccaccacacctgtttaaagaacctaagcaccatttaaagccactggaaatttgttgtctagtggttgtgggtgaataaaggagggcagaatggatgatttcatctccattagcctgctgtctctggctatgttggtgggatgttacgtggccggaatcattcccttggctgttaatttctcagaggaacgactgaagctggtgactgttttgggtgctggccttctctgtggaactgctctggcagtcatcgtgcctgaaggagtacatgccctttatgaagatattcttgagggaaaacaccaccaagcaagtgaaacacataatgtgattgcatcagacaaagcagcagaaaaatcagttgtccatgaacatgagcacagccacgaccacacacagctgcatgcctatattggtgtttccctcgttctgggcttcgttttcatgttgctggtggaccagattggtaactcccatgtgcattctactgacgatccagaagcagcaaggtctagcaattccaaaatcaccaccacgctgggtctggttgtccatgctgcagctgatggtgttgctttgggagcagcagcatctacttcacagaccagtgtccagttaattgtgtttgtggcaatcatgctacataaggcaccagctgcttttggactggtttccttcttgatgcatgctggcttagagcggaatcgaatcagaaagcacttgctggtctttgcattggcagcaccagttatgtccatggtgacatacttaggactgagtaaggattagaactaagaggacacaccagcatcggagtgtattaagcccctgaaacacatggtagctagggactgaacacaggaaccgtatgacagcagcacaaacccccaaaggatgttcctgccttgtgggcccctgagccccttgggagactgagaatcatgaccagattcatccagaactgctgcagtgttaagtgaaaatcctctgtagttgttctgcagaggaaccttccttccattagaaaatttctgctcaatacagaatggtccacatcacccaaagtgcactgttggagatgctgtgaaattaaaacctctttgtacctgagacatctagattcacctcaggaggcctgaaggaaatgtgtaacttgtgggaaagaactagacaaccatttaggaattctctagatatactcagcctaacccagtggcttaacacaaggagattggctttgatctttttttcttgtggcatcttccagcaagttagaagtctcatgggataagactgcagttcccctggttcaatagctggaacagtgattttaaatgtccctttttctggatcccttgtaaacatgaaatcattccatggatggctgccttataattttgtctctttccactttaattgtgaatggttaaaaaaatgctgttttctgatattaaatttttattagtgcatacctt

SEQ ID NO: 88260 - DNA, 441 bp, Artificial Sequence
  derived and/or modified sequence
atgtcctacccgcaggggtacctgtaccagccgtctgcttcccttgcactttatagctgtcctgcttacagcacttccgtgatctctggccctagaaccgatgagcttggtcggtcctcaagtggcagtgcatttagcccatatgcgggcagtactgcatttacagcaccaagccctggctacaacagtcaccttcagtacggcgctgatcccgccgcagctgctgcagcagcattctcatcatacgtcctgctgaaaaaggagaagaagtctctcgactttccatgtttccccccacttcgcccaacatgtgtgagatctcccgccgaaaggggcgtcgcaagtgtcgcccaggccagcatctgcatggagggtagggccgcagtggcccgttctgcccatgggggaagtccttacgcccacagagttcccggcccatag

SEQ ID NO: 88261 - DNA, 441 bp, Artificial Sequence
  derived and/or modified sequence
atgagctacccccagggctacctgtaccagcccagcgccagcctggccctgtacagctgcccagcctacagcaccagcgtcatcagcggccccaggacagatgagctgggccgcagcagcagcggcagcgccttcagcccctatgccggcagcacagccttcaccgcccccagccctggctacaacagccacctgcagtatggagctgaccctgctgctgctgctgctgctgccttcagcagctatgtgctgctgaagaaggagaagaagagcctggacttcccctgcttcccccccctgcggcccacctgtgtgcgcagccctgctgagcggggcgtggcctctgtggcccaggccagcatctgcatggagggccgggctgctgtggcccggagcgcccacggcggcagcccctatgcccaccgggtgcccggcccctag

SEQ ID NO: 88262 - DNA, 441 bp, Artificial Sequence
  derived and/or modified sequence
atgagctacccccagggctacctgtaccagcccagcgccagcctggccctctacagttgccccgcgtatagcacttccgtcatctcagggccgaggacggacgagctggggcgaagtagctctggctccgccttttccccatatgccggctccactgcattcaccgcaccatcccccggctacaatagtcatctgcagtatggagccgaccccgcagccgccgctgcagcagcattcagcagctacgtgctgctgaagaaggagaagaaaagtttggatttcccatgttttcctcccttaaggcccacctgcgtacgctctcctgcagaaagaggagtcgcctccgtagcccaggcatcaatatgtatggaaggacgcgccgccgtggcacggtccgcccatggcggttcaccctatgctcaccgcgttccagggccatag

SEQ ID NO: 88263 - DNA, 441 bp, Artificial Sequence
  derived and/or modified sequence
atgtcgtaccctcagggctatctgtatcaaccctccgcctctctcgctctctactcctgtccagcgtacagtacttccgtcattagtggacccaggacggacgagctgggcaggagcagcagcggcagcgccttttcaccatacgcgggtagcactgccttcaccgctccaagccccggttacaattctcatctacagtacggcgcagatccagcggctgcggctgccgctgccttttcttcctatgtgctcttaaaaaaggaaaaaaaaagtcttgatttcccatgttttccaccgctgcgccctacttgcgtgagatcgcctgccgagaggggagtcgcttctgtggctcaggccagcatctgcatggaaggccgagccgctgtcgccagaagcgctcacggcggatcaccatacgctcatcgcgtgccgggaccgtag

SEQ ID NO: 88264 - DNA, 441 bp, Artificial Sequence
  derived and/or modified sequence
atgagctacccccagggctacctgtaccagcccagcgccagcctggccctgtacagctgccccgcctacagcaccagcgtgatcagcggccccagaaccgacgagctgggcagaagcagcagcggcagcgccttcagcccctacgccggcagcaccgccttcaccgcccccagccccggctacaacagccacctgcagtacggcgccgaccccgccgccgccgccgccgccgccttcagcagctacgtgctgctgaagaaggagaagaagagcctggacttcccctgcttcccccccctgagacccacctgcgtgagaagccccgccgagagaggcgtggccagcgtggcccaggccagcatctgcatggagggcagagccgccgtggccagaagcgcccacggcggcagcccctacgcccacagagtgcccggcccctag

SEQ ID NO: 88265 - protein, 1698 aa, Artificial Sequence
  derived and/or modified sequence
MRLLWGLIWASSFFTLSLQKPRLLLFSPSVVHLGVPLSVGVQLQDVPRGQVVKGSVFLRNPSRNNVPCSPKVDFTLSSERDFALLSLQVPLKDAKSCGLHQLLRGPEVQLVAHSPWLKDSLSRTTNIQGINLLFSSRRGHLFLQTDQPIYNPGQRVRYRVFALDQKMRPSTDTITVMVENSHGLRVRKKEVYMPSSIFQDDFVIPDISEPGTWKISARFSDGLESNSSTQFEVKKYVLPNFEVKITPGKPYILTVPGHLDEMQLDIQARYIYGKPVQGVAYVRFGLLDEDGKKTFFRGLESQTKLVNGQSHISLSKAEFQDALEKLNMGITDLQGLRLYVAAAIIEYPGGEMEEAELTSWYFVSSPFSLDLSKTKRHLVPGAPFLLQALVREMSGSPASGIPVKVSATVSSPGSVPEVQDIQQNTDGSGQVSIPIIIPQTISELQLSVSAGSPHPAIARLTVAAPPSGGPGFLSIERPDSRPPRVGDTLNLNLRAVGSGATFSHYYYMILSRGQIVFMNREPKRTLTSVSVFVDHHLAPSFYFVAFYYHGDHPVANSLRVDVQAGACEGKLELSVDGAKQYRNGESVKLHLETDSLALVALGALDTALYAAGSKSHKPLNMGKVFEAMNSYDLGCGPGGGDSALQVFQAAGLAFSDGDQWTLSRKRLSCPKEKTTRKKRNVNFQKAINEKLGQYASPTAKRCCQDGVTRLPMMRSCEQRAARVQQPDCREPFLSCCQFAESLRKKSRDKGQAGLQRALEILQEEDLIDEDDIPVRSFFPENWLWRVETVDRFQILTLWLPDSLTTWEIHGLSLSKTKGLCVATPVQLRVFREFHLHLRLPMSVRRFEQLELRPVLYNYLDKNLTVSVHVSPVEGLCLAGGGGLAQQVLVPAGSARPVAFSVVPTAAAAVSLKVVARGSFEFPVGDAVSKVLQIEKEGAIHREELVYELNPLDHRGRTLEIPGNSDPNMIPDGDFNSYVRVTASDPLDTLGSEGALSPGGVASLLRLPRGCGEQTMIYLAPTLAASRYLDKTEQWSTLPPETKDHAVDLIQKGYMRIQQFRKADGSYAAWLSRGSSTWLTAFVLKVLSLAQEQVGGSPEKLQETSNWLLSQQQADGSFQDLSPVIHRSMQGGLVGNDETVALTAFVTIALHHGLAVFQDEGAEPLKQRVEASISKASSFLGEKASAGLLGAHAAAITAYALTLTKAPADLRGVAHNNLMAMAQETGDNLYWGSVTGSQSNAVSPTPAPRNPSDPMPQAPALWIETTAYALLHLLLHEGKAEMADQAAAWLTRQGSFQGGFRSTQDTVIALDALSAYWIASHTTEERGLNVTLSSTGRNGFKSHALQLNNRQIRGLEEELQFSLGSKINVKVGGNSKGTLKVLRTYNVLDMKNTTCQDLQIEVTVKGHVEYTMEANEDYEDYEYDELPAKDDPDAPLQPVTPLQLFEGRRNRRRREAPKLTSLSDRYVSHFETEGPHVLLYFDSVPTSRECVGFEAVQEVPVGLVQPASATLYDYYNPERRCSVFYGAPSKSRLLATLCSAEVCQCAEGKCPRQRRALERGLQDEDGYRMKFACYYPRVEYGFQVKVLREDSRAAFRLFETKITQVLHFTKDVKAAANQMRNFLVRASCRLRLEPGKEYLIMGLDGATYDLEGHPQYLLDSNSWIEEMPSERLCRSTRQRAACAQLNDFLQEYGTQGCQV

SEQ ID NO: 88266 - protein, 1698 aa, Artificial Sequence
  derived and/or modified sequence
MRLLWGLIWASSFFTLSLQKPRLLLFSPSVVHLGVPLSVGVQLQDVPRGQVVKGSVFLRNPSRNNVPCSPKVDFTLSSERDFALLSLQVPLKDAKSCGLHQLLRGPEVQLVAHSPWLKDSLSRTTNIQGINLLFSSRRGHLFLQTDQPIYNPGQRVRYRVFALDQKMRPSTDTITVMVENSHGLRVRKKEVYMPSSIFQDDFVIPDISEPGTWKISARFSDGLESNSSTQFEVKKYVLPNFEVKITPGKPYILTVPGHLDEMQLDIQARYIYGKPVQGVAYVRFGLLDEDGKKTFFRGLESQTKLVNGQSHISLSKAEFQDALEKLNMGITDLQGLRLYVAAAIIESPGGEMEEAELTSWYFVSSPFSLDLSKTKRHLVPGAPFLLQALVREMSGSPASGIPVKVSATVSSPGSVPEVQDIQQNTDGSGQVSIPIIIPQTISELQLSVSAGSPHPAIARLTVAAPPSGGPGFLSIERPDSRPPRVGDTLNLNLRAVGSGATFSHYYYMILSRGQIVFMNREPKRTLTSVSVFVDHHLAPSFYFVAFYYHGDHPVANSLRVDVQAGACEGKLELSVDGAKQYRNGESVKLHLETDSLALVALGALDTALYAAGSKSHKPLNMGKVFEAMNSYDLGCGPGGGDSALQVFQAAGLAFSDGDQWTLSRKRLSCPKEKTTRKKRNVNFQKAINEKLGQYASPTAKRCCQDGVTRLPMMRSCEQRAARVQQPDCREPFLSCCQFAESLRKKSRDKGQAGLQRALEILQEEDLIDEDDIPVRSFFPENWLWRVETVDRFQILTLWLPDSLTTWEIHGLSLSKTKGLCVATPVQLRVFREFHLHLRLPMSVRRFEQLELRPVLYNYLDKNLTVSVHVSPVEGLCLAGGGGLAQQVLVPAGSARPVAFSVVPTAAAAVSLKVVARGSFEFPVGDAVSKVLQIEKEGAIHREELVYELNPLDHRGRTLEIPGNSDPNMIPDGDFNSYVRVTASDPLDTLGSEGALSPGGVASLLRLPRGCGEQTMIYLAPTLAASRYLDKTEQWSTLPPETKDHAVDLIQKGYMRIQQFRKADGSYAAWLSRDSSTWLTAFVLKVLSLAQEQVGGSPEKLQETSNWLLSQQQADGSFQDPCPVLDRSMQGGLVGNDETVALTAFVTIALHHGLAVFQDEGAEPLKQRVEASISKANSFLGEKASAGLLGAHAAAITAYALTLTKAPVDLLGVAHNNLMAMAQETGDNLYWGSVTGSQSNAVSPTPAPRNPSDPMPQAPALWIETTAYALLHLLLHEGKAEMADQASAWLTRQGSFQGGFRSTQDTVIALDALSAYWIASHTTEERGLNVTLSSTGRNGFKSHALQLNNRQIRGLEEELQFSLGSKINVKVGGNSKGTLKVLRTYNVLDMKNTTCQDLQIEVTVKGHVEYTMEANEDYEDYEYDELPAKDDPDAPLQPVTPLQLFEGRRNRRRREAPKLTSLSDRYVSHFETEGPHVLLYFDSVPTSRECVGFEAVQEVPVGLVQPASATLYDYYNPERRCSVFYGAPSKSRLLATLCSAEVCQCAEGKCPRQRRALERGLQDEDGYRMKFACYYPRVEYGFQVKVLREDSRAAFRLFETKITQVLHFTKDVKAAANQMRNFLVRASCRLRLEPGKEYLIMGLDGATYDLEGHPQYLLDSNSWIEEMPSERLCRSTRQRAACAQLNDFLQEYGTQGCQV

SEQ ID NO: 88267 - protein, 1698 aa, Artificial Sequence
  derived and/or modified sequence
MRLLWGLIWASSFFTLSLQKPRLLLFSPSVVHLGVPLSVGVQLQDVPRGQVVKGSVFLRNPSRNNVPCSPKVDFTLSSERDFALLSLQVPLKDAKSCGLHQLLRGPEVQLVAHSPWLKDSLSRTTNIQGINLLFSSRRGHLFLQTDQPIYNPGQRVRYRVFALDQKMRPSTDTITVMVENSHGLRVRKKEVYMPSSIFQDDFVIPDISEPGTWKISARFSDGLESNSSTQFEVKKYVLPNFEVKITPGKPYILTVPGHLDEMQLDIQARYIYGKPVQGVAYVRFGLLDEDGKKTFFRGLESQTKLVNGQSHISLSKAEFQDALEKLNMGITDLQGLRLYVAAAIIEYPGGEMEEAELTSWYFVSSPFSLDLSKTKRHLVPGAPFLLQALVREMSGSPASGIPVKVSATVSSPGSVPEVQDIQQNTDGSGQVSIPIIIPQTISELQLSVSAGSPHPAIARLTVAAPPSGGPGFLSIEWPDSRPPRVGDTLNLNLRAVGSGATFSHYYYMILSRGQIVFMNREPKRTLTSVSVFVDHHLAPSFYFVAFYYHGDHPVANSLRVDVQAGACEGKLELSVDGAKQYRNGESVKLHLETDSLALVALGALDTALYAAGSKSHKPLNMGKVFEAMNSYDLGCGPGGGDSALQVFQAAGLAFSDGDQWTLSRKRLSCPKEKTTRKKRNVNFQKAINEKLGQYASPTAKRCCQDGVTRLPMMRSCEQRAARVQQPDCREPFLSCCQFAESLRKKSRDKGQAGLQRALEILQEEDLIDEDDIPVRSFFPENWLWRVETVDRFQILTLWLPDSLTTWEIHGLSLSKTKGLCVATPVQLRVFREFHLHLRLPMSVRRFEQLELRPVLYNYLDKNLTVSVHVSPVEGLCLAGGGGLAQQVLVPAGSARPVAFSVVPTAAAAVSLKVVARGSFEFPVGDAVSKVLQIEKEGAIHREELVYELNPLDHRGRTLEIPGNSDPNMIPDGDFNSYVRVTASDPLDTLGSEGALSPGGVASLLRLPRGCGEQTMIYLAPTLAASRYLDKTEQWSTLPPETKDHAVDLIQKGYMRIQQFRKADGSYAAWLSRDSSTWLTAFVLKVLSLAQEQVGGSPEKLQETSNWLLSQQQADGSFQDPCPVLDRSMQGGLVGNDETVALTAFVTIALHHGLAVFQDEGAEPLKQRVEASISKANSFLGEKASAGLLGAHAAAITAYALTLTKAPVDLLGVAHNNLMAMAQETGDNLYWGSVTGSQSNAVSPTPAPRNPSDPMPQAPALWIETTAYALLHLLLHEGKAEMADQAAAWLTRQGSFQGGFRSTQDTVIALDALSAYWIASHTTEERGLNVTLSSTGRNGFKSHALQLNNRQIRGLEEELQFSLGSKINVKVGGNSKGTLKVLRTYNVLDMKNTTCQDLQIEVTVKGHVEYTMEANEDYEDYEYDELPAKDDPDAPLQPVTPLQLFEGRRNRRRREAPKLTSLSDRYVSHFETEGPHVLLYFDSVPTSRECVGFEAVQEVPVGLVQPASATLYDYYNPERRCSVFYGAPSKSRLLATLCSAEVCQCAEGKCPRQRRALERGLQDEDGYRMKFACYYPRVEYGFQVKVLREDSRAAFRLFETKITQVLHFTKDVKAAANQMRNFLVRASCRLRLEPGKEYLIMGLDGATYDLEGHPQYLLDSNSWIEEMPSERLCRSTRQRAACAQLNDFLQEYGTQGCQV

SEQ ID NO: 88268 - protein, 1698 aa, Artificial Sequence
  derived and/or modified sequence
MRLLWGLIWASSFFTLSLQKPRLLLFSPSVVHLGVPLSVGVQLQDVPRGQVVKGSVFLRNPSRNNVPCSPKVDFTLSSERDFALLSLQVPLKDAKSCGLHQLLRGPEVQLVAHSPWLKDSLSRTTNIQGINLLFSSRRGHLFLQTDQPIYNPGQRVRYRVFALDQKMRPSTDTITVMVENSHGLRVRKKEVYMPSSIFQDDFVIPDISEPGTWKISARFSDGLESNSSTQFEVKKYVLPNFEVKITPGKPYILTVPGHLDEMQLDIQARYIYGKPVQGVAYVRFGLLDEDGKKTFFRGLESQTKLVNGQSHISLSKAEFQDALEKLNMGITDLQGLRLYVAAAIIESPGGEMEEAELTSWYFVSSPFSLDLSKTKRHLVPGAPFLLQALVREMSGSPASGIPVKVSATVSSPGSVPEVQDIQQNTDGSGQVSIPIIIPQTISELQLSVSAGSPHPAIARLTVAAPPSGGPGFLSIERPDSRPPRVGDTLNLNLRAVGSGATFSHYYYMILSRGQIVFMNREPKRTLTSVSVFVDHHLAPSFYFVAFYYHGDHPVANSLRVDVQAGACEGKLELSVDGAKQYRNGESVKLHLETDSLALVALGALDTALYAAGSKSHKPLNMGKVFEAMNSYDLGCGPGGGDSALQVFQAAGLAFSDGDQWTLSRKRLSCPKEKTTRKKRNVNFQKAINEKLGQYASPTAKRCCQDGVTRLPMMRSCEQRAARVQQPDCREPFLSCCQFAESLRKKSRDKGQAGLQRALEILQEEDLIDEDDIPVRSFFPENWLWRVETVDRFQILTLWLPDSLTTWEIHGLSLSKTKGLCVATPVQLRVFREFHLHLRLPMSVRRFEQLELRPVLYNYLDKNLTVSVHVSPVEGLCLAGGGGLAQQVLVPAGSARPVAFSVVPTAAAAVSLKVVARGSFEFPVGDAVSKVLQIEKEGAIHREELVYELNPLDHRGRTLEIPGNSDPNMIPDGDFNSYVRVTASDPLDTLGSEGALSPGGVASLLRLPRGCGEQTMIYLAPTLAASRYLDKTEQWSTLPPETKDHAVDLIQKGYMRIQQFRKADGSYAAWLSRDSSTWLTAFVLKVLSLAQEQVGGSPEKLQETSNWLLSQQQADGSFQDPCPVLDRSMQGGLVGNDETVALTAFVTIALHHGLAVFQDEGAEPLKQRVEASISKASSFLGEKASAGLLGAHAAAITAYALTLTKAPVDLLGVAHNNLMAMAQETGDNLYWGSVTGSQSNAVSPTPAPRNPSDPMPQAPALWIETTAYALLHLLLHEGKAEMADQAAAWLTRQGSFQGGFRSTQDTVIALDALSAYWIASHTTEERGLNVTLSSTGRNGFKSHALQLNNRQIRGLEEELQFSLGSKINVKVGGNSKGTLKVLRTYNVLDMKNTTCQDLQIEVTVKGHVEYTMEANEDYEDYEYDELPAKDDPDAPLQPVTPLQLFEGRRNRRRREAPKLTSLSDRYVSHFETEGPHVLLYFDSVPTSRECVGFEAVQEVPVGLVQPASATLYDYYNPERRCSVFYGAPSKSRLLATLCSAEVCQCAEGKCPRQRRALERGLQDEDGYRMKFACYYPRVEYGFQVKVLREDSRAAFRLFETKITQVLHFTKDVKAAANQMRNFLVRASCRLRLEPGKEYLIMGLDGATYDLEGHPQYLLDSNSWIEEMPSERLCRSTRQRAACAQLNDFLQEYGTQGCQV

SEQ ID NO: 88269 - protein, 1698 aa, Artificial Sequence [sequence omitted]

SEQ ID NO: 88270 - protein, 1698 aa, Artificial Sequence
  derived and/or modified sequence
MRLLWGLIWASSFFTLSLQKPRLLLFSPSVVHLGVPLSVGVQLQDVPRGQVVKGSVFLRNPSRNNVPCSPKVDFTLSSERDFALLSLQVPLKDAKSCGLHQLLRGPEVQLVAHSPWLKDSLSRTTNIQGINLLFSSRRGHLFLQTDQPIYNPGQRVRYRVFALDQKMRPSTDTITVMVENSHGLRVRKKEVYMPSSIFQDDFVIPDISEPGTWKISARFSDGLESNSSTQFEVKKYVLPNFEVKITPGKPYILTVPGHLDEMQLDIQARYIYGKPVQGVAYVRFGLLDEDGKKTFFRGLESQTKLVNGQSHISLSKAEFQDALEKLNMGITDLQGLRLYVAAAIIESPGGEMEEAELTSWYFVSSPFSLDLSKTKRHLVPGAPFLLQALVREMSGSPASGIPVKVSATVSSPGSVPEVQDIQQNTDGSGQVSIPIIIPQTISELQLSVSAGSPHPAIARLTVAAPPSGGPGFLSIERPDSRPPRVGDTLNLNLRAVGSGATFSHYYYMILSRGQIVFMNREPKRTLTSVSVFVDHHLAPSFYFVAFYYHGDHPVANSLRVDVQAGACEGKLELSVDGAKQYRNGESVKLHLETDSLALVALGALDTALYAAGSKSHKPLNMGKVFEAMNSYDLGCGPGGGDSALQVFQAAGLAFSDGDQWTLSRKRLSCPKEKTTRKKRNVNFQKAINEKLGQYASPTAKRCCQDGVTRLPMMRSCEQRAARVQQPDCREPFLSCCQFAESLRKKSRDKGQAGLQRALEILQEEDLIDEDDIPVRSFFPENWLWRVETVDRFQILTLWLPDSLTTWEIHGLSLSKTKGLCVATPVQLRVFREFHLHLRLPMSVRRFEQLELRPVLYNYLDKNLTVSVHVSPVEGLCLAGGGGLAQQVLVPAGSARPVAFSVVPTAATAVSLKVVARGSFEFPVGDAVSKVLQIEKEGAIHREELVYELNPLDHRGRTLEIPGNSDPNMIPDGDFNSYVRVTASDPLDTLGSEGALSPGGVASLLRLPRGCGEQTMIYLAPTLAASRYLDKTEQWSTLPPETKDHAVDLIQKGYMRIQQFRKADGSYAAWLSRGSSTWLTAFVLKVLSLAQEQVGGSPEKLQETSNWLLSQQQADGSFQDLSPVIHRSMQGGLVGNDETVALTAFVTIALHHGLAVFQDEGAEPLKQRVEASISKASSFLGEKASAGLLGAHAAAITAYALTLTKAPADLRGVAHNNLMAMAQETGDNLYWGSVTGSQSNAVSPTPAPRNPSDPMPQAPALWIETTAYALLHLLLHEGKAEMADQAAAWLTRQGSFQGGFRSTQDTVIALDALSAYWIASHTTEERGLNVTLSSTGRNGFKSHALQLNNRQIRGLEEELQFSLGSKINVKVGGNSKGTLKVLRTYNVLDMKNTTCQDLQIEVTVKGHVEYTMEANEDYEDYEYDELPAKDDPDAPLQPVTPLQLFEGRRNRRRREAPKLTSLSDRYVSHFETEGPHVLLYFDSVPTSRECVGFEAVQEVPVGLVQPASATLYDYYNPERRCSVFYGAPSKSRLLATLCSAEVCQCAEGKCPRQRRALERGLQDEDGYRMKFACYYPRVEYGFQVKVLREDSRAAFRLFETKITQVLHFTKDVKAAANQMRNFLVRASCRLRLEPGKEYLIMGLDGATYDLEGHPQYLLDSNSWIEEMPSERLCRSTRQRAACAQLNDFLQEYGTQGCQV

SEQ ID NO: 88271 - protein, 1698 aa, Artificial Sequence
  derived and/or modified sequence
MRLLWGLIWASSFFTLSLQKPRLLLFSPSVVHLGVPLSVGVQLQDVPRGQVVKGSVFLRNPSRNNVPCSPKVDFTLSSERDFALLSLQVPLKDAKSCGLHQLLRGPEVQLVAHSPWLKDSLSRTTNIQGINLLFSSRRGHLFLQTDQPIYNPGQRVRYRVFALDQKMRPSTDTITVMVENSHGLRVRKKEVYMPSSIFQDDFVIPDISEPGTWKISARFSDGLESNSSTQFEVKKYVLPNFEVKITPGKPYILTVPGHLDEMQLDIQARYIYGKPVQGVAYVRFGLLDEDGKKTFFRGLESQTKLVNGQSHISLSKAEFQDALEKLNMGITDLQGLRLYVAAAIIESPGGEMEEAELTSWYFVSSPFSLDLSKTKRHLVPGAPFLLQALVREMSGSPASGIPVKVSATVSSPGSVPEVQDIQQNTDGSGQVSIPIIIPQTISELQLSVSAGSPHPAIARLTVAAPPSGGPGFLSIERPDSRPPRVGDTLNLNLRAVGSGATFSHYYYMILSRGQIVFMNREPKRTLTSVSVFVDHHLAPSFYFVAFYYHGDHPVANSLRVDVQAGACEGKLELSVDGAKQYRNGESVKLHLETDSLALVALGALDTALYAAGSKSHKPLNMGKVFEAMNSYDLGCGPGGGDSALQVFQAAGLAFSDGDQWTLSRKRLSCPKEKTTRKKRNVNFQKAINEKLGQYASPTAKRCCQDGVTRLPMMRSCEQRAARVQQPDCREPFLSCCQFAESLRKKSRDKGQAGLQRALEILQEEDLIDEDDIPVRSFFPENWLWRVETVDRFQILTLWLPDSLTTWEIHGLSLSKTKGLCVATPVQLRVFREFHLHLRLPMSVRRFEQLELRPVLYNYLDKNLTVSVHVSPVEGLCLAGGGGLAQQVLVPAGSARPVAFSVVPTAAAAVSLKVVARGSFEFPVGDAVSKVLQIEKEGAIHREELVYELNPLDHRGRTLEIPGNSDPNMIPDGDFNSYVRVTASDPLDTLGSEGALSPGGVASLLRLPRGCGEQTMIYLAPTLAASRYLDKTEQWSTLPPETKDHAVDLIQKGYMRIQQFRKADGSYAAWLSRGSSTWLTAFVLKVLSLAQEQVGGSPEKLQETSNWLLSQQQADGSFQDLSPVIHRSMQGGLVGNDETVALTAFVTIALHHGLAVFQDEGAEPLKQRVEASISKANSFLGEKASAGLLGAHAAAITAYALTLTKAPADLRGVAHNNLMAMAQETGDNLYWGSVTGSQSNAVSPTPAPRNPSDPMPQAPALWIETTAYALLHLLLHEGKAEMADQAAAWLTRQGSFQGGFRSTQDTVIALDALSAYWIASHTTEERGLNVTLSSTGRNGFKSHALQLNNRQIRGLEEELQFSLGSKINVKVGGNSKGTLKVLRTYNVLDMKNTTCQDLQIEVTVKGHVEYTMEANEDYEDYEYDELPAKDDPDAPLQPVTPLQLFEGRRNRRRREAPKLTSLSDRYVSHFETEGPHVLLYFDSVPTSRECVGFEAVQEVPVGLVQPASATLYDYYNPERRCSVFYGAPSKSRLLATLCSAEVCQCAEGKCPRQRRALERGLQDEDGYRMKFACYYPRVEYGFQVKVLREDSRAAFRLFETKITQVLHFTKDVKAAANQMRNFLVRASCRLRLEPGKEYLIMGLDGATYDLEGHPQYLLDSNSWIEEMPSERLCRSTRQRAACAQLNDFLQEYGTQGCQV

SEQ ID NO: 88272 - DNA, 5097 bp, Artificial Sequence
  derived and/or modified sequence
atgcggctgctgtggggcctgatctgggccagcagcttcttcaccctgtcactacagaagcccagactcttgttgttctctccatcggtggtgcatttgggcgtgccactgtcggtgggggtccagctccaggatgttccccgtggtcaggtggtcaaagggagtgtgttcctccgtaacccttccagaaataatgttccctgctcgcccaaagtcgatttcactttgtcgtctgagagggactttgctctgttatcccttcaggtccccctgaaagacgccaagtcttgtgggctgcaccaactccttagaggacctgaagtccagcttgtggcccacagcccctggttaaaggattccctgtcgcggacaaccaacattcagggcataaacctgctcttttcttctagacgaggccatttgttccttcagactgaccagcctatctacaatcccggacagcgggtgaggtacagggtatttgccttggaccagaaaatgagaccctccacagatacgatcactgtaatggtggagaattcccatggtttgagagtgaggaagaaagaagtgtacatgccgagctccattttccaagacgatttcgtgataccagacatctccgaaccgggcacatggaaaatctccgcccgattttccgatggcctggagtctaactcttccacccagtttgaggtgaagaagtatgtactgcccaacttcgaggttaagatcaccccagggaagccctacattctgactgtgccgggacacctggatgaaatgcagttggatattcaggcgagatatatctacggtaagcccgtccagggagtggcctacgtgaggttcggcctgttagacgaagacggcaagaaaacttttttcaggggattagagagccagaccaagctggtgaatggtcagtctcacatctctctctccaaggctgaattccaggacgccttggagaagttaaatatggggattactgaccttcagggactccggctgtacgtagccgcggccattatagaatatcctggaggggagatggaggaagctgagctcacgagctggtacttcgtatcttctcccttcagtctggacctgtccaaaaccaaaagacatttggtgcccggtgccccattcctcttgcaggccctggtgagagaaatgtccggcagtcccgccagtggcataccagtgaaagtgtctgctaccgtgtctagccccggaagtgttcccgaagtccaggatatccagcagaacacagatgggagtggacaggtcagtatcccaatcattatccctcagactatttccgaattgcagctgtctgttagcgccggcagcccacaccctgctatcgcaagactcactgtggccgcccccccatctggcggaccagggtttctgtcaatagagcggcctgacagtagacccccaagagtgggggatacactcaacctaaacctcagagccgtaggttccggagctacgttcagtcactactattacatgattctgtctcgggggcagattgttttcatgaaccgggagcctaagcggaccctcacctcggtttcggttttcgtggaccaccacctggcaccatctttctattttgttgctttttattatcacggcgaccaccctgtggcgaactctttgcgcgtagatgtgcaagctggggcatgcgaaggcaagttggagctgagcgttgacggtgcgaagcagtacaggaacggagagagcgtgaagctgcatctcgagacagatagtctagctctggtggcccttggagctctcgacactgcactatatgctgccgggagtaagagccacaaacccctcaacatggggaaagttttcgaggccatgaattcatatgacctcggatgtgggcccggcggcggagacagtgccttgcaggttttccaggcagcggggttagcgttttctgacggcgaccagtggacgctgagtcgtaagcgattgagttgtccaaaggaaaagactacgcgcaagaaacgcaacgtgaactttcagaaagcaatcaatgagaaacttggccagtacgcttccccaacggccaagcgctgttgtcaggatggtgtaacacggcttcctatgatgcggagctgtgagcagcgtgcggcccgagtgcagcagcccgattgccgggagccttttctctcctgttgtcagttcgccgaatctctgcgcaagaagagtagggacaaaggccaggctggactccaaagagcactcgaaatcctgcaagaagaggaccttattgacgaggacgacattcctgtcagatcattttttcctgagaactggctctggagagttgagacggtggatcggtttcagattctgacattatggctgcctgatagcctgactacttgggaaatacatggtctctcgttatcaaagacaaaaggtctatgcgtggctacacccgtgcaactgcgcgttttccgcgaatttcatctccatttgcgacttcccatgtctgtgcgcagatttgagcagcttgagctgcggcccgtgctgtacaactacttggataagaatctgactgtgtccgtgcatgtgtcccctgtagaaggactctgcctcgccggagggggagggctcgctcagcaggtgctggtccccgcaggaagcgcacgccccgtggcttttagtgtcgtacccacggctgccgcggcagtgtccctgaaggtagtcgcccgtggctcattcgaatttcccgtcggtgatgcagtgtcaaaggtgttacagatagaaaaggaaggcgctattcatcgtgaagagctcgtttatgagctgaatccgttggatcaccgcggcagaacactggagatacccggcaactccgaccccaatatgattccagacggggacttcaatagttacgtccgggtgacagcttccgatcctctggataccttaggatccgaaggggcactcagtcctggcggcgtcgcctcgctcttaaggttgccaaggggatgcggagagcagacaatgatttacctggcgcccacgttggctgcatctcggtatctagacaagaccgagcagtggtcaaccctcccacctgaaacgaaggaccacgccgtggatctcatccagaagggttatatgagaatccagcaattccgtaaggccgatggcagctatgctgcatggctgagcagaggcagctctacctggctcacagccttcgtgctgaaggtgctctcgctcgcgcaggagcaggtggggggctctcctgagaaactgcaagaaacatccaactggttattaagtcaacagcaggcagacggctctttccaggacttgagccctgtcattcaccgttccatgcaaggcggcttggtgggaaacgatgagactgtcgcgctgaccgctttcgtcactatcgccctgcatcacggactggccgtgtttcaagatgaaggggcggagcctctcaagcagagggtggaggctagcatatctaaagcaagttcattccttggagaaaaggcatcagctggcctgctaggagctcatgccgccgcgatcactgcctatgccctcacgcttaccaaagctcctgctgatctccggggtgtagcacacaataacctcatggctatggctcaggagactggcgacaacctgtattgggggtcagtgacaggaagtcagtcaaacgccgtctcccccactcctgcaccacgcaacccttccgatcccatgccccaagctccggctctgtggatcgagacaaccgcctacgccctgctgcacctgctactccatgaagggaaggccgagatggctgaccaggccgccgcctggctgacaaggcaaggcagttttcaagggggctttcgcagtacacaggacacggtcattgcacttgatgccctgagtgcgtactggatcgcctcacacactacggaagaacgcggcctgaacgtcacactttcaagcacaggcaggaatggatttaagtcgcatgccttacagctcaacaatagacagatcaggggcctcgaagaagaactacagttcagcctcggctctaaaattaatgtgaaggtgggtggaaactcgaaaggaactctcaaagtgcttaggacttataatgtgctagacatgaaaaacaccacttgccaagacctacagatcgaggttactgtcaaaggccatgtcgagtatactatggaggccaatgaggactacgaagattacgagtacgacgaactgccggcaaaggacgatcccgacgctccactccaaccagttacccccctgcagctttttgaggggcggagaaaccggagacgaagagaggccccaaagttgacgtcattgtcggaccggtacgtatcacacttcgaaacagagggaccacacgtgctcctctactttgattcagttcccacttctagagaatgcgtcggcttcgaggccgttcaggaggttcccgtaggcctggtgcaacccgcctctgcaactctatatgactactacaatccagagaggcgctgttcagtgttttatggcgcgccttccaaatcaagactcttagctaccctgtgctctgctgaagtgtgtcagtgtgcggaggggaagtgtccacgccagcggagggctttggagcgcggcctgcaggacgaagacggctatagaatgaaatttgcctgttactacccccgggtggaatacggtttccaagtgaaggtgctccgggaggatagtagggcagcttttcgactgttcgaaacaaaaataacgcaggtgctacacttcacaaaggacgtgaaggccgccgcgaatcagatgcgaaactttctcgtcagagcctcgtgccgactacgactggagcctggaaaggagtatctgatcatgggcttggacggcgccacttacgatctggaagggcacccccagtacttgctggatagcaacagctggatcgaagagatgcctagcgagaggctgtgccgatcaactagacagcgggctgcttgtgcccagctcaacgatttccttcaagagtatggcacacaaggttgccaggtgtag

SEQ ID NO: 88273 - DNA, 5097 bp, Artificial Sequence
  derived and/or modified sequence
atgcggctgctgtggggcctgatctgggccagcagcttcttcaccctttctctgcagaaaccaaggctgctcctgttctcaccctctgtagtgcatctaggcgtgccgctgagtgttggtgtccagctgcaagacgtgccaagaggacaggtcgtaaaaggaagtgttttcctgaggaatccaagccggaataacgttccctgcagcccaaaagtagactttacactgagctctgagcgggactttgcgctgttgtctctgcaggttcccctgaaggatgccaagtcttgtggtctgcatcagctcctgcgcgggcctgaggttcagctggttgcccactcaccctggctcaaagacagcttaagcagaactaccaacatccaaggtattaatctgctgttctccagccgaagggggcatctgttcttacagactgaccagcctatctacaacccaggtcagagagttaggtatagagtcttcgcactggaccagaagatgcgtcctagcaccgatactatcactgtcatggtcgaaaattctcacggactccgcgtgcgaaaaaaggaagtttatatgcctagttcgatttttcaggacgacttcgtcattccagacatcagcgagcccggtacctggaagatctcagcgagattctccgatgggctggagtctaacagctccacgcagtttgaggttaaaaaatatgttctacccaacttcgaggtgaagataaccccagggaagccctacattctgacagtccctgggcatttagacgaaatgcagctggatatccaggctaggtatatttacggaaagccagtacagggggtggcctacgtcaggttcggactgctggacgaggacgggaaaaaaactttcttccggggtctggagtcccaaaccaagctggtcaacggccaatctcacatatctctgagcaaggctgaattccaggacgcactggaaaagcttaatatgggaatcactgatctgcaaggtctgaggctatatgtggccgcagccatcattgaatatcccgggggcgagatggaggaggccgagttaacttcctggtacttcgtctcctctcctttctccttggacctgagcaagacaaaacggcatctagtgcctggagccccattcctgttacaggccctggtgagggagatgtccggatctcccgccagcggaatacccgtgaaggtcagcgctactgtgagctcgcccggcagcgtgccggaggtgcaggacattcagcagaacaccgacggctccgggcaggtgtcaatccccattataatcccacagactatatctgagctgcagctgtccgtgtctgccggatcccctcaccctgccattgctagactgaccgtagccgcacctccctccgggggccccggatttttgtcgatcgaacgcccggacagcagaccacctcgcgttggcgataccctgaatttgaacctacgcgcggtaggcagcggagctaccttctcacactactactacatgattctgagtagaggccagatcgtcttcatgaatagagagccaaaacggacactgacttccgttagcgttttcgtggaccatcatctcgcccctagcttttacttcgtggcattctactaccacggtgaccacccagtggccaattcattaagggttgacgtgcaagccggcgcatgtgagggcaagttggaactctccgttgacggagccaagcaatatagaaacggcgagtcagtgaagctgcacctagagactgattcattagctttagtggctctgggagcactggacactgctctctacgctgccggttccaaaagtcacaagcctctcaatatgggaaaggtgtttgaagccatgaactcctacgatctcggatgtggacctgggggaggagacagtgccctgcaggtgttccaggccgctggtctcgctttttccgatggggatcagtggactctgtccaggaaaagattatcatgtccgaaggagaagacaacaagaaaaaagcgcaatgtcaattttcagaaggcaataaatgagaaattgggtcagtacgcttccccaacagccaagcgctgctgccaggatggagtaacacggctgccaatgatgcgctcttgcgagcagagggctgcccgggtgcagcagcctgattgccgtgaaccatttttgtcatgctgccagttcgccgagtcactgagaaagaaaagccgcgacaagggccaggccggcctgcagagggcgctggagatccttcaagaggaggatctgatcgatgaggatgacatcccagttcgctcgttttttccggaaaactggttgtggcgtgtagagacggttgatagattccagattctcacactgtggttaccagactccctaaccacttgggagatacacggcctgtccttgagcaagacaaaaggtctctgcgtggccacccccgtgcagctcagagtattccgggaattccacctgcatctgcgtctgcctatgtccgtgcgccggtttgaacagctggaacttagacctgtcctctataactacttagataagaatctcacggtctccgtgcacgtctctcccgtggagggcttgtgtttggccggcggaggcgggctagcccaacaggttcttgtgcctgccggaagcgcccgacccgtcgcattctccgtggtgccaacagccgctgccgccgtgtccctgaaggtcgtggcacggggctcgtttgaattccctgtaggagacgctgttagcaaggtgctgcagatagaaaaggaaggggctatccacagggaggagctggtgtatgaactcaacccactggaccataggggtcgaacattagaaatccctggaaattctgaccctaatatgatcccggacggtgatttcaattcctatgtacgcgtcacagcctctgaccctctggatacattgggcagtgaaggcgccctctccccaggtggagtggcctcacttctacgattgccccgcggctgtggtgaacaaaccatgatctacctggcacccactctcgccgccagccgatacctggacaaaactgagcagtggagcactcttccacccgaaaccaaagatcacgcggtcgacctgatccagaagggatacatgcggatccagcagttccgaaaagcggatggctcgtacgccgcctggctttctcggggatcaagcacctggctgacagcgtttgtcctaaaggttcttagcctagcgcaggaacaggtgggcggctctccagagaaactgcaagagacatctaactggctgctcagccagcagcaggcggatgggagtttccaagacctgtccccggtcatccacagatcaatgcaaggcggcctggtagggaatgacgaaacagtcgccctcaccgcctttgtcacaatcgctctccatcatggcctggccgtattccaggatgaaggggctgaacccctgaagcagagggtggaggcctcaatatcgaaagccagcagctttcttggagaaaaggcgagcgctggattattgggagcccacgcagccgctatcaccgcttacgcgttaaccttgacgaaagcacccgcagacctcaggggagttgcccataacaatctgatggccatggcacaagagactggagacaacctttactgggggtccgtcacaggatcccagtccaacgccgtgtcacctacgccggcccccaggaatccctctgatccgatgccacaggctcctgccctctggatcgagactacagcatacgctctcctgcacctgctgctgcatgaaggaaaggcagaaatggccgatcaagcggccgcctggttaacgcgacaaggctcgtttcagggagggtttcgttctactcaggataccgtgatcgctttagacgctctcagcgcctattggattgcctcccacacaacggaagagagaggtctgaatgtgacgctgagctcaactggtcgtaacggatttaaatcacatgcacttcaactcaacaatcggcagattcgcggcctcgaagaagagctgcagttctcgctcggctctaaaatcaatgtaaaggtcggcggcaacagcaaggggacactgaaagtgttacggacttacaatgtgcttgatatgaagaacaccacctgccaggatctccagatcgaagtgaccgtcaagggacacgtcgagtacaccatggaggccaacgaagactacgaagattacgaatacgatgaattaccagccaaagacgatccagacgcccccttacagcccgtcacccccttacagctttttgaagggcggcggaacagaaggcggcgtgaagctcctaaacttacatccttgtccgatagatatgtcagtcattttgagacagaaggacctcatgtgctactctacttcgacagtgtccctacctctagagagtgtgtgggctttgaggccgtgcaagaggtcccggtcggccttgtgcaacctgcgtcagccactctctacgactactacaatccggagagacgttgttctgtgttctatggggccccaagtaaatctagactcctggctacgttatgttctgccgaggtgtgccagtgtgcagaaggaaaatgcccccgtcagaggagggcgcttgaacgagggctgcaggacgaggacggttatcgaatgaagttcgcctgctactaccctagggtggaatacggattccaggtgaaagtgctgagggaggactcgcgcgccgcgttccgactgtttgaaacgaaaatcacacaggttctccactttactaaggacgtgaaggcggctgccaatcaaatgaggaacttcctcgtgagggctagttgccggctgcggctggaacctggcaaggagtacttaattatggggctagacggggcgacatatgacctagaggggcatccgcagtatttgcttgatagtaattcatggattgaagaaatgccaagcgagcgcctttgccggagtacccgccagcgcgcggcctgcgctcagctcaatgactttctacaagagtatgggacccagggctgccaggtgtag

SEQ ID NO: 88274 - DNA, 5097 bp, Artificial Sequence
  derived and/or modified sequence
atgagactgctgtggggcctgatctgggctagctctttctttaccctgagcctgcagaaacctcgcctcctcctgtttagcccaagtgtggtgcaccttggagtccctcttagtgtgggcgtccagctgcaggatgttcctcgcggtcaggtagtgaaagggagtgtcttcctcagaaacccatcgaggaacaatgtcccgtgctcaccaaaggtggatttcacgctgagtagcgagcgggattttgccctgctcagcctgcaggttcctcttaaggacgctaagagttgcggcttgcaccagctactccgcggaccagaggtgcagctggttgcccattcaccatggttaaaagacagtctgtcccggacaacgaacatacaaggcataaacctgttatttagcagccggagaggccacctgtttctccaaactgatcaaccgatttataatcccggtcagcgggtgcgttaccgagtctttgcgctggatcagaagatgagaccgtccacagatactattaccgttatggtcgagaactcccatgggcttcgcgtccgtaagaaggaagtgtatatgccctcttccatctttcaggacgactttgttatacccgacatttcagagccaggtacatggaaaatttctgcccgattcagcgatgggctcgagtctaactccagtacccagtttgaagtcaagaagtacgtgctgcctaatttcgaagtgaagatcactcccggaaagccctatatcttgacggtgcccggtcacctggacgagatgcagcttgacatccaagccagatacatttatggaaaaccagtgcagggtgttgcctacgtccgctttggcctattagatgaggacggcaagaagacattctttcgcggactcgagtcccagactaaattggtcaacggacaaagtcacattagcctgtccaaggcagaatttcaggacgccctggagaagctgaacatgggcattactgacttgcaaggcttgcggctgtacgtagcagcggcaattatcgaatacccgggtggggaaatggaagaagctgaactgaccagctggtacttcgtgtctagtcctttcagcctggacctgtcgaaaaccaagcgccatttggtccctggtgccccttttcttctacaggccctagttagggaaatgtccggttctcctgcttctggcattcctgtaaaagtctcagcgacggttagttctccaggcagcgtgcccgaagtccaggatattcagcaaaatacggacggctccgggcaggtgtcgataccaattatcatcccccagacaatatcagagctgcaattgagcgtgagtgcgggaagtcctcatccagcaatcgcgcgactcactgttgcagccccacctagtggaggtccaggcttcttgagcatcgagcggcctgactcccggccacctcgcgtcggcgatactttaaaccttaatctgcgcgcagttggttcgggtgcgacattttcacactattactacatgattttgtctagaggccagatcgtgttcatgaacagagagcccaaacgcactctgactagcgtgtctgtgttcgtggaccatcacctagctccatcattctacttcgttgccttctattatcacggcgaccatcccgttgccaatagtctgagggtcgatgtgcaggccggagcttgtgagggtaagctggagttgtccgtagacggcgctaaacagtaccggaacggcgagagtgtcaaattacacctcgaaaccgactcactcgcactcgttgcattgggcgcactggatacagctctttacgccgcaggctcaaagagccacaagccactgaacatgggaaaagtgtttgaggcaatgaactcctacgatctcggttgtggtcccggaggcggagattctgcactgcaggtgtttcaggctgcaggcctcgccttctccgacggggaccagtggactctgtcacgcaaaagactcagttgcccaaaagaaaaaacaactcgcaagaagcgaaacgtcaattttcagaaagctattaatgaaaaattagggcagtacgctagtcctacagcaaaacggtgctgtcaggacggggtgaccaggttgcctatgatgcggtcctgcgagcaaagggcagcgagagtccagcagccggactgtcgggagccttttctgtcatgttgccagtttgctgaaagcctgcgtaagaaaagcagagacaaaggccaagctggattgcagcgcgcactcgagattctacaggaagaagatctgattgatgaagacgatatacccgtcagatcgttctttccagaaaattggttgtggcgtgtcgagactgtcgacaggttccagatcctcacactgtggttgcccgactctctcacgacatgggagattcacggcctctctttgtcaaaaaccaaaggcctttgcgttgcgactccggtacagctgcgggtcttccgagaatttcacctccacctaagactccctatgtctgtgcggaggttcgaacaactcgagctgcggcctgtgctgtacaattacctagacaagaatctgactgtgagtgtccacgtttcaccagtagaagggctgtgtctagctggcggaggcggactggcgcaacaagtgctggttccagccggttccgctcgccctgtcgccttttcagtggtaccaacagccgcagctgccgtgagtctcaaagtggttgccagagggtcttttgaattccccgtgggcgacgccgtctctaaggttttacaaattgagaaggaaggtgcaattcacagagaagaactggtatatgagctgaatcctctagatcacagaggcaggacactggaaattccaggcaatagtgaccccaacatgattccggacggtgatttcaactcctacgtacgcgtcactgcttccgaccctttggacactctgggttccgagggggcattgagtcctggcggagtggcctccttactgcgcctccccagggggtgtggggagcagaccatgatttatctggcacctactctcgccgcatccaggtatctggataagaccgagcaatggagcactctgccacccgagacaaaggatcatgccgtcgatctgattcagaagggctatatgcgcattcagcagtttaggaaggctgacggtagctatgccgcttggctgtcgcgcggatccagcacatggttgacagcgtttgttctgaaggtgttgtcactggcccaggagcaagtgggaggctcgcctgaaaagttacaggaaacgagcaattggcttttaagccagcaacaggccgacgggtcctttcaggacctatcaccagtgatccatagatccatgcagggaggactggtggggaatgacgaaaccgtcgccctaacggcattcgtgaccatcgccttacaccacggattggccgtgttccaagatgaaggagctgagccattaaagcagcgggtggaggcctcaataagcaaggcatcctcctttctgggggagaaagcttccgcagggctgctgggcgcacacgccgctgctatcactgcatacgccctcactttgactaaggccccagccgacttacggggagtagcacacaacaatctcatggccatggcacaggagacaggggacaacttatactggggctctgttacggggtcccaatccaacgccgtgagccccactcccgctcctagaaacccctccgatccaatgcctcaggcgcctgcactgtggattgagactaccgcttacgctctactgcatctgctgttgcatgagggaaaggctgaaatggctgaccaggctgccgcatggctgactcgccaaggctcgttccaggggggatttagatccacgcaagatacggtcatagcgctggacgcactctcagcatactggattgcgagccatactactgaagaacgcggtcttaatgtcacgctctcatcgacagggagaaatggatttaagtcacatgccctgcagctcaacaataggcagatcagagggctggaagaagaactgcagttctccctgggctctaaaatcaatgtcaaggtagggggaaactccaagggaactctgaaggtacttcggacctacaacgttctggacatgaagaatacaacctgtcaagacttgcagatcgaggtgacagtcaaaggacatgtcgaatatactatggaagcaaatgaggactatgaggactacgagtatgatgaactgcccgctaaagatgatccagacgctccattgcagcccgttacccccttacagctcttcgagggacgacggaaccgtaggcggagggaagcacctaaactaacttcactgtccgatagatacgtgtcccactttgagaccgagggccctcacgttctgctgtatttcgattccgtcccaactagccgagagtgcgtaggttttgaggctgtgcaagaggtgcctgtgggtctggtgcagccggcttcagctaccctgtatgactactataaccctgagcgacgttgctccgttttctatggagctccctcaaagagcagactgctggccaccctctgttctgccgaagtgtgccagtgtgctgaagggaagtgccccagacagcgccgagcattggagagaggtttacaagatgaagatgggtacagaatgaagttcgcctgctattacccaagggtcgagtatggctttcaggtgaaggtgctgagggaagactcacgcgcagccttcagactgttcgagaccaagattactcaagtactgcattttaccaaggacgttaaggccgcagccaatcagatgcgaaatttcttagttcgcgcttcatgccggctgcggctggagcccggaaaagaatatttaataatgggactggatggcgcaacatatgacctagaggggcatccacagtacctcttagactctaactcatggatagaggaaatgcctagcgaacgtctctgtagatcgacacgtcagcgggcagcatgcgcacagctgaacgacttcttgcaggaatacggcacccaaggatgccaggtgtag

SEQ ID NO: 88275 - DNA, 5097 bp, Artificial Sequence
  derived and/or modified sequence
atgcggttgctctggggactcatctgggcctcttccttttttactttgtcactccagaagccccgattactgttgtttagcccttccgtggtccacctaggagtcccgctcagcgttggagtccagctgcaggatgtgccaagaggccaggtggtgaagggatcagtctttctaagaaatccgtctcgcaataatgtcccttgtagtcctaaagtcgacttcaccctcagtagtgaaagggatttcgcactactttcactgcaggtgcctctgaaggatgccaagagctgcggcttgcatcagcttctgcgcggacctgaagttcaactggtggcacactccccctggctgaaggactctttgagcaggaccaccaatattcaaggaattaatttgctgttctcttcacgacggggtcacctttttcttcagacagatcagcccatatataaccctggacagcgagtaaggtaccgcgtgtttgccctggatcagaagatgcgcccatctaccgataccatcaccgtgatggtggaaaacagccacggcctaagagtgagaaagaaggaagtgtacatgccatcctccatttttcaggacgactttgtcattcccgatatcagcgaacctgggacctggaagatatcagcgaggttcagcgatgggctcgagtccaattccagtacccagtttgaagtaaagaaatacgtgctgcctaacttcgaagtcaagatcaccccgggaaagccctacatcctgacagtgccagggcacttggacgagatgcagctcgacattcaggccagatacatatacggtaagccggtacagggtgtggcatacgtgcggtttggcctgctagatgaggatggcaagaagacatttttcaggggcttggagtcccagactaagctggtgaatggccaatctcacattagcttgagcaaagccgagtttcaggatgctctggagaaactcaatatgggcattactgacttacagggactgagactatacgtggcggcagccataatcgagtatccaggaggggaaatggaggaggccgagctcacaagttggtattttgtgagttcacccttttccctagacctgtctaaaacaaaaaggcatctcgtgcccggtgcaccgttccttctgcaggcactggtgagggaaatgtcaggctcacctgccagtgggatccctgtgaaagtttctgcgacagtctccagccctgggagcgtgccagaggtgcaggacatccaacagaacaccgatggcagcggtcaagtgtctatacctattattattccccagacgatcagtgagctgcagctgtcagtgagcgccggttcaccccaccccgctatagcacgtctgacagttgcagctcccccatcagggggtcccggatttctttccatagaaagaccagatagcaggcctcccagggtgggcgacactctgaatctgaatcttcgagcagttggatctggggcaaccttctcccactattactatatgatactcagccgcggacagatcgttttcatgaatagagagcctaaacgaacattgacttcggtgtccgtctttgtagatcatcatcttgcccctagcttttatttcgtggccttttactaccacggggaccatccagtcgcgaattcgctaagagtggatgtgcaagcaggcgcttgtgagggaaagctcgaactctccgtcgacggcgcaaagcagtatagaaatggtgaatctgttaagctgcatctggagaccgactccttggctctggtcgccctcggcgcactggatacagcattatatgccgcaggtagcaagagtcataaaccccttaacatggggaaagtgttcgaggctatgaacagctacgatctggggtgcgggcctggaggtggggatagtgcattacaggtattccaggctgcaggtcttgctttcagcgacggagatcagtggacactgtcaaggaagaggttgagctgcccgaaagaaaagactactcgaaaaaagagaaatgtaaacttccagaaagccattaatgaaaagctcggacagtatgcttcacccacagcgaagcgctgctgtcaggatggggttacccggctacctatgatgcgctcatgtgaacaacgagctgccagggttcagcagccagactgtcgggaacccttcctaagctgctgtcagttcgccgagagtcttaggaagaagtcacgtgacaagggacaggccggacttcaacgtgccctcgaaattctccaggaggaggatctgatagatgaagatgatatacctgtgcgtagcttttttccagagaactggctgtggcgcgttgaaactgtagaccgatttcagatcctgacactttggctcccagatagtctgactacttgggaaatccacggccttagcctgtccaagacaaaaggactttgcgtcgcaactcctgttcagctccgggtcttccgggagtttcacctccacctcaggttaccgatgtcggtccggcgatttgagcaacttgagttgcgcccagtcctttacaactatttagataaaaatcttacagtgagcgtgcatgtctcacctgtggaaggcctgtgtctggctggtggcggtggactcgctcagcaggtgctggtacccgcaggctctgcgcgaccagtagcattcagcgtagtcccaacagcggcagccgctgtttccctgaaagtcgtcgcccgtgggtcatttgaattccccgtcggcgatgcagtctcaaaggttctccagattgaaaaagagggcgctatccacagggaagagttagtctatgagctcaatccattggaccatcgagggcgtacgctggagattccaggaaatagcgatcccaacatgataccggacggagacttcaactcctatgtcagagttaccgcatctgatcctctggatactttgggttcagagggagcgctgtctcctgggggtgtcgctagcctgcttagactccccagaggctgcggtgagcaaacaatgatctacctggcccctaccctggccgcatcgcggtacttagacaaaaccgagcagtggagcacattgccacctgagacaaaagaccacgctgtcgatctcattcagaaaggatatatgagaatacagcaatttagaaaggcagacggtagctacgcagcctggctgtctcgtggaagctcgacatggcttacagctttcgtgctgaaagtgctatctcttgctcaggaacaggtcggcggatcaccggagaaactccaggaaacctcgaactggctcctctcccagcaacaagcggatggaagctttcaggatctgagtccagtgatccatagatccatgcagggcggtttggttggaaatgacgagactgttgctctgacagcttttgttaccatagctctgcaccatgggcttgcagtgttccaggacgagggagcagagcccctgaaacagcgcgttgaggcctcaatctcaaaagcgagctctttcctgggggagaaagcctccgcgggattactgggggcacacgctgccgcaatcaccgcatacgcacttacactcactaaagcacctgcagacctaagaggcgtcgcccacaacaaccttatggctatggctcaggagactggtgacaacctgtactggggttctgttaccgggtctcagtcgaacgccgtgtcaccaactcccgcaccaagaaacccttccgatcccatgcctcaggcacccgcactctggattgagactaccgcttatgccctgctgcacttactattacatgagggcaaggcggagatggccgaccaagctgctgcctggctcacgaggcaggggagttttcagggtggattcaggagcacccaggatacggtcatcgctttggacgccctaagcgcctactggatagcatcccatacaaccgaggaacggggtctcaatgtgaccttgtcaagcacaggccgaaatggcttcaagagtcacgcactacagctgaacaatcgacagattagaggattagaagaggagctccagtttagcctgggcagcaaaatcaacgtgaaagtggggggtaatagcaagggcacactgaaagttctgcgcacttataatgtcctggacatgaagaatacaacttgtcaagatctacagattgaggttacagtgaaaggacatgtggagtacactatggaggcaaacgaggattatgaggactatgagtacgatgaattgcccgctaaggacgatcctgacgctcccctccaaccagtgacacctttacaactattcgaaggtcggagaaacaggcgcaggcgagaagcaccaaaactgacttcgctgtccgatcggtatgtgtctcattttgagaccgaaggaccccacgtgctcctgtacttcgactcagtgccaacttcgagagagtgtgtcggcttcgaagcagtccaggaagtgcccgtcgggctggtgcaacctgcctcggccaccttatacgactattataatcctgaacggagatgttcggtgttttacggggctccaagtaaatctagactcctggccacactctgcagcgccgaagtgtgccaatgtgccgagggcaagtgtccaagacaaagaagggccttggagaggggactgcaagatgaagatggctatcgcatgaaattcgcgtgctactacccaagggtcgaatatgggtttcaggtgaaagtgctgcgtgaggacagtcgggctgcgtttcgcctctttgagaccaagatcacacaagttctccatttcaccaaggacgtcaaggccgcagccaaccagatgcggaatttcttggtgcgcgcatcctgccgcctgcgtttggagcctgggaaagagtacctgatcatggggctcgacggcgctacttacgatctggagggccaccctcaatacctgctcgactcaaattcgtggatagaggagatgcccagcgaacgattgtgtaggagcactagacagagagcagcctgtgctcaactcaacgatttcctgcaggaatatggtacgcagggatgtcaggtgtag

SEQ ID NO: 88276 - DNA, 5097 bp, Artificial Sequence
  derived and/or modified sequence
atgcggctactttggggactcatctgggccagttctttcttcaccttaagcctgcagaaacctcggctgttgctgttcagcccatcagtggtccatctcggcgtgccactgagcgtgggtgtacaattgcaagatgttccccgtggacaggtggtgaaagggtcggtgttcctccgcaatccttccagaaacaatgtaccatgttcgcccaaggtagattttaccctctcctccgagcgggacttcgcactcctgagtcttcaggtccctcttaaggatgcgaaaagctgtggtctccatcagcttctgagagggccagaagttcagctggttgcacactccccctggctgaaggactcactttccagaacaaccaatattcagggcatcaatcttctcttcagttccagacgaggccacttatttctccagaccgatcagcccatatataacccgggccagcgagtgcgttatagggtgtttgcattagaccagaaaatgcgcccaagtaccgatactatcactgtgatggtggaaaactcccacgggcttagagtccggaaaaaggaagtgtatatgccatctagtatcttccaggacgactttgtaatacctgacatttcagaacccgggacgtggaaaattagtgcccggtttagtgacggcctggaatccaactcttccacccagtttgaagtgaaaaagtacgtactgcccaatttcgaagtcaaaatcacaccgggcaaaccttatattcttactgtgccaggtcatctggatgaaatgcagctcgatatccaagccaggtacatatacggaaagcctgtgcagggcgtagcctacgtcagatttggactgctcgacgaggacggcaagaagacgttcttccgcggtctagaatcccagaccaagcttgtgaatggccagtcccacatctcattgagcaaggcagaattccaagatgctctggagaaactaaatatgggaataactgatctgcagggtctacgtctatatgtggcagcggctattattgagtatcccggtggggagatggaagaagccgagctgaccagctggtatttcgtgagctcacccttctctctggatctctccaagaccaagcgacacctggtgccaggagccccattcctcctgcaagctctggttcgcgaaatgagcggctcacctgcctccggaattcctgtgaaggtgagcgcaacagtcagcagtcccggatctgttcccgaggtacaagacattcagcaaaacacagacggctctggacaggtctctatcccaattattattcctcaaactatttccgaactgcaactgagtgtgtctgcagggagtcctcacccagcaatcgcgagacttacagttgccgctccaccaagtggaggcccagggttcctgagtattgaacgccctgactcccgccctcctcgggtgggcgatacactgaaccttaatttgagagctgtgggcagtggggctactttttcccattattattacatgattctaagtagaggccagattgttttcatgaaccgcgagcccaagaggacattgacctcagtgagcgtgttcgtagaccaccaccttgcccccagcttctactttgtcgcgttttactatcacggagaccaccccgttgccaatagcctacgcgtcgacgtgcaggccggagcgtgtgaggggaagcttgaactttccgtggacggagcaaagcagtaccggaacggggagtcagtgaagctccacttagaaactgattcacttgctcttgtggccctcggcgcgctggataccgcactgtacgccgccgggtccaaaagccataagcctcttaacatgggcaaggtctttgaggccatgaacagttatgatctgggttgcggtccaggcgggggggattcggcgctgcaagtgtttcaagcagccgggctggctttctctgacggagaccagtggaccctttctcgtaagcggctctcctgccccaaggaaaaaactacccgcaaaaagcgcaatgtgaatttccagaaggccattaatgaaaaactcggccaatacgcttcccccacagcaaagcgctgttgtcaagacggggtgaccagactgcccatgatgcgtagttgcgagcagcgtgctgctcgggtccagcaacctgattgccgggaaccatttctaagctgctgtcagtttgcggagtcactccgcaaaaaatccagagataaaggacaagcgggattacagcgcgctctggaaatcctgcaggaggaagacttaattgacgaggatgatatcccggtccgatctttctttccggagaactggctttggcgcgtagagactgtggacaggttccagattttgactttgtggctgcccgatagcctgacaacatgggaaatccatggtctctcgctttctaaaacaaaaggcttgtgtgtggctacccctgtccagctgcgcgtgtttagagagttccatctgcatcttcgccttccaatgagtgtgcggagatttgaacagctagaactgaggccggttctctacaactacttggataaaaacctcacagtgtcagttcatgtctctccggtggaaggcctgtgtctggcaggggggggtggactggcacagcaggtcctagttcctgcaggctcagctcgcccagtcgcatttagtgtagtgccaaccgcagcagctgccgtcagtctcaaggttgtcgccagggggagctttgaatttccggtgggcgacgcagtgtcaaaagttctccagatcgagaaggagggagcaatacaccgtgaggagttggtctacgaactcaaccccctggatcatcgcgggaggaccctcgagattcctgggaatagcgacccaaatatgattccggacggagactttaactcctatgtccgggtgactgcttctgatcctctggacaccttgggctctgaaggcgccctgagtcccgggggggtggcctcgctactccgactgcctaggggatgtggtgaacagaccatgatctatctggctccaactctggctgcctccagatacctagataagaccgagcagtggagcactttgcctccagagactaaggaccatgcagtagacctcatccaaaaaggatacatgcgaatccaacagttcaggaaggccgacgggagctacgccgcttggctgagcagaggaagctctacgtggctgacagctttcgtattaaaagtgttatcccttgcccaagaacaggttggcggctctccagagaaactgcaggagacctcgaactggctgctatcacagcagcaagccgacgggtctttccaggatctctcccctgtcatccatcgctccatgcagggtggacttgtgggaaatgacgaaacagtcgctctgaccgccttcgtaacaatcgcgctgcaccacggcctggccgtattccaggacgaaggggccgaaccactcaaacagcgtgtggaagcctcgatctccaaggcatccagctttctgggagagaaggcttcagcgggactcttgggtgcccacgccgcagctataaccgcctatgccctcacactcactaaagcgccagctgatctgagaggagtcgcacataataacctcatggccatggcccaagaaaccggcgacaacctctattggggctctgtgacaggatctcagtccaacgcagtctcgcctaccccagctccacgaaatccatcagaccctatgccccaggcacccgccttatggatcgagacaacagcatacgctctccttcacctcctccttcacgaggggaaagctgaaatggccgaccaggcggccgcctggctcactcggcagggaagtttccaaggtggctttagaagtacacaggacaccgttatcgcgttagatgcgctatctgcatactggatcgcttctcacaccactgaagagaggggactgaacgtcacgttgagctcgaccgggaggaatgggtttaagagccacgctcttcagttaaataatagacagatcagggggttagaggaggagctccagttttctctgggctctaagatcaatgtgaaggtaggaggtaacagcaaaggaaccctgaaagtgctgagaacatataatgtgctcgatatgaaaaacaccacctgccaggacctgcaaatcgaggttactgttaagggccacgtggagtatacgatggaggccaatgaagattacgaggattatgagtatgacgagctaccagctaaagatgacccagacgcaccccttcaacccgttacacccctccaactgtttgagggacggagaaatcggaggagacgcgaagcgcccaaactgacgtccctgagtgatagatatgtctcccatttcgaaacagaaggcccacacgtgctgctgtattttgatagtgtccccacgtctcgggaatgtgtcggcttcgaggctgtgcaggaagtcccagtgggcttggtccaaccagcatccgccactctctatgattactacaacccagaacgccgatgtagcgtcttctatggtgcaccatccaaatcccgccttctagcaactctgtgctcagccgaagtttgccaatgtgcagagggcaagtgcccccgccagagaagagccctggagcgcggactccaagacgaggacggataccggatgaagtttgcttgttactaccctagagttgagtacggtttccaggtaaaggtactaagagaggatagcagggcggcttttcgcctgtttgagaccaaaatcactcaggtcctacactttacaaaggacgtgaaggccgccgccaatcaaatgcgcaattttctggtccgcgcctcttgccgtttgaggttggagcctggcaaagaatacctcatcatgggcttggacggcgctacctacgaccttgaggggcatccccagtatcttctggactcaaatagttggatagaggagatgccgtctgaaagactctgccgaagcactcgccagagagccgcgtgcgctcagctcaacgattttttacaggagtacgggacccaggggtgtcaggtttag

SEQ ID NO: 88277 - DNA, 5097 bp, Artificial Sequence
  derived and/or modified sequence
atgcgactgttgtggggacttatctgggcatcttccttttttacactttccttgcagaaaccccgcttactgctgttcagtccatctgtggttcacctaggcgttccactgtcagtgggggtccagttacaggacgtacctcgaggccaagttgtgaagggaagcgtgtttctcagaaacccatcaaggaataatgtgccatgcagccctaaggtggattttacactttcctctgagagggatttcgcactcctgtcactgcaggtgcccctcaaggatgcaaagagctgtgggttgcaccagctccttcgcggcccagaggtacaactggtcgcccatagtccctggctaaaggacagcttaagccggactacgaatattcagggtatcaacttgctattttcttcgcggagggggcacttattcctccaaactgatcagcctatatacaatccaggtcagcgcgtgcgttaccgagttttcgctttagaccagaaaatgaggcccagtaccgatacaatcaccgtcatggttgagaatagtcatggcctgagggtacgcaagaaggaagtgtacatgcctagcagcatcttccaggacgactttgttatccctgacatctcagagcctggaacttggaaaatctctgcgcgctttagtgacggactagagagtaatagctctacccagttcgaagtgaagaaatacgtgctgcccaacttcgaagtcaagattactcctgggaaaccatatatactgacggtcccaggccacctggatgagatgcaattagacatccaggccaggtatatatatggcaagccagttcaaggggttgcgtacgttcgtttcggtctgctggacgaggatgggaaaaaaacctttttcagagggctggaatctcagaccaaattagtgaacggccagagtcatatctctctctccaaagcagagttccaggacgcactggaaaaactgaatatgggcatcaccgacttgcagggcctcaggctctacgtagccgccgccataattgaataccccgggggcgaaatggaagaagctgagttaacaagttggtacttcgtctctagccctttcagcctcgatctctctaagaccaaacggcaccttgtgccgggggccccctttttattgcaggccctggtgagagagatgagtggctctccggcatcaggaatcccagtgaaggtgagcgctacagtctcgtccccagggagcgtgcctgaggtacaggacattcagcagaatactgatggaagcggtcaggtgtcaatccctatcattattcctcagaccatttccgagctacaactctctgttagcgccggatccccccatccagcaatcgcccgtctgaccgtggcagctcctccaagcgggggtcctggatttcttagtatagaaaggccagatagccggcccccgagagtgggtgatacattgaacttaaatttgcgcgcagtaggtagcggagcaactttctcacactattattacatgattttatcacgtggacagatcgtctttatgaacagagaaccaaaacggaccttaacctctgtatccgtattcgttgaccaccacctcgcaccttctttttatttcgtggccttctattatcacggcgatcaccccgtggcgaattctctccgcgtggatgtgcaggccggcgcatgcgagggcaaactcgagctgtcggtggacggggccaaacagtataggaacggcgaatcagtcaaactgcatctggagaccgattcactggccctcgtggccctgggtgcacttgataccgcactgtacgctgccggatcaaagtcacacaaacctcttaatatggggaaagtcttcgaggccatgaacagctacgacctggggtgtgggcctgggggcggcgactcagcgctgcaagtgtttcaggctgccggccttgcgttctccgatggggatcagtggaccttgagccgaaagaggctgtcttgtcccaaggaaaaaacaactaggaagaagcgcaatgttaatttccaaaaggctataaacgaaaagctaggacagtacgcctctccaactgccaaacgctgctgccaagacggcgtgactagactgccaatgatgaggtcctgtgagcagagggctgcccgggtgcagcagcccgactgtcgcgaaccatttctgtcatgctgtcagtttgccgagtccctgagaaaaaaatctcgcgacaaaggacaggccggacttcaaagggctcttgagatattgcaggaagaggacctgatcgatgaggacgacatccccgttaggtctttcttccccgagaactggctttggagagttgaaactgtagatcggttccagatcctgaccctgtggcttccagactcgctgacaacgtgggaaattcatggactgtctctctctaagacaaaagggctctgcgtagccaccccagttcagcttagagtgtttagggaatttcatctgcaccttcgactgccaatgtcggtcagaaggttcgagcagctagagctgcgaccggtgctgtataattacctcgacaagaacctaactgtcagtgtgcatgtatctcccgtcgagggcctttgccttgcaggtggaggcggtctggctcagcaggtcctggtccccgccggatctgctcggcccgtggccttctccgtggtcccaacagccgctgctgcggtgagcttaaaagtggtcgctcgcggctcatttgaattccctgttggcgatgcagtctccaaagtccttcagatcgaaaaggagggcgcaatccatcgtgaggagctggtgtatgaacttaaccctctcgatcataggggcagaacattagaaatacctggtaactcagatcccaacatgatccctgatggagactttaacagttacgtgcgagtcaccgcctcagatcctctggatactctggggtcggagggcgccctgtcaccagggggggtggccagtctgctgcgtctgcctcgaggctgcggtgagcagaccatgatctaccttgcaccgacgctggcggcatcacgctatctggacaagacagaacaatggagcacattgccacctgaaaccaaggatcatgccgtggacctgatccagaagggctacatgcggatacagcagttcagaaaagcagatggttcctacgcagcttggctctccagaggctccagcacctggctgacagcatttgtgctgaaggtgctgagtctggcccaggaacaagtgggagggtctccagagaagctccaagagactagtaactggcttctcagccagcagcaggcagatggtagctttcaggatctaagccctgttattcaccgatctatgcagggcggtttggtggggaacgatgagaccgtggcattgacagcttttgtgacaatcgctctccaccacgggctcgccgtctttcaggacgaaggtgcagagcctctgaagcagcgcgtggaggccagcatcagtaaagcatcttcattcctgggagagaaagcctcggccggattactgggggcgcatgcggcagctatcactgcatacgccttaacactgactaaggcccctgcagatcttcgcggcgttgcacataacaacctaatggcaatggcacaggagactggcgataatttgtactggggttctgtgacagggtcccaaagtaacgccgtcagtcccactcctgcgccacgaaatcctagtgaccctatgccccaagctcccgctctgtggatcgaaaccacagcttacgccttgttacatctgttactgcacgaaggaaaggccgaaatggcggatcaggccgcagcgtggctgactagacaaggttcctttcagggaggtttccgcagcacacaggatactgtgatcgctctggacgccctgtcagcatactggatagccagtcacactactgaagaaagaggcttaaacgtgaccctttctagcacaggccggaacggattcaaatctcacgcccttcaactgaacaatagacagatccgcggattagaggaggaactccaatttagtctgggctctaagatcaatgtcaaggtgggagggaactcaaagggaacacttaaggtcctgcgaacttataatgtgttagatatgaagaataccacatgccaagacctgcaaattgaggtgacagtcaaggggcacgtagaatataccatggaagctaatgaggactacgaagattacgaatacgatgaactcccggcaaaagatgatcctgacgcgcctttacagccagtgactccgttacaactgtttgagggacggcggaatcgacgaaggcgagaggcaccaaaacttacgagtctgagtgacagatatgtgagccacttcgagaccgaaggaccacatgttctgctctatttcgacagtgttccgactagccgagaatgcgtaggattcgaagcagtacaagaagtcccagtcggactcgtgcagcctgcttcggcaaccctgtatgattattataacccagaaaggcgttgttcagtgttttatggtgcgcccagcaagagtaggctactggccaccctctgttccgccgaggtgtgtcagtgtgcagaggggaaatgtccgcggcaaaggcgcgccctggaaagaggtctgcaggacgaagacgggtatcggatgaagttcgcatgttactatccccgggtggagtatggctttcaagtgaaagtgctgagagaggactctcgcgccgcctttaggcttttcgagaccaaaattacccaagtgctccatttcaccaaggacgtaaaggcggccgcaaatcagatgcgcaacttcttagtccgggcaagttgtagacttcggctcgagccaggcaaggaatacctaatcatgggattagatggggctacatatgacctagaaggccatccacagtacctccttgacagtaattcatggatcgaagagatgcccagcgagagactttgtcggtccactagacagcgcgctgcttgcgcacaactgaacgattttcttcaggagtatggaacacagggctgccaggtgtag

SEQ ID NO: 88278 - DNA, 5097 bp, Artificial Sequence
  derived and/or modified sequence
atgagactgctgtggggactcatttgggcatcttcattcttcacgctgtcattgcaaaaacctcggctactcctgttctctccctctgttgtacatctcggggtgccgctgagtgtgggcgtccagttgcaagacgtgcctcgaggtcaggtcgtgaaaggtagcgtctttctgagaaacccgtcccgaaacaatgtgccttgtagtcccaaggtggactttaccttatcatctgaacgcgattttgctctactatccctccaggtgcccctgaaggacgccaaatcctgcggacttcatcagcttctgagagggccagaagttcagctggttgcacactccccctggctgaaggactcactttccagaacaaccaatattcagggcatcaatcttctcttcagttccagacgaggccacttatttctccagaccgatcagcccatatataacccgggccagcgagtgcgttatagggtgtttgcattagaccagaaaatgcgcccaagtaccgatactatcactgtgatggtggaaaactcccacgggcttagagtccggaaaaaggaagtgtatatgccatctagtatcttccaggacgattttgtcataccagatatctcagagcccggcacttggaagatttctgcccgctttagtgatggtctcgaaagcaatagctcaacccagttcgaagtgaagaaatatgtcctgcctaatttcgaggttaagatcacccccggtaaaccgtacatccttactgtgccaggtcacttggacgagatgcagctggacatccaggcaagatatatctatggcaaacctgtacagggcgtcgcctacgtgcgattcggacttctcgacgaagatgggaaaaaaacattctttagaggactggagagtcagacaaaactagtcaatgggcagtcacacatttccctgtccaaagccgaatttcaagatgcgctggagaagctcaacatgggcatcacagacctacaggggctcagactgtatgtcgctgctgcaatcatagaataccctggaggggagatggaagaggcagaactcacatcatggtatttcgtcagctcaccattcagcctagacttaagtaagacaaaaagacatcttgtccccggagctcctttcctgctgcaagctcttgtccgcgaaatgtccggctcacccgcatctggcatccccgtgaaagtgtccgccacagtaagtagtccaggatcggtgcccgaagtgcaggatatccagcaaaataccgacggatctggacaggtgtctattcccataatcatcccacagaccatttcagaactgcaactatccgtatccgctggcagtccccaccctgccattgcccggttgacagtggctgcgccaccctccggaggtcctggtttcctaagcattgaacgacctgactctcggcctcctagagtaggagacactcttaaccttaacctgagagctgttggctcaggtgctaccttcagccattattattacatgattttatccagaggccaaattgtgttcatgaacagagagccaaaaaggacactgacatctgtaagcgttttcgttgaccatcacttagcaccctcattctattttgtggccttttattatcacggagaccatcccgtggccaacagcctaagagtggacgtccaggccggggcctgcgaaggcaaattagagctgagcgttgacggagcaaagcaatatagaaacggggagagtgttaaactccacctagagacagattcactcgcactcgttgctcttggcgcactggacaccgccttgtacgcggctggctctaagtcacataagccactaaacatggggaaagtctttgaggctatgaattcctacgatctcggatgtggacccggagggggggacagtgccctccaagtttttcaagccgccggcctggctttcagcgacggagaccaatggaccttatccaggaaacgcctgtcatgtcctaaggagaaaacaacccgaaaaaagcgtaacgtgaactttcagaaagcaatcaatgaaaagttgggtcagtatgcaagtcctactgctaagaggtgttgccaggacggcgtcacaagactacctatgatgagatcctgcgagcagcgcgcagcccgggtccaacagcctgactgccgcgaaccttttctaagctgctgtcagtttgctgaaagcctgagaaagaagtccagagataaaggacaagccggactacaacgggcactggaaattcttcaggaggaagatttaatagacgaagacgatatcccagtccgctcctttttccctgaaaattggctttggagagtcgaaaccgtggatcgcttccagattctaactctgtggttgccagattcattgactacctgggagatacacgggctttctctatcaaaaaccaaaggactatgcgtagctactcccgttcagttaagggtgtttagagagttccacttgcacctgagattgcccatgagtgttcgcaggttcgaacaacttgaactgagacccgttttatataattacctggataagaacttgactgtatctgtacatgtgagtccagtagagggactgtgtttagcagggggaggaggactcgcccaacaggtgctggtgcctgccggctctgctcgtccagtggccttctccgttgtgccaacagcagctgcagcggtgtcactaaaggtagttgctagaggcagctttgaatttccggtgggcgatgcggtgtccaaagtgctccaaatagaaaaggaaggcgcaatccacagagaagagctggtgtatgaactgaatccgctcgatcaccggggccgtaccctagagattcctggaaattctgacccaaacatgatccccgatggtgatttcaatagctatgtgagagtgaccgcttccgaccctctcgacacgttgggcagcgaaggggccctgtcaccaggtggtgtggcatccctgctgcgtttgccaagagggtgtggggaacaaacaatgatctatctcgccccaacactggccgcctcacggtacctagacaagacagagcaatggagcaccctccccccggagacaaaagaccacgctgttgatcttattcaaaaagggtatatgagaatccagcagtttcgtaaggctgacgggagctacgccgcatggcttagtcgaggatctagcacctggctgaccgcatttgttctaaaagttctttctctagcacaggaacaggtcgggggctcaccagagaaattacaagaaacatctaattggctgctctctcagcaacaggcggacggcagcttccaggacctgtcccccgtaatccatagatccatgcaaggaggacttgttggcaatgacgagacagtggccctgacagcattcgttacgattgctttgcaccatggcttggcagtgttccaagacgagggtgcggaacctctgaagcagagagttgaagcttccatttctaaagcctcctcatttttgggcgaaaaggctagcgccggactcctgggggcccacgctgcagcaattactgcctatgccctcaccctcacaaaagcccctgcagacctcaggggtgtggcacacaacaacctaatggctatggctcaagagaccggcgataacttgtactggggctctgttacaggaagtcagagcaatgctgtttcacctacacccgctcccagaaatccttctgacccaatgcctcaggctcccgccctctggatcgaaacgaccgcatacgcactgctacacctcttgctgcatgaaggcaaggcagaaatggctgatcaggccgcagcttggctgactcgtcaaggttccttccagggcggcttccggtctacacaggatacagttatcgccttggatgcattgagtgcctactggattgcttctcacaccaccgaggagcgcggattgaacgtgaccctgtcatctactggccgtaatggttttaagtcccacgccttgcaacttaacaacagacagattagggggttagaggaggagttacagttctccctgggcagcaagatcaacgtcaaggtcggcgggaattctaaaggaactttgaaggtcctacgcacctacaacgtgctcgacatgaagaacactacatgccaagacctgcagatcgaggttactgttaagggccacgtggagtatacgatggaggccaatgaagattacgaggattatgagtatgacgagctaccagctaaagatgacccagacgcaccccttcaacccgttacacccctccaactgtttgagggacggagaaatcggaggagacgcgaagcgcccaaactgacgtccctgagtgatagatatgtctcccatttcgaaacagaaggcccacacgtgctgctgtattttgatagtgtccccacgtctcgggaatgtgtcggcttcgaggctgtgcaggaagtcccagtgggcttggtccaaccagcatccgccactctctatgattactacaacccagaacgccgatgtagcgtcttctatggtgcaccatccaaatcccgccttctagcaactctgtgctcagccgaagtttgccaatgtgcagagggcaagtgcccccgccagagaagagccctggagcgcggactccaagacgaggacggataccggatgaagtttgcttgttactaccctagagttgagtacggtttccaggtaaaggtactaagagaggatagcagggcggcttttcgcctgtttgagaccaaaattacccaggttttgcatttcactaaggatgtgaaagctgccgctaaccaaatgagaaatttcctggtgcgcgcatcgtgtagactgcgtttggagccaggcaaggaatatctaattatgggattggatggagcaacttatgacctcgaaggccacccacagtacctattagattccaattcttggatcgaagagatgccatcagagagattgtgccggtctacaaggcagagagcagcatgtgcccagttgaacgacttcttacaggagtacgggacccagggctgtcaggtctag

SEQ ID NO: 88279 - DNA, 5097 bp, Artificial Sequence
  derived and/or modified sequence
atgcgattactgtggggactcatctgggcatcttctttcttcacacttagcctgcagaagccacgcctgttacttttttccccttctgtggtgcacctcggtgtccctctgtccgtgggcgttcagcttcaagatgttccccgcgggcaagtggtcaaagggtcagttttcctgagaaaccctagtagaaacaacgttccatgcagcccaaaggtggattttaccttatccagtgagcgcgactttgcattgctgtcattacaggtgccactgaaagatgcaaaatcatgcggactccaccagttacttcgcgggcctgaagttcaattagtggcgcacagcccgtggcttaaggatagccttagtagaaccacaaatatccaaggtatcaatctcctctttagtagcagacggggccatctcttcttacaaaccgaccagcccatctacaaccctggccaaagagtgaggtacagagtctttgcactcgatcagaaaatgagaccctcaaccgacacaatcacagtcatggtggagaactctcacggcttgcgcgttcgaaaaaaagaggtttacatgccgagttcaatcttccaggatgacttcgtcatacccgacattagcgaacccggtacatggaagatttctgcccgcttctctgatggcttagaaagtaactcatctacccagtttgaggtaaagaaatacgtgctccccaactttgaggtgaagataacgcctggaaaaccatatattttaacagttcccggtcatctggatgagatgcagctcgacatccaggcccggtacatttacggcaaaccagtacagggagtggcatacgtgcgtttcggactcctagacgaggatggcaagaagaccttctttagaggactcgagtcccaaacaaagctggtcaatggccagagtcacattagtctaagtaaagccgagtttcaggatgccctggaaaaattgaacatgggcattacagacctgcagggcctaagactttatgtcgccgcggcaatcatagaataccccgggggtgaaatggaagaagccgaactgacctcttggtacttcgtgtccagtccttttagcctagatttgtccaagactaaacgccacctggtgccaggagcccccttcctcctccaagcactggtcagagaaatgagcggctcccccgctagcggtattcctgtgaaggtttctgctactgtctcctcaccaggctcagttcccgaagtgcaggacatccaacagaacactgatggctctggccaggtcagcataccaataatcatcccacagaccatttccgaactccagctgtcagtctcggccggaagcccacaccccgccatagcccgtctgaccgttgcagcccccccctccggtggacctgggtttctgtctatcgagagacccgattcaagacctcctagggtaggtgacacattgaaccttaacctccgagctgttggatctggcgccacattttcacactactactatatgatcctgagtcgaggccaaatagtgtttatgaatcgtgaacccaaaagaactctcacttcagtcagcgtctttgttgatcaccacctcgccccgagtttctacttcgtggccttttattatcatggcgatcacccagtcgcaaatagcctgcgagtcgatgtgcaagcaggagcttgtgagggaaaactggaacttagcgttgatggagccaagcaatacagaaacggagagagcgtgaagcttcatcttgagactgactctttggccctcgtggcactgggtgcactggacacagccctgtacgctgcaggatcgaagagccacaaacctctgaatatgggtaaggtgttcgaagccatgaattcctatgatttgggctgcggaccaggcggcggtgattccgctctgcaagtcttccaagcggctggtcttgccttcagcgatggcgatcaatggaccctctccagaaaaagattgagctgccccaaagaaaagacgactagaaaaaaacgtaacgtgaacttccagaaggccattaacgagaagctgggccaatacgcctcaccgaccgccaagcggtgctgccaggatggtgttactagattaccgatgatgcggtcctgtgaacaacgcgccgccagggttcaacaaccagactgtagggaaccatttctaagctgttgtcagttcgccgaatcgctgaggaaaaaatctagggacaaagggcaggcgggactgcagcgtgcgctagagatcctccaagaagaggacctgatcgacgaagacgacattcccgtaagatctttctttcccgaaaattggctttggagagtcgaaactgtggatcgatttcagatcctgacactttggctgccagacagcctaacaacttgggaaatacatggattgagcctgtccaagactaaaggtctttgcgtggcaaccccagtccagctccgtgtttttcgcgagtttcacttgcacctacgcctccctatgagtgtgcggcggttcgaacaactggaacttcggcccgtgttatacaactacttagacaaaaatctaaccgtttccgttcacgtttcacctgtggaggggctgtgtctcgcaggaggaggaggattagcccagcaggtcttagtccccgccggctcggcacgtccagttgcctttagcgtagtacccaccgctgcagccgcggtgtcactgaaggtagttgctcggggcagttttgaattcccagtcggggatgctgtgtccaaagtgctgcagatagaaaaggaaggcgctattcatcgggaagagcttgtttatgagttgaaccccctggaccaccgtggtcggactctagaaattcctggcaattctgaccccaatatgattccagacggcgattttaattcttatgtgcgcgtgaccgcgtctgatccactggacaccctcggatctgaaggagctttgtcccctggcggtgtggctagcctgttacgcttgccacggggttgtggggaacagacaatgatctatctcgctccaacattagccgcatcacgttaccttgacaaaaccgaacagtggtcaaccctcccccccgaaacaaaagatcacgccgtggacctcatacagaaaggttatatgcgcatacaacagttccgcaaggctgacggctcctacgcagcctggttgtctagaggcagttcaacctggcttactgcctttgtcctcaaggtgctgagccttgcccaagaacaggtaggcggctcacctgagaaacttcaagagacctctaactggctcttatctcagcagcaagcagacggctccttccaagacctatctcccgtgattcatcgaagtatgcagggaggattagtgggtaacgatgaaaccgtagctctcactgcctttgtgacaatcgcactgcaccacggtctggcagtttttcaggatgagggtgctgaacccttgaaacagcgggttgaagcctccatcagcaaggcttccagtttccttggcgaaaaggcatccgccggcctgctgggtgcccacgctgccgcaatcaccgcctatgctctgacactcacaaaagcgccagcagatctgcgtggcgtagcacacaacaacctgatggcaatggcacaggaaactggcgacaacctctattgggggagcgtgacgggcagccaatcgaatgcagtttctcctaccccagcgccccgcaatccatcagacccaatgccccaagcaccagccttatggatagaaacgacagcgtatgccctgcttcatttattgttacatgagggaaaagcagaaatggccgatcaggcagccgcatggctgacacggcagggtagcttccaaggtggcttccgctctacacaggataccgtcattgccctcgatgcactctccgcatactggatcgcttctcacactaccgaggaaagaggactgaacgttacgctgtcatctacaggccgcaacggattcaaatcacacgcccttcaacttaacaaccggcagatacgggggctggaagaagaactgcagttttctcttgggagtaagataaatgtaaaagtcggtggtaatagtaaagggacactaaaagtccttagaacctacaacgtcctcgatatgaaaaacactacctgccaggacttacagatcgaggttaccgttaagggtcatgtcgaatacaccatggaggccaatgaagactacgaggactacgagtatgatgaattgccagcaaaagacgacccggatgcccccttgcagcccgtgacccccctgcagttgttcgaggggagaaggaacagacgcagaagggaggctccaaaactaaccagcctgtctgaccgatacgtaagccacttcgagacagagggccctcacgttctcctatatttcgactcggtgccaaccagtagagagtgtgttggattcgaagcagtgcaagaagtccctgtgggtctcgtgcaaccggctagcgcaactctctatgactattataaccccgaaagacgttgttcagttttttatggagctccatccaaatcccggctgttggcaacattgtgctcagcagaagtttgtcagtgtgcggaaggtaagtgtccgagacagagaagagctctggagaggggcctgcaggatgaggatggctaccgtatgaagttcgcatgctattatccaagagtggaatatggattccaggtcaaggtgctgagagaggattctagagctgcctttcggttattcgaaacaaaaattactcaagttctacatttcaccaaggacgttaaggccgcagcaaaccaaatgagaaacttcctggtccgggctagctgcagattacgtttggagccagggaaggaatatctaatcatgggacttgatggcgccacatatgatctcgagggccatccgcaatatctcctcgatagtaactcctggattgaagagatgcctagcgagagattgtgccggtccacacgccagagagctgcctgcgcccaactgaatgacttcctgcaggaatacggtacccagggctgccaggtttag

SEQ ID NO: 88280 - DNA, 5220 bp, Artificial Sequence
  derived and/or modified sequence
atgaggctgctctgggggctgatctgggcatccagcttcttcaccttatctctgcagaagcccaggttgctcttgttctctccttctgtggttcatctgggggtccccctatcggtgggggtgcagctccaggatgtgccccgaggacaggtagtcaaaggatcagtgttcctgagaaacccatctcgtaataatgtcccctgctccccaaaggtggacttcacccttagctcagaaagagacttcgcactcctcagtctccaggtgcccttgaaagatgcgaagagctgtggcctccatcaactcctcagaggccctgaggtccagctggtggcccattcgccatggctaaaggactctctgtccagaacgacaaacatccagggtatcaacctgctcttctcctctcgccgggggcacctctttttgcagacggaccagcccatttacaaccctggccagcgggttcggtaccgggtctttgctctggatcagaagatgcgcccgagcactgacaccatcacagtcatggtggagaactctcacggcctccgcgtgcggaagaaggaggtgtacatgccctcgtccatcttccaggatgactttgtgatcccagacatctcagagccagggacctggaagatctcagcccgattctcagatggcctggaatccaacagcagcacccagtttgaggtgaagaaatatgtccttcccaactttgaggtgaagatcacccctggaaagccctacatcctgacggtgccaggccatcttgatgaaatgcagttagacatccaggccaggtacatctatgggaagccagtgcagggggtggcatatgtgcgctttgggctcctagatgaggatggtaagaagactttctttcgggggctggagagtcagaccaagctggtgaatggacagagccacatttccctctcaaaggcagagttccaggacgccctggagaagctgaatatgggcattactgacctccaggggctgcgcctctacgttgctgcagccatcattgagtatccaggtggggagatggaggaggcagagctcacatcctggtattttgtgtcatctcccttctccttggatcttagcaagaccaagcgacaccttgtgcctggggcccccttcctgctgcaggccttggtccgtgagatgtcaggctccccagcttctggcattcctgtcaaagtttctgccacggtgtcttctcctgggtctgttcctgaagtccaggacattcagcaaaacacagacgggagcggccaagtcagcattccaataattatccctcagaccatctcagagctgcagctctcagtatctgcaggctccccacatccagcgatagccaggctcactgtggcagccccaccttcaggaggccccgggtttctgtctattgagcggccggattctcgacctcctcgtgttggggacactctgaacctgaacttgcgagccgtgggcagtggggccaccttttctcattactactacatgatcctatcccgagggcagatcgtgttcatgaatcgagagcccaagaggaccctgacctcggtctcggtgtttgtggaccatcacctggcaccctccttctactttgtggccttctactaccatggagaccacccagtggccaactccctgcgagtggatgtccaggctggggcctgcgagggcaagctggagctcagcgtggacggtgccaagcagtaccggaacggggagtccgtgaagctccacttagaaaccgactccctagccctggtggcgctgggagccttggacacagctctgtatgctgcaggcagcaagtcccacaagcccctcaacatgggcaaggtctttgaagctatgaacagctatgacctcggctgtggtcctgggggtggggacagtgcccttcaggtgttccaggcagcgggcctggccttttctgatggagaccagtggaccttatccagaaagagactaagctgtcccaaggagaagacaacccggaaaaagagaaacgtgaacttccaaaaggcgattaatgagaaattgggtcagtatgcttccccgacagccaagcgctgctgccaggatggggtgacacgtctgcccatgatgcgttcctgcgagcagcgggcagcccgcgtgcagcagccggactgccgggagcccttcctgtcctgctgccaatttgctgagagtctgcgcaagaagagcagggacaagggccaggcgggcctccaacgagccctggagatcctgcaggaggaggacctgattgatgaggatgacattcccgtgcgcagcttcttcccagagaactggctctggagagtggaaacagtggaccgctttcaaatattgacactgtggctccccgactctctgaccacgtgggagatccatggcctgagcctgtccaaaaccaaaggcctatgtgtggccaccccagtccagctccgggtgttccgcgagttccacctgcacctccgcctgcccatgtctgtccgccgctttgagcagctggagctgcggcctgtcctctataactacctggataaaaacctgactgtgagcgtccacgtgtccccagtggaggggctgtgcctggctgggggcggagggctggcccagcaggtgctggtgcctgcgggctctgcccggcctgttgccttctctgtggtgcccacggcagccgccgctgtgtctctgaaggtggtggctcgagggtccttcgaattccctgtgggagatgcggtgtccaaggttctgcagattgagaaggaaggggccatccatagagaggagctggtctatgaactcaaccccttggaccaccgaggccggaccttggaaatacctggcaactctgatcccaatatgatccctgatggggactttaacagctacgtcagggttacagcctcagatccattggacactttaggctctgagggggccttgtcaccaggaggcgtggcctccctcttgaggcttcctcgaggctgtggggagcaaaccatgatctacttggctccgacactggctgcttcccgctacctggacaagacagagcagtggagcacactgcctcccgagaccaaggaccacgccgtggatctgatccagaaaggctacatgcggatccagcagtttcggaaggcggatggttcctatgcggcttggttgtcacggggcagcagcacctggctcacagcctttgtgttgaaggtcctgagtttggcccaggagcaggtaggaggctcgcctgagaaactgcaggagacatctaactggcttctgtcccagcagcaggctgacggctcgttccaggacctctctccagtgatacataggagcatgcaggggggtttggtgggcaatgatgagactgtggcactcacagcctttgtgaccatcgcccttcatcatgggctggccgtcttccaggatgagggtgcagagccattgaagcagagagtggaagcctccatctcaaaggcaagctcatttttgggggagaaagcaagtgctgggctcctgggtgcccacgcagctgccatcacggcctatgccctgacactgaccaaggcccctgcggacctgcggggtgttgcccacaacaacctcatggcaatggcccaggagactggagataacctgtactggggctcagtcactggttctcagagcaatgccgtgtcgcccaccccagctcctcgcaacccatccgaccccatgccccaggccccagccctgtggattgaaaccacagcctacgccctgctgcacctcctgcttcacgagggcaaagcagagatggcagaccaggctgcggcctggctcacccgtcagggcagcttccaagggggattccgcagtacccaagacacggtgattgccctggatgccctgtctgcctactggattgcctcccacaccactgaggagaggggtctcaatgtgactctcagctccacaggccggaatgggttcaagtcccacgcgctgcagctgaacaaccgccagattcgcggcctggaggaggagctgcagttttccttgggcagcaagatcaatgtgaaggtgggaggaaacagcaaaggaaccctgaaggtccttcgtacctacaatgtcctggacatgaagaacacgacctgccaggacctacagatagaagtgacagtcaaaggccacgtcgagtacacgatggaagcaaacgaggactatgaggactatgagtacgatgagcttccagccaaggatgacccagatgcccctctgcagcccgtgacacccctgcagctgtttgagggtcggaggaaccgccgcaggagggaggcgcccaagctgacctccctctctgaccgttacgtgagtcactttgagaccgaggggccccacgtcctgctgtattttgactcggtccccacctcccgggagtgcgtgggctttgaggctgtgcaggaagtgccggtggggctggtgcagccggccagcgcaaccctgtacgactactacaaccccgagcgcagatgttctgtgttttacggggcaccaagtaagagcagactcttggccaccttgtgttctgctgaagtctgccagtgtgctgaggggaagtgccctcgccagcgtcgcgccctggagcggggtctgcaggacgaggatggctacaggatgaagtttgcctgctactacccccgtgtggagtacggcttccaggttaaggttctccgagaagacagcagagctgctttccgcctctttgagaccaagatcacccaagtcctgcacttcaccaaggatgtcaaggccgctgctaatcagatgcgcaacttcctggttcgagcctcctgccgccttcgcttggaacctgggaaagaatatttgatcatgggtctagatggggccacctatgacctcgagggacacccccagtacctgctggactcgaatagctggatcgaggagatgccctctgaacgcctgtgccggagcacccgccagcgggcagcctgtgcccagctcaacgacttcctccaggagtatggcactcaggggtgccaggtgtgagggctgccctcccacctccgctgggaggaacctgaacctgggaaccatgaagctggaagcactgctgtgtccgctttcatgaacacagcctgggaccagggcatattaaaggcttttggcagc

SEQ ID NO: 88281 - DNA, 5268 bp, Artificial Sequence
  derived and/or modified sequence
gacagacagacggatctaacctctcttggatcctccagccatgaggctgctctgggggctgatctgggcatccagcttcttcaccttatctctgcagaagcccaggttgctcttgttctctccttctgtggttcatctgggggtccccctatcggtgggggtgcagctccaggatgtgccccgaggacaggtagtgaaaggatcagtgttcctgagaaacccatctcgtaataatgtcccctgctccccaaaggtggacttcacccttagctcagaaagagacttcgcactcctcagtctccaggtgcccttgaaagatgcgaagagctgtggcctccatcaactcctcagaggccctgaggtccagctggtggcccattcgccatggctaaaggactctctgtccagaacgacaaacatccagggtatcaacctgctcttctcctctcgccgggggcacctctttttgcagacggaccagcccatttacaaccctggccagcgggttcggtaccgggtctttgctctggatcagaagatgcgcccgagcactgacaccatcacagtcatggtggagaactctcacggcctccgcgtgcggaagaaggaggtgtacatgccctcgtccatcttccaggatgactttgtgatcccagacatctcagagccagggacctggaagatctcagcccgattctcagatggcctggaatccaacagcagcacccagtttgaggtgaagaaatatgtccttcccaactttgaggtgaagatcacccctggaaagccctacatcctgacggtgccaggccatcttgatgaaatgcagttagacatccaggccaggtacatctatgggaagccagtgcagggggtggcatatgtgcgctttgggctcctagatgaggatggtaagaagactttctttcgggggctggagagtcagaccaagctggtgaatggacagagccacatttccctctcaaaggcagagttccaggacgccctggagaagctgaatatgggcattactgacctccaggggctgcgcctctacgttgctgcagccatcattgagtatccaggtggggagatggaggaggcagagctcacatcctggtattttgtgtcatctcccttctccttggatcttagcaagaccaagcgacaccttgtgcctggggcccccttcctgctgcaggccttggtccgtgagatgtcaggctccccagcttctggcattcctgtcaaagtttctgccacggtgtcttctcctgggtctgttcctgaagtccaggacattcagcaaaacacagacgggagcggccaagtcagcattccaataattatccctcagaccatctcagagctgcagctctcagtatctgcaggctccccacatccagcgatagccaggctcactgtggcagccccaccttcaggaggccccgggtttctgtctattgagcggccggattctcgacctcctcgtgttggggacactctgaacctgaacttgcgagccgtgggcagtggggccaccttttctcattactactacatgatcctatcccgagggcagatcgtgttcatgaatcgagagcccaagaggaccctgacctcggtctcggtgtttgtggaccatcacctggcaccctccttctactttgtggccttctactaccatggagaccacccagtggccaactccctgcgagtggatgtccaggctggggcctgcgagggcaagctggagctcagcgtggacggtgccaagcagtaccggaacggggagtccgtgaagctccacttagaaaccgactccctagccctggtggcgctgggagccttggacacagctctgtatgctgcaggcagcaagtcccacaagcccctcaacatgggcaaggtctttgaagctatgaacagctatgacctcggctgtggtcctgggggtggggacagtgcccttcaggtgttccaggcagcgggcctggccttttctgatggagaccagtggaccttatccagaaagagactaagctgtcccaaggagaagacaacccggaaaaagagaaacgtgaacttccaaaaggcgattaatgagaaattgggtcagtatgcttccccgacagccaagcgctgctgccaggatggggtgacacgtctgcccatgatgcgttcctgcgagcagcgggcagcccgcgtgcagcagccggactgccgggagcccttcctgtcctgctgccaatttgctgagagtctgcgcaagaagagcagggacaagggccaggcgggcctccaacgagccctggagatcctgcaggaggaggacctgattgatgaggatgacattcccgtgcgcagcttcttcccagagaactggctctggagagtggaaacagtggaccgctttcaaatattgacactgtggctccccgactctctgaccacgtgggagatccatggcctgagcctgtccaaaaccaaaggcctatgtgtggccaccccagtccagctccgggtgttccgcgagttccacctgcacctccgcctgcccatgtctgtccgccgctttgagcagctggagctgcggcctgtcctctataactacctggataaaaacctgactgtgagcgtccacgtgtccccagtggaggggctgtgcctggctgggggcggagggctggcccagcaggtgctggtgcctgcgggctctgcccggcctgttgccttctctgtggtgcccacggcagccgccgctgtgtctctgaaggtggtggctcgagggtccttcgaattccctgtgggagatgcggtgtccaaggttctgcagattgagaaggaaggggccatccatagagaggagctggtctatgaactcaaccccttggaccaccgaggccggaccttggaaatacctggcaactctgatcccaatatgatccctgatggggactttaacagctacgtcagggttacagcctcagatccattggacactttaggctctgagggggccttgtcaccaggaggcgtggcctccctcttgaggcttcctcgaggctgtggggagcaaaccatgatctacttggctccgacactggctgcttcccgctacctggacaagacagagcagtggagcacactgcctcccgagaccaaggaccacgccgtggatctgatccagaaaggctacatgcggatccagcagtttcggaaggcggatggttcctatgcggcttggttgtcacggggcagcagcacctggctcacagcctttgtgttgaaggtcctgagtttggcccaggagcaggtaggaggctcgcctgagaaactgcaggagacatctaactggcttctgtcccagcagcaggctgacggctcgttccaggacctctctccagtgatacataggagcatgcaggggggtttggtgggcaatgatgagactgtggcactcacagcctttgtgaccatcgcccttcatcatgggctggccgtcttccaggatgagggtgcagagccattgaagcagagagtggaagcctccatctcaaaggcaagctcatttttgggggagaaagcaagtgctgggctcctgggtgcccacgcagctgccatcacggcctatgccctgacactgaccaaggcccctgcggacctgcggggtgttgcccacaacaacctcatggcaatggcccaggagactggagataacctgtactggggctcagtcactggttctcagagcaatgccgtgtcgcccaccccagctcctcgcaacccatccgaccccatgccccaggccccagccctgtggattgaaaccacagcctacgccctgctgcacctcctgcttcacgagggcaaagcagagatggcagaccaggctgcggcctggctcacccgtcagggcagcttccaagggggattccgcagtacccaagacacggtgattgccctggatgccctgtctgcctactggattgcctcccacaccactgaggagaggggtctcaatgtgactctcagctccacaggccggaatgggttcaagtcccacgcgctgcagctgaacaaccgccagattcgcggcctggaggaggagctgcagttttccttgggcagcaagatcaatgtgaaggtgggaggaaacagcaaaggaaccctgaaggtccttcgtacctacaatgtcctggacatgaagaacacgacctgccaggacctacagatagaagtgacagtcaaaggccacgtcgagtacacgatggaagcaaacgaggactatgaggactatgagtacgatgagcttccagccaaggatgacccagatgcccctctgcagcccgtgacacccctgcagctgtttgagggtcggaggaaccgccgcaggagggaggcgcccaagctgacctccctctctgaccgttacgtgagtcactttgagaccgaggggccccacgtcctgctgtattttgactcggtccccacctcccgggagtgcgtgggctttgaggctgtgcaggaagtgccggtggggctggtgcagccggccagcgcaaccctgtacgactactacaaccccgagcgcagatgttctgtgttttacggggcaccaagtaagagcagactcttggccaccttgtgttctgctgaagtctgccagtgtgctgaggggaagtgccctcgccagcgtcgcgccctggagcggggtctgcaggacgaggatggctacaggatgaagtttgcctgctactacccccgtgtggagtacggcttccaggttaaggttctccgagaagacagcagagctgctttccgcctctttgagaccaagatcacccaagtcctgcacttcaccaaggatgtcaaggccgctgctaatcagatgcgcaacttcctggttcgagcctcctgccgccttcgcttggaacctgggaaagaatatttgatcatgggtctagatggggccacctatgacctcgagggacacccccagtacctgctggactcgaatagctggatcgaggagatgccctctgaacgcctgtgccggagcacccgccagcgggcagcctgtgcccagctcaacgacttcctccaggagtatggcactcaggggtgccaggtgtgagggctgccctcccacctccgctgggaggaacctgaacctgggaaccatgaagctggaagcactgctgtgtccgctttcatgaacacagcctgggaccagggcatattaaaggcttttggcagcaaagtgtc

SEQ ID NO: 88282 - DNA, 5097 bp, Artificial Sequence
  derived and/or modified sequence
atgagactgctgtggggcctgatctgggccagcagcttcttcaccctgagcctgcagaagcccagactgctgctgttcagccccagcgtggtgcacctgggcgtgcccctgagcgtgggcgtgcagctgcaggacgtgcccagaggccaggtggtgaagggcagcgtgttcctgagaaaccccagcagaaacaacgtgccctgcagccccaaggtggacttcaccctgagcagcgagagagacttcgccctgctgagcctgcaggtgcccctgaaggacgccaagagctgcggcctgcaccagctgctgagaggccccgaggtgcagctggtggcccacagcccctggctgaaggacagcctgagcagaaccaccaacatccagggcatcaacctgctgttcagcagcagaagaggccacctgttcctgcagaccgaccagcccatctacaaccccggccagagagtgagatacagagtgttcgccctggaccagaagatgagacccagcaccgacaccatcaccgtgatggtggagaacagccacggcctgagagtgagaaagaaggaggtgtacatgcccagcagcatcttccaggacgacttcgtgatccccgacatcagcgagcccggcacctggaagatcagcgccagattcagcgacggcctggagagcaacagcagcacccagttcgaggtgaagaagtacgtgctgcccaacttcgaggtgaagatcacccccggcaagccctacatcctgaccgtgcccggccacctggacgagatgcagctggacatccaggccagatacatctacggcaagcccgtgcagggcgtggcctacgtgagattcggcctgctggacgaggacggcaagaagaccttcttcagaggcctggagagccagaccaagctggtgaacggccagagccacatcagcctgagcaaggccgagttccaggacgccctggagaagctgaacatgggcatcaccgacctgcagggcctgagactgtacgtggccgccgccatcatcgagtaccccggcggcgagatggaggaggccgagctgaccagctggtacttcgtgagcagccccttcagcctggacctgagcaagaccaagagacacctggtgcccggcgcccccttcctgctgcaggccctggtgagagagatgagcggcagccccgccagcggcatccccgtgaaggtgagcgccaccgtgagcagccccggcagcgtgcccgaggtgcaggacatccagcagaacaccgacggcagcggccaggtgagcatccccatcatcatcccccagaccatcagcgagctgcagctgagcgtgagcgccggcagcccccaccccgccatcgccagactgaccgtggccgccccccccagcggcggccccggcttcctgagcatcgagagacccgacagcagaccccccagagtgggcgacaccctgaacctgaacctgagagccgtgggcagcggcgccaccttcagccactactactacatgatcctgagcagaggccagatcgtgttcatgaacagagagcccaagagaaccctgaccagcgtgagcgtgttcgtggaccaccacctggcccccagcttctacttcgtggccttctactaccacggcgaccaccccgtggccaacagcctgagagtggacgtgcaggccggcgcctgcgagggcaagctggagctgagcgtggacggcgccaagcagtacagaaacggcgagagcgtgaagctgcacctggagaccgacagcctggccctggtggccctgggcgccctggacaccgccctgtacgccgccggcagcaagagccacaagcccctgaacatgggcaaggtgttcgaggccatgaacagctacgacctgggctgcggccccggcggcggcgacagcgccctgcaggtgttccaggccgccggcctggccttcagcgacggcgaccagtggaccctgagcagaaagagactgagctgccccaaggagaagaccaccagaaagaagagaaacgtgaacttccagaaggccatcaacgagaagctgggccagtacgccagccccaccgccaagagatgctgccaggacggcgtgaccagactgcccatgatgagaagctgcgagcagagagccgccagagtgcagcagcccgactgcagagagcccttcctgagctgctgccagttcgccgagagcctgagaaagaagagcagagacaagggccaggccggcctgcagagagccctggagatcctgcaggaggaggacctgatcgacgaggacgacatccccgtgagaagcttcttccccgagaactggctgtggagagtggagaccgtggacagattccagatcctgaccctgtggctgcccgacagcctgaccacctgggagatccacggcctgagcctgagcaagaccaagggcctgtgcgtggccacccccgtgcagctgagagtgttcagagagttccacctgcacctgagactgcccatgagcgtgagaagattcgagcagctggagctgagacccgtgctgtacaactacctggacaagaacctgaccgtgagcgtgcacgtgagccccgtggagggcctgtgcctggccggcggcggcggcctggcccagcaggtgctggtgcccgccggcagcgccagacccgtggccttcagcgtggtgcccaccgccgccgccgccgtgagcctgaaggtggtggccagaggcagcttcgagttccccgtgggcgacgccgtgagcaaggtgctgcagatcgagaaggagggcgccatccacagagaggagctggtgtacgagctgaaccccctggaccacagaggcagaaccctggagatccccggcaacagcgaccccaacatgatccccgacggcgacttcaacagctacgtgagagtgaccgccagcgaccccctggacaccctgggcagcgagggcgccctgagccccggcggcgtggccagcctgctgagactgcccagaggctgcggcgagcagaccatgatctacctggcccccaccctggccgccagcagatacctggacaagaccgagcagtggagcaccctgccccccgagaccaaggaccacgccgtggacctgatccagaagggctacatgagaatccagcagttcagaaaggccgacggcagctacgccgcctggctgagcagaggcagcagcacctggctgaccgccttcgtgctgaaggtgctgagcctggcccaggagcaggtgggcggcagccccgagaagctgcaggagaccagcaactggctgctgagccagcagcaggccgacggcagcttccaggacctgagccccgtgatccacagaagcatgcagggcggcctggtgggcaacgacgagaccgtggccctgaccgccttcgtgaccatcgccctgcaccacggcctggccgtgttccaggacgagggcgccgagcccctgaagcagagagtggaggccagcatcagcaaggccagcagcttcctgggcgagaaggccagcgccggcctgctgggcgcccacgccgccgccatcaccgcctacgccctgaccctgaccaaggcccccgccgacctgagaggcgtggcccacaacaacctgatggccatggcccaggagaccggcgacaacctgtactggggcagcgtgaccggcagccagagcaacgccgtgagccccacccccgcccccagaaaccccagcgaccccatgccccaggcccccgccctgtggatcgagaccaccgcctacgccctgctgcacctgctgctgcacgagggcaaggccgagatggccgaccaggccgccgcctggctgaccagacagggcagcttccagggcggcttcagaagcacccaggacaccgtgatcgccctggacgccctgagcgcctactggatcgccagccacaccaccgaggagagaggcctgaacgtgaccctgagcagcaccggcagaaacggcttcaagagccacgccctgcagctgaacaacagacagatcagaggcctggaggaggagctgcagttcagcctgggcagcaagatcaacgtgaaggtgggcggcaacagcaagggcaccctgaaggtgctgagaacctacaacgtgctggacatgaagaacaccacctgccaggacctgcagatcgaggtgaccgtgaagggccacgtggagtacaccatggaggccaacgaggactacgaggactacgagtacgacgagctgcccgccaaggacgaccccgacgcccccctgcagcccgtgacccccctgcagctgttcgagggcagaagaaacagaagaagaagagaggcccccaagctgaccagcctgagcgacagatacgtgagccacttcgagaccgagggcccccacgtgctgctgtacttcgacagcgtgcccaccagcagagagtgcgtgggcttcgaggccgtgcaggaggtgcccgtgggcctggtgcagcccgccagcgccaccctgtacgactactacaaccccgagagaagatgcagcgtgttctacggcgcccccagcaagagcagactgctggccaccctgtgcagcgccgaggtgtgccagtgcgccgagggcaagtgccccagacagagaagagccctggagagaggcctgcaggacgaggacggctacagaatgaagttcgcctgctactaccccagagtggagtacggcttccaggtgaaggtgctgagagaggacagcagagccgccttcagactgttcgagaccaagatcacccaggtgctgcacttcaccaaggacgtgaaggccgccgccaaccagatgagaaacttcctggtgagagccagctgcagactgagactggagcccggcaaggagtacctgatcatgggcctggacggcgccacctacgacctggagggccacccccagtacctgctggacagcaacagctggatcgaggagatgcccagcgagagactgtgcagaagcaccagacagagagccgcctgcgcccagctgaacgacttcctgcaggagtacggcacccagggctgccaggtgtag

SEQ ID NO: 88283 - DNA, 5097 bp, Artificial Sequence
  derived and/or modified sequence
atgcgtctgctctggggtctcatttgggcatcctctttttttacactgtctctgcagaagccaaggctgctgctatttagcccatctgtcgtgcatcttggagtaccactgtcggtcggcgttcagttgcaggacgtcccgagaggccaagttgtgaagggcagtgtgttcttgagaaaccctagccgcaacaatgtgccctgcagcccgaaagtggactttacgttaagcagtgagcgtgatttcgctctgctgagccttcaggtgcctctcaaagacgccaaatcttgcggacttcaccaactgctaaggggcccagaagtccaactcgtcgcccacagtccatggttgaaagatagcctctcacggaccaccaatatccaaggcatcaacctgttgttctcctctagacgtggtcatctcttcctgcaaacagatcagcctatctacaaccctggtcaacgggttagatacagggttttcgccctcgaccagaaaatgcgcccctcaaccgatacaatcaccgtgatggtcgaaaacagccacggattaagagtgcggaagaaagaagtgtatatgccttcatctatctttcaggatgactttgtaataccggatattagcgagcccggaacctggaagattagcgcacggttcagcgatggcctcgaatcaaactccagcacgcagttcgaggttaagaaatatgtcctgcctaatttcgaggttaaaattactccgggcaagccctatattttaaccgtgcctggtcacctggacgagatgcaacttgacatacaggctagatacatatacggcaagcccgttcagggggttgcctatgtcagattcggtcttttggacgaggatgggaagaaaacatttttccgtggccttgagagccaaacaaaactggtcaacgggcagtcccatatatccctgtcaaaagcagagttccaagacgcacttgaaaaacttaatatgggtattaccgatctgcagggcttgaggttgtatgtcgccgccgcgatcattgagtaccccggtggggagatggaagaggcagaattgacctcttggtactttgtgagcagccccttttctctggatctgtcaaagactaagcggcacctggtgcctggtgccccatttctcctgcaggcactcgtgcgcgagatgtctgggagtcctgcctcaggcatacccgttaaagtgagcgccacagtgtcgtcacccgggtcagtcccagaggtgcaggatattcaacagaacaccgatgggtctggtcaagtatcgatccccattatcattccacagacgatctctgaactccaattgtctgtcagcgcgggctcacctcatccagctatagctcggttaacagtcgctgcaccgccatcgggaggcccagggtttctgagtatcgagcgaccagattcacgcccccctagggttggcgatactttgaatttaaatctgcgggctgtgggtagtggcgccactttcagccactattactatatgatcctctctaggggccagattgtgttcatgaatcgagaacccaagaggaccctcacctccgtttccgttttcgtggaccatcaccttgccccgagcttctacttcgttgccttctattatcatggggatcaccctgtggccaacagcctccgggtcgatgtgcaggcgggcgcgtgcgaaggcaaactcgaactctctgtggatggtgcaaaacaatatcggaacggggaatccgtcaagcttcatttggaaacagactccctagccttagtagcattgggagcactggacacagcactctatgcagctggttctaagtctcataagccactgaatatgggcaaggtatttgaagccatgaattcctatgacctgggctgcggacccggggggggggactcagcactccaggtttttcaggctgctggactggcatttagtgatggcgaccaatggacactttcacgaaagcggctgtcctgtcccaaggaaaagaccacccggaagaaacggaacgttaattttcagaaggctataaacgagaagcttggtcagtacgccagtcccacagctaaacgttgctgtcaggatggtgtcactcggttgcctatgatgcggtcatgcgagcagcgggctgctcgggtacagcagcctgattgccgggagcccttcctgagctgttgccagtttgctgagtcccttcgcaaaaagtcacgggacaaaggccaggcaggcttgcaaagggctctggaaatactacaggaagaggaccttattgatgaagacgacatcccagtgagaagctttttcccggaaaactggctgtggagggtagaaacagtggacagatttcagatactgactctctggttgccagactcactgacgacttgggagatccacgggctgtccctctcaaagactaagggtctttgtgtcgctaccccagtgcagctgagggtcttcagagaatttcaccttcatctacgactgccaatgtccgttaggagatttgagcagctggagcttaggccagtgttgtataattatctggacaaaaatctgacagtttccgtgcatgtctccccggttgagggcctctgtctggcaggcgggggagggctcgcccagcaggtcctggtgccagccgggtccgctagaccggtcgccttcagcgtggtgccaactgccgcggctgccgtgtctctgaaggtagtggctcggggatccttcgagtttcccgtgggggatgctgtgagcaaagtactgcaaattgagaaggaaggggctattcatagggaggagctggtctatgagctgaatccattggaccaccgcggcagaacactcgaaattcctggcaattcagatccaaatatgattcctgacggggattttaacagttacgttagggtcacggcttcagacccattggatacattgggctccgaaggggctcttagccctggtggggtagccagtctcttgcgcctgccccgaggatgtggggagcagaccatgatttacttggcgccaaccctggccgccagccgctacctcgacaagaccgagcagtggtcaactctgcctccagagacaaaggaccacgctgtggatctgatccagaaggggtacatgaggatacagcagtttcgcaaggccgacggctcgtatgcagcatggttgtcacgtggcagttccacttggctgaccgccttcgtgctgaaggtgctgagtctcgcacaggagcaggtcggcggaagtcccgagaagctccaggaaacctctaattggctccttagccaacaacaggcagacggatcttttcaggatttgtcaccagtcattcataggtccatgcaggggggtctcgtcggcaatgatgagacagttgcgttgaccgcatttgttacaatcgctctgcaccacggcctggctgtgtttcaggatgaaggcgctgaacccctgaaacagagggtggaagctagcatttcaaaggccagtagcttcttaggggaaaaagcctccgccggcttactcggcgcacatgctgccgctattacagcatatgcactcacactcacaaaagcaccggctgatttaaggggcgtcgctcataacaacctgatggcaatggctcaggaaacaggcgacaatctgtattggggttctgtcactgggtcacagagtaatgcggtgagcccgacccccgcacccaggaacccatctgatcccatgcctcaggccccagcgctctggattgagacgactgcctacgccctcttgcatctattactccacgagggcaaggctgaaatggcagaccaggccgcagcctggctcacacgacaagggtcattccaaggcggtttcaggagcacccaagacaccgtgatcgcgctggacgccctgtctgcttattggatcgccagccacacaactgaggagagaggcctgaacgtgaccctttcgtccaccgggcggaacgggtttaagtcccacgcactccagctgaacaacaggcagattagaggtctggaagaggagttgcagttcagcctcggtagtaagattaacgtcaaggtgggagggaactccaaggggaccctgaaagttctgaggacatataatgtgctggatatgaagaacaccacttgccaggacctccagatagaggtgacggtgaagggccacgtcgaatacaccatggaagctaacgaggactatgaagactatgaatacgacgaactgccagcaaaggatgatcctgatgctcccctgcagcctgttaccccactgcagctgttcgagggaaggcgcaaccgcaggcgccgggaagcccccaaactcacgtctctgtcagaccggtatgtttctcactttgaaacagagggaccacacgtgctgctgtactttgattctgtgccaacttcgcgcgagtgtgtcggattcgaagccgtccaggaagtgccagtgggactcgtgcagccggcaagcgcgaccctatatgattattacaaccccgagagacgctgttcagttttctacggcgcaccaagcaaaagccgactgctggcaacactctgcagcgcagaagtttgtcaatgtgcagaggggaagtgcccccgccagagacgagcccttgaacgggggctccaggatgaggacggataccggatgaaatttgcatgctattacccaagggtcgagtatgggttccaggttaaagtgctcagagaagacagtcgggctgcgttccgcctcttcgagactaaaattacacaggtgttgcatttcaccaaagacgttaaggccgctgccaatcagatgcgaaatttcctcgtcagagcaagttgcagactgcgcctggaacccggcaaggagtatctaatcatgggccttgatggagccacatacgatctggaggggcacccccaatacctcctggattctaattcgtggattgaggagatgccatctgagagactttgtcgctccactcgccaaagagcagcttgcgcgcagttgaacgacttcctccaggagtatggtacgcagggatgccaggtgtag

SEQ ID NO: 88284 - DNA, 5097 bp, Artificial Sequence
  derived and/or modified sequence
atgagactgctctggggtcttatttgggcctctagtttctttacattaagcctgcagaaaccacgtttactgctgtttagcccctcagtggttcaccttggagtcccactgagtgtgggagtgcagttgcaggacgtcccccggggacaagtggtgaagggctctgtcttcctgcgaaatccctcgcgtaataatgtcccttgctcacctaaggtcgacttcacactctccagtgaacgggactttgctctgttgtctttgcaagtaccgcttaaagatgcaaaatcatgtgggctgcatcagctcttacgcggtcccgaagtgcagctcgtcgcccacagtccatggttaaaagattccctctctaggaccaccaacatacaggggattaacctgctctttagcagcagacgcggacacctgttcctgcagaccgatcagccaatttacaatcccgggcagcgtgtacggtaccgggtatttgcgctcgaccagaaaatgaggccatcaacagacactataaccgtcatggtggagaactcccatggccttagagtcagaaaaaaggaggtctacatgccatcttccattttccaggatgactttgtgataccagatatcagcgagccaggaacatggaaaataagtgcccgtttctcagacggcctggaaagcaattcttccacacaattcgaagtgaaaaagtatgtgctcccaaactttgaggtgaagatcaccccgggcaagccctatattctgaccgtcccgggacacttggacgaaatgcaactggatattcaggctcggtacatatatggcaagcccgtgcaaggcgtcgcctatgtgcgctttggtctgctggacgaggatggcaagaagaccttttttcgggggcttgaatctcaaactaagttggtcaacgggcaatctcacatttccttatcaaaagccgagtttcaggatgcccttgagaaacttaacatggggatcacggaccttcagggcctccggttgtacgtagcagcagctatcattgaatatccaggaggcgagatggaggaggccgagctgacatcttggtatttcgtgtcaagcccttttagtctagacctgtccaagacaaagcgccacttggtgccaggcgccccttttctactacaggcactggtgcgggaaatgtccggctcacccgcttcgggcattccagtcaaagtttccgccaccgtaagtagtcctggatccgtacctgaggtgcaggatattcagcagaatacagacggaagcggccaggtctcaatccctataataattccacagacaatatctgaacttcagctgagtgtcagtgccggcagtccacacccagccatcgccagactcacagtggctgcacctcctagtggcggcccaggatttctgtcaattgaacgccctgactcccgcccaccacgtgtgggtgacaccctgaaccttaatttgcgagccgtgggttcaggagcaaccttctcccattattactatatgattctgtctaggggccagattgtttttatgaaccgggagccaaaaaggactcttaccagcgtgtccgtcttcgtcgaccatcatctggcgccctccttctattttgttgccttctactaccatggagaccaccccgtagccaattctctccgggttgacgttcaagccggggcatgtgaaggtaagcttgagcttagcgtagacggggccaaacaatataggaacggggagtctgtgaagctgcacttggagaccgattctctggctctcgtggctctgggagctctagacaccgccctgtacgctgcggggagtaaaagccataagcctctgaacatgggcaaagtgttcgaggctatgaacagctatgacctgggttgtggtcctggaggaggggactcagcgctgcaagtgtttcaagcagcaggcctggctttctccgatggagaccagtggacactgtcccggaaacggctctcctgccccaaagaaaaaactacgcggaaaaaacggaatgtgaatttccaaaaagcgattaatgagaaactcggccaatacgccagcccaactgcaaaacgatgttgtcaggacggtgtgacccgcctaccaatgatgagaagctgtgaacagcgcgctgctagagtgcagcagcctgattgcagggagcctttcctttcctgttgtcaatttgccgagtctttgcgtaaaaagtcaagagataaaggacaagctggcctgcagagagcccttgaaatacttcaggaagaggatctgatagatgaagatgacatcccggtgagatccttcttcccagagaattggttatggagggtcgaaactgtggatcgttttcagattttgactctgtggcttcccgatagtttgacaacctgggaaatccacggactgtctttgagcaagacaaaaggtctgtgcgtcgccactccagtgcaactccgagtgtttagagagtttcacttacacctgagattacccatgagcgtgcgccgattcgagcagctggagttgaggccagtcctgtacaattaccttgacaagaacctaaccgtaagtgtccatgttagtccagtggaaggcttgtgcctcgccggaggcggcgggcttgcccagcaagtgctcgtcccagcaggtagtgccaggcccgtggctttctccgtagtcccaactgcagcggctgctgtctcactgaaagtggttgctcggggctcctttgaattcccagtgggggatgccgtctccaaggttctccagattgaaaaagaaggcgcgattcacagggaagagctggtttacgagctgaatccattagatcaccggggaagaacactggagatcccgggcaactcagatcctaacatgatccccgacggagatttcaacagctatgtcagagtgacggcctctgacccgcttgacactctgggatccgagggcgccttgtcccccggcggcgtggcgtcattgttacggttacctcgtggctgtggggaacagactatgatatatttagccccaacactggctgcgtcgcggtacctcgacaagactgaacagtggtctacactaccccctgaaacgaaggatcatgctgttgatcttattcaaaaggggtatatgagaatccaacagtttaggaaggctgacgggtcttatgctgcttggctctctcggggatcctctacgtggctgacggcctttgttcttaaggtgctcagtctggcccaggaacaggtgggtgggtcgcccgagaagctccaggaaacctccaactggctgctgagtcaacagcaggctgatgggtcattccaggacctttcacctgtcatacatcgatccatgcaaggcgggctggtaggcaacgatgagactgtggctctcacggcgttcgttaccatcgctctgcaccacggtcttgccgtatttcaggacgagggtgcagaacccctcaagcagcgcgtggaggccagcatttctaaggcaagcagctttctgggggagaaagcgtccgcaggtctgctaggcgcacatgccgcggcaatcactgcctacgcgttgaccctcacaaaggccccagccgatttgcgcggtgtggcccataacaacctgatggccatggcgcaggaaaccggcgacaacctctactggggtagcgttaccggttctcagtccaatgctgtcagccccactcccgccccccgcaacccttccgaccctatgccgcaagcaccagcactctggatcgagacgacagcttacgcccttctacacttactgctccatgaaggaaaggccgagatggccgaccaggctgcggcatggctgaccagacagggatcttttcaggggggtttccgttctacacaggatacagtgatcgcccttgatgctctttccgcttactggatcgcttcacacacaacagaagaacgggggctcaatgtcaccctcagcagtactgggagaaacggttttaagtcccacgcactgcagctcaataatagacagatccggggtttggaagaggaattacagttcagcctaggatctaagattaacgtcaaagtcggtgggaacagtaagggcacgttgaaagtcctccggacatataatgtgctcgacatgaaaaacacaacctgtcaggacttacaaatcgaggtgaccgtcaaagggcatgtggaatacacaatggaggcaaacgaggattacgaagactatgagtacgacgaattgccagctaaggatgaccctgacgcacctctgcagcctgtgaccccgcttcagttatttgagggaaggcggaataggaggagaagagaggcccccaaactgacatccctatcagataggtacgtcagtcattttgaaactgaagggccccacgtactgctatactttgattccgtgcctacttctcgggagtgcgttgggtttgaggctgtgcaggaagtacccgtcggacttgtgcaaccagcaagcgcaacgttgtacgattattacaacccggaacgtagatgctctgtgttctatggagcgccatctaagtcacgcctgctcgcgaccctctgctccgctgaagtatgtcagtgtgcggagggaaagtgcccaaggcaacgccgagccttggagcgtggcctgcaggacgaagacggatatcggatgaaatttgcatgttactatccccgtgtggagtacggcttccaagtcaaagtgttacgcgaagattcacgtgccgcattccgcctgttcgagacaaagatcacacaggtgctccacttcactaaagacgtcaaggctgccgctaaccaaatgagaaactttctagtgagagcttcttgccgcttgcggctagaacccggcaaggagtacctgataatgggattagatggagccacctacgacctggaggggcacccccagtatctcctggattctaattcctggattgaggagatgccaagcgagcggctctgccgttctactagacagagagctgcttgtgcccaactgaatgacttcctgcaagagtacggtacacagggatgtcaagtttag

SEQ ID NO: 88285 - DNA, 5097 bp, Artificial Sequence
  derived and/or modified sequence
atgaggctgctgtggggcctcatctgggccagcagcttcttcaccctgagcctgcagaagccccggctgctgctcttcagccccagcgtggtgcacctgggcgtgcccctgtctgtgggcgtgcagctgcaggatgtgccccggggccaggtggtgaagggctctgtgttcctgaggaaccccagcagaaataatgtgccctgcagccccaaggtggacttcaccctgagcagcgagcgggactttgccctgctgagcctgcaggtgcccctgaaggatgccaagagctgtggcctgcaccagctgctgcggggccctgaggtgcagctggtggcccacagcccctggctgaaggacagcctgagcaggaccaccaacatccagggcatcaacctgctcttcagcagcagaagaggccacctgttcctgcagacagaccagcccatctacaaccctggccagagggtgcgctacagagtgtttgccctggaccagaagatgaggcccagcacagacaccatcaccgtgatggtggagaacagccacggcctgcgggtgaggaagaaggaggtgtacatgcccagcagcatcttccaggatgactttgtgatcccagacatcagcgagcccggcacctggaagatcagcgcccgcttcagtgatggcctggagagcaacagcagcacccagtttgaggtgaagaagtatgtgctgcccaactttgaggtgaagatcaccccaggcaagccctacatcctgactgtgcccggccacctggatgagatgcagctggacatccaggcccgctacatctacggcaagcctgtgcagggcgtggcctacgtgcgcttcggcctgctggatgaagatggcaagaagaccttcttccggggcctggagagccagaccaagctggtgaatggccagagccacatcagcctgagcaaggccgagttccaggatgccctggagaagctgaacatgggcatcacagacctgcagggcctgcggctgtatgtggccgccgccatcatcgagtacccaggaggagagatggaggaggccgagctgacctcctggtactttgtgagcagccccttcagcctggacctgagcaagaccaagaggcacctggtgcctggggcccccttcctgctgcaggccctggtgcgggagatgagcggcagccctgccagcggcatccctgtgaaggtgtctgccaccgtgagcagccctggctctgtgcctgaggtgcaggacatccagcagaacacagatggcagcggccaggtgtccatccccatcatcatcccccagaccatcagcgagctgcagctgtctgtgtctgctggcagcccccacccagccatcgcccggctgactgtggccgcccctccttctgggggccctggcttcctgagcattgaaagaccagacagccggcccccccgggtgggggacaccctgaacctgaacctgcgggctgtgggcagcggggccaccttcagccactactactacatgatcctgagccggggccagatcgtgttcatgaaccgggagcccaagaggaccctgacctctgtgtctgtgtttgtggaccaccacctggcccccagcttctactttgtggccttctactaccatggagaccaccctgtggccaacagcctgcgggtggatgtgcaggccggggcctgtgagggcaagctggagctgtctgtggatggagccaagcagtacagaaatggagagagcgtgaagctgcacctggagacagacagcctggccctggtggccctgggcgccctggacacagccctgtatgctgctggcagcaagagccacaagcccctgaacatgggcaaggtgtttgaggccatgaacagctatgacctgggctgcggccctgggggcggggacagcgccctgcaggtgttccaggccgccggcctggccttcagtgatggagaccagtggaccctgagcaggaagaggctgagctgccccaaggagaagaccaccaggaagaagagaaatgtgaacttccagaaggccatcaatgagaagctgggccagtatgccagccccacagccaagcgctgctgccaggatggagtgacccggctgcccatgatgaggagctgtgagcagagagctgcccgggtgcagcagcctgactgccgggagcccttcctgagctgctgccagtttgctgagagcctgaggaagaagagccgggacaagggccaggccggcctgcagagggccctggagatcctgcaggaggaggacctgattgatgaagatgacatccctgtgcgctccttcttccctgagaactggctgtggagggtggagaccgtggaccgcttccagatcctgaccctgtggctgcctgacagcctgaccacctgggagatccacggcctgagcctgagcaagaccaagggcctgtgtgtggccacccctgtgcagctgcgggtcttccgggagttccacctgcacctgcggctgcccatgtctgtgagaagatttgagcagctggagctgcggcctgtgctgtacaactacctggacaagaacctgactgtgtctgtgcacgtgtcccctgtggagggcctgtgcctggccggcggcggcggcctggcccagcaggtgctggtgcctgctggcagcgcccggcctgtggccttctctgtggtgcccacagctgctgctgctgtgtccctgaaggtggtggcccggggcagctttgagttccctgtgggagatgctgtgtccaaggtgctgcagatcgagaaggagggcgccatccaccgggaggagctggtgtatgagctgaaccccctggaccaccggggccgcaccctggagatccctggcaacagcgaccccaacatgatcccagatggagacttcaacagctatgtgcgggtgacagccagtgaccccctggacaccctgggcagcgagggcgccctgagccctggaggagtggccagcctgctgcggctgccccggggctgtggggagcagaccatgatctacctggcccccaccctggccgccagccgctacctggacaagacagagcagtggagcaccctgcccccagagaccaaggaccatgctgtggacctgatccagaagggctacatgaggatccagcagttcaggaaggcagatggcagctatgctgcctggctgagccggggcagcagcacctggctgacagcctttgtgctgaaggtgctgagcctggcccaggagcaggtgggcggcagccctgagaagctgcaggagaccagcaactggctgctgagccagcagcaggctgatggcagcttccaggacctgagccctgtgatccaccgctccatgcagggcggcctggtgggcaatgatgagaccgtggccctgacagcctttgtgaccatcgccctgcaccacggcctggccgtgttccaggatgagggcgctgagcccctgaagcagagggtggaggccagcatcagcaaggccagcagcttcctgggggagaaggccagcgctggcctgctgggcgcccacgccgccgccatcacagcctatgccctgaccctgaccaaggccccagctgacctgcggggcgtggcccacaacaacctgatggccatggcccaggagaccggggacaacctgtactggggctctgtgacaggcagccagagcaatgctgtgagccccaccccagcccccaggaaccccagcgaccccatgccccaggccccagccctgtggattgagaccacagcctatgccctgctgcacctgctgctgcacgagggcaaggccgagatggctgaccaggccgccgcctggctgacccggcagggcagcttccagggcggcttccgcagcacccaggacacagtgattgccctggatgccctgagcgcctactggatcgccagccacaccacagaggagcggggcctgaatgtgaccctgagcagcactggaagaaatggcttcaagagccacgccctgcagctgaacaaccggcagatccggggcctggaggaggagctgcagttcagcctgggcagcaagatcaacgtgaaggtgggcggcaacagcaagggcaccctgaaggtgctgcggacctacaacgtgctggacatgaagaacaccacctgccaggacctgcagatcgaggtgacagtgaagggccacgtggagtacaccatggaggccaatgaagattatgaggactatgaatatgatgagctgcctgccaaggatgatcctgatgcccccctgcagcctgtgacccccctgcagctgtttgagggcagaagaaacagaagaagaagagaggcccccaagctgaccagcctgagtgacagatatgtgagccactttgaaacagagggcccccacgtgctgctgtactttgacagcgtgcccaccagccgggagtgtgtgggctttgaggccgtgcaggaggtgcctgtgggcctggtgcagcctgccagcgccaccctgtatgactactacaaccctgagcggcgctgcagcgtcttctacggggcccccagcaagagccggctgctggccaccctgtgcagcgctgaggtgtgccagtgtgccgagggcaagtgcccccggcagaggcgggccctggagcggggcctgcaggatgaagatggctacaggatgaagtttgcctgctactacccccgggtggagtatggcttccaggtgaaggtgctgcgggaggacagccgggccgccttccggctgtttgagaccaagatcacccaggtgctgcacttcaccaaggatgtgaaggccgccgccaaccagatgaggaacttcctggtgcgggccagctgccgcctgcggctggagcccgggaaggagtacctgatcatgggcctggatggagccacctatgacctggagggccacccccagtacctgctggacagcaacagctggattgaggagatgcccagcgagcggctgtgccgcagcacccggcagagagctgcctgtgcccagctgaatgacttcctgcaggagtatggcacccagggctgccaggtgtag

SEQ ID NO: 88286 - DNA, 5097 bp, Artificial Sequence
  derived and/or modified sequence
atgagattgctctggggccttatctgggctagtagtttttttaccctgagtctgcaaaagccacgcttgctgttgttctctccctcggtagtgcacctcggagttcccctgagcgtgggagtgcagctccaggatgtgcctagggggcaggttgtaaagggttccgtgttcttgcgaaacccctcacgaaacaacgtaccctgcagcccaaaggtggattttaccctgagctccgagcgggatttcgccttgctgtccttacaggtgccactgaaagatgccaagagctgtgggcttcaccagctcttaagggggccagaggtgcagctcgtggcccacagcccatggttgaaggactctctgtcgagaaccacaaacatccagggaattaacctccttttctccagccgccgcggccacctgtttctccaaaccgatcagcccatctacaatcctggacagagggtgagatatcgagtcttcgccctggaccagaaaatgcggccatccacagataccatcactgtcatggtagaaaattcccatggcctgcgggtccggaaaaaagaagtttacatgccctcctcaatcttccaggacgacttcgtcatcccggacatcagcgaacccgggacgtggaagatttccgcccggttctctgatggacttgagtccaattcatctacacagtttgaggtgaaaaagtacgtgttgcccaatttcgaggtgaaaattacccccggtaagccttatattctgaccgtgcccggccacctggacgaaatgcaattggatatccaggcccgttacatctacgggaaaccagtgcagggcgtcgcgtacgtgcggtttgggctgctagatgaggatggtaaaaagacattcttcaggggccttgagagccagacgaaactcgtgaatggacaatcacacatctccctgagcaaggccgaattccaggacgccctcgaaaagttaaacatgggtatcacagacctgcagggtctgcggctctatgttgcagctgccattattgaaagcccaggaggagagatggaagaagccgagctgaccagttggtactttgtgtcctccccattcagtctagacctcagtaagaccaagcggcatctggtgcctggggcgccttttctcttgcaggctctggttcgtgaaatgagtggtagccccgcctcaggtattccagttaaagtgagcgcaaccgtctcctctcctgggtctgtgcccgaggttcaggacatccagcaaaacacggacgggtccggacaagtgtcgatacctatcattataccacagacgatttccgagctgcagctaagtgttagcgctggctctcctcatccagccatcgcccggctgaccgttgccgccccaccctcagggggcccaggattcctgagtatcgaacgacctgacagccgcccacctcgcgttggcgatacacttaaccttaacctgcgagccgtgggctccggagccaccttcagccactattattatatgattctgagccgaggtcaaatagtctttatgaaccgagaacctaagcgtactcttacatccgtgtcagtctttgttgatcaccatctcgcacctagcttttacttcgtagctttttattaccacggtgatcaccccgtcgccaattcccttcgcgtggacgtccaggcaggcgcctgcgagggcaaactggaactctctgttgacggagctaaacagtatcgtaacggggagtctgtcaaattgcatttagagaccgactccctggctctcgtcgccctcggtgcccttgacaccgccctgtatgcagcaggcagtaaatcccataagcctctcaatatggggaaagtttttgaagctatgaactcttacgatctgggttgcggtccaggaggcggagatagcgccttgcaggtgtttcaggccgcaggactggccttcagtgacggtgatcagtggaccctctctagaaagaggctcagctgccccaaagagaagactacccggaaaaagcggaacgtcaattttcagaaggccattaatgaaaagctcggccagtacgcttctcctaccgccaagcggtgttgtcaggatggagttactagactgcctatgatgcgatcatgcgagcaacgtgcggccagagtccagcagccagactgcagagagccatttctaagttgttgtcagtttgcggagtccctacggaaaaaatctagggacaagggacaagctggtctacagagagcgctcgaaatcctccaggaagaggaccttatcgatgaagatgacatcccagtcagatccttctttccagagaattggttatggcgggtagagactgtagatcgattccagatcttaaccctgtggctgccagacagtctcacaacctgggaaattcacggattgtctctgagcaagaccaaaggactgtgtgtggccactcctgttcagctgagggtgttcagggagttccacctccacctccgcctcccgatgagcgtgaggcgatttgagcagcttgagctgcggcctgtgttgtacaactatctggacaagaacttaaccgtgtccgtgcatgtaagtcccgtagagggattgtgcttggcagggggaggggggctagcacaacaggtgctcgttcctgcaggctccgccaggccggtggccttctctgtggttccaaccgctgcggctgccgtgagtctaaaggtggtggctagaggctcctttgagtttcctgttggtgatgctgtctctaaggtgctgcagatagagaaggagggcgctatccatagagaagagctggtctacgagcttaacccactggatcacagagggaggacactggagataccggggaactccgatccgaatatgatccccgatggcgattttaactcttatgtccgggtcaccgcatcagaccccctcgatacactgggaagtgagggtgctctgtcacccggtggagtggcctcattactgagacttccgcgggggtgcggtgaacagaccatgatttatttggcacctactctcgcagctagccgatatctcgataagactgagcagtggtccaccctccccccggagaccaaggatcacgcagtggatttgatccagaaaggatacatgcggatccagcaattccgaaaagccgacggaagctatgccgcttggttgtcccgggactcatcaacttggctgaccgcctttgtcctgaaggtcctctcactggctcaagagcaagtcgggggcagtcctgagaagctccaagagacttccaactggctgctgtctcaacagcaggcggacggcagctttcaggacccctgtcctgttctggacaggtccatgcagggaggcctcgttggcaatgacgagactgtcgccttgaccgcattcgtcacaattgccctccaccacggacttgctgtgttccaggacgaaggtgctgaaccgctcaagcaaagagtcgaagcctccatctccaaggccaattcatttctaggggaaaaggcgtctgctgggctgttgggcgctcatgctgcagctatcaccgcgtacgctctgacgctgactaaggctcctgtggacctgttgggcgtagcacataataaccttatggccatggcacaggaaaccggggacaatttgtattggggtagtgtaactgggagtcagagtaatgccgtctctcccacccccgctcccagaaatccatccgaccccatgccacaagcccccgcgctgtggatcgaaaccaccgcctacgcattgctgcacttacttttacatgagggtaaagccgagatggctgatcaggcctccgcttggctgactcggcaaggatctttccagggcggcttccgctccacccaggatacggtgatcgctctagacgcgctgtcagcgtattggattgcatctcacacgacagaggagcgcggtctaaatgttacactaagctccaccggcaggaatgggttcaagtcacacgcccttcagcttaacaatcggcagatccgcgggctggaagaagaactacaatttagtctggggagcaagataaatgtcaaagttggagggaactctaagggaacacttaaggtgctccgcacctataacgtcctggatatgaagaataccacttgtcaggatttgcagatcgaagttacggtgaaagggcatgttgagtacacgatggaagcgaacgaagactatgaggactatgagtacgatgagctgcctgccaaggatgacccagacgcacccctccagcccgtgactcctcttcagctgttcgagggacgcaggaatcgtcgacggagggaggcacccaagttgaccagcctctctgaccggtacgtcagccacttcgagactgagggaccgcacgtgttgctgtactttgactccgttccaacttcacgcgagtgcgtggggttcgaggctgttcaagaggtccccgtcgggctcgtgcagccggcctccgccacactgtacgactattacaatccagagcggcgctgctccgtgttttacggagcccccagcaaatcacggctcctggcaacactctgctctgcagaggtttgccagtgcgccgaaggcaaatgtccaaggcagcggcgtgctctggaacgtgggttgcaggacgaggacggctatcgaatgaagtttgcctgctactatccccgggtggaatatggtttccaggtgaaagttctgcgtgaagattcaagagcagcattcaggctgttcgagacaaagatcacacaggtgctacactttacaaaagacgtgaaggccgcggccaaccagatgcggaacttcctggtcagggcttcatgccggctcaggctcgagccaggtaaggagtacctgattatgggcctggacggtgccacctacgatctggaagggcacccccagtacctactggattccaactcatggattgaagagatgcccagtgagcgtctgtgtcgaagcactcgccagcgcgccgcctgcgcccagctaaatgactttctccaggagtacggtacacaggggtgtcaagtctag

SEQ ID NO: 88287 - DNA, 813 bp, Artificial Sequence
  derived and/or modified sequence
atgtgtcccgaggactccctgcaagtgccactgaaagacgctaaatcatgcggattgcaccagctgctccgaggccctgaagtccagctcgtcgctcactcaccatggctaaaggatagcctgtcccgcacaaccaacattcaagggataaatctgctgttttcctcccgaagagggcacctgttcctacaaaccgaccaacctatctataatcccgggcaaagagtccgatacagagtgtttgcactggatcagaaaatgaggccttccacggacactatcacagttatggttgagaactctcatggtctgcgggttaggaagaaagaggtgtacatgccttcctcaatctttcaggacgacttcgtcatcccggacatttccgagcccggaacatggaaaatcagtgcacgcttctcagacgggctggagtccaattcctcaacgcagttcgaagtcaagaaatatgtccttcctaatttcgaagtcaagataacaccgggtaagccctatattttgacagtcccaggccacctggacgaaatgcaactggacatacaggcccggtacatctacgggaaacccgtccagggagtagcatatgttaggtttggcttgctggacgaggatggcaaaaagactttctttcgaggccttgaaagtcagactaaattagttaatggccagtcccatatttctctgtctaaggccgagttccaagatgcactcgaaaaattaaatatgggcatcacagatctccagggcttacgcctttacgttgctgccgccattatagaaagtcctgggggatag

SEQ ID NO: 88288 - DNA, 5097 bp, Artificial Sequence
  derived and/or modified sequence
atgcggttactgtgggggcttatttgggcatcaagcttcttcacgttgagcctgcaaaagcctcgactgttgttgttttcgccaagtgttgtacacctcggcgtcccactgtcagtgggggtccaacttcaggacgtgcctagaggccaagttgttaagggttctgtgttcttgaggaatcccagtcggaacaacgtgccttgctctccgaaggtcgactttacactgagctccgaacgcgacttcgcattgctgagtctgcaggtccctttaaaggatgccaagtcgtgcggcctgcaccagttgcttagaggccccgaagtgcagctcgtagcccattcaccctggctcaaagattccctcagccgcactactaatatacaaggtatcaatctgctgtttagtagtcggaggggacacctgttcttgcagaccgaccagcccatctataatcccggtcagcgtgtgcggtacagagtattcgcgttagaccaaaagatgcgaccatcaactgatactatcaccgtgatggtagagaactctcacggcctgagagtcaggaaaaaagaggtgtacatgcctagtagcatcttccaggacgactttgttatccccgatatcagcgagcccggcacttggaagatcagcgctcgcttcagcgatgggctggagagcaactcttctacccaatttgaagtcaaaaaatatgtattaccgaatttcgaggtgaagatcactccaggtaaaccctatattttgacggtgcccgggcatctggatgaaatgcagctagatattcaggcaagatacatttacgggaagccggtgcaaggcgttgcctatgtccggttcgggctgcttgacgaagatggcaagaagacatttttcagaggcctcgagtcacaaaccaagttggtgaacggacagagccatatttctttatcaaaagctgaatttcaggacgccctggagaagctcaatatgggcattaccgacctgcagggactgcgactgtacgtggccgccgctatcatcgaatacccaggcggcgagatggaagaggctgagctgacctcatggtacttcgtgtcttctccattctctttggacctatccaagaccaagagacaccttgtacccggggcccccttcctgctgcaagcgctcgttcgggaaatgagcggctctccagcctctggcattccagtgaaggtatccgccaccgtgagctcacccggctccgtgcccgaagtgcaggacatccaacaaaacactgatggatctggacaagtttccatccccattatcatcccacaaacaatctctgaactccaacttagcgtcagtgcaggctctccacacccagctatcgcccggctgacggtggcagcacctccttctggagggccaggctttctgagtatagagtggcccgacagtcgccctccgagggtaggagataccctgaacctgaacttacgcgctgtcggttcaggggcaactttcagccactactattatatgatcctgtcacgcgggcagattgtttttatgaatagggagcccaaacgtacacttacaagcgtctccgtgttcgtcgatcatcatctggcaccttcattttacttcgtggctttctactaccacggcgatcatcctgttgccaatagcctaagggtcgacgtccaagcaggagcatgcgagggaaaactggaactctccgtagatggcgcaaagcagtacagaaacggcgagtcagtgaagctccatcttgagaccgacagcttagccctggtcgccttaggcgccttggacactgctctgtacgctgccggcagcaaatcccacaagccactgaatatgggaaaggtgtttgaggctatgaattcttatgatctgggctgtggcccagggggcggagacagcgccctccaggtgtttcaggctgccgggctagccttttcggacggggatcaatggacactttcacgaaaacggctttcctgccctaaagagaaaacgacgaggaagaagagaaacgtcaacttccagaaggcaattaatgagaagcttggtcagtacgcctccccaacagctaagcgctgctgccaggacggggttacccgtctacctatgatgaggtcatgcgagcagagggccgcacgcgtacagcagcctgactgcagggagccgtttttgagctgctgtcaattcgccgagtcactccgcaaaaagtcccgagataaggggcaggccgggctccagcgggccttggagattctgcaggaggaagacctgatcgatgaagacgacatcccagtgcggtctttttttccagaaaactggctgtggcgtgtcgaaacagtcgatcgattccagatcctcactctttggctaccggactccctcacgacttgggagattcacgggttatccctcagtaaaaccaaaggcctctgcgtggctactcctgtacagctcagagtattccgggaattccacctccatttgcgtctgccaatgagcgtccggaggtttgagcagctggaattgcggcctgttctctacaactacctggacaaaaacctcaccgttagcgtgcacgtgagccctgtagagggtctgtgcttggctggaggaggcggcctagcgcagcaggtgctggtaccggccggaagtgcccggcctgtggcattctcagtcgtccccaccgctgcagccgccgtgtcccttaaagttgtagctcggggaagctttgaattccccgtgggcgatgctgtgtccaaagtattgcagatcgagaaggagggggctatccacagagaggaactggtatacgagctgaacccgcttgaccacagagggaggacacttgagatcccagggaattcagatccgaatatgattcccgacggcgacttcaatagctacgtgcgagtcactgcctccgatcctctggacacgctcggttcagagggggccctgagtcctggtggtgtggctagcctgctcagactgcctaggggctgcggagaacagacaatgatatacctggcccctaccctggcagcctcaaggtacctggataagacagagcagtggagtacactgcctcccgagaccaaagaccacgccgtggatctgatccagaagggatacatgaggatacagcagtttcgtaaagctgacggcagttatgccgcgtggctgtctcgggattctagcacttggctgactgcctttgtcttgaaggtccttagtcttgcgcaggagcaggtgggtggaagtcctgagaaactccaggaaacgagtaactggttactgagtcagcagcaggcggatggatcattccaggatccttgcccggtcctggatcggagtatgcaggggggcttagtgggcaacgatgaaacagtggcacttaccgcctttgtgaccatagcacttcatcacgggctggctgtcttccaggacgagggagccgaacccttgaaacagcgagtggaagcctcaatttctaaggccaactcatttctgggcgaaaaggcatctgctgggctgctgggcgcccacgccgctgccattacagcctatgccctcacactgacaaaggctcccgtcgacctgctgggagtggcacataacaacctgatggcaatggctcaggagaccggcgacaacctttactggggtagcgtgacaggatcacagagtaatgctgtcagccctacaccggctccaaggaaccccagcgacccaatgccccaggctccggccctttggattgagacaactgcatacgcgcttttgcacctgctcctgcacgaaggaaaggctgaaatggctgatcaggccgcggcatggctgactcgacagggatcttttcagggagggtttagatctacccaagacaccgtgatcgctctggatgctttatccgcctattggattgcttcacatacaaccgaggaaaggggcctaaacgtaacgcttagttctaccgggcgaaacggttttaaaagccatgccctgcaactgaacaatcggcagattcgcggactggaggaggagctgcaattttctctggggtctaagatcaacgtcaaggtgggagggaattcaaagggcacattaaaggtcctccggacatataatgtgctcgatatgaaaaatacgacatgtcaggaccttcagattgaagtcaccgtcaagggacatgtggaatacactatggaggctaacgaagattacgaagattacgaatacgacgagctaccagccaaagacgatccagacgctccactgcaacccgtcactccgctgcaattgtttgaggggcggcggaaccgcagacggcgcgaggctccgaaattgacctcactctcagacaggtatgtgtcacacttcgagacggaggggccccatgtgttactgtacttcgattccgtccctacgtctcgggagtgcgttggcttcgaagcagttcaggaagtgcctgtcggcctggtgcaaccagcttctgccactctgtacgactattacaatccggaaaggcggtgctccgtcttttatggggcaccttcaaagagtcgcctcttggccacgctgtgcagtgcggaagtgtgtcaatgtgccgagggaaagtgtccacgccaacggcgggcactggagcgggggctgcaggatgaggacggctaccgcatgaaatttgcgtgctattatcctcgcgtggagtacggctttcaagtgaaggtgctacgggaggattcccgagccgcatttcgactcttcgagaccaagattacccaggttcttcacttcactaaagacgttaaagcagctgctaaccagatgcgcaactttctggttcgggcctcgtgtcgacttagactggagccaggtaaagaatatctcatcatgggtttggacggagcaacatacgatttagaaggtcaccctcagtacctccttgacagcaattcctggatcgaggagatgcctagcgagcgcctgtgtcgcagcacgagacaaagagccgcatgcgcccagttgaacgattttctgcaggaatacgggacacagggatgccaggtgtag

SEQ ID NO: 88289 - DNA, 5097 bp, Artificial Sequence
  derived and/or modified sequence
atgcgtcttctatggggactgatatgggctagcagtttcttcaccctgagcctgcagaaacctcgactcctgctcttttctccgtcagtagtgcacctgggggtcccccttagcgtcggtgtgcaattacaggatgttccccggggacaggtggtcaaggggagcgtgttccttcgcaatccgtcacgtaataatgtcccttgtagtccaaaagtggactttacccttagctccgaaagagacttcgctctgctaagcctacaggtacccctaaaggatgccaaatcatgcggccttcatcagctgttaagggggccagaagttcagctcgtcgcgcactcaccctggctcaaagactccctgtccagaaccaccaacattcagggcattaatttgctcttttcctctcggaggggccacctgtttctgcagacagaccagcctatctataacccaggtcagcgcgtacggtacagggtgtttgctctcgaccagaagatgagaccttctaccgacacaattaccgttatggtggaaaatagtcatggtctccgggtgagaaaaaaggaagtctacatgccgtccagtatctttcaagacgatttcgtgatccccgatatctccgaacctggcacatggaagatcagcgctaggttcagcgatggcctggagagcaactccagcacacagttcgaggtcaaaaagtatgtgcttccaaactttgaagtcaagatcacgccaggaaaaccttacatacttacagttccaggccatctggatgaaatgcagctcgacattcaagccagatatatctatgggaagccagtgcagggagtcgcctacgtcagatttggtctgctggacgaagatggtaagaaaacattctttcgggggctggaaagtcagaccaaactggtgaacggccagtcccatattagcctgagtaaggcagagttccaggatgctctggaaaaactgaacatgggcatcacagacttgcaaggcctgagattgtatgtcgccgctgccattatcgagagtcccggcggtgagatggaggaagccgaactcactagctggtactttgtttctagccccttctccttggatctgagtaaaacgaaacgacacctggtgcccggagccccattcttgctgcaagccctggtccgggaaatgtccggatctcccgcttccggcataccggttaaggtgtccgccacggtctcctcccccggatcagtccctgaggttcaggacatccaacaaaacacagatgggtcgggacaggtgtccattcccattataataccgcagaccatcagtgaactgcagctcagcgtgagtgcaggaagcccacacccagctatagcacggctgacggttgctgctcccccctctggagggcctggcttcctctcgatagagcgaccggacagccgaccacctagggtgggcgatactctgaacttgaatttgagggcagtggggtctggcgcgaccttcagccattattattacatgattttaagtagggggcaaatcgtctttatgaacagggagcctaaaaggaccctcacctccgtgagtgtttttgttgaccatcatctggcgcctagtttctacttcgttgcgttctactaccacggcgatcaccccgtggctaactcattgcgggtggatgtgcaggccggtgcctgcgaaggcaagctagagctctcggtagatggtgccaagcagtataggaatggcgaatcggtaaaactgcacttggagaccgactcacttgcactggtcgcactaggagcgctggatacagctctgtacgccgccggtagcaagagccacaagcccctgaatatgggtaaagtgtttgaggcgatgaattcttatgacctggggtgcggcccaggtggaggtgacagcgcgcttcaggtcttccaggccgctgggcttgcgttttctgatggggaccaatggaccctgagcaggaaacgactgagctgtcccaaagaaaaaacaacgaggaagaagagaaacgtgaactttcaaaaggccatcaatgagaagctgggtcaatacgcctcccccacagccaaacggtgctgccaggacggagtgactcgactccccatgatgagatcctgcgaacagagggcggcacgcgtccagcaaccagactgtagggaaccattcctctcttgttgtcaatttgccgaatctttacggaagaaatccagagacaagggccaagctgggcttcagagagcgctggaaatcctgcaggaagaggatctcatagacgaagatgacattcccgtgcggtcattttttcctgaaaactggctctggagagtggaaactgtcgatcggttccagattctcactttgtggctgcccgattcgctcactacctgggaaattcatggcctgtcgttgtctaagacaaaggggctttgtgttgctactccagtgcagcttcgcgtttttcgggagtttcatcttcatctgagactgccgatgagcgtgcgcagatttgagcagttggaattaagacccgtcctgtataactacctggataaaaacctgactgtctcagtgcatgtgagcccagtggaaggcttgtgcctggccgggggtggcggcctggctcagcaggttttggtaccagcggggtccgcacgtcctgtagcgttcagcgtggtgcccaccgccgccgcagcagttagcctgaaagttgttgctaggggatcattcgaatttcccgtgggggacgccgtttccaaggtgctgcagatcgagaaggagggggcgatacacagagaagagctagtgtatgaacttaatccattggaccatcggggacgtactcttgagatcccgggaaattcagatccgaacatgattccggacggcgactttaacagctatgtgagggtgacagcttcagaccctctggataccttgggatctgaaggggcactgtcgcctggaggagttgcctccctcctccgccttcccaggggctgcggagaacaaaccatgatatacctggctcctactttggcagcaagcagatatctggataagaccgagcagtggagcaccctgccccccgagacgaaagaccacgcagtcgacctgatccaaaaaggatacatgaggattcagcagtttcggaaagctgatggatcatatgcagcatggctctcccgggacagctcaacctggctaacagcctttgtcctcaaggtgctaagtctggcacaggagcaggtcggaggctctcctgagaaattgcaggagacgtcaaactggctgttatcccagcagcaagcggacggctccttccaggacccctgccccgtgcttgaccgatctatgcagggtggcttggtgggtaatgacgagactgtggccttgacagctttcgtaacgattgctctacaccatggtttagctgtgttccaggatgaaggcgctgaacctctgaaacagagagtggaggccagtattagcaaagcgtcaagcttccttggcgaaaaagcttccgctgggctcctgggagcccatgctgcggcaattactgcatacgcgctaactttgaccaaagcccctgtggatctgcttggggttgcgcataacaatctgatggcgatggctcaggaaacaggggataatctgtattgggggtccgtaactggctctcagtcaaatgccgtgagtcccacccccgccccccgcaatccctccgaccctatgccccaggcacccgccctctggatcgagaccaccgcctacgccctgctgcatctgctgctacatgaaggcaaggctgaaatggccgaccaagcagctgcatggttgacaagacaggggagcttccaggggggctttaggagtactcaagatacagttattgcccttgacgcattgtctgcatattggatcgcatcacacacgaccgaagaacggggactgaacgtgacgctatctagcaccggcaggaacggattcaaaagtcatgccctccagctgaataaccgtcagattcgtggccttgaggaggaactccagttctctctggggagcaaaattaacgtgaaggtcggcggaaactcaaaggggacactgaaagtgctcaggacttacaacgtgctggacatgaagaacacaacttgccaggacttgcaaatcgaagtcactgtcaaggggcacgtggagtacaccatggaagcgaatgaagactacgaggactatgagtacgacgagctccctgctaaggacgatccagatgccccactgcaaccagttacccccctgcagttgtttgaaggccggcggaataggcgacgacgggaggcgccaaaattaacttccctgtcagatagatatgtcagccatttcgagactgaggggccacatgtgttgctttattttgacagtgtgcccacctcacgggagtgtgtcgggttcgaggccgtgcaggaagtgcctgtgggcctggtccaaccagcctccgcaacactgtacgactactataatccagaacgcaggtgctctgtcttttacggcgctcccagtaagtcacgccttctcgcgacactgtgttctgcagaagtgtgtcagtgcgctgaaggaaagtgccctcgacagcggcgcgctctcgagcgggggcttcaggacgaagacggttacaggatgaagttcgcatgttattatccgagggtagagtatggcttccaggtgaaggtgttaagagaagactctagagccgcattcagactgtttgagaccaagataacacaggttctgcatttcaccaaggatgtgaaagctgccgccaaccagatgaggaatttcctggttcgggcctcatgtcggttgaggctggaacccggcaaagagtatcttataatggggctcgatggtgccacttatgatcttgagggccacccccagtacctattagatagtaactcttggatcgaggagatgccctctgagaggctgtgtcggtcaacacgacaacgggcggcctgcgcccagctcaatgatttcctgcaagagtacggcactcaggggtgccaggtctag

SEQ ID NO: 88290 - DNA, 5097 bp, Artificial Sequence
  derived and/or modified sequence
atgaggctgctatggggccttatctgggcctctagcttttttactctgtcattgcagaaaccccgtctcttgctgttttctccatctgtggttcacctgggagttccactctctgtcggcgtgcagctgcaggatgtgcctagagggcaagtggtgaagggctcagtgttcctcagaaatccttcccggaataacgtcccctgctccccaaaagtggatttcaccctgagctccgagagggattttgccttgctgtccctgcaggtccctcttaaagatgcgaagtcttgcggcctgcatcagttactccgcggccccgaggtgcagcttgtggcgcactctccatggcttaaggattcactaagccgaactaccaacatccaagggattaatctgctgttttcgagtcggagggggcacttgtttctgcaaacagatcagccgatctataaccccggccagcgcgtccgttatagagtattcgcattggatcagaagatgaggccgagtacagataccatcacggtgatggtggagaacagccatggattacgcgtccgaaagaaggaagtctatatgcctagctctatctttcaggatgatttcgtcatccccgacattagcgaaccggggacttggaagatcagtgctcggttttcggacggcctagaaagcaacagttccacccagttcgaagtaaagaagtacgtgctgccaaatttcgaagtcaaaatcacaccagggaagccgtacatcttgacagttcctgggcatctggatgaaatgcagctcgacatccaggctaggtatatctacgggaaacctgtccaaggggtggcttatgtgcgcttcggactactggacgaggacggcaaaaagactttctttaggggactcgaaagccagacaaaactggtgaacggccaaagccacatctcgctttccaaggccgaattccaggatgcattggagaaattgaatatggggatcactgatctccagggactgcgactgtacgtcgccgcagcaattattgagtacccaggaggcgagatggaggaggcagagttgactagttggtactttgtgagcagtccctttagcctcgatttgagcaagaccaaaaggcatctggtgccaggggccccctttcttctccaagctctcgtgcgagagatgtctggttctccagcctctggaatcccggtcaaagtcagcgcaaccgtgtccagccctggttctgtgccagaagtgcaggatattcagcagaataccgatgggtcaggccaggtatcaatacccatcattatcccccagaccattagtgaactccaactgagcgtcagtgccggatctccccaccccgctatcgcacgcctcactgtcgccgctcctccaagcggcgggccagggtttctctctattgaaaggccagattcccggcctcccagggttggagatactctcaacctgaatcttagagctgtaggctccggggccactttctctcattactactacatgatcctttcccgaggacagatcgtgttcatgaaccgcgagccgaagaggaccttgacgtcagtgagcgtgtttgtggaccaccatctggcaccttcattttattttgtggcattctattatcatggggatcaccccgtggctaattcactgagggtcgacgtccaggctggcgcttgcgaggggaagctcgagcttagtgtagacggcgccaaacaatacagaaatggcgagagtgtgaaactgcatctggaaactgactccctggccctcgtagctcttggcgccctggatactgctctgtacgcggctgggagcaaatcccataagcccctgaacatgggaaaagtgtttgaggccatgaattcatatgatttgggctgcggaccggggggaggagattccgctctgcaggtgttccaggcagcaggtctcgccttcagtgacggggaccagtggacattaagccggaagaggttgagttgccctaaagaaaaaacaacgcgcaaaaaacgtaatgtgaattttcaaaaagctataaacgaaaagttaggacagtacgcttcgcccacagccaaacgttgctgccaggacggcgtcactcggctgccaatgatgaggtcttgcgagcagagagccgcacgcgtccaacaacccgactgtagagagcccttcctgtcgtgttgccagtttgccgagtcactgaggaagaaaagccgagacaaagggcaggcaggcctgcagagggctctggaaatcctgcaggaagaagacctcatcgacgaggatgacattccggttcgtagtttcttccccgaaaactggttgtggcgcgtcgaaactgttgaccgctttcagattctgaccctgtggctaccagacagtcttaccacttgggaaatccacgggttatccctgtctaagacaaaggggctatgcgtggccaccccggtccaactccgagtttttagagaatttcatcttcatttgcggctgccaatgtcagtgcgaagatttgagcaactcgagctgcggccagtcctgtataactaccttgataaaaacttgactgtatctgtgcacgtgtctcctgtcgaggggttgtgtctggctggaggcggcggtctggcccagcaagtactggtacccgccggcagcgcccggccggtggccttttctgtcgtgcccaccgctgcggcggccgtttcgctaaaggtcgttgcccgtggctcttttgagtttccagttggggatgcggtgagtaaggtcctgcagattgagaaagagggggcaattcatcgtgaggaactcgtgtatgaacttaatccgctcgaccatagaggccggacgttagagatcccaggaaactctgatcccaacatgatcccggatggagatttcaattcatatgtccgggtaaccgcaagtgacccactggacacccttggctccgaaggcgcgctgagccctggaggagtggcgtccctgcttagactaccaagagggtgtggagaacagacaatgatatacctcgctcctacgctggctgcatcgcgctacctcgacaagacggagcagtggagtaccttgccccccgaaactaaggaccatgcagtggatcttatacaaaaaggctatatgcgaatccagcaattcaggaaagctgacggttcttacgccgcctggctcagcagggactcctccacctggctgaccgccttcgtactgaaggtcctgtcactcgcacaggagcaggttggcggcagccccgaaaagctgcaggagaccagcaattggctccttagccaacagcaggccgacggaagtttccaagacccctgtcccgtgctggaccgctcaatgcaaggggggttggtggggaacgacgagaccgtcgcactcactgcctttgtcactattgctctccaccacggactcgcagtcttccaggatgaaggcgcagagccactaaagcagagagtcgaagcgtctatctctaaggctaattccttcctgggggaaaaggccagcgcgggcctgctgggtgctcacgctgcagctataaccgcttatgcattgacccttacaaaggctcccgtggatctactgggagttgcccataataatctgatggccatggctcaggagaccggggacaacctatattggggtagcgtgacagggtcacagtccaacgccgtatcacctacacccgctccgcgcaacccttccgaccccatgccccaggcacctgctctgtggatcgagacgaccgcctacgcattgcttcatcttttgttgcacgaaggtaaagcagaaatggcagaccaagccgcagcctggctgaccaggcaagggtccttccagggaggatttcgatctacccaagatacagtcattgcactggacgcattgtctgcctactggatcgccagccacactacggaagaaagggggctgaatgtgacactttctagtacaggcagaaacgggtttaagagtcatgcattgcaactaaacaacaggcagataagaggcctcgaggaggaactacagtttagtttaggatctaagataaacgtaaaggtaggcggcaactccaagggcacactgaaagttctccggacatacaacgttctggatatgaagaatacaacatgtcaagacctgcaaatagaggtgaccgtcaaaggccacgtggagtacacgatggaggccaatgaagattacgaagactacgagtacgacgaactgcctgcaaaggatgacccagatgctcccctccaaccggtgacacccctgcagctgttcgaggggcgccggaacaggcgtagaagagaggcaccaaagcttacaagcctaagcgaccggtatgtcagccacttcgagaccgaggggcctcatgtcctcctttacttcgacagcgtccccacatcacgcgagtgcgtgggtttcgaagcagttcaggaggtgccagtcggcctggttcagcccgcctctgccactctctacgattactacaatcctgaaaggcgatgctcagtgttctatggtgctccgtccaagagccggcttcttgctactctgtgttcagcagaggtctgtcagtgcgccgaaggaaagtgtcctcgacaacgtcgcgccctggaacggggactgcaggatgaggacggttaccgtatgaagttcgcttgttattaccctcgcgtggagtacggtttccaagtcaaggtcctgcgggaagactcgcgggctgcctttcgtctgttcgaaacgaaaattacgcaggtgctacatttcactaaggatgtgaaagccgctgctaatcaaatgcggaacttccttgtccgcgcctcctgtcgcctgagactggaaccaggaaaagagtatctgatcatgggcctcgacggagccacatatgatctggaagggcacccacagtacctgctcgactccaactcttggatcgaagagatgccaagcgagcgcctctgccgctctactcggcaaagggccgcttgcgcccagctcaacgatttccttcaggaatatggcacccaggggtgtcaggtctag

SEQ ID NO: 88291 - DNA, 5097 bp, Artificial Sequence
  derived and/or modified sequence
atgcgtctactgtggggcctgatctgggcgagcagcttctttaccctgtcgctgcagaagcctcggctgctattgttttccccttcggtggtccatctcggagtaccactgtccgtcggggtgcagctacaggacgtgccacgcggccaagtagtgaagggatccgtgtttctgagaaaccctagtcgcaataatgtgccttgctcaccaaaagtagattttactctttcctcagaacgcgacttcgcgctgctttccctccaagtgcctttgaaggatgcgaagagttgcggtttacatcagttgttaaggggcccagaggtgcagctcgtggcccactctccatggttgaaggactcactgtctaggaccaccaacatccagggcatcaacttattgttttcgtctagacgcggacacctgttcctgcagaccgaccagcctatttacaaccccggccagcgcgtgcgatatcgagtcttcgctctggatcaaaagatgcgcccttcaacagacacaatcaccgtcatggtggagaatagtcacgggcttagagtgaggaaaaaggaagtctacatgccctcatccatctttcaagacgactttgttattccagatatctcagaacctggcacctggaagatttccgctagattctctgatggactcgaatcaaatagttcgacacagttcgaggtaaagaagtacgtgttgccaaactttgaagttaagatcacgccaggcaaaccttacatccttacagttccaggacacctggatgaaatgcagttagatatacaggctagatatatttacgggaaaccggtgcagggagttgcatacgttaggttcggccttcttgacgaagacggcaaaaaaaccttctttaggggcctggagtcacagaccaagctagtgaatgggcagtcccacatcagtctgagcaaagcggagtttcaggacgctttggagaaattaaacatgggtatcactgacctgcagggcttacgcttgtacgtagccgccgctattatcgagagcccagggggcgagatggaagaggccgagctgacaagttggtattttgtctcctcccctttttcacttgacctgtctaagaccaagcggcacctggtcccaggggctccttttctgctccaagcactggtaagggagatgtctgggtccccagcatcaggtattcctgtaaaggtttccgccacagtgtcatcaccgggctcagtgcctgaggttcaggatatccagcagaacacggatggaagcggtcaggtgagcatcccgatcataattccccagacaataagcgagctgcagctgtctgtcagcgcagggtctcctcatcccgccatagcccgtctgacggttgccgcaccaccctcaggaggtcctggcttcctatccattgaaagacccgattccagaccacctcgggtgggggatacgctgaatttgaaccttcgagccgtgggaagtggggcaacgtttagtcactactattacatgattctcagcagagggcagatagtgtttatgaaccgcgagccgaagcgaacactgacatccgtgtcagttttcgtggatcaccatctggctccctccttctactttgtggcgttttattaccacggggaccacccggtcgcgaattcactaagggtggacgtgcaggctggagcatgtgaagggaaactcgagctgtccgtcgatggtgcgaagcaataccgcaatggagaaagcgtcaagctacacctcgaaacagactctttagccctagtcgccctcggggccctggatacagctctatatgctgcaggaagcaagtcacataagccacttaatatgggaaaagtgttcgaagcaatgaacagttatgatcttggctgtgggccaggtggcggcgactcggccttacaggtatttcaagctgccggtctggcttttagcgacggcgaccagtggacattgagcagaaagagattgtcctgtcctaaagagaaaacaacgcgcaagaaaagaaacgtgaacttccagaaagccattaatgagaaactaggccaatacgcgtcccccaccgccaagcggtgttgtcaggacggggtcacacgtcttccaatgatgcgcagctgtgaacaacgggcagcacgagtgcagcagcctgattgccgagagccgtttctctcctgctgtcaatttgcggagagcctacgtaaaaagagccgagataagggacaggccggcctccagagggcgcttgagattctgcaggaggaagacttgatcgacgaagatgacatccctgtgcgcagcttttttcctgagaactggctgtggagagtggagaccgtcgatagattccagatactcactttatggctgcctgacagcctcacaacatgggaaattcatggcctcagcctttcgaagaccaagggcctgtgcgtggccacaccagtgcagctgagagtgttccgcgagtttcatcttcatcttcgactgccgatgagtgtccgcagattcgaacagctggagctcaggcccgtgttatataattatctggataagaatctgacggtctccgtccacgtcagcccggtcgaaggtctgtgtctcgctggaggggggggtctagcccagcaggtgctagtgccggcaggctctgcgagacccgtagcctttagtgtcgtacctacggccgccaccgctgtgagcctgaaagtggtggcgcgcggcagctttgagtttcccgttggggatgctgttagtaaggtgctgcagattgagaaggagggagcaatacatcgtgaggagctggtgtacgaactgaaccctctggatcaccgggggaggacattggagattccaggaaactccgatccaaacatgatccccgacggggatttcaactcgtatgtccgggtcacagcttctgatcctcttgatactctgggtagcgaaggcgcactgtcacccggtggtgtagctagcttgctgaggttgccccgcggatgtggcgagcagactatgatttatctggcgcctacactcgctgccagcagatatctggataagacggaacagtggtcaaccttgccgcccgagaccaaggatcacgctgtggacctgatccagaagggatatatgcgcatacagcagtttcgcaaagcggacggaagctacgcggcgtggctatccagaggctcttccacttggctgactgcatttgtgctgaaggtgctgtctctcgcccaggagcaggtaggcggtagtcctgaaaagctgcaggagactagcaactggctcctgtcacagcagcaggctgacggtagctttcaggatttgtcaccagtgatccacagaagtatgcagggagggcttgttggaaacgacgaaacagtagctcttaccgcattcgttaccattgccttgcaccatggtttggccgtttttcaggacgaaggggcggagccgctgaaacagcgtgttgaagcaagtatcagtaaggcatctagttttcttggggagaaggcctcagccggattactgggcgcccacgcagctgctataactgcctacgctcttacactgactaaagctcccgccgatctcaggggcgttgcccacaacaacctcatggccatggcacaagaaactggcgacaacctgtattggggctcagtcaccggctcacagagtaatgcagtttcccctacccccgcccccaggaatccctcagacccaatgccgcaggcccccgctttgtggatagagacaacagcctatgccctcctccacctgctgcttcacgaggggaaggccgagatggcagatcaggctgctgcttggcttactcgacaaggatcatttcagggaggctttcgctcaacccaggatacagttatcgccctggatgctttgtcagcctattggatagcatctcacaccactgaggaaaggggcctcaacgttaccttgtcttctactggtagaaatggctttaaatctcacgcccttcagttaaacaacaggcagataagggggttggaagaggaattgcagttttctctgggcagtaaaattaacgttaaggtaggtggaaatagtaagggcacgctgaaggtgctgcgtacctataacgtcctcgatatgaaaaacactacatgtcaggatctacaaatcgaggtcaccgtaaagggccatgttgaatacactatggaggcaaacgaagactatgaagactacgagtatgacgagctgccggcaaaggatgaccccgacgcacccctccaaccagtgacccctctgcagctcttcgaggggagaagaaatcggcgccggcgcgaggcccctaagttaactagcctctccgacaggtacgtttctcacttcgaaaccgagggcccacacgtgttattgtactttgattccgtgccaactagtagagaatgcgtgggatttgaggcagtgcaagaagtcccagttggtcttgtgcagcccgcgagcgcaacgctttatgactactataacccagagcggagatgttcagtattttacggcgccccctccaagtctaggctcctggcaactctctgcagtgccgaggtctgccaatgtgctgaagggaaatgtcctagacaaagaagggcattagagcgcggactgcaggacgaggacgggtaccgtatgaaattcgcctgctactacccgagggtcgagtatggatttcaggtaaaggtgttaagagaggatagtagagcggccttccgtctgtttgagactaaaataactcaggtgctgcacttcactaaagacgttaaagccgcagccaaccaaatgcgcaacttccttgttcgggcttcctgtaggctgcggctggagcccggcaaggagtacttaatcatgggtctggacggcgcaacctatgacctggaagggcacccacaatacctcctagactccaattcatggattgaagagatgccctctgagaggctctgcagatctactaggcagcgcgcagcttgcgcacaattaaacgatttcctgcaggaatacgggactcaggggtgtcaagtgtag

SEQ ID NO: 88292 - DNA, 807 bp, Artificial Sequence
  derived and/or modified sequence
atgtgccccgaggactcccttcaggtgcccttaaaagatgccaagtcgtgcgggttgcatcagttactcaggggcccagaggtacaactcgtggctcacagcccttggcttaaagactcacttagccgtaccacgaacatccagggcataaatctcctgttttcttctagaagggggcacctcttcctgcagactgatcagcctatatacaatcctggacaaagagtgaggtatcgagtctttgcattggatcagaagatgaggccctctaccgataccattaccgttatggttgagaacagtcacggactgagggtcaggaagaaggaagtatacatgccatcttccattttccaggatgatttcgtcatccctgatatttctgaacctggcacttggaaaatttcagccagattttcagacggcctggaatctaattcctctactcaattcgaggtgaaaaagtatgtacttccaaacttcgaggttaaaattacccctgggaaaccctatattctcacagtgcccggacacctcgatgaaatgcagcttgatatccaggccagatacatatatggcaagcctgtgcagggcgttgcctacgtgaggtttggtctgttagatgaagacggcaaaaagaccttcttcagggggcttgagtcccagactaaattagtgaacgggcagtctcatatttcgctgtcgaaagcagagttccaggacgcactggagaaactgaatatggggattacagacctacaggggctcaggttatatgttgctgccgccattatcgagtcaccttag

SEQ ID NO: 88293 - DNA, 5097 bp, Artificial Sequence
  derived and/or modified sequence
atgagattactgtggggcctaatctgggcatcctccttctttaccctgtccctgcaaaagcctcggctgctgctttttagccctagcgtagtgcaccttggtgttcccctgtctgtgggggtccagctccaagatgtgcctagaggacaagttgtgaagggctcagtctttctgagaaatccgagccgcaataacgtgccatgctcgccaaaggtcgacttcactctttcctctgagcgcgatttcgccctgctgtctctgcaagtgccgctaaaagatgctaagtcctgtggactccaccagcttctgaggggacccgaggtgcagttggtggcccattctccgtggctcaaggattctctgagcaggactaccaacatccagggaatcaacctcctattttcgtctcggcgaggtcaccttttcctgcaaactgaccagccaatctacaatccggggcagcgagtcaggtacagagtttttgcattagaccaaaagatgcggcctagcactgacacaatcaccgtcatggtcgaaaattcccacggcctccgcgttcgaaaaaaagaagtctacatgcctagttcaatttttcaagacgacttcgtgatccccgacattagcgagccgggaacctggaaaatttccgcccgattcagtgacgggctcgaatctaactctagtacacagttcgaggtgaagaaatatgtacttcctaatttcgaggtgaaaatcacaccgggtaagccttacattctgactgttcccgggcacctcgacgagatgcagctggacatacaggcacggtatatttacggcaaaccggttcagggcgtagcctatgtgcgcttcggtttactggatgaggatggaaaaaagacgttctttcgagggctggaatcccagacaaagctagtgaatgggcagagtcatatttctttgagtaaagcagagtttcaggatgcgctcgagaaattgaatatgggaattactgacctgcagggcctccgcttatacgtggccgcagccattatcgaatctccaggtggcgagatggaggaagctgagctcacatcttggtactttgtctctagcccgttttctctggacctcagcaagacaaagcggcatctggttcctggcgcgccctttctgcttcaggccttggtccgggaaatgtctggctctcctgcttccggaatcccggttaaagtgagcgccaccgtctcttccccaggttccgtacctgaggtccaggatatccagcagaatacagatggaagcggccaggtgagcatccccatcatcattccgcaaaccattagcgagttgcagctttccgttagtgctggctcgccccatcccgctattgcccgcctgaccgtcgcagcaccccccagcggcggaccagggttcctgtccattgaacgtcccgacagcaggcctccgagggtgggagataccttaaacctgaaccttagagccgtaggatcaggcgccacattttcacattattattacatgatcttatctcgcggccagatcgtattcatgaatcgtgagcctaaacggactctcacgtctgtgtctgtcttcgtggaccaccaccttgccccctctttctactttgtggccttttactatcatggtgaccacccagtggcaaattctctgcgcgtagatgtccaagcgggggcatgcgagggcaaactggagcttagcgtggacggggcaaagcagtaccggaacggtgagtccgtgaagctccatctggagaccgacagcctggccctagttgccctcggagcccttgacacagcactgtacgcagccgggagcaagagtcacaagccactcaatatgggtaaagtcttcgaggctatgaattcatatgatctaggatgcggaccagggggcggtgactccgccctgcaggtttttcaggccgccggactggctttcagcgatggcgatcagtggaccctttcccggaagcgccttagctgtcctaaagagaaaaccacccgcaaaaaacgtaatgtcaatttccagaaggcaattaacgaaaagctgggacagtatgcgagtcctaccgccaagcgatgttgtcaggacggagtgacccggcttccaatgatgaggagttgcgagcaacgtgcggcaagggtccagcagcctgattgccgagaaccgttcttgtcctgttgccagtttgcagagagcttgcggaaaaaaagccgagataaggggcaagccggcctccagcgagcactggaaattctgcaggaggaagatctgatagacgaagatgacataccagtgcgcagtttctttccagaaaattggctgtggagggttgaaacagtagacaggttccagatacttacattgtggctgcctgacagcctgaccacttgggaaattcacgggcttagtctctctaagactaaggggctatgtgttgcaaccccagtgcagctgcgggtgtttcgagaattccacctccacttgcgactgcctatgtccgtgaggcgttttgaacagttggaactcagacccgttttgtacaactacctggataaaaatttaactgtttccgtacatgtgtcaccggtagaaggactgtgccttgccggcggcggaggattggcacaacaggtcctcgttccagctggcagtgccagacccgttgcttttagcgtagttccaacagccgccgctgcagtgtcactgaaggtggtcgcccgcggcagttttgaatttcctgtcggagacgccgtgtccaaagtgctccagatcgaaaaggaaggcgcaattcaccgggaggagctcgtgtacgagctgaacccgctcgaccatcggggtcggacactcgaaattcctggcaacagtgaccctaatatgattcctgacggagatttcaactcctatgtgagggtcactgcttccgaccctttggataccctgggcagtgaaggggctttatcacccggcggagtggccagtttactgagactcccgaggggctgtggggaacagacaatgatttatctagcccccacattggcggcatcacgctatttggacaagactgagcagtggtcaactctgccgcctgagacaaaagaccatgcagttgacctcatccagaaaggatacatgcgcatccaacagtttagaaaggcggacgggtcttacgccgcatggctgtcccgcggatcaagtacctggctcactgctttcgttctaaaagttttgagtttggcccaggagcaggtggggggaagccctgagaagcttcaggagaccagcaattggctgctgagccagcaacaggcagatggaagtttccaggacttgagccctgtcatacaccggtcgatgcagggtggcttagtggggaatgatgagaccgtggctctcaccgctttcgtgacaatcgcacttcaccatgggctagctgtgttccaggatgaaggcgctgagccgttgaaacaacgcgtggaggctagcatctctaaggcaaacagcttccttggagaaaaggcttctgccgggcttctgggcgcacacgccgctgcaattaccgcctacgccttgaccctcaccaaggcgcctgctgatcttaggggggtggcccataacaatctgatggctatggcgcaggaaactggggacaacctgtactggggctctgttactgggtcccagagtaatgcagtgagccccactcccgccccccgcaacccctccgaccccatgcctcaggctccagctctctggatcgaaaccaccgcatatgcactgctgcacctgctcctgcatgaggggaaggcagagatggccgatcaggctgcagcgtggctgacacggcaggggtcctttcaggggggtttcagaagcacgcaggatacagttatagccctagatgccctgagcgcatactggatcgcctcccacacgactgaggaaagaggcctcaatgtaactctcagtagcacggggagaaatgggtttaagtcacacgccctgcagctgaataaccgccaaattagggggctggaggaggagttgcagttctcactgggcagtaagatcaacgtgaaggtcggcgggaactcaaagggcacattaaaggttctgcgcacctacaacgtgctcgacatgaagaatactacctgccaggatctgcagatcgaagttacagttaaggggcatgtcgagtatactatggaagctaatgaagactacgaggattacgagtatgatgaattaccagcaaaagacgatccggatgcccccctccagcccgtcaccccattgcagctattcgagggccgcaggaacagacgtcggcgggaggcccctaaactgacctcactaagcgatcggtatgtatctcactttgagaccgaaggaccacacgtactgttatactttgactctgttcctacgagccgcgagtgtgtgggcttcgaagcagtgcaggaggttccagtagggcttgtgcaacctgcgagcgccacgctgtacgactactataatccggaaagacgctgcagcgttttttatggagcccccagcaagtcgcgcctgttagcaaccctgtgttctgcggaagtatgtcagtgtgctgagggaaaatgtcccaggcagcgacgagccctcgaaaggggactgcaggatgaggatggctatagaatgaagttcgcttgctactatccacgcgtggaatatggctttcaggtgaaggttctccgcgaggactctagagcggcctttcgcctgtttgagacgaagattacacaggttcttcatttcactaaggacgtgaaggccgcagccaaccagatgaggaatttcctcgtgcgagcctcctgccggctccgtttagaacccggcaaggaatatctcattatggggctggatggtgccacatatgatttggaggggcacccccaatatttgctcgacagcaattcttggatcgaggaaatgccaagtgaacggctttgcaggtccacaaggcaacgcgctgcctgtgcccaactgaatgatttcctccaggagtacgggactcagggatgtcaggtgtag

SEQ ID NO: 88294 - DNA, 813 bp, Artificial Sequence
  derived and/or modified sequence
atgtgccccgaggattccctgcaggtacctctgaaagacgccaagagttgcggcctgcatcagctgttgcgtggccccgaggtccagctggttgctcatagcccttggcttaaagattcccttagtaggacaacaaacatccagggaattaacctacttttctcgtcccggagaggacacctcttcctccaaacagaccagccaatttataatcctggccagagagtgcgatatcgcgttttcgcccttgaccagaagatgagaccttccacagatacaatcacagtgatggttgaaaattcccacggccttcgcgtgagaaagaaagaagtatatatgccaagttccatttttcaggatgattttgttatcccggatatttccgagcccggcacttggaagatctctgcccggttctctgatggtttagagtccaatagctctacacagttcgaagttaagaaatacgtactgcctaactttgaggtgaaaattactcctggcaagccatatatactaacggtgccagggcacctggatgagatgcagctggatatacaagcacggtatatctacggcaaacctgtgcagggtgtggcgtacgtgagatttggactgctcgatgaagatgggaaaaagacttttttccgaggcctcgagagccagacaaagctggtaaacgggcagtcacacattagtctgagcaaagccgagttccaggacgccctggaaaaactcaatatggggataacagatctgcagggcctgaggctttatgtcgcagcagcaatcattgagtctccggggggctag

SEQ ID NO: 88295 - DNA, 5097 bp, Artificial Sequence
  derived and/or modified sequence
atgcgccttttgtggggactgatttgggcatcaagcttcttcacactaagcctccagaaaccgcgcctgctcctcttttcaccaagcgtagttcacctgggggttccgctctccgtgggggtgcagcttcaggacgtccctagagggcaggtggtcaagggaagtgtctttctacgaaacccttcgcgaaataatgtaccatgctctcctaaagtggacttcaccctgagttccgaaagggacttcgctttgctctctctgcaggttccactgaaggatgccaagtcttgcgggctgcaccaacttctgagaggtcctgaagttcagttagtcgcacattcaccctggctgaaggattcgctgtcacgtaccacaaacatccagggaattaacttactcttttcttccagacgaggacaccttttcctacagaccgatcagcctatctacaaccccggtcagagagtcagataccgcgtcttcgctctcgatcagaagatgcggcctagcactgatacgataaccgtgatggtggaaaacagccatggactgagggtgcggaaaaaggaggtttatatgccatcctcaatcttccaagacgatttcgtgatacccgacatctctgagcctgggacttggaaaatctcagcccggtttagtgatggcctggagtccaacagttcaacccagtttgaggtgaagaaatacgtgctgccaaattttgaagtgaagatcacccccggtaagccctacattttgactgtacccggacatttggacgagatgcagctcgacattcaagcacgatatatttacggcaaacctgtccaaggggtggcgtatgttaggttcgggcttctcgacgaagacggcaaaaaaacattcttccggggacttgagtcccagacgaaactagttaacggccagagccacatttctctgagcaaagccgaatttcaagatgcactggaaaagcttaacatgggaataactgatctgcagggactccgcctctatgtagctgctgctatcatagagtcccccggaggtgagatggaggaggctgaactgacatcttggtacttcgttagttcccccttttctctagatctttctaagactaagagacacctggtacctggcgcgccctttctcctgcaagccctggtgagagagatgtctgggtcccccgcttctgggatacccgtcaaggtgtcagctaccgtgtccagtccgggatccgtgcccgaggtccaggatattcaacagaatactgacggcagtgggcaggtgtccattcccatcataattcctcaaaccatctctgaactgcagctttcagtctctgccgggagccctcacccggccatcgcgcgtcttactgtggctgcccccccttctggcggtccgggctttctgagcatagagcggcccgactctcggcccccccgggtcggagacactctcaatctcaatctgcgggctgtgggtagcggggcaacattttcgcactattactacatgatattaagtaggggccagattgtttttatgaatcgagaaccgaagaggacgctcaccagcgtgagtgtgttcgtcgaccatcatctcgcccccagtttttattttgtcgcattctattaccacggtgaccatccggttgcaaactctctccgcgtcgatgtgcaggccggcgcatgtgaaggcaaactggaactttccgtggatggcgccaagcagtacaggaatggcgagagcgtgaaactccacctggagaccgactcccttgctctcgtggcactaggcgctctggatactgcgctgtatgcagcaggttctaaatcgcataaacctctcaatatgggaaaagtgtttgaggctatgaatagctatgatctgggatgtggccctggaggaggtgatagcgctctccaggtgtttcaagctgccggtctggcgttctctgacggagaccagtggacgctgtcacgcaagcggctctcctgtccgaaagagaaaacgacccgcaagaaacgaaatgtcaacttccaaaaggccatcaatgaaaagctgggccagtacgcttcccccaccgcaaagcggtgctgtcaggatggggtgacccggctcccaatgatgcgctcctgtgagcagagggcagcccgggtgcagcagcctgactgccgagagcctttcctgtcttgttgccaattcgcagaaagcctgcgcaagaaatcccgagataaggggcaggctggtctgcagagagccctcgaaatcttgcaggaagaagacctgattgacgaggatgacattcctgtcagatcttttttccctgaaaattggctgtggagggtggagacagtggatcgtttccagatcttaacactgtggctgcctgacagcctgacaacttgggaaattcacggtctgagcctgagcaagactaaaggcctgtgcgttgccacgccggtgcagctaagggtgtttcgtgaatttcacctgcacctgagactgccaatgtccgtcaggaggtttgaacagctggagctgagacccgtgctgtacaactacctcgataagaacctgacagtgtccgtccatgtctcgcctgtggagggactatgcctcgccggcgggggaggtctggcccagcaggtgctggtcccagcagggtcagcgcgtcctgtggcatttagcgttgttcccaccgctgcaacagccgtatctctgaaggtcgtagctcggggaagtttcgagttcccagtgggggacgccgtttccaaggtgctgcagatcgagaaagaaggggctatccatcgcgaagaactcgtgtatgaactgaaccctctggaccaccgggggaggactcttgaaattccgggcaattctgaccccaatatgatccctgatggagatttcaactcttacgtgcgcgttaccgcctctgaccctcttgacaccctgggttccgagggagccttaagcccaggcggagttgcttctcttctgcggctgcctcgcggctgcggcgagcagacaatgatctatctggcgcccacacttgccgcatccaggtacctggataaaaccgaacaatggtccactctgcccccagagaccaaggaccacgctgtggatcttatacagaaggggtatatgagaattcaacaatttcgcaaagctgatggtagctacgccgcttggttgagcagggggagtagcacttggctgactgcatttgtgctgaaagtgctgtccctggcccaagaacaggtgggtggaagccctgagaagctgcaggagactagcaactggttgctctcccagcaacaggccgatggctcgttccaggacctgtcccccgttattcaccgtagcatgcagggagggttggtcggcaacgatgaaaccgttgccctcacagcatttgtgaccattgcgctccatcacggactggctgtgttccaagacgagggagccgaacctctcaaacaaagagttgaagcctcgatctctaaggcgtcttcgttcctgggggaaaaagccagtgccggcctgctgggagcacatgccgcagctattacggcgtatgctctaacgctcaccaaagcaccagccgatcttcgaggcgttgcacataacaacctgatggcaatggcccaagagactggcgataacttatattggggttcagtaaccggctcccaatccaatgccgtatctccaaccccagcaccacggaacccttccgacccgatgccccaggctccagcgctgtggattgaaaccaccgcctacgccctgctgcatctgctcctacacgagggcaaggccgaaatggcagatcaagcagccgcctggctgacaagacagggatcgttccagggtggcttcagatcaacccaggacactgtcatcgctcttgatgctctgagtgcttactggatcgcaagccacaccactgaggagcggggcctcaacgttactctgagttcaacaggacgcaatggcttcaagtcacacgctctacagctgaataacaggcagatccgcggtctggaggaggaactccagttcagccttggctcgaaaataaacgtaaaggtaggcggtaactctaagggaactctgaaggtgcttcgcacctacaatgtcctcgatatgaagaacactacctgtcaggatctacaaattgaggttaccgtgaaggggcatgtggaatacacaatggaggctaacgaggattacgaggactatgagtacgacgaactccctgcaaaagacgatcctgacgctccactgcaaccagtcacccctctgcagttattcgagggcaggagaaacagacggaggcgcgaagcacctaaactcacaagcctgtccgacagatacgtcagccacttcgagaccgaggggccccacgtgttgctgtattttgattccgttcctacctcgcgagaatgcgtcggatttgaggccgtccaggaggttccagtggggctggtgcagcctgcaagtgccacactctatgactactataaccctgaaaggaggtgctctgttttttacggagctccgagtaaaagtagactcctggcgaccctctgttccgcagaagtatgccagtgtgccgagggaaaatgtccaaggcaaaggcgcgctctcgagcggggacttcaggatgaggatggttacagaatgaagttcgcctgctactaccctagggtcgagtatgggttccaggtgaaggtacttcgtgaagattctagagcagcgttccgcctgtttgaaacaaaaatcacccaagttctgcacttcacaaaggacgtgaaagcagctgcaaaccagatgaggaattttctcgtgcgcgcatcctgtagactgcgactcgagcctggaaaggaatatctgattatgggactcgatggggcaacctacgacctggaaggacacccccagtacctcctggattccaattcgtggattgaagagatgccttctgagcggctttgccggagcacacgacagagagccgcgtgtgcacagctaaatgactttctgcaggaatatggaacccagggttgccaggtgtag

SEQ ID NO: 88296 - DNA, 5097 bp, Artificial Sequence
  derived and/or modified sequence
atgaggctgctgtggggcctcatctgggccagcagcttcttcaccctgagcctgcagaagccccggctgctgctcttcagccccagcgtggtgcacctgggcgtgcccctgtctgtgggcgtgcagctgcaggatgtgccccggggccaggtggtgaagggctctgtgttcctgaggaaccccagcagaaataatgtgccctgcagccccaaggtggacttcaccctgagcagcgagcgggactttgccctgctgagcctgcaggtgcccctgaaggatgccaagagctgtggcctgcaccagctgctgcggggccctgaggtgcagctggtggcccacagcccctggctgaaggacagcctgagcaggaccaccaacatccagggcatcaacctgctcttcagcagcagaagaggccacctgttcctgcagacagaccagcccatctacaaccctggccagagggtgcgctacagagtgtttgccctggaccagaagatgaggcccagcacagacaccatcaccgtgatggtggagaacagccacggcctgcgggtgaggaagaaggaggtgtacatgcccagcagcatcttccaggatgactttgtgatcccagacatcagcgagcccggcacctggaagatcagcgcccgcttcagtgatggcctggagagcaacagcagcacccagtttgaggtgaagaagtatgtgctgcccaactttgaggtgaagatcaccccaggcaagccctacatcctgactgtgcccggccacctggatgagatgcagctggacatccaggcccgctacatctacggcaagcctgtgcagggcgtggcctacgtgcgcttcggcctgctggatgaagatggcaagaagaccttcttccggggcctggagagccagaccaagctggtgaatggccagagccacatcagcctgagcaaggccgagttccaggatgccctggagaagctgaacatgggcatcacagacctgcagggcctgcggctgtatgtggccgccgccatcatcgagagccctggaggagagatggaggaggccgagctgacctcctggtactttgtgagcagccccttcagcctggacctgagcaagaccaagaggcacctggtgcctggggcccccttcctgctgcaggccctggtgcgggagatgagcggcagccctgccagcggcatccctgtgaaggtgtctgccaccgtgagcagccctggctctgtgcctgaggtgcaggacatccagcagaacacagatggcagcggccaggtgtccatccccatcatcatcccccagaccatcagcgagctgcagctgtctgtgtctgctggcagcccccacccagccatcgcccggctgactgtggccgcccctccttctgggggccctggcttcctgagcattgaaagaccagacagccggcccccccgggtgggggacaccctgaacctgaacctgcgggctgtgggcagcggggccaccttcagccactactactacatgatcctgagccggggccagatcgtgttcatgaaccgggagcccaagaggaccctgacctctgtgtctgtgtttgtggaccaccacctggcccccagcttctactttgtggccttctactaccatggagaccaccctgtggccaacagcctgcgggtggatgtgcaggccggggcctgtgagggcaagctggagctgtctgtggatggagccaagcagtacagaaatggagagagcgtgaagctgcacctggagacagacagcctggccctggtggccctgggcgccctggacacagccctgtatgctgctggcagcaagagccacaagcccctgaacatgggcaaggtgtttgaggccatgaacagctatgacctgggctgcggccctgggggcggggacagcgccctgcaggtgttccaggccgccggcctggccttcagtgatggagaccagtggaccctgagcaggaagaggctgagctgccccaaggagaagaccaccaggaagaagagaaatgtgaacttccagaaggccatcaatgagaagctgggccagtatgccagccccacagccaagcgctgctgccaggatggagtgacccggctgcccatgatgaggagctgtgagcagagagctgcccgggtgcagcagcctgactgccgggagcccttcctgagctgctgccagtttgctgagagcctgaggaagaagagccgggacaagggccaggccggcctgcagagggccctggagatcctgcaggaggaggacctgattgatgaagatgacatccctgtgcgctccttcttccctgagaactggctgtggagggtggagaccgtggaccgcttccagatcctgaccctgtggctgcctgacagcctgaccacctgggagatccacggcctgagcctgagcaagaccaagggcctgtgtgtggccacccctgtgcagctgcgggtcttccgggagttccacctgcacctgcggctgcccatgtctgtgagaagatttgagcagctggagctgcggcctgtgctgtacaactacctggacaagaacctgactgtgtctgtgcacgtgtcccctgtggagggcctgtgcctggccggcggcggcggcctggcccagcaggtgctggtgcctgctggcagcgcccggcctgtggccttctctgtggtgcccacagctgctgctgctgtgtccctgaaggtggtggcccggggcagctttgagttccctgtgggagatgctgtgtccaaggtgctgcagatcgagaaggagggcgccatccaccgggaggagctggtgtatgagctgaaccccctggaccaccggggccgcaccctggagatccctggcaacagcgaccccaacatgatcccagatggagacttcaacagctatgtgcgggtgacagccagtgaccccctggacaccctgggcagcgagggcgccctgagccctggaggagtggccagcctgctgcggctgccccggggctgtggggagcagaccatgatctacctggcccccaccctggccgccagccgctacctggacaagacagagcagtggagcaccctgcccccagagaccaaggaccatgctgtggacctgatccagaagggctacatgaggatccagcagttcaggaaggcagatggcagctatgctgcctggctgagccgggacagcagcacctggctgacagcctttgtgctgaaggtgctgagcctggcccaggagcaggtgggcggcagccctgagaagctgcaggagaccagcaactggctgctgagccagcagcaggctgatggcagcttccaggacccctgccctgtgctggaccgctccatgcagggcggcctggtgggcaatgatgagaccgtggccctgacagcctttgtgaccatcgccctgcaccacggcctggccgtgttccaggatgagggcgctgagcccctgaagcagagggtggaggccagcatcagcaaggccaacagcttcctgggggagaaggccagcgctggcctgctgggcgcccacgccgccgccatcacagcctatgccctgaccctgaccaaggcccctgtggacctgctgggcgtggcccacaacaacctgatggccatggcccaggagaccggggacaacctgtactggggctctgtgacaggcagccagagcaatgctgtgagccccaccccagcccccaggaaccccagcgaccccatgccccaggccccagccctgtggattgagaccacagcctatgccctgctgcacctgctgctgcacgagggcaaggccgagatggctgaccaggccagcgcctggctgacccggcagggcagcttccagggcggcttccgcagcacccaggacacagtgattgccctggatgccctgagcgcctactggatcgccagccacaccacagaggagcggggcctgaatgtgaccctgagcagcactggaagaaatggcttcaagagccacgccctgcagctgaacaaccggcagatccggggcctggaggaggagctgcagttcagcctgggcagcaagatcaacgtgaaggtgggcggcaacagcaagggcaccctgaaggtgctgcggacctacaacgtgctggacatgaagaacaccacctgccaggacctgcagatcgaggtgacagtgaagggccacgtggagtacaccatggaggccaatgaagattatgaggactatgaatatgatgagctgcctgccaaggatgatcctgatgcccccctgcagcctgtgacccccctgcagctgtttgagggcagaagaaacagaagaagaagagaggcccccaagctgaccagcctgagtgacagatatgtgagccactttgaaacagagggcccccacgtgctgctgtactttgacagcgtgcccaccagccgggagtgtgtgggctttgaggccgtgcaggaggtgcctgtgggcctggtgcagcctgccagcgccaccctgtatgactactacaaccctgagcggcgctgcagcgtcttctacggggcccccagcaagagccggctgctggccaccctgtgcagcgctgaggtgtgccagtgtgccgagggcaagtgcccccggcagaggcgggccctggagcggggcctgcaggatgaagatggctacaggatgaagtttgcctgctactacccccgggtggagtatggcttccaggtgaaggtgctgcgggaggacagccgggccgccttccggctgtttgagaccaagatcacccaggtgctgcacttcaccaaggatgtgaaggccgccgccaaccagatgaggaacttcctggtgcgggccagctgccgcctgcggctggagcccgggaaggagtacctgatcatgggcctggatggagccacctatgacctggagggccacccccagtacctgctggacagcaacagctggattgaggagatgcccagcgagcggctgtgccgcagcacccggcagagagctgcctgtgcccagctgaatgacttcctgcaggagtatggcacccagggctgccaggtgtag

SEQ ID NO: 88297 - DNA, 813 bp, Artificial Sequence
  derived and/or modified sequence
atgtgcccagaggacagcctgcaggtgcccctgaaggatgccaagagctgtggcctgcaccagctgctgcggggccctgaggtgcagctggtggcccacagcccctggctgaaggacagcctgagcaggaccaccaacatccagggcatcaacctgctcttcagcagcagaagaggccacctgttcctgcagacagaccagcccatctacaaccctggccagagggtgcgctacagagtgtttgccctggaccagaagatgaggcccagcacagacaccatcaccgtgatggtggagaacagccacggcctgcgggtgaggaagaaggaggtgtacatgcccagcagcatcttccaggatgactttgtgatcccagacatcagcgagcccggcacctggaagatcagcgcccgcttcagtgatggcctggagagcaacagcagcacccagtttgaggtgaagaagtatgtgctgcccaactttgaggtgaagatcaccccaggcaagccctacatcctgactgtgcccggccacctggatgagatgcagctggacatccaggcccgctacatctacggcaagcctgtgcagggcgtggcctacgtgcgcttcggcctgctggatgaagatggcaagaagaccttcttccggggcctggagagccagaccaagctggtgaatggccagagccacatcagcctgagcaaggccgagttccaggatgccctggagaagctgaacatgggcatcacagacctgcagggcctgcggctgtatgtggccgccgccatcatcgagagccctgggggctag

SEQ ID NO: 88298 - DNA, 5097 bp, Artificial Sequence
  derived and/or modified sequence
atgaggctgctgtggggcctcatctgggccagcagcttcttcaccctgagcctgcagaagccccggctgctgctcttcagccccagcgtggtgcacctgggcgtgcccctgtctgtgggcgtgcagctgcaggatgtgccccggggccaggtggtgaagggctctgtgttcctgaggaaccccagcagaaataatgtgccctgcagccccaaggtggacttcaccctgagcagcgagcgggactttgccctgctgagcctgcaggtgcccctgaaggatgccaagagctgtggcctgcaccagctgctgcggggccctgaggtgcagctggtggcccacagcccctggctgaaggacagcctgagcaggaccaccaacatccagggcatcaacctgctcttcagcagcagaagaggccacctgttcctgcagacagaccagcccatctacaaccctggccagagggtgcgctacagagtgtttgccctggaccagaagatgaggcccagcacagacaccatcaccgtgatggtggagaacagccacggcctgcgggtgaggaagaaggaggtgtacatgcccagcagcatcttccaggatgactttgtgatcccagacatcagcgagcccggcacctggaagatcagcgcccgcttcagtgatggcctggagagcaacagcagcacccagtttgaggtgaagaagtatgtgctgcccaactttgaggtgaagatcaccccaggcaagccctacatcctgactgtgcccggccacctggatgagatgcagctggacatccaggcccgctacatctacggcaagcctgtgcagggcgtggcctacgtgcgcttcggcctgctggatgaagatggcaagaagaccttcttccggggcctggagagccagaccaagctggtgaatggccagagccacatcagcctgagcaaggccgagttccaggatgccctggagaagctgaacatgggcatcacagacctgcagggcctgcggctgtatgtggccgccgccatcatcgagtacccaggaggagagatggaggaggccgagctgacctcctggtactttgtgagcagccccttcagcctggacctgagcaagaccaagaggcacctggtgcctggggcccccttcctgctgcaggccctggtgcgggagatgagcggcagccctgccagcggcatccctgtgaaggtgtctgccaccgtgagcagccctggctctgtgcctgaggtgcaggacatccagcagaacacagatggcagcggccaggtgtccatccccatcatcatcccccagaccatcagcgagctgcagctgtctgtgtctgctggcagcccccacccagccatcgcccggctgactgtggccgcccctccttctgggggccctggcttcctgagcattgagtggccagacagccggcccccccgggtgggggacaccctgaacctgaacctgcgggctgtgggcagcggggccaccttcagccactactactacatgatcctgagccggggccagatcgtgttcatgaaccgggagcccaagaggaccctgacctctgtgtctgtgtttgtggaccaccacctggcccccagcttctactttgtggccttctactaccatggagaccaccctgtggccaacagcctgcgggtggatgtgcaggccggggcctgtgagggcaagctggagctgtctgtggatggagccaagcagtacagaaatggagagagcgtgaagctgcacctggagacagacagcctggccctggtggccctgggcgccctggacacagccctgtatgctgctggcagcaagagccacaagcccctgaacatgggcaaggtgtttgaggccatgaacagctatgacctgggctgcggccctgggggcggggacagcgccctgcaggtgttccaggccgccggcctggccttcagtgatggagaccagtggaccctgagcaggaagaggctgagctgccccaaggagaagaccaccaggaagaagagaaatgtgaacttccagaaggccatcaatgagaagctgggccagtatgccagccccacagccaagcgctgctgccaggatggagtgacccggctgcccatgatgaggagctgtgagcagagagctgcccgggtgcagcagcctgactgccgggagcccttcctgagctgctgccagtttgctgagagcctgaggaagaagagccgggacaagggccaggccggcctgcagagggccctggagatcctgcaggaggaggacctgattgatgaagatgacatccctgtgcgctccttcttccctgagaactggctgtggagggtggagaccgtggaccgcttccagatcctgaccctgtggctgcctgacagcctgaccacctgggagatccacggcctgagcctgagcaagaccaagggcctgtgtgtggccacccctgtgcagctgcgggtcttccgggagttccacctgcacctgcggctgcccatgtctgtgagaagatttgagcagctggagctgcggcctgtgctgtacaactacctggacaagaacctgactgtgtctgtgcacgtgtcccctgtggagggcctgtgcctggccggcggcggcggcctggcccagcaggtgctggtgcctgctggcagcgcccggcctgtggccttctctgtggtgcccacagctgctgctgctgtgtccctgaaggtggtggcccggggcagctttgagttccctgtgggagatgctgtgtccaaggtgctgcagatcgagaaggagggcgccatccaccgggaggagctggtgtatgagctgaaccccctggaccaccggggccgcaccctggagatccctggcaacagcgaccccaacatgatcccagatggagacttcaacagctatgtgcgggtgacagccagtgaccccctggacaccctgggcagcgagggcgccctgagccctggaggagtggccagcctgctgcggctgccccggggctgtggggagcagaccatgatctacctggcccccaccctggccgccagccgctacctggacaagacagagcagtggagcaccctgcccccagagaccaaggaccatgctgtggacctgatccagaagggctacatgaggatccagcagttcaggaaggcagatggcagctatgctgcctggctgagccgggacagcagcacctggctgacagcctttgtgctgaaggtgctgagcctggcccaggagcaggtgggcggcagccctgagaagctgcaggagaccagcaactggctgctgagccagcagcaggctgatggcagcttccaggacccctgccctgtgctggaccgctccatgcagggcggcctggtgggcaatgatgagaccgtggccctgacagcctttgtgaccatcgccctgcaccacggcctggccgtgttccaggatgagggcgctgagcccctgaagcagagggtggaggccagcatcagcaaggccaacagcttcctgggggagaaggccagcgctggcctgctgggcgcccacgccgccgccatcacagcctatgccctgaccctgaccaaggcccctgtggacctgctgggcgtggcccacaacaacctgatggccatggcccaggagaccggggacaacctgtactggggctctgtgacaggcagccagagcaatgctgtgagccccaccccagcccccaggaaccccagcgaccccatgccccaggccccagccctgtggattgagaccacagcctatgccctgctgcacctgctgctgcacgagggcaaggccgagatggctgaccaggccgccgcctggctgacccggcagggcagcttccagggcggcttccgcagcacccaggacacagtgattgccctggatgccctgagcgcctactggatcgccagccacaccacagaggagcggggcctgaatgtgaccctgagcagcactggaagaaatggcttcaagagccacgccctgcagctgaacaaccggcagatccggggcctggaggaggagctgcagttcagcctgggcagcaagatcaacgtgaaggtgggcggcaacagcaagggcaccctgaaggtgctgcggacctacaacgtgctggacatgaagaacaccacctgccaggacctgcagatcgaggtgacagtgaagggccacgtggagtacaccatggaggccaatgaagattatgaggactatgaatatgatgagctgcctgccaaggatgatcctgatgcccccctgcagcctgtgacccccctgcagctgtttgagggcagaagaaacagaagaagaagagaggcccccaagctgaccagcctgagtgacagatatgtgagccactttgaaacagagggcccccacgtgctgctgtactttgacagcgtgcccaccagccgggagtgtgtgggctttgaggccgtgcaggaggtgcctgtgggcctggtgcagcctgccagcgccaccctgtatgactactacaaccctgagcggcgctgcagcgtcttctacggggcccccagcaagagccggctgctggccaccctgtgcagcgctgaggtgtgccagtgtgccgagggcaagtgcccccggcagaggcgggccctggagcggggcctgcaggatgaagatggctacaggatgaagtttgcctgctactacccccgggtggagtatggcttccaggtgaaggtgctgcgggaggacagccgggccgccttccggctgtttgagaccaagatcacccaggtgctgcacttcaccaaggatgtgaaggccgccgccaaccagatgaggaacttcctggtgcgggccagctgccgcctgcggctggagcccgggaaggagtacctgatcatgggcctggatggagccacctatgacctggagggccacccccagtacctgctggacagcaacagctggattgaggagatgcccagcgagcggctgtgccgcagcacccggcagagagctgcctgtgcccagctgaatgacttcctgcaggagtatggcacccagggctgccaggtgtag

SEQ ID NO: 88299 - DNA, 5097 bp, Artificial Sequence
  derived and/or modified sequence
atgaggctgctgtggggcctcatctgggccagcagcttcttcaccctgagcctgcagaagccccggctgctgctcttcagccccagcgtggtgcacctgggcgtgcccctgtctgtgggcgtgcagctgcaggatgtgccccggggccaggtggtgaagggctctgtgttcctgaggaaccccagcagaaataatgtgccctgcagccccaaggtggacttcaccctgagcagcgagcgggactttgccctgctgagcctgcaggtgcccctgaaggatgccaagagctgtggcctgcaccagctgctgcggggccctgaggtgcagctggtggcccacagcccctggctgaaggacagcctgagcaggaccaccaacatccagggcatcaacctgctcttcagcagcagaagaggccacctgttcctgcagacagaccagcccatctacaaccctggccagagggtgcgctacagagtgtttgccctggaccagaagatgaggcccagcacagacaccatcaccgtgatggtggagaacagccacggcctgcgggtgaggaagaaggaggtgtacatgcccagcagcatcttccaggatgactttgtgatcccagacatcagcgagcccggcacctggaagatcagcgcccgcttcagtgatggcctggagagcaacagcagcacccagtttgaggtgaagaagtatgtgctgcccaactttgaggtgaagatcaccccaggcaagccctacatcctgactgtgcccggccacctggatgagatgcagctggacatccaggcccgctacatctacggcaagcctgtgcagggcgtggcctacgtgcgcttcggcctgctggatgaagatggcaagaagaccttcttccggggcctggagagccagaccaagctggtgaatggccagagccacatcagcctgagcaaggccgagttccaggatgccctggagaagctgaacatgggcatcacagacctgcagggcctgcggctgtatgtggccgccgccatcatcgagagccctggaggagagatggaggaggccgagctgacctcctggtactttgtgagcagccccttcagcctggacctgagcaagaccaagaggcacctggtgcctggggcccccttcctgctgcaggccctggtgcgggagatgagcggcagccctgccagcggcatccctgtgaaggtgtctgccaccgtgagcagccctggctctgtgcctgaggtgcaggacatccagcagaacacagatggcagcggccaggtgtccatccccatcatcatcccccagaccatcagcgagctgcagctgtctgtgtctgctggcagcccccacccagccatcgcccggctgactgtggccgcccctccttctgggggccctggcttcctgagcattgaaagaccagacagccggcccccccgggtgggggacaccctgaacctgaacctgcgggctgtgggcagcggggccaccttcagccactactactacatgatcctgagccggggccagatcgtgttcatgaaccgggagcccaagaggaccctgacctctgtgtctgtgtttgtggaccaccacctggcccccagcttctactttgtggccttctactaccatggagaccaccctgtggccaacagcctgcgggtggatgtgcaggccggggcctgtgagggcaagctggagctgtctgtggatggagccaagcagtacagaaatggagagagcgtgaagctgcacctggagacagacagcctggccctggtggccctgggcgccctggacacagccctgtatgctgctggcagcaagagccacaagcccctgaacatgggcaaggtgtttgaggccatgaacagctatgacctgggctgcggccctgggggcggggacagcgccctgcaggtgttccaggccgccggcctggccttcagtgatggagaccagtggaccctgagcaggaagaggctgagctgccccaaggagaagaccaccaggaagaagagaaatgtgaacttccagaaggccatcaatgagaagctgggccagtatgccagccccacagccaagcgctgctgccaggatggagtgacccggctgcccatgatgaggagctgtgagcagagagctgcccgggtgcagcagcctgactgccgggagcccttcctgagctgctgccagtttgctgagagcctgaggaagaagagccgggacaagggccaggccggcctgcagagggccctggagatcctgcaggaggaggacctgattgatgaagatgacatccctgtgcgctccttcttccctgagaactggctgtggagggtggagaccgtggaccgcttccagatcctgaccctgtggctgcctgacagcctgaccacctgggagatccacggcctgagcctgagcaagaccaagggcctgtgtgtggccacccctgtgcagctgcgggtcttccgggagttccacctgcacctgcggctgcccatgtctgtgagaagatttgagcagctggagctgcggcctgtgctgtacaactacctggacaagaacctgactgtgtctgtgcacgtgtcccctgtggagggcctgtgcctggccggcggcggcggcctggcccagcaggtgctggtgcctgctggcagcgcccggcctgtggccttctctgtggtgcccacagctgctgctgctgtgtccctgaaggtggtggcccggggcagctttgagttccctgtgggagatgctgtgtccaaggtgctgcagatcgagaaggagggcgccatccaccgggaggagctggtgtatgagctgaaccccctggaccaccggggccgcaccctggagatccctggcaacagcgaccccaacatgatcccagatggagacttcaacagctatgtgcgggtgacagccagtgaccccctggacaccctgggcagcgagggcgccctgagccctggaggagtggccagcctgctgcggctgccccggggctgtggggagcagaccatgatctacctggcccccaccctggccgccagccgctacctggacaagacagagcagtggagcaccctgcccccagagaccaaggaccatgctgtggacctgatccagaagggctacatgaggatccagcagttcaggaaggcagatggcagctatgctgcctggctgagccgggacagcagcacctggctgacagcctttgtgctgaaggtgctgagcctggcccaggagcaggtgggcggcagccctgagaagctgcaggagaccagcaactggctgctgagccagcagcaggctgatggcagcttccaggacccctgccctgtgctggaccgctccatgcagggcggcctggtgggcaatgatgagaccgtggccctgacagcctttgtgaccatcgccctgcaccacggcctggccgtgttccaggatgagggcgctgagcccctgaagcagagggtggaggccagcatcagcaaggccagcagcttcctgggggagaaggccagcgctggcctgctgggcgcccacgccgccgccatcacagcctatgccctgaccctgaccaaggcccctgtggacctgctgggcgtggcccacaacaacctgatggccatggcccaggagaccggggacaacctgtactggggctctgtgacaggcagccagagcaatgctgtgagccccaccccagcccccaggaaccccagcgaccccatgccccaggccccagccctgtggattgagaccacagcctatgccctgctgcacctgctgctgcacgagggcaaggccgagatggctgaccaggccgccgcctggctgacccggcagggcagcttccagggcggcttccgcagcacccaggacacagtgattgccctggatgccctgagcgcctactggatcgccagccacaccacagaggagcggggcctgaatgtgaccctgagcagcactggaagaaatggcttcaagagccacgccctgcagctgaacaaccggcagatccggggcctggaggaggagctgcagttcagcctgggcagcaagatcaacgtgaaggtgggcggcaacagcaagggcaccctgaaggtgctgcggacctacaacgtgctggacatgaagaacaccacctgccaggacctgcagatcgaggtgacagtgaagggccacgtggagtacaccatggaggccaatgaagattatgaggactatgaatatgatgagctgcctgccaaggatgatcctgatgcccccctgcagcctgtgacccccctgcagctgtttgagggcagaagaaacagaagaagaagagaggcccccaagctgaccagcctgagtgacagatatgtgagccactttgaaacagagggcccccacgtgctgctgtactttgacagcgtgcccaccagccgggagtgtgtgggctttgaggccgtgcaggaggtgcctgtgggcctggtgcagcctgccagcgccaccctgtatgactactacaaccctgagcggcgctgcagcgtcttctacggggcccccagcaagagccggctgctggccaccctgtgcagcgctgaggtgtgccagtgtgccgagggcaagtgcccccggcagaggcgggccctggagcggggcctgcaggatgaagatggctacaggatgaagtttgcctgctactacccccgggtggagtatggcttccaggtgaaggtgctgcgggaggacagccgggccgccttccggctgtttgagaccaagatcacccaggtgctgcacttcaccaaggatgtgaaggccgccgccaaccagatgaggaacttcctggtgcgggccagctgccgcctgcggctggagcccgggaaggagtacctgatcatgggcctggatggagccacctatgacctggagggccacccccagtacctgctggacagcaacagctggattgaggagatgcccagcgagcggctgtgccgcagcacccggcagagagctgcctgtgcccagctgaatgacttcctgcaggagtatggcacccagggctgccaggtgtag

SEQ ID NO: 88300 - DNA, 5097 bp, Artificial Sequence
  derived and/or modified sequence
atgaggctgctgtggggcctcatctgggccagcagcttcttcaccctgagcctgcagaagccccggctgctgctcttcagccccagcgtggtgcacctgggcgtgcccctgtctgtgggcgtgcagctgcaggatgtgccccggggccaggtggtgaagggctctgtgttcctgaggaaccccagcagaaataatgtgccctgcagccccaaggtggacttcaccctgagcagcgagcgggactttgccctgctgagcctgcaggtgcccctgaaggatgccaagagctgtggcctgcaccagctgctgcggggccctgaggtgcagctggtggcccacagcccctggctgaaggacagcctgagcaggaccaccaacatccagggcatcaacctgctcttcagcagcagaagaggccacctgttcctgcagacagaccagcccatctacaaccctggccagagggtgcgctacagagtgtttgccctggaccagaagatgaggcccagcacagacaccatcaccgtgatggtggagaacagccacggcctgcgggtgaggaagaaggaggtgtacatgcccagcagcatcttccaggatgactttgtgatcccagacatcagcgagcccggcacctggaagatcagcgcccgcttcagtgatggcctggagagcaacagcagcacccagtttgaggtgaagaagtatgtgctgcccaactttgaggtgaagatcaccccaggcaagccctacatcctgactgtgcccggccacctggatgagatgcagctggacatccaggcccgctacatctacggcaagcctgtgcagggcgtggcctacgtgcgcttcggcctgctggatgaagatggcaagaagaccttcttccggggcctggagagccagaccaagctggtgaatggccagagccacatcagcctgagcaaggccgagttccaggatgccctggagaagctgaacatgggcatcacagacctgcagggcctgcggctgtatgtggccgccgccatcatcgagtacccaggaggagagatggaggaggccgagctgacctcctggtactttgtgagcagccccttcagcctggacctgagcaagaccaagaggcacctggtgcctggggcccccttcctgctgcaggccctggtgcgggagatgagcggcagccctgccagcggcatccctgtgaaggtgtctgccaccgtgagcagccctggctctgtgcctgaggtgcaggacatccagcagaacacagatggcagcggccaggtgtccatccccatcatcatcccccagaccatcagcgagctgcagctgtctgtgtctgctggcagcccccacccagccatcgcccggctgactgtggccgcccctccttctgggggccctggcttcctgagcattgaaagaccagacagccggcccccccgggtgggggacaccctgaacctgaacctgcgggctgtgggcagcggggccaccttcagccactactactacatgatcctgagccggggccagatcgtgttcatgaaccgggagcccaagaggaccctgacctctgtgtctgtgtttgtggaccaccacctggcccccagcttctactttgtggccttctactaccatggagaccaccctgtggccaacagcctgcgggtggatgtgcaggccggggcctgtgagggcaagctggagctgtctgtggatggagccaagcagtacagaaatggagagagcgtgaagctgcacctggagacagacagcctggccctggtggccctgggcgccctggacacagccctgtatgctgctggcagcaagagccacaagcccctgaacatgggcaaggtgtttgaggccatgaacagctatgacctgggctgcggccctgggggcggggacagcgccctgcaggtgttccaggccgccggcctggccttcagtgatggagaccagtggaccctgagcaggaagaggctgagctgccccaaggagaagaccaccaggaagaagagaaatgtgaacttccagaaggccatcaatgagaagctgggccagtatgccagccccacagccaagcgctgctgccaggatggagtgacccggctgcccatgatgaggagctgtgagcagagagctgcccgggtgcagcagcctgactgccgggagcccttcctgagctgctgccagtttgctgagagcctgaggaagaagagccgggacaagggccaggccggcctgcagagggccctggagatcctgcaggaggaggacctgattgatgaagatgacatccctgtgcgctccttcttccctgagaactggctgtggagggtggagaccgtggaccgcttccagatcctgaccctgtggctgcctgacagcctgaccacctgggagatccacggcctgagcctgagcaagaccaagggcctgtgtgtggccacccctgtgcagctgcgggtcttccgggagttccacctgcacctgcggctgcccatgtctgtgagaagatttgagcagctggagctgcggcctgtgctgtacaactacctggacaagaacctgactgtgtctgtgcacgtgtcccctgtggagggcctgtgcctggccggcggcggcggcctggcccagcaggtgctggtgcctgctggcagcgcccggcctgtggccttctctgtggtgcccacagctgctgctgctgtgtccctgaaggtggtggcccggggcagctttgagttccctgtgggagatgctgtgtccaaggtgctgcagatcgagaaggagggcgccatccaccgggaggagctggtgtatgagctgaaccccctggaccaccggggccgcaccctggagatccctggcaacagcgaccccaacatgatcccagatggagacttcaacagctatgtgcgggtgacagccagtgaccccctggacaccctgggcagcgagggcgccctgagccctggaggagtggccagcctgctgcggctgccccggggctgtggggagcagaccatgatctacctggcccccaccctggccgccagccgctacctggacaagacagagcagtggagcaccctgcccccagagaccaaggaccatgctgtggacctgatccagaagggctacatgaggatccagcagttcaggaaggcagatggcagctatgctgcctggctgagccgggacagcagcacctggctgacagcctttgtgctgaaggtgctgagcctggcccaggagcaggtgggcggcagccctgagaagctgcaggagaccagcaactggctgctgagccagcagcaggctgatggcagcttccaggacccctgccctgtgctggaccgctccatgcagggcggcctggtgggcaatgatgagaccgtggccctgacagcctttgtgaccatcgccctgcaccacggcctggccgtgttccaggatgagggcgctgagcccctgaagcagagggtggaggccagcatcagcaaggccaacagcttcctgggggagaaggccagcgctggcctgctgggcgcccacgccgccgccatcacagcctatgccctgaccctgaccaaggcccctgtggacctgctgggcgtggcccacaacaacctgatggccatggcccaggagaccggggacaacctgtactggggctctgtgacaggcagccagagcaatgctgtgagccccaccccagcccccaggaaccccagcgaccccatgccccaggccccagccctgtggattgagaccacagcctatgccctgctgcacctgctgctgcacgagggcaaggccgagatggctgaccaggccgccgcctggctgacccggcagggcagcttccagggcggcttccgcagcacccaggacacagtgattgccctggatgccctgagcgcctactggatcgccagccacaccacagaggagcggggcctgaatgtgaccctgagcagcactggaagaaatggcttcaagagccacgccctgcagctgaacaaccggcagatccggggcctggaggaggagctgcagttcagcctgggcagcaagatcaacgtgaaggtgggcggcaacagcaagggcaccctgaaggtgctgcggacctacaacgtgctggacatgaagaacaccacctgccaggacctgcagatcgaggtgacagtgaagggccacgtggagtacaccatggaggccaatgaagattatgaggactatgaatatgatgagctgcctgccaaggatgatcctgatgcccccctgcagcctgtgacccccctgcagctgtttgagggcagaagaaacagaagaagaagagaggcccccaagctgaccagcctgagtgacagatatgtgagccactttgaaacagagggcccccacgtgctgctgtactttgacagcgtgcccaccagccgggagtgtgtgggctttgaggccgtgcaggaggtgcctgtgggcctggtgcagcctgccagcgccaccctgtatgactactacaaccctgagcggcgctgcagcgtcttctacggggcccccagcaagagccggctgctggccaccctgtgcagcgctgaggtgtgccagtgtgccgagggcaagtgcccccggcagaggcgggccctggagcggggcctgcaggatgaagatggctacaggatgaagtttgcctgctactacccccgggtggagtatggcttccaggtgaaggtgctgcgggaggacagccgggccgccttccggctgtttgagaccaagatcacccaggtgctgcacttcaccaaggatgtgaaggccgccgccaaccagatgaggaacttcctggtgcgggccagctgccgcctgcggctggagcccgggaaggagtacctgatcatgggcctggatggagccacctatgacctggagggccacccccagtacctgctggacagcaacagctggattgaggagatgcccagcgagcggctgtgccgcagcacccggcagagagctgcctgtgcccagctgaatgacttcctgcaggagtatggcacccagggctgccaggtgtag

SEQ ID NO: 88301 - DNA, 5097 bp, Artificial Sequence
  derived and/or modified sequence
atgaggctgctgtggggcctcatctgggccagcagcttcttcaccctgagcctgcagaagccccggctgctgctcttcagccccagcgtggtgcacctgggcgtgcccctgtctgtgggcgtgcagctgcaggatgtgccccggggccaggtggtgaagggctctgtgttcctgaggaaccccagcagaaataatgtgccctgcagccccaaggtggacttcaccctgagcagcgagcgggactttgccctgctgagcctgcaggtgcccctgaaggatgccaagagctgtggcctgcaccagctgctgcggggccctgaggtgcagctggtggcccacagcccctggctgaaggacagcctgagcaggaccaccaacatccagggcatcaacctgctcttcagcagcagaagaggccacctgttcctgcagacagaccagcccatctacaaccctggccagagggtgcgctacagagtgtttgccctggaccagaagatgaggcccagcacagacaccatcaccgtgatggtggagaacagccacggcctgcgggtgaggaagaaggaggtgtacatgcccagcagcatcttccaggatgactttgtgatcccagacatcagcgagcccggcacctggaagatcagcgcccgcttcagtgatggcctggagagcaacagcagcacccagtttgaggtgaagaagtatgtgctgcccaactttgaggtgaagatcaccccaggcaagccctacatcctgactgtgcccggccacctggatgagatgcagctggacatccaggcccgctacatctacggcaagcctgtgcagggcgtggcctacgtgcgcttcggcctgctggatgaagatggcaagaagaccttcttccggggcctggagagccagaccaagctggtgaatggccagagccacatcagcctgagcaaggccgagttccaggatgccctggagaagctgaacatgggcatcacagacctgcagggcctgcggctgtatgtggccgccgccatcatcgagagccctggaggagagatggaggaggccgagctgacctcctggtactttgtgagcagccccttcagcctggacctgagcaagaccaagaggcacctggtgcctggggcccccttcctgctgcaggccctggtgcgggagatgagcggcagccctgccagcggcatccctgtgaaggtgtctgccaccgtgagcagccctggctctgtgcctgaggtgcaggacatccagcagaacacagatggcagcggccaggtgtccatccccatcatcatcccccagaccatcagcgagctgcagctgtctgtgtctgctggcagcccccacccagccatcgcccggctgactgtggccgcccctccttctgggggccctggcttcctgagcattgaaagaccagacagccggcccccccgggtgggggacaccctgaacctgaacctgcgggctgtgggcagcggggccaccttcagccactactactacatgatcctgagccggggccagatcgtgttcatgaaccgggagcccaagaggaccctgacctctgtgtctgtgtttgtggaccaccacctggcccccagcttctactttgtggccttctactaccatggagaccaccctgtggccaacagcctgcgggtggatgtgcaggccggggcctgtgagggcaagctggagctgtctgtggatggagccaagcagtacagaaatggagagagcgtgaagctgcacctggagacagacagcctggccctggtggccctgggcgccctggacacagccctgtatgctgctggcagcaagagccacaagcccctgaacatgggcaaggtgtttgaggccatgaacagctatgacctgggctgcggccctgggggcggggacagcgccctgcaggtgttccaggccgccggcctggccttcagtgatggagaccagtggaccctgagcaggaagaggctgagctgccccaaggagaagaccaccaggaagaagagaaatgtgaacttccagaaggccatcaatgagaagctgggccagtatgccagccccacagccaagcgctgctgccaggatggagtgacccggctgcccatgatgaggagctgtgagcagagagctgcccgggtgcagcagcctgactgccgggagcccttcctgagctgctgccagtttgctgagagcctgaggaagaagagccgggacaagggccaggccggcctgcagagggccctggagatcctgcaggaggaggacctgattgatgaagatgacatccctgtgcgctccttcttccctgagaactggctgtggagggtggagaccgtggaccgcttccagatcctgaccctgtggctgcctgacagcctgaccacctgggagatccacggcctgagcctgagcaagaccaagggcctgtgtgtggccacccctgtgcagctgcgggtcttccgggagttccacctgcacctgcggctgcccatgtctgtgagaagatttgagcagctggagctgcggcctgtgctgtacaactacctggacaagaacctgactgtgtctgtgcacgtgtcccctgtggagggcctgtgcctggccggcggcggcggcctggcccagcaggtgctggtgcctgctggcagcgcccggcctgtggccttctctgtggtgcccacagctgccacagctgtgtccctgaaggtggtggcccggggcagctttgagttccctgtgggagatgctgtgtccaaggtgctgcagatcgagaaggagggcgccatccaccgggaggagctggtgtatgagctgaaccccctggaccaccggggccgcaccctggagatccctggcaacagcgaccccaacatgatcccagatggagacttcaacagctatgtgcgggtgacagccagtgaccccctggacaccctgggcagcgagggcgccctgagccctggaggagtggccagcctgctgcggctgccccggggctgtggggagcagaccatgatctacctggcccccaccctggccgccagccgctacctggacaagacagagcagtggagcaccctgcccccagagaccaaggaccatgctgtggacctgatccagaagggctacatgaggatccagcagttcaggaaggcagatggcagctatgctgcctggctgagccggggcagcagcacctggctgacagcctttgtgctgaaggtgctgagcctggcccaggagcaggtgggcggcagccctgagaagctgcaggagaccagcaactggctgctgagccagcagcaggctgatggcagcttccaggacctgagccctgtgatccaccgctccatgcagggcggcctggtgggcaatgatgagaccgtggccctgacagcctttgtgaccatcgccctgcaccacggcctggccgtgttccaggatgagggcgctgagcccctgaagcagagggtggaggccagcatcagcaaggccagcagcttcctgggggagaaggccagcgctggcctgctgggcgcccacgccgccgccatcacagcctatgccctgaccctgaccaaggccccagctgacctgcggggcgtggcccacaacaacctgatggccatggcccaggagaccggggacaacctgtactggggctctgtgacaggcagccagagcaatgctgtgagccccaccccagcccccaggaaccccagcgaccccatgccccaggccccagccctgtggattgagaccacagcctatgccctgctgcacctgctgctgcacgagggcaaggccgagatggctgaccaggccgccgcctggctgacccggcagggcagcttccagggcggcttccgcagcacccaggacacagtgattgccctggatgccctgagcgcctactggatcgccagccacaccacagaggagcggggcctgaatgtgaccctgagcagcactggaagaaatggcttcaagagccacgccctgcagctgaacaaccggcagatccggggcctggaggaggagctgcagttcagcctgggcagcaagatcaacgtgaaggtgggcggcaacagcaagggcaccctgaaggtgctgcggacctacaacgtgctggacatgaagaacaccacctgccaggacctgcagatcgaggtgacagtgaagggccacgtggagtacaccatggaggccaatgaagattatgaggactatgaatatgatgagctgcctgccaaggatgatcctgatgcccccctgcagcctgtgacccccctgcagctgtttgagggcagaagaaacagaagaagaagagaggcccccaagctgaccagcctgagtgacagatatgtgagccactttgaaacagagggcccccacgtgctgctgtactttgacagcgtgcccaccagccgggagtgtgtgggctttgaggccgtgcaggaggtgcctgtgggcctggtgcagcctgccagcgccaccctgtatgactactacaaccctgagcggcgctgcagcgtcttctacggggcccccagcaagagccggctgctggccaccctgtgcagcgctgaggtgtgccagtgtgccgagggcaagtgcccccggcagaggcgggccctggagcggggcctgcaggatgaagatggctacaggatgaagtttgcctgctactacccccgggtggagtatggcttccaggtgaaggtgctgcgggaggacagccgggccgccttccggctgtttgagaccaagatcacccaggtgctgcacttcaccaaggatgtgaaggccgccgccaaccagatgaggaacttcctggtgcgggccagctgccgcctgcggctggagcccgggaaggagtacctgatcatgggcctggatggagccacctatgacctggagggccacccccagtacctgctggacagcaacagctggattgaggagatgcccagcgagcggctgtgccgcagcacccggcagagagctgcctgtgcccagctgaatgacttcctgcaggagtatggcacccagggctgccaggtgtag

SEQ ID NO: 88302 - DNA, 807 bp, Artificial Sequence
  derived and/or modified sequence
atgtgcccagaggacagcctgcaggtgcccctgaaggatgccaagagctgtggcctgcaccagctgctgcggggccctgaggtgcagctggtggcccacagcccctggctgaaggacagcctgagcaggaccaccaacatccagggcatcaacctgctcttcagcagcagaagaggccacctgttcctgcagacagaccagcccatctacaaccctggccagagggtgcgctacagagtgtttgccctggaccagaagatgaggcccagcacagacaccatcaccgtgatggtggagaacagccacggcctgcgggtgaggaagaaggaggtgtacatgcccagcagcatcttccaggatgactttgtgatcccagacatcagcgagcccggcacctggaagatcagcgcccgcttcagtgatggcctggagagcaacagcagcacccagtttgaggtgaagaagtatgtgctgcccaactttgaggtgaagatcaccccaggcaagccctacatcctgactgtgcccggccacctggatgagatgcagctggacatccaggcccgctacatctacggcaagcctgtgcagggcgtggcctacgtgcgcttcggcctgctggatgaagatggcaagaagaccttcttccggggcctggagagccagaccaagctggtgaatggccagagccacatcagcctgagcaaggccgagttccaggatgccctggagaagctgaacatgggcatcacagacctgcagggcctgcggctgtatgtggccgccgccatcatcgagagcccctag

SEQ ID NO: 88303 - DNA, 5097 bp, Artificial Sequence
  derived and/or modified sequence
atgaggctgctgtggggcctcatctgggccagcagcttcttcaccctgagcctgcagaagccccggctgctgctcttcagccccagcgtggtgcacctgggcgtgcccctgtctgtgggcgtgcagctgcaggatgtgccccggggccaggtggtgaagggctctgtgttcctgaggaaccccagcagaaataatgtgccctgcagccccaaggtggacttcaccctgagcagcgagcgggactttgccctgctgagcctgcaggtgcccctgaaggatgccaagagctgtggcctgcaccagctgctgcggggccctgaggtgcagctggtggcccacagcccctggctgaaggacagcctgagcaggaccaccaacatccagggcatcaacctgctcttcagcagcagaagaggccacctgttcctgcagacagaccagcccatctacaaccctggccagagggtgcgctacagagtgtttgccctggaccagaagatgaggcccagcacagacaccatcaccgtgatggtggagaacagccacggcctgcgggtgaggaagaaggaggtgtacatgcccagcagcatcttccaggatgactttgtgatcccagacatcagcgagcccggcacctggaagatcagcgcccgcttcagtgatggcctggagagcaacagcagcacccagtttgaggtgaagaagtatgtgctgcccaactttgaggtgaagatcaccccaggcaagccctacatcctgactgtgcccggccacctggatgagatgcagctggacatccaggcccgctacatctacggcaagcctgtgcagggcgtggcctacgtgcgcttcggcctgctggatgaagatggcaagaagaccttcttccggggcctggagagccagaccaagctggtgaatggccagagccacatcagcctgagcaaggccgagttccaggatgccctggagaagctgaacatgggcatcacagacctgcagggcctgcggctgtatgtggccgccgccatcatcgagagccctggaggagagatggaggaggccgagctgacctcctggtactttgtgagcagccccttcagcctggacctgagcaagaccaagaggcacctggtgcctggggcccccttcctgctgcaggccctggtgcgggagatgagcggcagccctgccagcggcatccctgtgaaggtgtctgccaccgtgagcagccctggctctgtgcctgaggtgcaggacatccagcagaacacagatggcagcggccaggtgtccatccccatcatcatcccccagaccatcagcgagctgcagctgtctgtgtctgctggcagcccccacccagccatcgcccggctgactgtggccgcccctccttctgggggccctggcttcctgagcattgaaagaccagacagccggcccccccgggtgggggacaccctgaacctgaacctgcgggctgtgggcagcggggccaccttcagccactactactacatgatcctgagccggggccagatcgtgttcatgaaccgggagcccaagaggaccctgacctctgtgtctgtgtttgtggaccaccacctggcccccagcttctactttgtggccttctactaccatggagaccaccctgtggccaacagcctgcgggtggatgtgcaggccggggcctgtgagggcaagctggagctgtctgtggatggagccaagcagtacagaaatggagagagcgtgaagctgcacctggagacagacagcctggccctggtggccctgggcgccctggacacagccctgtatgctgctggcagcaagagccacaagcccctgaacatgggcaaggtgtttgaggccatgaacagctatgacctgggctgcggccctgggggcggggacagcgccctgcaggtgttccaggccgccggcctggccttcagtgatggagaccagtggaccctgagcaggaagaggctgagctgccccaaggagaagaccaccaggaagaagagaaatgtgaacttccagaaggccatcaatgagaagctgggccagtatgccagccccacagccaagcgctgctgccaggatggagtgacccggctgcccatgatgaggagctgtgagcagagagctgcccgggtgcagcagcctgactgccgggagcccttcctgagctgctgccagtttgctgagagcctgaggaagaagagccgggacaagggccaggccggcctgcagagggccctggagatcctgcaggaggaggacctgattgatgaagatgacatccctgtgcgctccttcttccctgagaactggctgtggagggtggagaccgtggaccgcttccagatcctgaccctgtggctgcctgacagcctgaccacctgggagatccacggcctgagcctgagcaagaccaagggcctgtgtgtggccacccctgtgcagctgcgggtcttccgggagttccacctgcacctgcggctgcccatgtctgtgagaagatttgagcagctggagctgcggcctgtgctgtacaactacctggacaagaacctgactgtgtctgtgcacgtgtcccctgtggagggcctgtgcctggccggcggcggcggcctggcccagcaggtgctggtgcctgctggcagcgcccggcctgtggccttctctgtggtgcccacagctgctgctgctgtgtccctgaaggtggtggcccggggcagctttgagttccctgtgggagatgctgtgtccaaggtgctgcagatcgagaaggagggcgccatccaccgggaggagctggtgtatgagctgaaccccctggaccaccggggccgcaccctggagatccctggcaacagcgaccccaacatgatcccagatggagacttcaacagctatgtgcgggtgacagccagtgaccccctggacaccctgggcagcgagggcgccctgagccctggaggagtggccagcctgctgcggctgccccggggctgtggggagcagaccatgatctacctggcccccaccctggccgccagccgctacctggacaagacagagcagtggagcaccctgcccccagagaccaaggaccatgctgtggacctgatccagaagggctacatgaggatccagcagttcaggaaggcagatggcagctatgctgcctggctgagccggggcagcagcacctggctgacagcctttgtgctgaaggtgctgagcctggcccaggagcaggtgggcggcagccctgagaagctgcaggagaccagcaactggctgctgagccagcagcaggctgatggcagcttccaggacctgagccctgtgatccaccgctccatgcagggcggcctggtgggcaatgatgagaccgtggccctgacagcctttgtgaccatcgccctgcaccacggcctggccgtgttccaggatgagggcgctgagcccctgaagcagagggtggaggccagcatcagcaaggccaacagcttcctgggggagaaggccagcgctggcctgctgggcgcccacgccgccgccatcacagcctatgccctgaccctgaccaaggccccagctgacctgcggggcgtggcccacaacaacctgatggccatggcccaggagaccggggacaacctgtactggggctctgtgacaggcagccagagcaatgctgtgagccccaccccagcccccaggaaccccagcgaccccatgccccaggccccagccctgtggattgagaccacagcctatgccctgctgcacctgctgctgcacgagggcaaggccgagatggctgaccaggccgccgcctggctgacccggcagggcagcttccagggcggcttccgcagcacccaggacacagtgattgccctggatgccctgagcgcctactggatcgccagccacaccacagaggagcggggcctgaatgtgaccctgagcagcactggaagaaatggcttcaagagccacgccctgcagctgaacaaccggcagatccggggcctggaggaggagctgcagttcagcctgggcagcaagatcaacgtgaaggtgggcggcaacagcaagggcaccctgaaggtgctgcggacctacaacgtgctggacatgaagaacaccacctgccaggacctgcagatcgaggtgacagtgaagggccacgtggagtacaccatggaggccaatgaagattatgaggactatgaatatgatgagctgcctgccaaggatgatcctgatgcccccctgcagcctgtgacccccctgcagctgtttgagggcagaagaaacagaagaagaagagaggcccccaagctgaccagcctgagtgacagatatgtgagccactttgaaacagagggcccccacgtgctgctgtactttgacagcgtgcccaccagccgggagtgtgtgggctttgaggccgtgcaggaggtgcctgtgggcctggtgcagcctgccagcgccaccctgtatgactactacaaccctgagcggcgctgcagcgtcttctacggggcccccagcaagagccggctgctggccaccctgtgcagcgctgaggtgtgccagtgtgccgagggcaagtgcccccggcagaggcgggccctggagcggggcctgcaggatgaagatggctacaggatgaagtttgcctgctactacccccgggtggagtatggcttccaggtgaaggtgctgcgggaggacagccgggccgccttccggctgtttgagaccaagatcacccaggtgctgcacttcaccaaggatgtgaaggccgccgccaaccagatgaggaacttcctggtgcgggccagctgccgcctgcggctggagcccgggaaggagtacctgatcatgggcctggatggagccacctatgacctggagggccacccccagtacctgctggacagcaacagctggattgaggagatgcccagcgagcggctgtgccgcagcacccggcagagagctgcctgtgcccagctgaatgacttcctgcaggagtatggcacccagggctgccaggtgtag

SEQ ID NO: 88304 - DNA, 5097 bp, Artificial Sequence
  derived and/or modified sequence
atgcggctgctgtggggcctgatctgggccagcagcttcttcaccttgtctttgcagaagccccggttgttgctctttagccctagcgtcgtccatctaggtgtgcccctgagcgtgggagtacaattgcaggatgtgcccaggggccaggtagtgaagggcagcgtcttcctgaggaatccatctcgaaataatgtgccctgcagccccaaagtggacttcactctgagcagtgagagagatttcgcactcctcagcctgcaagtgcccttgaaggacgctaagtcctgtgggttgcaccaactgctgcggggtccagaagtccagctggttgctcacagcccatggttgaaggacagcctgtctagaaccacaaatattcagggaattaacctgctctttagctctagacgggggcacctgtttctacagactgatcagccaatctacaacccaggccagagggttcgctaccgcgtgttcgcacttgaccagaagatgcgtccaagtacagacaccataaccgtcatggtggaaaatagtcacggcctcagagtccgtaagaaggaggtgtacatgccttctagcatctttcaggacgatttcgtgattcccgacatcagcgagcccggcacatggaagatcagtgcccgtttctccgacgggctggagtcaaactcttctactcagttcgaggtgaagaagtatgtgctgcctaattttgaagtcaaaatcacgcccggaaagccctacattctcactgtaccaggacatttagacgaaatgcagctcgacattcaggcacgatacatttatggaaagcctgtgcagggagtcgcttacgtcagattcggactactcgacgaggacggcaagaaaacttttttcaggggcctcgagtcacagactaagcttgtcaatggccagagccatatcagcctgagcaaagcggaattccaggatgcactcgagaagctcaacatggggattacggatctgcagggcctgagattgtatgtggcggccgctattatagagtcacccggcggagagatggaagaagccgagctcacgtcatggtattttgtgtcttcccccttttcactggacctctcaaaaaccaaacggcacctggtgccaggggcgccctttcttctccaagcacttgtgagagagatgagcggttcccctgcttccggcataccagtgaaagtatcagcgacagtgtcatcccctggctctgtcccagaagtgcaggacatacagcaaaacactgatggtagtgggcaggtctccataccgattataattccccagacgatttcagaacttcagttatctgtttccgctggtagtccacatcctgccattgcacgattgacagtggccgcccctcctagcggggggcctgggttcttgagcattgagagacccgattctagaccacctcgcgtgggagacaccctgaacctgaacctccgagccgtgggctccggtgcgacgttttctcattactactacatgatcctgtcccgcgggcagattgtgtttatgaatcgggaacccaaaagaacattaacaagcgtgagcgtgttcgtggaccaccacttggcaccctctttttatttcgtcgcattctactatcacggcgatcacccggttgccaactccctcagagtggacgtgcaagccggggcatgtgaaggaaagctggaactttcagtggatggagcgaagcagtacagaaacggagaaagcgtgaaactccacttggaaacagatagcctagccttggtcgccttgggggcccttgacacagccctatatgctgctggatccaagtcacacaaaccactcaatatgggaaaggtcttcgaggcgatgaactcttacgaccttggttgtggtcctggcgggggcgacagcgccctgcaagtcttccaggctgccggcctcgcctttagcgacggagaccagtggacactgagccgtaaacgtttgagctgccctaaggagaaaactacaagaaagaagcgcaatgtgaacttccagaaagccataaatgaaaagctgggccagtatgcctcccccactgccaaacgttgttgtcaggacggcgtcactcggcttcccatgatgagatcgtgtgagcaacgcgcggccagggtgcagcagccagattgcagggagccatttctctcatgctgtcagttcgccgaaagcctgcgcaagaaaagcagggacaagggtcaggccggcctgcaaagagcactcgaaatacttcaggaagaagacctgattgatgaggacgacattccagttagatcattcttccccgaaaattggttatggcgggtggaaactgtagacaggttccagatcttaacactttggctgccggattcactgacaacctgggagatccacggattatctctgagcaagactaagggtctatgtgtggccacacccgtgcagttgcgtgtattcagggaattccacttacatctcagactccccatgtccgtccgaagattcgagcagctcgaactccgacctgtgctgtataattatctcgataaaaacctgactgtgtcagtccatgtgagtcccgtggaaggcctctgtcttgcaggcggcggtggcctggcacagcaagtgttagttcctgccggaagcgctagaccagtagctttcagcgtagtccctacagccgctgctgctgtgtctctgaaagtggttgctcgcgggtcctttgagttccccgtgggcgacgccgtctccaaggtccttcagatcgagaaggaaggcgctatccatcgtgaggagcttgtctatgaattaaatcccctagatcatcgaggccgcaccttggagatccccggtaatagtgatcctaacatgattccagacggagacttcaactcctatgttcgggtgactgcgtctgaccctctggacacactgggttccgaaggcgctctgtctcctgggggggtggcgtcgctgctccggctccctcgcgggtgcggcgaacagaccatgatttacttggcgcccacacttgcggcaagtcgttacctggacaaaactgagcaatggtctactcttcctccggaaacaaaggaccacgctgtggacctcattcagaaaggatatatgagaatccaacagttcaggaaggctgacggcagctacgccgcctggctgagccgcgacagctctacctggctgacagcctttgttctgaaggtcctatccttagcccaggaacaagtcggagggagcccagagaagctgcaggagacttctaattggctgctctcgcagcagcaagccgatggatctttccaggatccatgtcctgtgctggacaggtctatgcaggggggccttgtgggcaacgatgagaccgtcgcactaaccgcattcgtgaccatagccctgcaccacgggctggccgttttccaagatgaaggcgccgagcctctgaagcagcgggtggaagccagcatcagtaaggccaattctttcctgggagaaaaggcctcagccggactcctcggagcacacgctgccgccatcaccgcttacgctctgaccctaactaaggcgcctgtagatctgctgggagtggcccataacaacttgatggcgatggcacaggagaccggggacaacctttactgggggtcagtgacgggatcccagagtaatgccgtatctcccacccctgcccctaggaaccccagcgaccctatgccgcaagcacctgccttgtggatcgagactacggcttatgccttactccatctcctgctccacgagggtaaggcggagatggccgaccaagcctcagcttggctgacccgacagggatctttccagggcggcttccgctcaactcaggataccgtgattgctttggacgcactgtcagcctactggattgcgtctcacaccacagaagagaggggcctgaatgtgacactgagttctaccgggcggaatgggtttaagtcccacgcactccagttaaacaaccgccagatcaggggactggaggaggaactccagttcagcctcggcagcaagatcaatgttaaagttggagggaattcaaaaggtactttaaaggttctgagaacctacaatgtcctggacatgaagaataccacctgccaggatctgcaaatagaggtaacagtgaagggccacgtggagtacacgatggaagctaacgaagattacgaagactacgaatacgacgagctccccgccaaggacgatccggacgcgcccctccaacctgtcacaccccttcagctgttcgagggtcgcagaaacagacgccgtcgcgaggcaccgaagttaaccagtctcagcgatagatacgtctctcacttcgaaacggaaggtccccacgttttactgtatttcgattccgtgcctactagccgtgaatgtgttggtttcgaagcagtgcaggaggtaccagttggattagtccagcctgcttcagcgaccctgtacgactattataaccctgaacgccggtgtagtgtgttctacggagcaccaagcaagtctcggctgctggcgaccctgtgcagcgcagaagtgtgtcagtgcgccgagggtaagtgtccgagacagagacgtgcccttgaacgaggtttacaggatgaggacggctatagaatgaaattcgcatgttactacccacgggtagaatatggatttcaggtaaaggtgcttagggaggattcccgggccgcctttaggctctttgaaactaagatcacccaggtactgcacttcactaaggacgtgaaggcagcggctaaccagatgcgcaattttctagtacgcgcctcctgcaggctgagacttgagcctggtaaggaatacttgatcatgggcctcgacggcgcgacttatgatttggagggccatccccagtacctgctcgattccaacagctggatcgaggaaatgccaagtgaacgcctctgcagatccacccggcagcgggccgcatgtgcccaattgaacgatttcctgcaagagtatggcacacaaggctgccaggtgtag

SEQ ID NO: 88305 - DNA, 813 bp, Artificial Sequence
  derived and/or modified sequence
atgtgccccgaggacagcctgcaggtgcccctgaaggacgccaagagttgtggactgcaccagttgctcagagggcccgaggtccagctcgtggcccattcaccttggcttaaggactctcttagtcgcaccacaaacatccaaggcatcaaccttctattcagctcacgccgaggccacttattcctgcagaccgatcagccgatctacaacccagggcagcgcgtgagataccgagtgttcgctctggaccagaagatgagaccttccacagacactatcaccgttatggtggaaaactcccacggcctccgcgttagaaagaaggaagtctacatgccctcatctatcttccaggatgacttcgtgatacccgacattagtgagcccggaacctggaagatttcagcacgattcagcgatggccttgagtcgaattcttccactcagttcgaggtgaagaaatacgtgttgcccaattttgaggttaagataacccccggcaaaccatacatcctgacggttcctggccatctggacgagatgcagctagatatccaagctcgatatatctacggaaagccagtccagggcgtagcatacgtccgatttgggcttctggatgaggatggaaaaaagacattcttccggggcctggagtctcagactaaactggttaacggacagtcccacatctctctgagcaaggctgagtttcaggatgctcttgaaaaactcaatatggggatcactgatttacaagggctacgcctctatgtggccgctgccatcattgagagtcctggcggctag

SEQ ID NO: 88306 - DNA, 5097 bp, Artificial Sequence
  derived and/or modified sequence
atgcggctgctgtggggcctgatctgggccagcagcttcttcaccctatccctgcagaagcctaggctcttgttgttcagtcccagcgtggtccatcttggagtgcctctttccgtgggggttcagttacaagacgtgccaaggggacaagtcgtgaaaggatctgtgtttctcaggaatccctcgcgtaacaatgtgccctgttcacccaaagtcgatttcacactgagctcagaacgcgactttgccctgctctctctccaggttcctctcaaggacgcgaaaagttgtggcttgcaccagctccttcgcgggccagaggttcagctggtcgctcattccccttggctcaaggactcactctccaggactactaatatccagggaattaatttgcttttttccagcagaaggggccatctgtttctgcagaccgaccagcccatttacaatccagggcagcgggtgcggtacagggtctttgccttagatcagaagatgcgcccttcaaccgataccattactgtgatggtcgaaaattctcatggactgcgtgtgcggaagaaggaagtgtatatgcctagttctatcttccaagacgacttcgtcattccagatatttctgaacccggcacatggaaaatatccgctagattcagcgacggcctggagtccaattcctccacacagttcgaagtgaagaagtatgtgctgcccaactttgaggtgaagatcactccaggcaaaccttatattcttactgtgccaggccatttggacgaaatgcagttagacatccaggctcgctatatttacgggaagcccgtccagggtgtggcctatgtgaggttcggcttgctcgatgaggacggcaaaaaaaccttctttcgaggacttgagagtcagacaaagctcgtcaacggccaaagtcacatatctctgagcaaagctgagtttcaggatgccttggaaaaactgaatatgggcattaccgacctgcagggactacgtttgtatgtggccgccgccatcattgaatacccagggggggagatggaagaggctgaactcacctcttggtactttgtttcctcacccttcagcttagacctgtcaaaaacaaagaggcacctggttccaggcgccccttttctgctccaggctctggtgagggagatgagcggatcacctgcctctggcatcccagttaaggtgtctgcaaccgtgtcgtcccctggctccgtgcctgaggtgcaggacatacagcagaacaccgatggctcgggacaggtgagtatccccattatcataccccagaccatatcagagctacaacttagcgtcagcgccggctccccccacccggcaatagcccgacttacagtggccgcccccccaagtggggggcctgggtttctgtccatagagtggcctgactccaggcctcctcgagtgggggataccttgaatctcaatcttagagctgtgggctctggcgccacctttagtcattattattatatgattctgagtagaggtcagatcgtgttcatgaacagagagcctaaacggaccctgacatcggtgtcagtctttgtagaccatcacctggcaccatcattctacttcgtcgccttttactatcacggcgatcatcccgttgcaaactctctgcgagtggacgtgcaggccggggcttgcgagggaaaactggaattgagtgtggatggcgccaagcagtatagaaacggggagtccgtgaaactgcacctagaaaccgactcgctagcattggtagccctaggggcattagacactgccctgtacgcagcgggatccaaaagccacaaaccactgaatatgggcaaagttttcgaagctatgaatagctatgacctgggatgcggacccgggggcggcgactccgctcttcaagtttttcaggccgcagggttggcattctcagacggcgatcaatggacactgagccggaagagactcagttgccctaaggagaaaactactagaaagaaacggaatgttaattttcagaaggctatcaatgagaagctgggacagtacgcatcgcctacggccaagagatgctgtcaagatggcgtcacgaggctgccaatgatgaggagctgcgagcagagggcagcacgggtgcagcagccagactgtcgcgagccttttttgagttgttgccagttcgccgagagcttgcgcaaaaaatctcgggataagggtcaggcaggtctgcaaagggcgctggaaattctgcaggaggaagatctgatcgacgaggatgatatcccagtgaggtcttttttcccagaaaattggttgtggcgggtagagacagtggacaggttccagatcctgactctgtggctccccgactcattaacaacctgggagatacacgggctctctctgagtaaaacgaaaggtctttgcgtcgcaacaccagtccaactgcgcgtgtttagggagtttcacctgcacctgcgtctccccatgagcgtgcggcgctttgagcagctcgaactgcggcctgtgctttacaactacctggataaaaacctcacggttagtgttcacgtgagccctgtggaaggtttgtgcctggcgggcggcggaggacttgcacaacaggttctcgttcccgccggctctgctaggcctgtggcctttagcgttgtgccaaccgcagccgccgcagtaagcctgaaggtggtggcacgtgggtcattcgaatttcccgtgggagatgccgtgtctaaggtgctgcagatagagaaggaaggggccatccatcgagaagaattggtgtatgaacttaatcctttggaccataggggccggaccctagagatccctggcaactccgatcctaacatgatccctgatggcgactttaatagctacgtgagggtgacagcctcggacccactcgacacactgggaagcgaaggcgccctctcacccggcggagtagcctctctgctccgcttgcctcgtggttgtggcgaacaaactatgatctacctggcccccaccttggccgctagcaggtacctcgataagacagagcagtggtcaaccttaccgcccgagacaaaagaccatgctgttgacttgatccagaagggttacatgagaattcagcagttcaggaaagccgatggttcttacgcggcctggctgtcgagagactcctcaacttggttaaccgcttttgtgcttaaagtgttgagccttgcacaggagcaggtggggggctcaccagagaagctccaggagaccagtaactggctgctgtcccagcaacaggctgacggcagcttccaggatccctgtccggtcctagatcggagcatgcagggcggactggtcggcaacgacgaaaccgtggccctcacagcatttgttacgatcgcgctgcaccacggactggctgtatttcaggacgaaggggctgagcctctgaaacagcgcgtcgaagctagcatctcaaaggctaatagcttcctgggcgagaaggcttccgccgggctccttggtgcccacgccgcagccatcaccgcctatgcgctcactttgacaaaagcacctgtggacctgttgggtgtcgcccataataacctgatggctatggcccaagagactggcgataatctatactggggatctgttactggatctcagagcaacgcggtgtcacccacgccagctcccagaaatccttccgatcctatgccccaggctccagccctgtggatagaaacgaccgcatatgcactcctccacctcctcctccatgaagggaaggctgagatggccgatcaagccgctgcatggctgaccagacagggttcattccagggaggcttccgatcaacacaggatacagttatcgccctagatgccctcagcgcctattggattgcctcgcacacaacagaggaacgtggcttgaacgtcacactctccagcaccggccgcaatgggttcaagagtcacgccctgcagctgaacaaccggcagatacgaggcctggaagaggagctgcaattctccttgggctctaagataaacgtcaaagtggggggcaacagtaagggcactctcaaggtccttcgcacctacaacgtactcgatatgaaaaatacaacatgtcaggatctgcagatcgaggtgacagtgaaggggcatgtagagtacactatggaagctaatgaggactacgaggattacgagtacgacgaactgcccgcaaaggacgatccagacgcaccgttacagcctgtaacacctctccagctgttcgagggccgtagaaatcggcgcagacgtgaggcacctaaactgacttctctgagtgacaggtacgtaagccatttcgagacggaaggccctcacgtccttctgtacttcgattctgtcccaacctcccgggagtgtgtgggtttcgaggctgtccaggaggtgccagtggggctcgttcagcctgcctccgctacactttacgactactacaaccccgagcggaggtgcagtgttttctacggcgccccttccaaatcccgcttgttggctacattgtgctccgcggaagtatgtcagtgtgcagagggtaagtgcccaagacagcgaagagctcttgagagaggtcttcaagatgaagatgggtaccgaatgaaatttgcatgctactatccacgagtggagtacggcttccaggtcaaggtgctccgggaagattctcgggccgctttccgcttgtttgaaaccaagatcacccaagtcctccacttcaccaaggacgtgaaagccgcagctaatcagatgcggaatttcctcgtaagagcctcatgccgcctgcggttagagccaggaaaagagtaccttataatgggtttggatggtgctacatacgacctagagggccatccccaatatctgcttgacagtaatagttggatcgaagagatgccgtccgagcgcctgtgtcggtcaaccaggcagagggccgcatgtgcccagctgaacgactttctccaggaatacggcacccagggctgtcaggtttag

SEQ ID NO: 88307 - DNA, 5097 bp, Artificial Sequence
  derived and/or modified sequence
atgcggctgctgtggggcctgatctgggccagcagcttcttcaccttgtcgctgcagaagccgcgcttgctgctgttcagcccttcggtggtgcatttgggtgtgcccctttcagttggagtacagcttcaagatgtccccagaggccaagtggtgaaaggatccgtgtttcttagaaacccttctagaaataacgtgccatgcagtccaaaggtggattttacactctcttctgaacgggactttgccttgctcagcctgcaggtccccctcaaggatgctaaaagctgcggcctccatcagctgttgaggggaccagaagtccagcttgtcgctcactccccctggttgaaggactcactgtcacggaccaccaacatacagggaatcaatctcctgtttagttccagacgcgggcacctcttcttgcagacggatcagcccatttataaccctggacaacgggtaaggtatcgcgtgttcgcgctggatcagaagatgagaccatccaccgatacaataaccgtgatggtggaaaatagccacgggttaagggttcgtaagaaagaagtgtatatgccctccagtatctttcaggatgatttcgtaattcctgatattagtgagcccggcacctggaaaatcagcgcccggttttcggacggactcgagtctaattcctcaacacaatttgaggtcaaaaaatacgtcttacccaacttcgaggtgaaaattacacccgggaagccctatatcttgaccgtgccaggacacctagacgaaatgcagttggatatacaggctcgttatatttacggcaaacctgtgcagggggtggcctatgtaaggtttggattattggatgaggatggaaaaaaaactttcttcagggggctggaatcccagactaaactcgtgaatggacagtcccacatctcactgagcaaggctgagttccaagacgccctggagaagttgaacatgggaattacagacctgcagggtctgcgcctttacgtagccgcggctattattgaatcccctgggggcgaaatggaagaagccgaactgaccagctggtatttcgttagctcccctttttccctggacttaagcaagaccaaaaggcatctcgtgccaggggctccattcttactccaggcactggtcagagaaatgagcggttcgccggcctctgggatccccgtgaaggttagtgccactgtctcctcacccggatccgtgccagaagtgcaggacattcagcagaatacagatgggagcggccaggtttccattcctatcattattcctcagaccataagcgagttacagctaagcgtgagtgccggctccccacaccctgcaatcgctagactgactgtggctgccccacccagtgggggccctgggtttttgtctatcgagcgtcctgatagccggccaccccgcgtgggagacaccctcaaccttaatcttagggctgttggcagtggagctacattctctcactattattatatgatactttctagggggcagattgtatttatgaatagggaaccaaaacgcactctgaccagcgtttctgtatttgtggaccaccatctggctcccagcttttattttgtcgctttctactaccacggcgaccaccccgtcgcgaattccctgcgagtggatgttcaggccggagcttgcgagggaaagctcgagctctcagtggacggcgcaaagcagtatagaaatggcgagagtgtgaagttgcacctcgaaacagattcactggcactcgtagccctgggagctctggacactgccctctacgcagccggcagtaaatcacataagcctctcaacatgggcaaagtcttcgaggccatgaatagctatgacctcggctgtggccccggtggaggcgactctgcccttcaggtatttcaagcagctggcctggcttttagcgacggcgatcagtggacactgtctcggaaaaggttgagctgtccaaaggaaaaaaccacaagaaaaaaacgcaatgtcaacttccaaaaggccatcaatgagaagctggggcagtacgcctcacccacggccaagcgctgctgccaggacggagtgactagactccccatgatgcgctcctgcgagcagagggccgcgagagttcaacagccagactgccgggaaccctttctgtcatgctgtcagtttgcagagtcactgagaaagaagagtcgggataaaggtcaggcggggctgcagagggccctggagatattacaggaggaggacctcatagacgaagatgatatcccagtgaggtctttttttcccgaaaattggttgtggcgggtggaaacggtcgatcgttttcagatcctgacattgtggcttccagatagcctgaccacatgggagatccacggcctcagtctgtcaaaaactaagggcctgtgtgtggccactcctgtgcaattgagggtgtttcgggagttccacctgcacctgagattgcccatgtctgtccgccgattcgagcagctcgagttacgacccgtgctgtacaattacctggacaagaatctgacagtgagtgtgcacgtgagccccgtggagggcctctgtctggcagggggaggaggcctggctcagcaggtcctggtgccagcaggcagcgccagaccagtggccttctcggtcgtgccaaccgcagctgccgcggttagcctcaaggtcgtggcaagaggctcatttgagttccctgtgggggacgccgtgtctaaagtcttgcagatagagaaggagggagccatccaccgtgaggagctcgtctacgagcttaacccactagatcatcgcggcagaaccctggagatccctggcaattctgatcctaatatgattcctgatggcgactttaatagctatgtccgggttacggcgagcgacccccttgataccctcggcagtgagggagctctgagtcccgggggcgtcgcttctcttctgcgcctacccaggggctgtggtgagcagacgatgatataccttgctcccaccctggctgcgtctcggtatctagataaaaccgaacagtggtctacactgcctccagaaacaaaggatcacgcagtcgacctgatacagaaaggctatatgcggatccagcagtttaggaaagcggatggatcctacgctgcttggctgagcagagatagcagcacttggttaacagcttttgtgctcaaagtactgtccttggctcaggagcaggtcgggggcagccccgaaaaattgcaagaaacatccaattggttgctcagccaacaacaagcggacgggagcttccaggacccatgccccgtgctagaccgttctatgcagggtggcctggttggaaacgatgagacagtggcactgacagcctttgtgactatcgccctccatcatggtctggctgtgtttcaggatgagggtgcagaacccctgaaacaacgtgtcgaggcttccatttctaaagcttcctctttcctcggagaaaaggcatccgccggcttgctgggggcacatgccgcagccatcactgcctatgccttaacccttactaaggcccctgtggatctcctgggagttgctcacaataatttgatggccatggcccaggaaaccggcgataatttgtactggggatccgttaccggctcacagtcgaacgccgtctctccaacacctgcccccagaaatccaagtgaccccatgcctcaagccccggcgctgtggatcgagactacagcctatgcccttttgcacctgcttctgcacgaaggcaaagctgaaatggcagaccaggcagcagcatggctcactcgacaaggttcctttcagggaggatttcgaagcacacaggatactgtcattgccctggacgctctatccgcctactggatagcatcgcacactaccgaggagagggggttgaacgtgactctttccagcaccggcagaaatggatttaaatcgcatgcactccaattgaacaatagacagattcgtggcctggaagaggagcttcagtttagtttaggctctaaaattaatgttaaggtgggggggaattctaaggggactttaaaggtgctcagaacctataatgtgctggacatgaagaacacaacatgccaggacctccagatcgaggtcacggtgaaagggcatgtcgaatatacaatggaagccaacgaggactacgaagactacgaatacgacgaactgcccgctaaggacgatcccgacgcccctctacagcccgtcacgcccctccaattatttgagggacgccggaaccgcagacgcagagaggcgcccaagcttacttccttgtcggaccgatatgtctcacacttcgagaccgaagggccacacgtactcctgtattttgatagcgtgccaacatccagggaatgtgttggcttcgaagctgtgcaagaggtcccagtaggactggtgcagcctgccagcgctacactgtatgactattacaatcccgaaagaaggtgtagcgtgttctatggagcaccttctaagagcagactccttgctacgctgtgctctgccgaggtgtgtcaatgcgctgagggcaaatgccccaggcagcggcgcgcactggagcgtggcctgcaagatgaggatggttatagaatgaaatttgcgtgttactatcctagagttgagtacggtttccaggtaaaggtgctgagagaggactcgagggcggccttcaggctctttgagactaaaatcacgcaagtgttacactttaccaaggacgttaaagcggccgccaaccagatgaggaatttcctggtgagggcgagttgtaggctccgcctagagcccggtaaagagtacctcattatgggtctagatggagcaacatatgacttggagggtcacccccagtacctgctcgactctaactcgtggattgaagaaatgcctagcgaaagactttgtcgctccacaagacagcgtgcagcttgcgctcagctcaatgacttcttacaggaatacggtacccagggctgccaggtgtag

SEQ ID NO: 88308 - DNA, 5097 bp, Artificial Sequence
  derived and/or modified sequence
atgcggctgctgtggggcctgatctgggccagcagcttcttcaccttgtcattacagaaaccacgtcttctgttgttctccccatctgtggtgcacctcggcgttccactctcagttggcgttcagctccaagacgttccccgtgggcaagtcgtcaaaggaagcgtgtttctccgcaacccaagtcggaataatgtgccgtgttctccaaaggtggacttcactctgtcctctgaacgagacttcgccctgttgagtctgcaggtgcctctgaaggacgccaagtcttgcggactccatcagctgcttcgggggcccgaagtgcaactggtggcacattccccatggcttaaagatagcctgtccaggacaactaacatccagggcatcaacctattgttttcttctcgacgcgggcatctcttcctacagaccgatcagccgatctataacccagggcagagggttaggtacagggtatttgcactggaccagaagatgaggccctctaccgataccatcactgtgatggtggagaacagtcacggactgcgcgtgcgcaagaaagaagtgtatatgccctcaagcatctttcaagatgatttcgtgatacccgacatatctgaacccggaacctggaagataagcgcccgcttttccgatgggctggaatctaacagctctacacagtttgaggtcaagaaatatgtgctgccgaactttgaggtcaagattacgcctggaaagccttatatccttacagtgcctggccacctggacgaaatgcagctggatattcaagccaggtacatctacggaaaacccgttcaaggtgtggcctatgttaggtttggcctgctggatgaagatggcaagaagacgttttttaggggccttgaaagccagaccaagctggtcaatggccagagccatatcagcttgtccaaggccgaatttcaggacgccctagaaaaattaaatatgggaatcacggatctccaggggttaagactgtacgtggcagccgctattatcgagtacccagggggagagatggaggaagccgagttaactagttggtacttcgtgtctagtcccttctcgctggaccttagcaaaacaaagcgccatctggtgcctggtgcccccttcctcttgcaagcactggttcgagagatgtccggatctcctgcaagcggtattccagtcaaggtgagcgctactgtcagtagtcccggctcagtccctgaggtccaggatatacagcagaacaccgatgggtcaggtcaagttagcatccctatcatcatcccccagacgatcagtgagcttcagctgtccgtaagtgccggtagcccacacccggccatcgcccgcctgacggtcgcagctcctccttccggagggcctggttttctgagcatagaaaggccggactctcggcctccgagggtcggcgatactctgaatttaaatctcagagcggtcggctctggagctacctttagtcactattactacatgattctgagccgcggccagatcgtctttatgaatagagagcctaagcgaaccctcacttccgtgagcgtgttcgttgaccaccatcttgcgccctcgttttatttcgtggccttctactatcatggggaccatcctgtcgctaatagcctcagagtggacgtacaggcaggggcctgtgagggcaagctcgagctctcagtcgatggagccaaacagtacaggaacggcgagtctgtgaaactccatctcgagacagatagcctggctcttgtcgctctgggtgccctggataccgccctctacgccgccggctcaaaaagccacaagcccctcaacatgggcaaagtctttgaagcaatgaattcctacgatctgggctgcggaccggggggaggagactctgcgcttcaagtcttccaggccgctggattggccttttcagacggagatcaatggacactctccaggaagagactgtcttgtcctaaggaaaagaccacaaggaagaaaagaaacgttaacttccagaaggctatcaatgagaagctggggcagtatgctagcccaaccgccaagaggtgttgccaggacggcgttactcggctccccatgatgcggtcttgcgaacagcgcgccgctcgggtgcaacaacctgactgccgggagccctttctgtcctgttgccagtttgcagagagcttgaggaaaaagagtcgtgataaggggcaggccggactgcagagagccctggagatactccaagaggaggacctgatcgatgaagatgatatccctgtcaggtcattttttcccgaaaattggttgtggagagtcgagacagtagaccgatttcagattctcaccttatggctcccagactccctgaccacttgggaaatccatgggctgtctctgtccaaaactaaggggctatgtgtcgcaacccctgttcagctgagagtttttcgggagttccacctgcacctgcgtcttccaatgtcagtgcgcaggtttgagcagctggaattgaggcctgtgctgtacaactatctagacaagaacctgaccgttagtgtgcacgtgtcccccgttgagggtctgtgtctcgcaggaggaggaggtttggctcaacaggtgctggtgcctgccgggtccgcaagacctgtcgcttttagcgtagtacccactgcagccgcagccgtctccttgaaagtggtggctagaggttctttcgaatttccagtcggcgatgccgtgtctaaggtattacagatcgagaaggaaggcgcaatccaccgggaagaactggtttacgagcttaaccctctggaccacagggggaggacacttgagatccccggcaacagcgacccaaatatgattccggacggcgatttcaacagctatgtgagagtcacagcatcagatcccctcgatacactgggtagtgaaggggccctctccccaggcggtgtggcatctctgctaagactcccacgcgggtgcggagaacagaccatgatctaccttgcccccaccctagccgcctccagatacctcgataagacagagcagtggagtaccctacctcccgagacgaaagatcacgccgttgaccttattcaaaagggttatatgaggatccaacagtttagaaaagctgacggctcatacgccgcctggctgtccagagactccagcacctggttgaccgcgttcgttttaaaagtcctaagtctagctcaggagcaagtgggagggtcaccagagaagctccaagagacctctaactggcttttgtcccagcagcaggcagatgggtccttccaggatccatgtcccgtccttgacagatcaatgcaaggcgggctggttggcaatgatgaaactgtggcccttactgcgttcgtgactatagctctgcatcatggcttggccgtgttccaagatgagggcgccgaacccctgaaacagcgcgtcgaggcctctattagtaaggccaactcctttctaggcgagaaagctagtgctggcttgctgggagcccatgccgccgcaattactgcttacgcactcacgctcacaaaggcccctgtagacctcctgggcgtagctcacaataatctgatggcaatggcccaagaaaccggggacaatctgtattggggcagcgtcacaggaagccagtctaatgctgtgagcccaacacccgcacccagaaatccttcagacccaatgcctcaagcccccgccctgtggatagaaacgaccgcttacgctctgctccacctgctgctccacgagggcaaagcggagatggctgaccaggccgcagcatggcttacacgccagggcagcttccagggggggttccggtccacccaggataccgtgattgcactggacgccctgagtgcctattggattgcctcgcatacgactgaagagcgagggttgaatgttacattaagctccacgggacgcaacgggttcaagtctcatgccctgcaactgaacaacagacagatccgcggactcgaggaagagctgcaattttccctcggaagcaaaatcaatgtgaaagtgggaggtaacagtaagggcactctcaaagtgttgcgcacttacaacgtgcttgacatgaagaacacaacatgccaagacctgcagatagaggtgactgtgaagggccacgttgaatacaccatggaagccaacgaggattacgaggactatgaatatgacgagctgcctgctaaagacgaccctgacgcacctttgcagcccgtaactcctttgcagctgttcgaggggcgtcggaaccgccggaggcgggaggctcctaagctgaccagccttagtgaccgatatgttagccactttgagaccgagggaccacacgtgctgctctatttcgattctgtcccaacctctcgagaatgcgtgggctttgaggcagtacaggaagtgcccgtaggactggtgcaaccagctagcgccacattatacgactactacaaccccgagcgccgctgttctgtgttctatggggccccgtccaagagcaggttacttgccactctgtgtagtgccgaagtgtgccagtgcgctgagggcaagtgccctaggcagaggagagctctggagaggggtttgcaggacgaggatggctatcgaatgaagtttgcctgctactatcctcgggtggaatatggatttcaggtgaaggttctacgggaggactcccgtgctgcttttcggctcttcgagaccaagataacgcaagtgcttcatttcacaaaagacgtcaaagcagccgccaatcaaatgcgcaatttcctggtgagagcgagttgcaggctgaggctagagcccgggaaagagtatcttattatgggcctggacggcgcaacttatgatctggagggacatccccagtacctcttggattctaattcttggattgaggaaatgcccagtgaacggctttgtcgatccacacgacagcgggctgcctgcgcccagttgaatgatttccttcaagagtatggaacgcaaggatgtcaggtttag

SEQ ID NO: 88309 - DNA, 5097 bp, Artificial Sequence
  derived and/or modified sequence
atgcggctgctgtggggcctgatctgggccagcagcttcttcaccttgtctctccagaagccacgactgctgctattttccccctctgttgttcatctaggggtcccactcagcgtgggcgttcagctccaggacgttccccggggccaggtggttaagggatctgtctttttgcgtaatcccagccgcaacaacgtaccatgcagtcctaaggtcgacttcaccctgtcctccgaacgggacttcgcactgctgagcctccaggttcccctgaaggacgctaagtcttgtggactgcaccagctcttgcgaggtccggaagttcagctcgtagcacattccccctggctcaaggatagccttagcagaactacaaatatccagggaatcaacctgctgttctcttcccgccgcggacatctgttcttgcagactgaccaacccatctataatcctggccaacgagtcaggtatcgggtttttgctttggaccagaaaatgcggccctcaacggacaccattacggtgatggtggaaaacagccacgggttgcgagtgcgaaaaaaagaagtgtatatgccttcctctatattccaagacgatttcgttatacccgacatatctgagcccggaacttggaaaatcagcgctcgtttctctgacgggctggaaagtaacagtagcactcagtttgaggtgaagaagtacgtcctaccaaactttgaagtcaagatcacacccggaaagccatacatactgaccgttcccggacatctcgatgaaatgcagctggacatccaagccaggtatatttatggaaaacccgtgcagggtgttgcctatgtgaggttcggactgttggatgaagacggcaagaagacttttttccggggactcgagagtcagaccaagctcgtgaatggccagtctcacatctctctctcaaaggctgaattccaagatgctttggagaagctgaatatgggtattacagacctgcagggtctgagactttacgtagcggccgccatcattgaaagtccagggggtgaaatggaagaggcagagctgacctcttggtacttcgtgagttctccattttccctggatctctcaaagactaaacgacacctagttccaggcgcccctttcctgctccaggccttggtccgcgagatgtctggctcacccgcctccgggatcccagtgaaggttagcgcaacagtgtcttccccaggctcagtgcctgaggtgcaggatatccagcagaacaccgacggcagcggacaggtgagtattccaatcatcatcccccagacaatttctgagttgcagctctcagtgtctgcaggctccccacacccagccattgcacgactcacagttgctgcacctccttctggcggtcctggctttctaagtattgaaagaccagactccaggccccctcgggtgggcgacacgctcaacctgaatctccgcgccgtgggtagcggggcaacatttagccactactattatatgattctctccaggggacagattgtattcatgaaccgcgaaccgaagcgtaccctgactagtgtgtctgtgttcgtagaccatcacctcgctccctccttttactttgtagctttttattatcacggcgaccacccagtagccaattccctgcgcgttgacgtacaagcaggcgcgtgcgagggcaagctggagttgtcggtggatggtgccaagcaataccggaatggggagtctgtgaagttgcacctcgagacagatagcctggccctggtcgccttgggagccttggacactgctctgtacgcagctggttctaagtctcataaacctctgaacatggggaaggtctttgaggcaatgaactcctatgatctggggtgcggccctggcggcggcgactcggctcttcaggtgtttcaggctgcgggccttgcattctcggatggggaccagtggacactgtctcgcaaaagactctcctgccctaaggagaagaccacgcgcaagaagagaaatgtaaactttcaaaaagcgatcaatgagaagttaggccagtacgcctctccaacagccaagaggtgctgccaggatggggttactcggttacccatgatgcggagctgcgagcagcgagccgcccgcgtgcagcagcctgattgccgtgaaccttttctcagctgctgccagttcgctgaatcattaaggaagaagagtcgcgataaagggcaagccgggctccagagagctctggaaatattgcaggaggaagacctgattgacgaggacgatatccccgtacgcagtttcttccctgagaattggctgtggagagtagaaactgtagacagatttcagatcctgaccctgtggcttccggatagcctgaccacctgggaaattcatggactctccctgtctaaaactaaagggttgtgcgtagccaccccggtccagcttcgggtgtttagggagttccacttgcacctgcggctgccgatgtctgtccgcagatttgagcagctcgaattgaggcccgtgctgtacaactatctcgataagaacctgaccgtgtccgtgcatgtgtcaccagtggaagggctgtgcctggcagggggcggcgggctagcccagcaagtgttggtgcccgctgggtcggccaggcccgttgcatttagcgtggtgccaacagcggccacagctgtgtcccttaaggtcgtcgcacgcgggagctttgagttcccagtcggcgacgccgtgagtaaggtgctgcagatagagaaggagggcgctatccatcgtgaggagctggtttacgaacttaacccactcgaccatcggggacgcaccctggagatcccaggtaattcggatcccaatatgataccagacggcgattttaactcctacgttcgggttacagcatcggaccctcttgacacactcggatctgaaggggccctgtcaccagggggcgttgctagcctgttacgcctcccccggggctgcggggaacaaacgatgatatacttagcccccaccctggccgcatcccgatacttagacaagacagaacagtggagcaccttgcctccggagaccaaggatcacgcagtggatctgatccaaaaaggatatatgaggatccaacagttccggaaagccgacggttcttatgctgcctggctgtctagaggatcctccacctggctgactgcctttgttctcaaggtgttgagcctggcgcaggagcaggtgggggggtctccggagaaacttcaggagacttctaattggctactgtctcagcagcaagcagatggtagttttcaggacctctcacccgtgattcacaggtccatgcagggcgggctggttggtaatgacgagacagtggcactgactgcattcgtcacaattgcgttgcatcatgggcttgctgtgttccaagacgaaggagccgaacctttgaaacagcgggtggaagcttccatcagcaaagccagcagctttctcggggaaaaagcttcagcgggactcctgggcgctcatgcggcagctattacggcctacgccctgaccctgacgaaggctcccgccgatcttaggggcgttgcacacaataatctcatggctatggcacaggagaccggggacaatttatactggggaagtgtgacggggtctcagagtaatgccgtgtctccaacacccgcaccccgaaacccttcagacccgatgcctcaagcaccggctctgtggatcgaaaccacagcgtacgcccttcttcatctactgctccacgaaggcaaggctgaaatggccgaccaggcagccgcatggttgacacggcaaggttcatttcagggcggcttccgctctacccaggacaccgtgatcgccctggacgcactttccgcatattggatcgccagtcatacaactgaagaaagaggactcaatgtcacgctttcgtcaaccggtcgaaatggctttaaaagccatgcacttcagcttaataaccgccagattcggggtttagaggaagagctgcagtttagcttgggatcaaagattaacgtgaaggtgggcggaaattcaaagggaacgctgaaggtgctgagaacctacaacgtgctcgatatgaagaacactacctgtcaggatttacagattgaggtgactgtaaagggtcatgtagaatacaccatggaggcaaacgaggattatgaagattacgaatacgacgagctgcccgccaaggatgatccagacgcaccccttcagcctgtgacccctttgcaactgttcgagggccgcagaaatcggagaaggcgcgaagccccgaagctcacatccctgagtgaccgctacgtatcccatttcgaaactgaaggcccacatgtgttactctattttgacagtgttcccacatctagggagtgcgtaggcttcgaggcagtgcaggaggtacccgtggggctggtgcaacctgcctccgcaacactctatgattactataatcctgagcggaggtgttccgtgttctatggcgcacccagtaagagcaggcttctcgccactttatgtagtgctgaggtatgccaatgcgcggagggtaagtgtccaagacagaggcgtgctctggaaagaggcctgcaggatgaggacggatatcgcatgaaattcgcatgctattatcctcgggtggagtatggatttcaggtgaaagttctccgggaggactccagagcagcgttcagattgtttgagaccaaaatcacccaagtgttgcattttaccaaggacgtgaaagctgcggctaaccagatgcgaaacttcctggtgcgggcctcctgtcggctcaggctggaaccagggaaagagtatctcatcatgggactcgacggagcgacttacgatttagaagggcatcctcaatacctgctcgattctaattcctggatcgaggaaatgccctcagagagattgtgtaggtccacaagacagcgcgcggcctgcgcacagcttaacgattttctgcaagagtatggcacccaaggctgccaggtttag

SEQ ID NO: 88310 - DNA, 807 bp, Artificial Sequence
  derived and/or modified sequence
atgtgccccgaggacagcctgcaggtgcccctgaaggacgccaagtcttgcggactccaccagttgcttaggggtcccgaggtacagcttgtggctcattcaccctggctgaaagattctctcagccggacaaccaacattcaggggatcaatctattgttttcatcccgacgaggccatctgttcctgcagactgaccaacctatctataatcccgggcagagggtgcggtatcgtgtttttgcattggaccaaaagatgaggccttccaccgacactatcactgttatggttgagaatagccacggacttcgagtacgaaagaaagaggtttacatgccctctagcatctttcaggacgacttcgtgattccggatatatctgagccaggtacatggaagattagcgccagattctcagacggcctggagagtaactcaagcacccaattcgaagtcaagaagtatgtgttgccgaactttgaagtgaagatcactccaggcaaaccttatattctgacggtacccggccatctagatgagatgcagctagacattcaggcgcgctacatttatggcaaacctgtccagggtgtggcttatgtgaggttcggtctgctggacgaagacgggaagaagactttcttccgaggcctggagtctcaaacaaagctggtgaacggacagtctcacattagtttgagcaaagctgagttccaggacgctctggaaaaacttaatatgggaatcaccgacctccagggtctgcgcctttatgtggctgctgcaatcattgaatcaccatag

SEQ ID NO: 88311 - DNA, 5097 bp, Artificial Sequence
  derived and/or modified sequence
atgcggctgctgtggggcctgatctgggccagcagcttcttcaccctctctctacaaaagccaagactgctgctattctcaccaagtgtcgtgcatctaggagttccactgtccgtgggcgtgcaactccaggatgttccccggggccaggtggttaaggggtcagttttcctgaggaatccttccagaaacaacgtgccctgttccccgaaagtggattttaccctcagtagtgagcgggattttgccttgctttctctgcaggttcccctaaaggacgccaagagttgtggactgcaccagctactgcgcgggccagaggtacagttagtcgctcatagtccctggctgaaagatagccttagccgcactaccaacatccagggtatcaacctgcttttcagttcacggcgtgggcatcttttcctccagaccgatcaaccgatttataatcccggccagagggtcaggtaccgcgtgttcgcactggaccaaaaaatgaggccttcgacagacacgatcacagtgatggttgaaaattcacacggtttgcgagtccggaagaaggaggtgtatatgccctcttcgatctttcaggacgacttcgtcattcctgatatttctgaacctggcacttggaaaatttctgcaaggttctcagacggcttagaaagtaacagttcaacacagttcgaggtgaagaaatacgtgctgcctaactttgaggtgaagatcactcccgggaagccctacatcctcaccgttcctggccacctggacgaaatgcagctggacatccaggctagatatatttatggaaagccagtgcagggagtggcctatgtaagattcggattgcttgatgaagatgggaaaaaaacattttttagaggcctggaaagccagaccaagctggtgaacggccagagtcacatttctttgagtaaagctgagttccaggacgctctcgagaagctcaacatgggcattacggatctacaggggctgcggctatatgtcgctgccgcaatcattgagagtcccgggggcgagatggaggaggccgaattgactagctggtatttcgtgagctcaccttttagtcttgacctttccaaaacaaagcgacacctggtacccggcgcacccttcctactgcaggccctcgtacgcgaaatgtctggaagcccggcatctggcatccccgtcaaagtgtcagctactgtctcgtctcccggatccgtgcccgaggtccaagacattcagcagaatactgacggctctggacaggtttcgattccaatcattataccacaaactatctctgaattgcagctgagtgtatctgccggctccccccaccctgctatcgctcgtctgacagtggcggccccacctagcggtggaccaggcttcttgtctatcgaaagaccggactcacggccacccagggtgggtgacactctgaacctcaatttgcgtgctgttggcagtggagctaccttctcccactactactacatgattctttccagaggccaaatcgtctttatgaaccgcgagcccaagaggactctgacatccgtaagcgtgtttgtcgatcaccacctagcaccctccttctactttgtggccttttattaccatggcgatcatcctgttgccaactctctgagagtggacgttcaagcaggtgcctgtgaaggaaaactggaactttctgtggatggagctaagcagtacagaaatggagagtctgtcaaacttcacctcgagaccgacagcctcgccctagtggcgctcggagccttagacactgctctttatgccgctgggagcaagtcacataagcctctaaacatgggtaaggtgtttgaggccatgaatagttatgatctgggctgcggcccagggggcggcgactccgccttgcaggtcttccaggctgccgggctggccttctccgacggcgatcagtggactctgagcaggaagcgcctcagctgccccaaggagaaaactactagaaagaaacgcaatgtgaatttccagaaagcgattaacgaaaagcttggccaatatgcttccccaacagccaagcggtgttgtcaggatggcgtgacaagactgccgatgatgcgatcttgcgaacagcgcgcagctcgcgttcaacagcccgactgtcgtgaacctttcctgtcctgttgccagttcgccgagtccctccggaagaagtctcgcgacaaaggtcaagccggtctgcagagagcactggagatactgcaggaagaagatcttatagatgaggacgacataccagttcgatccttcttccctgagaactggctctggagagttgagacggtggaccgcttccaaatcctgacactttggttgcccgacagcttgacgacctgggaaatccacggcctcagcttgagcaaaacgaagggtctatgtgtggcaacccccgtacagttgcgggtgtttcgcgagtttcacttacacctgcgcctccctatgtcagtgcgcagatttgaacaacttgaactgaggccagtcctgtacaattatctcgacaaaaacttaactgtgagcgtgcacgtgtcacctgtggaggggctgtgtttagcaggcgggggcggtttagctcagcaagtgctggtgccagctggtagcgcccgccctgtggcgttttccgttgtgccgacagcagccgctgcagttagtctcaaggtagtggcccgtgggtcttttgaattcccagtgggggacgccgtcagtaaggtgctccagattgaaaaagagggggctattcacagagaagaactcgtgtatgaattgaaccccctggatcaccgcgggaggacactagagatccccggcaactccgaccccaacatgattccagacggagactttaactcgtatgtgagggtaacagcgagtgacccgctcgatactctgggttccgaaggagctctgtctccgggaggcgtcgcaagccttctgcggttaccccggggctgcggagaacagaccatgatctatctagctccaacgctggcagccagcaggtacttagataagacggaacaatggagcacactgccacccgagacaaaagatcacgcggttgacttgatccagaaaggctacatgaggatccagcagttcaggaaagcagacggctcttacgctgcttggctgagccgcgggtcctccacatggctcacagcgtttgtgctcaaagtactgtcgctggctcaggagcaggtcgggggcagcccagagaaactgcaagaaacaagcaactggttgctatcccagcagcaggctgatggatcttttcaggatctgagcccagtgatccaccggtctatgcaaggcgggctcgtcggaaacgacgagaccgtcgccctgaccgcctttgtgacgatcgccctccatcacggattagcagtctttcaggatgagggtgcggaacccctgaagcagagagtggaagctagcattagcaaagccaattcctttctgggggagaaagcgagtgccggactgctcggggcccacgctgccgctatcaccgcttatgcactaacattgaccaaggccccagctgatttgcgcggagtggcccacaacaatctcatggcgatggcacaggagaccggggataacctgtattggggatcagtcacaggctcccagagcaacgcagtaagtccaacccccgcccccagaaacccatccgaccccatgccacaagcccccgcgctgtggattgaaactactgcctacgccctcctgcatctcctgttgcacgaagggaaggccgaaatggccgatcaagccgctgcttggctgacgaggcaggggagcttccagggcgggtttcgttctacacaagataccgtcattgctctggacgccttgtcagcctattggatcgcctcccacactacagaagagaggggcttgaacgtgactcttagtagcactggcaggaatggttttaagtcccatgctctccagcttaacaacagacagattcgtgggttagaggaggagttacagttttccctgggttctaaaatcaacgtgaaagtgggggggaattctaaagggactctgaaagtgctaagaacttacaatgtgcttgatatgaaaaataccacctgtcaggacctgcaaatagaagtcaccgttaaaggtcatgttgaatatactatggaggccaacgaagattacgaggactatgaatacgacgaactccccgcgaaggacgacccagatgctccactccaaccagtgaccccactgcaattatttgaaggtaggcggaacagacgcagacgcgaagccccaaaattgacctccttatccgataggtacgtcagtcactttgagaccgaaggccctcacgtgctgttatatttcgattccgtccctacgtcacgcgagtgcgtggggttcgaagccgtccaggaggtgcccgtcggcctagtccagcctgcttccgccactctgtatgactactacaaccccgagcgcaggtgctcagtcttttacggcgccccctcaaagagtcgtctcctagcgactctctgcagcgcagaagtctgccagtgtgccgaagggaagtgccctcgacaaaggcgggccctagagaggggactgcaggacgaggacggatatagaatgaagttcgcctgctactacccccgggtcgaatacgggttccaggtcaaggttttacgcgaggactcgagggccgcgttccgactgttcgagacaaagattacacaggtgctccactttaccaaggatgtcaaggccgccgccaaccaaatgcgaaactttcttgtgagagcctcttgtcgactgaggttagagcccggtaaggagtatctcatcatgggactggatggtgctacctatgaccttgaaggtcacccacagtatttgctggattctaactcatggatcgaggagatgcctagcgagagattatgtcggagtacccgccagagagctgcatgtgcccagctgaacgacttcctgcaggaatatggtactcagggctgtcaggtatag

SEQ ID NO: 88312 - DNA, 813 bp, Artificial Sequence
  derived and/or modified sequence
atgtgccccgaggacagcctgcaggtgcccctgaaggacgccaagtcttgcggccttcaccagctccttagagggcctgaagtgcaattggtcgcccattccccgtggctgaaagattcgctaagccgaacaactaatatccaggggatcaatcttctcttcagctctaggcgcggacacctgtttctccagaccgaccagccaatatacaacccagggcaaagagtgcgttacagagtgtttgccctagaccagaaaatgaggccttctacggacaccattaccgtcatggttgaaaactctcacggcctccgcgttcgcaagaaggaggtctacatgccatccagcatctttcaggatgactttgtgattccggacatttcggaacccgggacctggaagatctccgcccgattttccgacggacttgaaagcaatagcagcactcagtttgaggtgaaaaagtacgtgctgccgaactttgaggtcaagattacccctgggaagccgtatatactaactgtaccaggacacctggacgagatgcagctcgatattcaggctaggtacatctacggcaaaccagttcagggagttgcatatgtacggtttggtctgctcgacgaggacggtaagaaaaccttttttagaggactagagtctcagaccaagttagtgaatggccagagccatatctccctctctaaggcggagttccaggatgcattagaaaagcttaacatgggcatcaccgacctccagggccttcgcctatatgtggcggcagcaattattgagtcgcctggaggatag

SEQ ID NO: 88313 - DNA, 5097 bp, Artificial Sequence
  derived and/or modified sequence
atgcggctgctgtggggcctgatctgggccagcagcttcttcaccctcagcctccagaagcctcgattgttgcttttctcaccttccgtggtgcacttaggagttccactgtcggtgggggtacagctgcaggatgtgccccgagggcaggttgtgaaaggatctgtctttctccgaaacccctccagaaataacgtaccgtgctcacccaaggtggactttacgctcagttctgagcgcgattttgcactgcttagcctgcaggtccctctgaaagacgccaagtcttgtggtctgcaccaactattgcgcggtcctgaggtgcagctcgtggcccactctccctggctcaaagatagcttaagcaggacgactaatattcagggaatcaatctactgttttcgtccagacgcggtcatctctttttacagacagatcaacctatatacaatcccgggcagcgcgtccgctacagggtcttcgcactggaccagaaaatgcgtccaagcacagataccatcactgtaatggtggagaattctcatggattgcgcgtccggaaaaaggaagtgtatatgccctccagcatcttccaggatgactttgtgatcccagatatatccgaaccaggtacctggaagatttctgcgaggtttagcgatggtctggaaagcaactccagtacacagtttgaagtgaagaagtacgtcctccccaactttgaagttaagatcaccccagggaaaccatacatactcaccgtccctggccatctggacgaaatgcagcttgacatccaggcacgttacatctatggaaagccggttcaaggagtcgcatacgttaggtttggcctgctggacgaagatggaaaaaagacttttttcagaggcctggaatcacagacaaagcttgtaaacggccagtcacacatcagcttgtcgaaagccgagtttcaggatgcccttgaaaagctgaatatggggataaccgatctgcaaggcctgcgattgtacgtggctgccgctatcatcgaatcacccgggggagaaatggaggaagcggaacttacctcctggtatttcgttagttctccgttctctcttgacttgtctaagacaaagcgacacctcgtacccggtgccccgtttctcttgcaggctctggtacgggagatgtccggcagccctgctagtgggatccctgtgaaggtgtcagcaacagtctccagcccggggtctgtgcccgaggtccaggatattcaacagaacacagatggcagcggccaggtgtctattccgatcataattccacagacaatatctgagctgcagcttagtgtctccgcaggatctccgcacccagctatcgctcgtctgaccgtcgccgctccgccatcagggggcccaggctttcttagtatagaacgccccgattctaggcccccacgggtgggcgataccctgaatctcaacctgcgcgccgttgggtcgggcgccacatttagtcactactattacatgatcctgtccagaggacaaatagtcttcatgaatcgcgaaccaaagagaaccctcaccagcgtgtcggtgttcgtagatcatcatttggcaccatccttctacttcgtcgccttctactaccatggagatcaccccgttgcaaactcacttcgggtggacgtccaggctggcgcgtgcgaaggcaaattagaacttagcgtggatggggccaaacaataccggaatggcgagtccgtcaagctgcatctggaaaccgattccctcgcactcgtcgctttgggcgctctagacacagcactctacgcagccgggagtaaatcccacaagccattgaacatgggtaaggtttttgaggcaatgaactcctacgacctgggatgtgggccaggtgggggagacagcgccctgcaggtgtttcaagcagcagggcttgccttcagcgatggcgatcagtggactctgtctcggaagcgcctcagctgcccgaaagaaaagacgactagaaagaagagaaacgtcaacttccagaaggctatcaatgaaaagctaggtcaatacgccagcccgaccgcaaaacggtgctgccaggacggggttacaaggcttccgatgatgaggtcatgcgagcagcgggctgctagggtccaacagcctgattgcagggagccttttttgtcatgttgtcagtttgcggaatcgcttcgcaagaagagccgggacaaaggccaggcaggcctgcagcgcgccttggaaatactgcaagaagaagacctaattgatgaagatgacattcctgtacgttccttctttccagaaaactggctgtggcgcgtcgaaactgtggataggttccaaatccttaccctctggctgcccgattcactgaccacctgggagatccatgggctgtcgctctcgaagaccaaaggcctttgcgttgctactcccgtacagctgcgtgtcttccgggagttccatctacacctacggctacctatgtctgtaagacggttcgaacaactggaactgcgacccgtgctgtataattacttagacaagaatctgacggtgtctgtgcatgtgtcacccgttgagggtctgtgtctggccgggggagggggacttgcacagcaagtgttggttccagcaggcagcgcacgcccagtagccttttcggttgttcctaccgctgccacagcagtgtcattgaaagtggtggcccggggcagttttgagttccccgtcggcgacgcagtgtcgaaagtacttcaaatcgagaaggagggcgccattcatagggaggaactggtgtacgaacttaatcccctagaccacaggggtaggacccttgaaatccccggaaatagcgacccaaatatgatccccgacggcgactttaatagttatgtgcgagtgactgcttcggacccactggacacactgggcagtgagggagcgctgagtccaggcggcgtcgcttccctgctacgcctgccccgcgggtgcggggagcagaccatgatctatttggcacccactctggctgctagccgttatctggacaaaaccgaacagtggtctaccctccccccagagaccaaagaccatgccgtggatctgatccagaaaggttacatgaggatccagcaatttcggaaggcagacgggagctacgcggcgtggctgtctagggggtcctcaacctggctgacggcattcgtgttgaaggtgctgtccctggcccaggaacaagtagggggcagcccagagaagctccaggaaacatctaactggctcctcagccagcagcaggccgatggcagctttcaagacctttcgccagttatccatcgctccatgcaaggaggactggttggcaatgacgagacagtcgctctaaccgcctttgtgactatagctctccatcatggtctagctgttttccaagatgagggggcggagcctctgaaacaacgggtggaagccagcatctctaaggcctcgtcgttcctgggtgaaaaggctagtgcaggactgctgggcgcgcacgctgccgcgattacagcttacgcgttgaccctaacaaaggcgccggcggacctccgcggagttgcacacaataacctgatggcgatggcccaggaaacaggtgacaatttatactggggcagcgtcactgggagtcagagtaatgcggttagccccacccccgctccaaggaatccctccgacccaatgccacaggcacccgccctgtggatagagacaacagcgtacgccctcctccaccttctcctgcacgagggaaaggccgagatggccgatcaagcagctgcatggcttacccggcaggggagctttcaaggcgggtttcgctccacacaagatactgtgatcgccctagacgccctcagcgcttactggattgcctcacacacaactgaggaaaggggccttaatgtgacactgtcctcaacgggcaggaacggctttaaaagccatgccttacagcttaataataggcagatcagaggactggaagaagagttgcagttcagcctgggaagcaaaattaatgtgaaagtgggggggaattcaaaaggtaccctcaaagtgttgcgcacgtataatgtgctcgatatgaagaacaccacatgccaggacctacagatcgaggtgactgtcaagggacatgtggaatacactatggaagccaacgaggactacgaggactacgaatacgatgagctgccagccaaggacgaccccgatgcacccttacaacccgtcacacccctgcagctgttcgagggacgtaggaacagaaggaggcgtgaggctccgaagttaactagcttgagcgacagatatgtctcacacttcgagacagaaggaccacacgtgctgttgtatttcgattccgttcctaccagtagggagtgcgtgggcttcgaagccgtgcaggaggtgccagtcggccttgtgcagcccgcgtccgccaccctgtacgactactataacccagagagacgctgttctgtgttctatggagcacccagcaaatcccgccttctggccacactgtgcagtgcagaagtatgtcagtgcgccgagggtaaatgcccgcgccagcgtagggctctcgagcgcggattgcaggacgaagacggttaccgcatgaagttcgcctgctactaccctagagttgagtacggcttccaagtgaaggtcctgagggaagattccagagcagccttccgcctgttcgagaccaaaatcacgcaggttcttcatttcaccaaggacgtcaaagcggcagccaaccagatgaggaacttcctggtgcgggccagctgtcgcctgaggttggagcccggaaaggagtatctgatcatgggacttgatggagcgacctatgacctcgaaggacacccgcagtacctcctggattctaactcatggatagaagaaatgccctccgaacggctctgcaggtccacaaggcagcgcgccgcatgtgcgcagctcaacgattttctgcaagaatatgggacacaagggtgtcaagtctag

SEQ ID NO: 88314 - DNA, 5097 bp, Artificial Sequence
  derived and/or modified sequence
atgcggctgttatggggcttgatttgggctagctcatttttcacactgagccttcagaagccacgtctcctcctcttttcaccgtccgtggtgcacctgggcgtaccactctccgtgggggtgcagctgcaggatgtgccccgtgggcaggtggtgaaggggtctgtttttctacgtaatccaagtaggaacaacgtcccctgtagtcccaaagtagacttcaccctgagctctgagcgcgactttgccctgttgagtctacaggttccactcaaggatgctaagtcttgcggattgcatcagctgctgcgtggccctgaggtgcagctggtcgcccattccccctggctgaaggacagtctgtctcggaccaccaacattcagggaatcaatctgctgttttcatctaggcggggacacctttttctgcaaaccgatcagcctatatataatcccggacagagagtgcggtacagggttttcgccctcgatcagaagatgaggccatcaactgatacgatcacagtgatggtcgaaaactcacatggtctgcgagtgcgcaaaaaagaggtctacatgcccagtagcatcttccaggatgactttgtcattcctgacatttcagaaccaggaacatggaagatcagtgctagattctccgatggactggagtcaaatagttctacccagttcgaagtaaaaaagtatgtgctccctaatttcgaagtaaagatcacacctggtaaaccgtacatcttaaccgtccctggtcacctggatgaaatgcagctagatatccaggctcgctacatctacggcaaacccgtccagggtgtggcctacgtaagatttgggttgctggatgaggatgggaagaagaccttcttccggggtctggagagccagacaaaacttgtgaacggccaatcccatatttctctgtccaaggccgagttccaggatgccctggagaagttaaacatgggcattacagacttacagggcctgagactctacgtcgcggctgccatcattgagtctccaggcggagaaatggaagaggccgagctaacgtcctggtatttcgttagctctccgttttccctcgatctaagtaaaacaaagcggcatctagtgcctggggctcccttcttattgcaggctctggttcgggagatgtctggctctccagcttcgggaatcccggtgaaagtgtctgccacggtttcctcacccggatccgtccctgaggtacaggacatacaacagaatactgatgggtctggacaagtctccatccctataatcattccgcagacaataagtgagctccagctatcggtgtctgcgggatcaccccatcccgctatcgcacggttgacggttgccgctcccccttccggcggtcctggatttctatcaatcgagcggccagattctcgacccccaagagtcggggatacgttgaatttgaacctcagagcagtgggctcgggagcgacattcagccattattactacatgattctttccaggggtcagattgttttcatgaatcgtgaacccaaaagaacactgaccagcgtgagcgtcttcgtggaccaccacctggccccttctttctattttgttgcattttattatcatggagaccaccccgtggctaactccctgcgcgtggatgtccaggcaggcgcttgcgagggcaaacttgagctatccgtggacggtgctaagcagtacaggaatggagaatcagtgaaattacacctggaaaccgacagcctcgctctggtggccctaggcgcactggatacggccctatacgctgcaggtagcaaatcacataaacctctcaacatgggcaaggtgtttgaagctatgaatagctatgaccttggctgcggccctgggggtggtgactccgccctgcaggtttttcaagcggctgggctggcattttctgatggtgatcaatggacgctcagcagaaaacggctctcatgtcctaaggaaaaaaccacgagaaagaagaggaacgtcaattttcaaaaagcaattaacgaaaaactgggtcagtacgcctcccctactgctaagcgatgctgccaggacggcgtgacacgactaccaatgatgaggtcatgcgagcagcgcgctgctagggtccagcaaccagattgtagggagccgtttctttcatgctgtcagtttgcggagagcttacggaaaaagtctcgggacaaggggcaagccggtctgcagcgagccctggagattctgcaggaagaggacctcattgatgaagatgatatacctgtgcgttctttcttccccgagaattggctatggagagtggaaacagtcgacaggtttcagattctcactctgtggctacccgattcgctgacgacctgggagattcacgggctgtccttgagcaagaccaaagggctgtgcgttgccacccctgttcagctacgcgtattcagggaattccatcttcatctccgcctgcccatgagcgtacggcgatttgaacaactggaactcagacctgtcctgtacaactatctggataagaatctaaccgtaagcgtgcatgtgtcccccgtagaggggctgtgcttggccggaggcggtggcctggcccagcaggttcttgtccctgccggatccgcacgccctgtggcctttagtgtagtgcccaccgcagctgcggctgtgagtctgaaggtcgtggctagagggagcttcgaatttccggttggggatgcagtgagcaaggtgctgcagatagagaaggaaggcgcaatccaccgggaggagctcgtgtacgaacttaatcccctagatcacagaggcagaactctggagattcccggtaatagtgatccaaatatgatcccagacggtgatttcaattcttatgtgagggtaaccgctagcgacccgcttgatacgctgggcagcgagggggctctgtctcccggtggcgtggccagtctactccgcctcccacgcggatgcggtgaacagaccatgatctacttagccccaacccttgccgcttctaggtacctcgataaaactgaacaatggtctaccctgccgcctgagacaaaagatcacgcagtggacttgatccaaaagggttacatgcgcattcagcagtttaggaaggctgatggatcttacgcagcctggctgagcagagattctagtacatggctgaccgcattcgtacttaaggtgctgtcgctcgcacaggagcaggttggcggaagccccgaaaagctgcaggaaacctccaactggctgctatctcaacaacaagccgatggaagcttccaggacccatgccccgtgctggatcgatcaatgcagggaggactggtgggtaatgatgagacagtcgctctaacggcttttgttaccattgccctacatcacggactggcagtgtttcaggatgaaggagccgagccactgaagcagagggtggaggcatcaatctctaaagccaacagttttcttggcgagaaggcgtcagccggactgctaggtgctcatgctgctgccattacggcctacgcactgaccttaacaaaagcgccagttgacctgctgggagtcgctcacaacaatttgatggcaatggcccaggaaacgggcgacaatctttactggggctccgtcacgggctcgcaaagtaacgctgttagtcccactcctgctcctcggaatccatcagatcccatgccacaggccccagccctgtggatcgagacgacagcgtatgcgttgctccatctgctcttacatgagggaaaagctgagatggctgatcaggcttccgcttggcttacacgccagggctcttttcagggcggatttcgtagcacacaagacaccgtgattgccctggatgccctttcagcctattggattgccagtcataccactgaagagcgaggcctgaacgttacgttgtcgtctactggtcgcaacggctttaaaagccatgccttgcagcttaataaccgacagattcggggtctggaagaggaactgcaatttagcctgggctccaagatcaatgtaaaagttggcggaaactctaagggaaccctcaaggtactgaggacatataatgtacttgatatgaaaaatacgacgtgccaagatctgcagattgaggttacagtgaaaggccacgtggaatataccatggaggccaatgaggattacgaggattacgagtatgacgagctgcccgcaaaagacgacccagacgcccctcttcagcctgttacccctctgcagctttttgaagggagacgcaatcggaggcggagagaagccccaaaattgaccagtctttcagaccggtatgtgtctcacttcgagactgagggaccccacgtgctgctgtacttcgactccgtgcccacatctagagagtgtgtgggcttcgaagccgtccaagaagttcccgttggactggtgcagccggcatctgcaactctgtacgattactacaacccagagcgacgctgctcggtcttctatggagcaccatccaagagccgcctgctggccaccctgtgctctgctgaggtctgccaatgcgcagaaggcaaatgccctaggcaacgcagagccctcgagagggggctccaggacgaagacggctatcgtatgaaatttgcttgttattatcccagagtcgagtacggtttccaggtcaaggtgttacgcgaggactctcgcgctgccttcaggctgttcgagacaaaaataacgcaggtgctgcattttaccaaggacgtgaaggccgctgcaaaccaaatgagaaacttcctggtccgggcaagctgcagattaaggttggaacccggtaaagagtatctgattatgggtttagacggcgcaacctacgatctagaaggacatccccaataccttctggacagtaacagttggatcgaagaaatgccctctgaacgcctgtgtcggtccacacggcagagagccgcatgcgcccagctgaacgattttcttcaggagtatgggacccaaggatgtcaggtctag

SEQ ID NO: 88315 - DNA, 813 bp, Artificial Sequence
  derived and/or modified sequence
atgtgtccggaggactcactccaggtgccactgaaagatgccaaatcctgcggcctccatcagctcctccggggaccagaggtacagctggtagcccattccccgtggctgaaggattccctcagtaggacgacgaacattcagggcatcaatctgcttttcagcagcagacgaggtcacctgtttctgcagacagatcaacctatctataacccaggtcagcgtgtccgatacagagtcttcgcactggatcagaaaatgcgaccgtccacagatactatcaccgtgatggtagaaaactcccacggcttacgggtccgaaagaaggaagtctatatgccttcctcgatcttccaggacgatttcgtgatccccgacatttcagagcctggtacctggaagatctctgccagattctcagacggcctcgagtctaattccagcactcagttcgaggttaagaaatacgtgctgcccaactttgaagtgaaaattactcctgggaaaccctacatcttgaccgtgccaggccatctcgatgagatgcagctggatatccaggcccgttacatatacgggaagccggtacagggcgtggcatatgtcaggttcggacttttagacgaagacgggaagaaaacctttttcagaggccttgaatctcagaccaagctggtgaacggacagagtcacatatctttatccaaagcagaattccaagacgcgctggagaagctcaacatggggattaccgaccttcaggggctacgcctctatgtggctgcagcgatcattgaaagtccagggggatag

SEQ ID NO: 88316 - DNA, 5097 bp, Artificial Sequence
  derived and/or modified sequence
atgagactcctatgggggttgatttgggcttcaagtttctttacactgtctcttcagaaaccccgtcttctgttattctcgcctagcgtggtccacttaggggtaccattgagtgtcggcgttcagctccaggacgtgcctaggggccaagttgtgaagggcagtgtgtttctgagaaacccttcaagaaacaacgtcccgtgtagccctaaagtagacttcacacttagcagcgaacgcgattttgctttgctgtctctgcaggttcctctcaaagacgctaaaagttgcggactgcatcagctgttgcgtggtcccgaggtccagctcgtggcgcattccccgtggctaaaggactctctgagcagaacaacgaatatccagggcattaatcttctgtttagcagcaggaggggccatctgttcctgcagactgatcagcccatctacaaccccggacagcgagtccgctaccgggtcttcgctctggatcagaaaatgcgcccatcaaccgataccatcactgtcatggtggagaactctcacgggctcagagttagaaagaaggaagtctacatgcctagttccatcttccaagatgatttcgtcatcccagacatcagcgagcctgggacctggaagatttccgccagattctccgatggattagagtcaaattccagtacacagtttgaggtaaaaaagtatgtgctgcctaatttcgaagtgaagattaccccaggcaaaccctacatactgacagtgcccggacacctggatgagatgcaactggacatacaggccagatatatatacggaaagcccgttcagggtgttgcatacgtcagatttggattgctggacgaagatggtaagaagacctttttcaggggactggaatcacagactaaactcgtgaacggtcaaagtcatatctccttgagcaaggcagagttccaagatgcactggagaagctgaatatgggcatcacagatttacagggactcagactctacgttgctgcagccattatcgagtacccaggcggagaaatggaggaggctgaactcacatcttggtactttgttagcagtccattctcactggatctgagtaaaactaagcggcatctggtccctggcgcacccttcttgttacaagctctggtcagggagatgtccgggagccccgcaagtggaattcccgtgaaagtgagcgcaactgtgtcttcccctgggtccgtacccgaagtgcaggacatccagcagaatacagacggaagcgggcaggtctctatccccataatcataccccagacaatcagcgagctgcagctgtcagtatccgccggatcaccccatccggcaatcgcacgactcactgttgccgctccgccatctggagggcctgggttcctgagcattgaatggccagatagtaggccccctcgggtaggggataccctcaacctgaacctgcgagctgtcgggtcgggagccacgttttctcattattattacatgattctctctcgtgggcagatagtgttcatgaatcgcgaacccaagaggacactgacttctgtatccgttttcgtggaccaccatctggccccatctttctacttcgtcgccttctactatcatggggaccatccagtcgccaactctctcagagtggacgtacaggcaggcgcttgcgagggaaaactcgaattatccgtggatggagccaaacagtaccggaatggcgagtccgtgaagctgcatctggagaccgatagtctggccctagtggccctcggggctctagatactgccctgtacgccgcaggtagtaagtctcacaagcccctgaatatgggtaaggtgttcgaagccatgaatagctacgacttaggatgcggcccaggcggtggggactcggccctgcaggtgtttcaggccgcagggctggctttctcagacggcgatcagtggacactgtcccggaagaggctgtcctgccctaaagaaaaaaccactagaaaaaaaagaaacgtgaattttcagaaagctatcaatgaaaagcttggccagtacgcttccccaacagccaaacgctgctgccaggacggggttactaggctgcctatgatgaggtcctgcgaacaacgcgctgctagagtgcagcagcccgattgtcgcgagccttttttgtcctgttgtcagtttgcagaatctctgcgcaagaagagtcgcgacaaggggcaagctggattgcagcgcgctcttgaaatattgcaggaggaagatctcattgatgaggacgacatcccagtcaggtcattcttcccagaaaattggctctggagggtggaaaccgtcgatagattccagatcctgacactttggctgcccgattccctgaccacctgggagatccacggcctcagcctgtctaagactaaggggctttgtgtggcaacgcctgtgcagctgagggtttttagggagtttcacctccatctgcgtttgcccatgtctgtacggaggtttgagcagcttgagctgaggcctgtgctttataattacctggataagaacctcaccgtgtccgtgcacgtcagtcctgtagaaggcctctgtttagcaggtggtggcggtctggcacaacaggttctagtgcctgcaggatctgcaaggcccgtcgccttctccgtggtgcccactgctgctgctgctgtgagcctaaaagttgttgccaggggatcattcgagttccccgtgggagacgccgtgtctaaggtgctccagatagagaaagagggcgctatccatcgggaggagctggtgtatgaattgaaccctctggaccataggggcaggacactcgagatcccaggaaacagcgatccaaacatgatacccgacggcgatttcaattcctacgttagggtgacagccagtgaccctctggacactcttggatcagagggcgcactgagcccgggtggcgtggccagtcttctgagactgcctcgaggatgtggagagcagaccatgatttatctggcacctacgctggcagcctcccgctatctggacaagaccgaacagtggagtaccctgcccccagagactaaagatcatgcggtggatcttatccaaaagggttacatgaggatccagcaatttcggaaggcagatggttcatatgccgcatggctgagccgtgattcatctacatggttgactgcctttgtgctgaaagtcctctctctcgcccaagagcaggtgggcggttcacccgagaagttacaggagacatcgaactggttgctgtcccagcaacaggcagatggaagcttccaagatccttgcccagtcctcgatcggtcaatgcaaggagggctggtgggaaatgacgagaccgtggccctgacagcctttgtgaccatagctttgcaccatgggctagccgtgttccaggacgagggcgctgagccccttaagcagagggtagaggcaagcatctcaaaggcaaactcttttttgggcgagaaagcatccgctggcctgcttggagcccacgctgcagcaattactgcttatgctctgacactgacaaaagcacccgtcgatctgcttggcgtggcgcataataaccttatggccatggcacaagaaaccggagacaatttgtactggggctccgttacaggcagccagagtaacgctgttagccccactcctgctccgagaaacccaagcgatcccatgccccaggctcccgcattatggatcgagactacagcttatgctctcctccacttgcttctgcatgaggggaaagccgaaatggctgaccaggctgcagcatggctgactcggcaggggagtttccaaggaggtttccgcagcactcaagacaccgtaattgccctggacgcactctcagcctattggatagcgtctcatactacggaagagaggggactgaacgttacactgtcctcaacaggacgaaacggctttaagtcgcatgctcttcaactcaacaaccgccagatccggggactcgaggaagaattgcagttctccctcggttcaaagattaatgttaaggtaggcggtaattcaaagggtactcttaaagtcctgaggacctataacgtgttggatatgaagaatacaacatgccaagacttgcaaattgaagtgactgtgaaaggccatgtcgagtatacaatggaggctaatgaagattatgaggactatgaatacgacgaacttccagctaaagatgaccctgacgcacccctgcagcccgtcaccccgctgcagctgttcgagggccgtaggaatcgcagacgtagagaggcaccgaaactgacgtcattaagtgatcgttacgtgtcccatttcgaaaccgaaggaccccacgttctgctgtacttcgatagtgtacccactagccgcgaatgcgtcgggtttgaagcagtgcaggaggtacctgtcggccttgttcagccagcatccgctaccctgtatgattattataaccctgagaggagatgttcggttttctatggcgcaccctccaaatcccggctgctggctacgctatgttcagccgaggtgtgccagtgcgctgaaggtaaatgcccgcgacagagaagagctctggaacgtggattgcaagacgaagacggctacagaatgaaatttgcatgttactatcctcgcgtggaatacggctttcaggtaaaagttttgcgggaggacagcagagcagcttttcggctgttcgagaccaaaattacccaggtgctccacttcaccaaagacgtgaaagcagctgccaaccaaatgagaaactttctggtgcgtgcttcatgtagattgagacttgaacctggcaaagagtacctgataatgggtctggacggggctacatatgacctggagggccaccctcaatacctcctcgactctaattcttggatcgaagaaatgccatcagaacgcctgtgccgctccacacgacagcgagccgcttgtgcacagttgaatgatttcctccaggaatatggtacacaggggtgtcaagtttag

SEQ ID NO: 88317 - DNA, 5097 bp, Artificial Sequence
  derived and/or modified sequence
atgcggcttctctggggcctcatttgggcctccagctttttcaccctctcattgcagaagcccagactgttgctgttttcgcctagcgtggtccacctaggggtacccctctcagtcggggtacaactccaggacgtaccgagaggccaggtggttaaaggctctgtgttccttagaaaccccagcaggaataatgtaccgtgctctccaaaagtggattttaccctaagttctgagagagactttgcgctgttatcactacaggtgccactgaaggacgctaaaagctgcggactgcatcagcttctgcggggacctgaggttcagctagttgcccactccccttggctgaaagatagcctaagtcgaactacaaatattcagggtatcaacctgttatttagttcccgacgcggacacttgtttctgcagaccgatcagcctatatataatccaggacagcgggtgcgctaccgcgttttcgcactcgatcagaagatgaggccttccacagacactataaccgtgatggttgagaatagccacgggttgcgcgtaaggaagaaggaggtatacatgccatcctccattttccaggacgactttgtaatccctgacatttccgaacctggaacctggaagatttcagcacgctttagcgatggacttgaatctaatagttctacacaatttgaagtcaagaagtacgtgctacccaacttcgaggtgaagatcacccctggaaaaccctatattctcaccgttcccggacatctcgacgagatgcagctagacatacaggcaagatacatatacggaaagccagtacagggggtggcttacgtgcgctttggccttctggatgaggatggcaagaagacattcttccggggattggagtctcaaacgaagttagttaacgggcaatctcacattagtttgtccaaggctgaattccaggacgcactcgaaaagctcaacatgggtatcaccgatctccaagggttaagactgtatgtggcagctgcaattattgagagtccaggaggtgaaatggaagaggcggaacttacttcttggtactttgtctcatcacctttctctctggatctttcaaaaaccaagcggcatttggtgcccggagcccctttcttactgcaagctcttgtgagagagatgtcaggctctccggcaagcgggattcccgtaaaggtgtctgcaacagtctcctccccgggatccgttcctgaggttcaggacatccagcaaaatacggatggctctgggcaggtgagcattccgatcattatcccgcagaccattagcgaacttcagctgagcgtctctgcgggatctcctcatccggctattgcccgactgactgttgccgcacctcctagcggagggcctggatttctttccattgagcgcccagattccaggccccctcgggttggcgacaccctcaacttaaacctgagagcggtgggttccggcgcaaccttctcccattactattacatgattctttcccgtggtcaaattgtcttcatgaatcgggagccaaagcgaaccctgaccagtgtctctgtgtttgtggaccaccatttggctccgtcattttatttcgtggccttttactaccatggcgaccaccccgtggcgaatagcttgagagtggatgtccaggccggtgcatgtgagggcaaacttgaactgagcgtggacggcgcaaagcagtacaggaatggtgagtccgtgaagctccaccttgaaacggactccctggcccttgttgctcttggagctctggacaccgcactgtacgccgcaggttccaaaagtcacaagccactgaacatggggaaggtgttcgaagccatgaacagttacgatttgggctgtggacccggaggcggtgactccgctctgcaggtgtttcaggctgctggtctggctttttcagatggggatcaatggactttaagcagaaaacgattgagctgtccaaaggaaaagactacacgcaagaagcggaatgtaaactttcagaaagccattaacgagaaactcgggcagtacgccagccccaccgccaagcgttgctgccaggatggggtcaccagattgcctatgatgaggagctgtgagcagagggctgcaagagtgcaacagccagactgccgcgaacctttcctgtcttgctgccagtttgccgaatccctgagaaaaaagagcagggataagggacaggctggcctgcagagagccctcgaaattttgcaggaagaggaccttatagatgaagatgacattccagtccgatcctttttcccagagaactggctgtggcgggtcgaaaccgtcgaccgctttcagatcttgactttgtggctgcctgacagcctcactacctgggagatacacggattgagtctgtcgaaaacaaagggactgtgcgtcgccacaccagtccagctgagagtgttccgggagtttcatctgcacctacggctgccaatgagcgtgaggcgattcgagcagctggaacttcgtcctgtgctctataactatctggacaagaatctgacagtgtctgtccacgtttccccagttgagggtctctgcctggcagggggtggaggactggcccagcaggtgctggttcctgccggaagcgctagacctgttgcttttagcgtggtgccaaccgctgctgcggcagtctctctcaaagtagttgcaagaggatcttttgaattccccgtgggggatgcagtgtccaaggtgttacagattgagaaagaaggcgcaatccaccgcgaggaactggtgtacgaactcaatcctcttgatcaccgaggtaggacccttgaaatcccaggaaacagcgacccaaacatgattccggatggcgatttcaactcatatgtcagagttactgcttccgatccactggacaccctcggctcggagggcgctctctcccctggaggcgtcgcgtcactactgagacttccgagaggctgcggggagcaaactatgatctacctggctcccaccctggccgctagtagatatctggacaagacagagcagtggagcaccctgccacctgaaactaaggatcacgcagtagacctcattcagaaggggtacatgcgcatacagcagttccgtaaagctgatggttcatacgccgcatggctgagtagggactcctcaacttggttaaccgctttcgtccttaaggtgctatcactcgcccaagaacaggtgggtggtagccctgagaagttgcaggaaacaagtaattggctcttgtctcagcagcaggccgatggatcatttcaggacccatgccccgtgctggaccggagcatgcagggtggcctggtaggcaatgatgagacggtcgcacttactgcgtttgtcacaattgctctccaccatggcctcgctgtatttcaagacgagggcgctgagccactgaaacagcgcgttgaggccagcatctctaaagcttcgtcattcttgggcgagaaagcttccgccggattacttggggctcatgcagccgcaattactgcttacgctcttactctgaccaaggcccctgtggatctgctgggagtcgcccataataacctcatggctatggctcaggaaacgggcgataacctctactggggatccgtcaccgggagtcagagcaacgcagtttctccaacacccgcaccaaggaatccctcagatcctatgccccaggcacctgctttatggatcgagaccacagcatatgcactgcttcatctgctccttcacgagggaaaggcggaaatggccgaccaggccgcagcttggcttactcggcaggggtcatttcagggaggcttccgcagcacccaagacaccgtgatcgccctggatgctctgagcgcttattggatcgcttcccatactaccgaagagcgcggactgaatgtcaccctgagctcaacgggccgaaacggctttaaatcccatgccctgcagctcaacaaccgacagattcggggtctggaggaagagttgcagttttcactcggaagcaaaattaacgttaaggtaggcggtaacagcaaaggaactctgaaggtactgcgtacatataacgtgctggacatgaaaaataccacttgccaggacttacaaatagaggtgaccgttaagggacatgttgagtatacaatggaggccaacgaggactatgaggactatgaatatgacgaacttccagccaaagacgaccctgatgcacccctacagccggttacccctcttcagctgtttgaggggaggcgcaatagaagaaggcgcgaagcccctaaacttacctccctgtccgataggtacgtttcccacttcgagaccgaagggccacatgtcctgttatactttgacagcgtgcccaccagtagggaatgcgtgggttttgaagccgtgcaggaggtgccagtgggcttagtgcagcctgcatccgcgaccctgtacgactactataaccccgagcgtaggtgcagcgtcttctacggagcaccgtccaagtcacggctgctggctacactgtgctctgccgaggtgtgccagtgtgccgaaggaaaatgtcccaggcaaagacgggcactcgaaagaggcctccaagacgaggacgggtatagaatgaagttcgcttgttactacccccgagtggagtacggctttcaggtcaaggtcctgagggaagatagtagagcagctttccgactcttcgagactaaaattacccaggtgctgcactttacaaaggatgtcaaagccgctgcgaatcagatgcgaaattttctcgtcagggcgtcctgccgactgagacttgaaccgggaaaagaatacttaattatgggtttagacggggcaacttacgacttggaggggcatcctcagtacctgttggattcaaattcatggatcgaagagatgccctcagagcggctgtgtaggtctacccgacagagagcagcttgcgcacagctcaatgattttctccaggagtacggaacacaggggtgccaggtctag

SEQ ID NO: 88318 - DNA, 5097 bp, Artificial Sequence
  derived and/or modified sequence
atgcggctgctgtgggggttgatctgggcaagcagtttctttaccttgtcccttcagaagccaaggctactgctcttttctccgtcagtcgtccaccttggtgtgccactgagcgtaggggtgcaacttcaggatgtgccaagggggcaggtggtcaaaggttcagtctttctcagaaacccttctcgcaacaatgtgccatgctctcccaaggtggattttaccctgtccagcgagcgcgattttgcccttctgtcattgcaggtgccactgaaagacgctaaatcttgtggcctgcatcagcttctacggggacccgaagtgcaacttgtcgcccacagcccatggcttaaagattctctatcacggacaacaaatatccagggcattaacttattgtttagctccagaagaggccatctcttcctccagacggaccagcctatttacaatcctggtcagagggtgcgctaccgcgttttcgctctggaccaaaaaatgagaccctctacggatactatcaccgtgatggttgagaactctcacggcctccgagttcgcaagaaagaggtctatatgccttctagcatattccaggacgatttcgttatacccgatatcagtgaaccaggcacttggaaaatttccgctcgtttctcagacggcttggaaagtaatagttcgactcaatttgaagtgaagaagtacgttttaccaaattttgaggtgaaaatcacgcctggcaagccctacattttaacggtgcccggtcatctggacgagatgcagctcgatatccaggcgagatacatttatggcaagccggtgcagggcgttgcgtatgttcgcttcggccttctggacgaggacggtaagaagacattctttaggggcctggaatcacagactaagctggttaacggtcaatcccacataagtttatccaaagcggagtttcaagacgctctggagaagctgaacatgggtattaccgacctccagggacttcgtttgtacgtggcagcggctattatcgagtaccccggaggtgaaatggaagaggcagagctgacaagttggtactttgtttcctcccctttttctttagacttgtctaaaacaaaaaggcatctggtccctggtgcccctttcctcctccaagcgctggtacgggaaatgtcaggttctcctgcttctggaatccctgtgaaagtgtcagcaacagtaagctcaccaggctctgtgcctgaagtgcaagatattcagcagaacacagacgggtctggccaggtatccatccctatcatcattccccaaactataagtgagttgcaactttcagttagtgccggaagccctcatccagcgatcgcacgcctcaccgtggctgcccctcctagtggcggaccagggttcctctctatagagcggccagactcccggcctcctagagtgggggatactcttaacctgaatctgcgcgctgtgggtagtggagctacgttttcccactactattatatgatcctctctcgcggtcagattgtgtttatgaatcgtgagccaaagaggacactgacatccgtctcggtgtttgtggaccatcacttggctccaagtttttattttgtggctttttactaccacggtgaccatcctgtagccaatagcctgcgggtggatgtacaggctggggcttgtgagggtaagctggagttgagcgtggatggagccaagcagtaccgaaatggggaaagcgttaagctgcatctggagacggactcactggcactggtcgctctgggcgctctggacaccgcactttacgcagctggatccaagagccataaaccccttaatatgggaaaggtcttcgaggctatgaacagttatgatttaggctgcggtcctggaggcggagattcagctctgcaggtgtttcaagccgcagggctcgccttcagcgacggagaccagtggaccttgtcacgaaagcgcttaagctgccctaaggaaaagacgacccgtaagaaacggaatgtgaattttcagaaagcaattaatgaaaaactgggacagtacgcttctcccactgcaaaacggtgctgccaagacggggtgacaaggctgccgatgatgcgctcctgcgaacaaagggccgctagggtccagcagcctgactgtagagagccattcctcagctgctgccagtttgccgaatccctgcgcaaaaagtcgagagataagggccaagcgggtctccagagagctctggagatcctccaggaggaggatcttatcgatgaagatgacattccagtgcgatctttcttccctgaaaattggctttggagagtcgagactgtcgaccggttccaaatactgaccctctggctgccagactccttaacaacctgggagatccacggcttgagcctgagcaagaccaagggactttgtgtcgccacaccagtgcagctccgggtgtttcgagaatttcacctacacctgcggctacccatgagtgtcagaaggttcgaacagctcgagctgcgacccgtcttatataactatctggacaagaatctgacggtgtccgtgcacgtttctcccgtggaagggctgtgtttagcgggtggtggcggacttgcccaacaagtccttgtgccagcgggatccgcaagacccgtcgctttttctgtggtgcctacagccgctgctgctgtatcacttaaagtagtcgccagagggtcctttgaatttccagtgggagatgcagtgagcaaagtgcttcagatagaaaaggaaggcgcaatccaccgcgaggaactagtgtatgagttaaatcccctggatcaccgtgggaggactctggaaatccccggaaattctgaccccaacatgatacctgacggtgatttcaattcctacgtacgcgtgacggccagcgatcctctggacactttaggctctgagggcgctctttcgccagggggtgtggcctcccttttaagactgccaaggggatgcggcgaacagacaatgatctatcttgcgcctaccctggcagcttcacggtacctggataaaacggagcagtggtctactctacccccagagaccaaagaccacgcagtggatttgattcaaaaggggtatatgcggatacagcagttccggaaggccgacggctcttacgctgcctggctgagccgggatagtagtacgtggcttacagcttttgttctaaaggtgctgtctctcgctcaagagcaagtcggtgggtcacctgagaaactccaggagacttctaattggttgttaagccagcagcaggctgatggcagttttcaagacccctgcccggtgctagacaggagcatgcagggcggactagttggaaacgacgagacggtcgctctgaccgcttttgtgaccatcgcacttcaccatgggctcgctgtgttccaggatgagggagccgagcccctcaagcagagagtggaggcatccattagcaaggctaacagtttcctgggggagaaggcgtcagcaggcctcctgggcgctcacgccgcagccatcactgcatatgccttgaccctgacaaaggccccagtcgatctgctgggagtggcccacaacaatctcatggccatggctcaggagactggcgataacctgtactgggggtccgtaacagggagtcaatccaatgcggtgagtcctacacctgcacctaggaacccatcagaccccatgccccaagcacctgcgctgtggatcgagacaacagcctacgcattactgcaccttctgctgcacgaaggcaaagctgaaatggctgaccaggcagccgcttggttaacccgtcagggatcttttcaaggcggtttcaggtctacacaggatacggtgatcgccctggacgccctgtcagcatactggatcgcaagccatactaccgaggaacgaggattgaatgtgacgttgtcttccaccggcaggaatggcttcaagtctcatgccttgcaactgaataaccggcagattaggggtctggaggaggaattacagttcagccttgggtctaagattaatgttaaagttgggggtaacagtaagggcaccctaaaggtgcttcgaacctacaacgtgcttgatatgaagaataccacatgtcaggatctgcagatcgaggtgacagtgaaagggcacgtggagtacacgatggaagctaatgaggactacgaagattacgagtatgatgaacttccagcaaaagacgaccccgacgccccattgcagccagtaacccccctgcagctgtttgaagggcgacgcaaccgacgcagacgcgaagctcccaagctcacatcgctgtccgaccggtatgtctctcacttcgaaaccgaaggacctcacgtgctattgtacttcgacagtgtacctacaagccgggagtgcgtgggatttgaagccgtgcaggaagtacccgttgggctagtgcagcctgcctccgccaccctgtacgactattacaatccagagcgcagatgttccgtcttctacggagcccctagtaaatctagactgcttgcgaccctgtgttcggccgaagtgtgtcagtgtgcagagggcaaatgccctcgccagcgtcgcgcattagagcgcggtctgcaggatgaagacggataccggatgaagttcgcttgttactacccacgcgtggaatatggattccaggtgaaagtgctgagagaggattcccgagcagcattcaggttattcgaaacaaaaattacacaggtgctccacttcaccaaggatgtaaaggccgcagcaaaccagatgaggaattttctggttagagcatcttgccgcttgcgactcgagcctggcaaagaatacctgatcatggggctggacggtgcgacctacgatctcgaagggcacccgcagtacctgctcgactctaacagctggatcgaggagatgccttctgaacgcctgtgccgcagcacacgacagcgagccgcatgtgcccagttaaacgactttctccaggaatacggtacccagggctgtcaggtttag

SEQ ID NO: 88319 - DNA, 5097 bp, Artificial Sequence
  derived and/or modified sequence
atgaggttgctttggggcttaatatgggctagttccttctttaccctgagcctacagaagccaagactgctgttgttttctccttccgtagtccacctgggggtcccgcttagtgtaggagtacagttacaggacgtgcctcggggacaggtggttaagggttctgtattcctcaggaacccttctagaaacaacgtgccatgcagccctaaagtggatttcacgttgtcgtcagaaagagatttcgctctgctctctctccaggttcccctgaaagatgccaagtcatgtggactgcatcagctgctgcgcggacctgaagtgcagttagttgcccacagcccatggctcaaggattccctatctaggaccacaaacatccaggggatcaatctcctgtttagctctagaagaggacaccttttcctccagaccgaccagcctatttacaatcccggacagagagtgaggtacagagtgttcgctctcgaccagaagatgagaccatcaacggataccataacagttatggtggaaaattctcacggtctgagggtgcgcaagaaggaggtttacatgcccagcagcatattccaggatgattttgttataccagacatttctgaacccggaacttggaaaattagtgctcgctttagtgatggcttggaatcaaacagctccactcagttcgaggtgaaaaaatatgtgctccccaattttgaagtgaagatcacccctggcaagccctatatattgacagtacccggacacctggatgagatgcagctcgatattcaggccagatacatctatgggaagccggttcagggtgtcgcctacgtgcggttcgggctcttggacgaagacggtaaaaagaccttctttcggggtctggagagccagactaagttggtgaatggccaatcgcacatctccctgagcaaagccgaatttcaggatgctttggagaagctcaacatgggcataacggacctgcaggggctaaggctgtacgtcgccgctgccattatcgaatctcccggaggcgaaatggaagaagccgaactgacaagttggtacttcgtgtctagtcctttttctctggacttgagtaagactaagcggcaccttgtaccaggcgcaccatttttgttgcaggctttggttagagaaatgtccggtagccctgccagcggcatacccgtgaaagtgtcggcaacagtgagcagtccaggaagcgtgccagaggtgcaagatatccagcagaacactgacggaagcggtcaggtcagcataccaatcattatacctcagaccatctccgagctgcagctctcggtgtccgccggatctccccatcctgccattgccaggctcaccgtggctgccccacctagcgggggaccaggatttctcagtatcgagcgtccagactcacggcctcctcgggttggggacactctgaatctgaatttaagggccgtggggagcggagcaaccttttcccattattactatatgatattatcccgcggtcaaatagttttcatgaatcgggagcccaagcggactctgacctccgtctcagtgttcgttgaccatcatctcgcaccttcattctacttcgttgccttttactatcacggagaccatcctgtggcaaatagtttgagagtggatgtgcaagccggagcatgtgagggtaagctggagctgtctgtggatggcgctaaacaatacagaaatggagagagcgtgaagttacacctcgaaaccgattccttagcattggttgccctgggcgcactggatacagcgctctatgccgctggttccaagtcacacaaacctcttaatatggggaaagtgtttgaggctatgaactcctatgatctaggctgtgggcctggaggcggagacagcgcgcttcaggtgtttcaggcagctggactggccttcagcgatggggatcaatggaccttgtcccgaaaaagactcagttgtccgaaggaaaagactacgaggaagaagagaaacgttaactttcaaaaggctattaatgagaagctggggcagtacgcctctcccacagctaagcgttgttgccaggatggcgttaccaggttgccaatgatgcgtagctgtgagcagagggcagccagggtccagcagcctgattgccgcgagcctttcctgtcttgctgccagtttgccgaatccctgaggaagaagagcagggacaagggccaggccggactgcagagggctctggaaatcctgcaggaagaggacttaatagatgaagacgatatccccgtgagaagctttttccccgagaactggctttggagagtagaaacggtggacaggtttcagattttaaccctctggttaccagattcccttactacttgggagatccatggtctctccttgagcaagaccaaaggcctctgtgttgctactccagtacagcttagagtctttcgggagttccatctgcacctccggttgcccatgagtgtgcggagatttgaacagctggaactgagacctgtgctatacaactatctggataagaatctcaccgtgagcgtgcatgtgtcacccgtggagggtttgtgtctcgcaggcggagggggactcgctcagcaggtcctggttcccgcaggaagtgctagaccggtcgcctttagcgtggtgcctacagctgctacagctgtgtctctcaaggtcgtcgccaggggtagcttcgaatttcccgtaggagatgcagtctccaaagtcctgcaaatcgagaaggagggcgctattcaccgggaggaactggtgtacgaacttaatcccttagatcatcgaggcagaacactagagatcccaggcaatagcgatcctaacatgatccctgatggagatttcaattcctatgtgcgagtgactgccagcgacccactggataccctgggctcagagggagctctgagtcctggcggtgttgcgtcccttttgcgcctgcccagaggctgcggagaacagaccatgatttatttggcaccaaccttagctgcgtcgcggtacctggacaagacagaacagtggtcaacccttcctccggagacgaaagaccatgcggttgacttgatccagaaaggatatatgcgcatccagcagtttcggaaagctgacggttcctatgccgcttggctctctcgcggtagttctacgtggttgacggccttcgtattaaaagtcttgtcgctcgctcaagagcaagtggggggttctccagaaaaactgcaggagacttcgaactggttgttgagtcagcaacaggctgacggctcattccaagatctatcaccggtgatccatcggagtatgcagggagggctggtaggcaatgatgagaccgtggccctcacagccttcgtcactattgccttgcatcacggcctggcagtgttccaggacgagggtgccgagccacttaagcaacgcgttgaggcttcaataagtaaggctagtagttttcttggcgagaaagcatcagccggactgctgggtgcacatgccgctgccattacggcctatgcgctcacactgacaaaggctcccgctgatttgagaggggtggctcataacaatttgatggcaatggcacaggagacgggggataatctgtactggggtagtgttacagggtctcagtctaatgcagtgtcccccaccccggctcctcgcaatccttcggatcccatgcctcaggcgccagctctttggatcgaaactacagcatatgccctgttgcacctcctgctgcatgagggtaaagcggagatggcagatcaggctgctgcctggctcacaagacagggtagttttcaaggcggatttcgatcgacccaggatacagttatcgccctggatgcgctgagcgcctattggatcgcatctcacacaactgaggaacgcggactgaatgtcaccctcagttccacagggagaaacggatttaaatctcatgctcttcagttgaataatagacagatccgcggactggaggaggagcttcagttcagcctcggatccaaaatcaatgtgaaggtggggggaaattcgaaaggcacgctcaaagtgcttcgcacctacaatgtgcttgatatgaagaacaccacgtgccaggatctacagatagaggtgacagtgaaaggccacgttgagtataccatggaggctaatgaagattacgaggactacgaatatgacgagctgcctgctaaagatgacccagacgcccctctgcaacctgtgactcctctgcagctttttgaagggagaaggaaccggaggcgcagggaggcccctaagttgacatctctttcagatcgctatgtcagtcactttgagacggagggtccccatgttctgctgtatttcgattccgtcccgacatcccgggagtgtgtgggattcgaggcggtgcaagaggttcctgtcggattggtgcagcctgcaagtgcaacactctacgactactataaccctgaacgacggtgttctgtgttttatggggctccatccaagtcacggcttctggccaccctgtgtagcgcggaagtgtgccagtgtgcagaaggaaaatgtccaagacaaagacgcgctctggagcggggactgcaggatgaagacgggtaccgaatgaaattcgcatgttattacccaagggtggaatatggtttccaggtcaaggtgttgcgtgaggattctcgggctgcgtttaggctattcgagacgaagattactcaggtgctccattttacaaaagacgttaaagccgctgccaaccagatgaggaattttctagttcgggcatcctgccgcttgcgtttagaaccaggaaaagagtatctgattatgggactggatggagccacgtacgacctggagggtcatccgcagtacctgcttgactcgaacagttggatagaggagatgccatctgagaggctctgtaggtctaccaggcagcgcgctgcctgtgcccagctgaatgacttcttgcaggaatacggaactcagggatgtcaggtatag

SEQ ID NO: 88320 - DNA, 807 bp, Artificial Sequence
  derived and/or modified sequence
atgtgtccggaagactcgctccaggttcctctaaaggacgccaagtcttgcggattgcatcagctgctgcgaggccctgaggtacagttagtggcccattctccttggctgaaagattcactttcgcgcactactaatattcaaggcatcaacctgctgttctcctcacgccgaggacacctctttctccaaactgaccagcctatttataaccccggacagagagtgaggtacagggtgtttgcattggaccagaaaatgcgcccttcaaccgatactattacagtgatggtcgaaaacagtcatggactgagagtgagaaagaaagaggtctatatgccatcgtctatttttcaggatgatttcgtgatcccagatatctccgaaccaggtacatggaaaatctctgcccgttttagcgacggcttggaatccaacagcagtactcagtttgaggtcaaaaaatacgtcctgcccaactttgaggtcaaaattacaccgggaaaaccctatattcttacagtgcccggacacttggacgagatgcagctggatattcaggcccgatacatttacgggaagccggtccaaggcgtggcgtacgtgcggttcggactgctggatgaagatggcaaaaaaactttctttaggggactcgagtcccagaccaaacttgtcaatggacagtcacatatctcactatctaaggctgaattccaggatgccttggagaaactgaacatgggaatcaccgaccttcagggactgcgcctgtacgttgccgctgccataattgagtctccctag

SEQ ID NO: 88321 - DNA, 5097 bp, Artificial Sequence
  derived and/or modified sequence
atgcgactgctctggggactgatatgggcatctagtttctttacactcagcctgcaaaagccccgactgctgcttttctccccaagcgtggtgcacctgggtgttcccctgagtgtgggggtccaactgcaagatgtccccagaggccaggtggtgaaggggtctgttttcttgaggaaccccagtagaaacaacgtcccttgctcccctaaggtggattttactctgagttcagagcgtgatttcgcacttctttccctgcaggttcccctaaaggacgccaagtcatgtggtcttcatcagttgttgagggggcctgaggtgcagctggtcgcacattccccatggctgaaagactcactatcccgtaccacaaacatccagggaatcaaccttctctttagctctcgcagaggacacctctttctccagaccgatcagcctatctataacccaggacagcgagtgcgctaccgtgtattcgctctggaccagaaaatgcggcctagcacagataccataaccgtgatggtggaaaattcccacggcctacgcgtgcgtaagaaggaagtttacatgccctcctcaatatttcaagatgacttcgtgatccctgacatttctgaaccaggcacgtggaaaatttcagccagattcagtgatggtctggagagcaattcttccacccagttcgaggtgaaaaagtatgtactgcccaactttgaggttaagattaccccaggcaaaccctacattctgaccgtcccaggacaccttgatgagatgcagctcgacattcaggccagatacatttatgggaagcctgttcagggcgtggcctacgtccgatttggcctcctggatgaagacggaaaaaaaacgttttttcggggtctggagagccagaccaagctcgttaacggacagtcacacatctccctgtctaaggctgagttccaagacgcactagaaaaacttaatatgggaataactgacctccagggcttgaggctttacgtggctgccgctattatcgagagcccaggtggtgagatggaggaagccgagctgacctcctggtattttgtgagctctccgttctcattggatctgagcaagactaaacgacacctggtaccaggtgcccctttcctcctgcaagcccttgtccgcgaaatgagtggctcacccgcatcgggtatccccgtgaaagtctccgcgaccgtgtcatcccctggaagtgtcccagaagtgcaggacattcaacagaacactgacgggtcgggccaggtgagcattccaattatcatcccccagaccatcagtgagctgcagctgagcgtctcggcaggcagtcctcatcccgctatcgccaggctgaccgttgccgctcccccttctggagggcctgggttcttgagcatagagcgacccgactcaaggccaccaagagtcggggatacactgaatctgaacctcagggcagtcggatctggggcaacctttagccactattactacatgatcctttccagagggcagattgtattcatgaatcgcgagcctaaacgcacactgacctctgtgagtgttttcgtggatcatcacctcgccccaagtttctattttgtggcattctactaccacggagatcaccctgtagcaaactctctaagagtggatgtccaggcaggggcttgtgagggaaagctggagctgagcgtggacggcgctaagcagtatagaaacggggagagtgtcaaactgcatctggagacagacagcttggctttagtggccctgggcgctctcgacactgccctttatgctgccggatcaaagagtcacaaaccactgaacatggggaaggtctttgaggccatgaatagttatgacctggggtgtggtccaggcggaggagattctgcgctgcaggtgttccaggctgcaggtctagcgttttcagatggggatcagtggacattgtcgcgcaaacggctttcctgccctaaagagaaaacgacgcgcaagaagaggaacgtaaacttccagaaagcaattaatgaaaagctgggacaatacgcatcacccactgcaaaaagatgctgccaagacggcgtgacacgcttaccaatgatgcggtcctgtgagcaacgcgctgcccgtgtccagcagcctgattgtagagagcccttcctctcttgttgtcagttcgccgaaagcctgaggaagaagagccgcgataaggggcaagcagggctgcagagagctttagagatcctgcaggaggaggatcttattgatgaagacgacatccctgtgcgctctttcttcccagagaattggttgtggagagtcgagaccgtagatcgcttccaaattctgaccctgtggctaccagattccctgaccacttgggaaattcacggactatcattgtcgaagacaaaaggactctgtgtggcaacacccgtccagttgagagtttttagagaatttcacctccatctgcgcctgccaatgagcgtgaggagattcgagcagctggaactaaggccagtgctgtacaattatctcgacaagaatctgacagtcagcgtgcatgtgtcccctgtcgaaggattgtgcctggcaggcggagggggactggctcagcaggtgctcgtacccgcaggctccgccagacctgtagcatttagcgtcgtccctaccgctgcggctgcagtctctcttaaggtggttgcaaggggttcctttgagtttcccgtgggggatgctgtatctaaagtacttcaaattgagaaagagggcgctattcacagggaggagttggtgtatgagttgaaccccctcgaccatcggggaagaaccctggagatcccagggaattccgaccctaatatgatcccggatggcgactttaatagttacgtgagagttactgcttctgaccctctggacactttaggaagtgaaggtgctttatcccctggcggtgtggccagtctcttgcgactgcctagggggtgtggtgaacagaccatgatctatctggcccctaccttagccgctagtcggtatctcgacaagaccgaacaatggagtaccctgccccctgagaccaaagaccacgccgtagacctgattcagaaagggtacatgaggatccaacaatttaggaaggctgacgggagctatgccgcatggttaagtcggggttcgagtacatggctgactgccttcgtattaaaagtcctgagtttggcccaggaacaagtcggagggtcgccagaaaagctgcaggagacatccaactggctgctgagccagcagcaggctgacggctcttttcaagacctgtcacccgttatacaccgctcaatgcagggaggattggtagggaatgacgagactgttgcattgactgcgttcgtgacaatagccctccaccatggtcttgccgtgtttcaggacgagggcgcagaacccctgaaacagcgcgttgaggcctcaattagcaaggcaaattcgttcctcggggagaaggcctcagctggactgctgggtgcgcacgcagctgccattaccgcttacgccctgaccctgaccaaagcccctgcggatctccgcggtgtggcccacaacaacctaatggctatggcgcaggagaccggcgataatctttactggggcagcgttaccggatcgcagagcaatgctgtttcccccacccctgcccctcgcaatccttcagacccgatgccacaggctcctgctttgtggatcgagaccacggcttacgccctactgcaccttctactccacgaagggaaggctgaaatggctgaccaggcggcagcctggctgacaaggcagggatcattccagggaggtttccgctcaacccaagataccgtgattgctctcgacgctctcagcgcatactggattgcatcccatactactgaggagcgagggctaaacgtaacactaagctcgacagggcgaaatggatttaagtcgcatgctttacagctgaataacagacaaatccgaggtcttgaggaagagttgcagttcagtctgggtagcaagatcaatgttaaagttggtggaaacagcaaaggaacccttaaggtcctgagaacttacaacgtcctggacatgaagaacacaacttgccaggacctgcagatcgaagtcaccgtcaagggtcacgtcgaatatacaatggaagctaatgaagattacgaagactacgagtacgatgaattgcccgcaaaagatgatcctgatgccccactacagcctgttaccccactacagctgttcgaggggaggagaaaccgcagaagaagggaggcgcctaaactcacttctctgtccgaccggtatgtgtcacactttgaaacagaaggaccccacgtgctgctatatttcgattcagtcccgaccagtagggaatgtgttgggttcgaagctgttcaggaggtacctgttggactcgttcagcccgcttccgcgacgttatacgactactacaatcccgagaggaggtgctctgtgttctacggcgctcctagcaagtcccgtctcttggccaccttatgctccgcagaggtgtgtcagtgcgctgaagggaagtgtccacggcaacgcagagctctcgagcgcggactgcaggacgaggatggataccgtatgaaatttgcttgttactaccctcgtgtagagtacggtttccaggtcaaagtgctccgggaagattcacgggctgcgtttcgactcttcgagaccaaaatcacccaggtgctccattttaccaaggatgtaaaagcagccgctaaccaaatgagaaactttctcgtgcgggcatcatgtcgtctgcggttagagccaggaaaagagtacttgataatggggctggatggagcaacgtatgatctggaaggccatccccagtatttgctcgactccaactcttggatcgaagaaatgccatcagagagattgtgtcggagtaccaggcaacgcgcagcatgcgcacagttgaatgactttctccaggagtatggtactcagggatgccaggtgtag

SEQ ID NO: 88322 - DNA, 813 bp, Artificial Sequence
  derived and/or modified sequence
atgtgccctgaagattcactgcaggttcctttaaaggatgccaagagctgcggactccatcagttgttgcgaggccctgaagtgcagctggtcgcccatagtccttggctgaaggacagcctctctcgtactaccaatatccaaggaattaatctcctgttttccagcaggagaggccacctttttctgcaaaccgatcagcccatttacaatcccggacagcgagtgcgatacagagtgttcgccctcgatcagaaaatgagaccctcaacagacactattactgtaatggttgagaatagtcacgggttgcgggtaagaaaaaaggaggtctacatgccttcctccatcttccaggatgatttcgtgattccagatatcagcgaaccaggcacctggaaaatatctgctagattttctgacgggctggaatcaaactccagtactcagttcgaggtgaagaagtatgtgctgcctaattttgaggtgaagatcacccctgggaagccctacatcttgacagtccccggacacctagacgagatgcaactagacattcaggccagatatatttatggtaagccagtgcagggagtcgcctacgttagatttggccttctcgatgaagatggtaaaaagacttttttcagagggctcgagtcacagaccaaacttgtcaacgggcagtcccatatttctcttagcaaagctgaatttcaggatgcacttgagaagcttaacatgggaataacagacctgcaggggctgagactgtacgtggctgccgctatcatcgaaagtcctggagggtag

SEQ ID NO: 88323 - DNA, 5097 bp, Artificial Sequence
  derived and/or modified sequence
atgagactgctctggggtttgatctgggcgagcagtttttttaccctctcacttcaaaagccccgattgctgctattctcgccatctgtcgtgcacctcggtgtgccactctccgtgggggtccagttacaggacgtgccacgcggtcaggtggttaaaggatccgtcttcttgaggaatccatcaaggaataacgtcccctgttcaccaaaggttgatttcacactgagctctgaacgggacttcgccctgctctccttacaagtgccgctcaaggacgccaaatcctgcggcctgcaccaactgctgcgcggacctgaagtgcagctcgtcgcgcattcaccctggctcaaagatagcctcagcagaacaaccaatatccagggcattaacctgctgttctctagtaggcggggacatctgtttctgcaaaccgaccagccaatttacaaccccggacagagggtgaggtacagagtgttcgcacttgatcagaaaatgcgcccatctacagacaccattacagtgatggtcgaaaatagtcacggactcagggtgcgtaagaaggaggtgtacatgccaagctcaatatttcaggatgactttgtgatccccgacatttccgaaccgggtacctggaagatcagtgcgaggtttagcgacggactcgagtcgaacagcagtacacaattcgaagttaaaaagtacgtcttgcccaactttgaggtgaaaatcacacctggcaaaccatatatcttgactgtgcctggacacctcgatgaaatgcagttagatatccaggctcgctacatctatggaaagcccgttcagggggtagcctatgttcggtttggattgctcgacgaggacggtaagaagacattcttccgcggacttgaaagtcaaaccaagctggtcaatggacagagccacataagtctgagcaaggcggagttccaggacgccttggagaaactgaacatgggaattacggatcttcagggcttacgactgtatgtggcagcagctatcatcgaaagcccgggtggtgaaatggaagaagcggagcttacttcttggtacttcgtatcctctccttttagcctggatctcagcaagacaaagaggcacctcgtgccaggggctccatttctgctgcaggcactagttagagaaatgagtggttctcccgcttcaggaataccagtgaaggtttccgctaccgtctcctctcccggatcagtgcctgaggttcaggatatacaacagaacacggacggatctggtcaggtgtctataccaatcatcatcccacaaactatcagtgagctccagctctccgtctctgccggtagcccacatcccgcaatcgcacgtctgacagtcgccgctccaccttccgggggtcctggatttttgagtattgagaggcccgactcccggccacctcgcgtcggcgatacactcaatctaaatctgagggcggtgggatccggagctacgttctcccactactactacatgatcctctcaagaggacagatcgttttcatgaatagagaacccaaacgcaccctgacaagtgtttcagtgttcgttgaccaccatttagctccgtcattttactttgttgccttttattaccacggtgatcacccagtggctaatagtctccgagtggacgtacaggccggagcatgcgaaggaaaacttgagttatctgtggatggcgctaagcagtacaggaatggagaatccgtcaaactacacctcgaaacggattcgctcgcactcgtcgctctgggcgctctggacacagccctgtatgctgccggatctaaatctcacaaacccctgaacatgggcaaggtattcgaggcaatgaactcttatgatctggggtgcgggccagggggtggagatagcgccctgcaagtcttccaggccgctgggttggccttctcagacggtgatcagtggaccttaagccgcaaacgcttgagctgcccaaaggagaagactacaaggaagaagagaaacgtcaactttcagaaagccattaatgaaaaactcggacagtatgcctccccaactgcgaaacgctgttgtcaagacggggttaccagactgccaatgatgcgtagttgcgaacaaagggcagctagagtccagcaacctgattgcagagagcctttcctttcatgctgtcagttcgccgagagcctgcgaaagaagtcgagggataaggggcaggcaggtctgcagcgtgccttggaaatcttgcaggaagaagacctcattgacgaagatgatatccccgtccggtcattctttcccgagaactggctgtggcgagtggaaacagtggataggttccagattctgactctttggcttcctgatagccttaccacctgggagatccatggcctgtccctgtctaagaccaagggcttgtgcgtggcaacacctgtacagttgcgtgtttttcgcgagttccacttgcatcttcgattaccgatgtctgtacgcagattcgagcagctggagctgcggcctgtgttatacaattaccttgataagaacttgacggtttcagttcatgtatcccccgtggaaggtctctgcctggccggagggggtggcctggcccagcaggtactggtccctgcgggatccgctcgcccagtcgccttcagcgtggtacccacagccgctacagccgtgtccttgaaggtggtggcgagaggctctttcgagtttccagtgggtgatgcggtgtctaaggtactccagatagagaaggagggggctattcatcgggaagagctcgtgtacgagctgaatccattggatcaccgcggtagaactctagagatccccggaaacagcgaccctaacatgattcccgacggagattttaactcatacgtccgagttacagcttcagatccgttggatacactgggcagcgagggggctctgagccccggaggagtggcgagcctgctcagattaccaaggggttgcggtgagcagacaatgatctatcttgccccaaccctcgcagcctcccgttatctagataagacagaacaatggtcaactcttccccctgagacaaaggaccatgccgtggatttaattcagaagggctatatgagaattcagcagttcaggaaagcagacgggagctacgccgcatggctgtccagaggtagttcaacatggctgacagcattcgtcctgaaggtcctgtccctcgcacaggaacaggtagggggatccccagagaagcttcaggagacaagcaattggttgttgtctcagcaacaagccgatggtagtttccaagatttgtcacctgttattcataggagtatgcaaggcggactggtgggcaatgacgagaccgtagctctcaccgcgttcgttacgattgccctgcaccacggcttggccgtatttcaagacgaaggtgccgagccgctgaagcagcgtgttgaggcctccatcagtaaagccagctcatttcttggggagaaagcttcagccggattattgggagcccatgctgcagccattactgcctacgccttgaccctgaccaaggctccagccgacctgcggggagtggctcataacaatctaatggccatggcccaggagacaggagacaacttatattggggctccgtgaccggaagccagagcaatgcagtgtcccccacacccgcacctcggaacccctcagatcctatgccgcaggctcctgccctgtggatcgaaacaaccgcctacgccctgttacacctcctgctgcatgaaggaaaggctgaaatggcagaccaggccgcagcatggctgacccggcaaggtagctttcagggtggattccgctcaacccaagacactgtcatcgcattggacgccctatctgcgtattggatcgcaagccacaccacagaagagcgtgggctcaatgtgacgctgtctagcaccggcaggaacggcttcaagtcccatgctctgcagctaaacaatagacagataagagggctggaagaggagctgcagttttccctcggctcaaaaattaatgtgaaagtggggggaaattcaaaagggactctcaaggtgcttagaacatataacgtgctggacatgaagaataccacatgccaagaccttcagattgaagtcaccgtgaaaggccacgttgaatacaccatggaggccaacgaggattatgaggactacgagtacgatgagctcccagccaaggacgatccagatgcccctctgcagccagtcacccctctgcagctttttgaaggaaggagaaacagaagaaggcgggaggccccaaaattgacgagcctgtccgatcgttacgtttctcactttgaaactgagggtccccacgtcttgctttacttcgatagcgtcccaacctctagagaatgcgtgggcttcgaggctgtgcaagaagtaccagtgggtctggtacaacctgcatcagcaaccttatacgattactacaacccagagagacgctgtagtgtgttctacggagcgccttccaaatcccggctgctggccacgttgtgtagtgcggaagtatgtcagtgcgctgaggggaagtgtcctaggcagagaagggctttagaacggggtcttcaggatgaggacggatatcgcatgaagttcgcttgttattatcccagagtcgaatatggatttcaggtgaaggttctccgagaggacagtagagccgcttttcgactgttcgagaccaaaattacacaagtgctccatttcaccaaggacgtgaaagcagccgcaaaccagatgcggaacttccttgtgagggcttcatgccggctacgactggaacccggtaaagagtatctaattatgggcttggatggggcaacatatgacctggaaggccatccccaatacttactggatagtaactcttggatcgaggaaatgcctagtgagcgtctctgcagaagcacccgccaaagagccgcttgtgctcaactgaacgactttctgcaggagtatggaacacaggggtgtcaagtttag

SEQ ID NO: 88324 - DNA, 5097 bp, Artificial Sequence
  derived and/or modified sequence
atgagactgctttgggggcttatctgggccagcagctttttcaccctgtctctccaaaagccgagactcctgctattttctccaagtgtggtccatctgggggtacccttgagcgtaggtgtgcaactgcaggacgttccaagaggacaggtcgtgaagggaagcgttttcctgcggaacccatcccgtaacaacgtaccatgctccccgaaagttgattttacactgtcaagtgagcgcgatttcgctcttctgtctctgcaagtgcccctgaaggatgccaagagttgtggcctgcaccagctgctgagggggcctgaagtgcagctggtcgcgcactccccctggctgaaggactcactttctcgcacaaccaatatccagggcattaatttactgttttcctctcgtcgtggacatctctttctgcaaactgatcagcccatatacaatcccgggcaacgcgtgagatatcgagtgttcgctctggaccagaaaatgcgcccatcaaccgatacaatcaccgtgatggtcgaaaacagccatggtctgcgagttcgaaagaaagaagtttatatgccttcctcaattttccaagatgactttgtgatacccgacatctcagagcctgggacttggaagatcagcgctcgttttagcgatggactcgaatctaactcttccacacaatttgaggtcaaaaagtacgttctgcccaattttgaagtgaagatcactccaggtaaaccatatattctaaccgtgccaggtcacctggacgagatgcagctggacattcaggccaggtatatttacggaaagccagtacagggcgtggcctacgtgcggttcggtctgctagatgaagacgggaagaaaactttcttcaggggacttgagtcccaaaccaaactggtgaacgggcaaagtcacatttctctgtctaaagcagagttccaggatgctctggaaaagctgaatatgggcataacagatcttcagggccttcgtctgtacgtggcagctgcgataattgaatctcccggcggcgagatggaagaagccgagctcacgtcttggtacttcgtgagctcccccttttctctcgacttgtccaagaccaaacggcacctggtacctggcgcaccttttttactgcaggctcttgtccgcgagatgagtgggtcgcctgcctcgggaattcctgtcaaagttagtgctaccgtgagtagtccaggaagcgtacccgaggtgcaagatattcaacagaacaccgatggcagtggccaggtaagtattccaatcatcattccccagactattagtgagttacagctatctgtgtctgccggaagtcctcatcccgccattgcccgacttactgtcgcagcgcccccaagtgggggccctggctttctttctatagagcgcccagatagcaggcctcccagggtcggggacacgttaaatctgaacctccgggcggtcggcagcggagccaccttctcacactattattatatgattctgagcaggggccagatagtctttatgaatagggagccgaaaagaacgctgacatcagtctcagtgtttgttgatcatcacctggcaccgtctttctactttgtggccttctactaccatggcgaccaccccgtagccaactcattgcgggtggatgtgcaggctggcgcttgcgaaggtaaattggaactgagcgtcgacggcgcaaagcagtaccggaatggcgagtcggtgaaactacacttggagactgattccctggcgctcgtagctctgggcgctttagatacagccttatacgcagcgggaagtaagagccacaaaccactgaatatggggaaagtttttgaggccatgaatagttacgacctcggatgtggcccaggcggaggagattctgccttgcaggtttttcaagctgcagggctggccttcagcgatggtgaccagtggaccttatctcggaaaagactgtcctgcccaaaggagaaaaccacccggaaaaagagaaacgttaatttccagaaggccatcaatgaaaagctggggcagtacgcctccccaacggccaagagatgctgccaggatggcgtcacgagacttccaatgatgcgtagctgtgagcagcgagccgctagggtacagcagcctgattgccgtgagccctttctgtcatgttgtcaattcgctgagagtctgcgcaagaagagcagagataagggtcaggccgggctccagagggcattagagatcctccaggaagaggacctcattgacgaagacgacattcctgttcggtctttctttcctgagaattggctgtggcgggtggagacagtagaccgctttcagatactcaccctctggctcccggatagcctgactacttgggaaattcatggactttcactcagtaaaacaaaaggactatgtgtcgcgacgccagtgcagctgagagtgtttcgcgagtttcacttacacttacgactgcctatgagcgtccgtagatttgagcagttagaattgcggcccgtgctgtacaattatctggacaaaaatctgaccgtgtcggtgcacgtgtcacctgttgaaggattgtgtctcgccggaggaggtgggctggctcagcaggttctggttccagccgggtctgcgcgccctgtggcttttagcgtcgtgcctactgctgctgccgcagtctcactgaaagtggttgctcgcgggtccttcgaatttcccgtgggtgatgcagtcagcaaggtcctgcagattgaaaaggagggtgcaatccaccgggaagagttggtgtacgagctgaatccactggatcatcgcgggcgcacactggaaatccctgggaacagtgaccctaatatgattcctgatggcgatttcaattcatacgtgcgcgtaaccgccagtgatccactggataccctaggaagtgaaggagcactaagtccaggaggggtggcatccctgctacgcctgcctcggggttgcggagagcagactatgatttatctggctcccacactcgcagcttcgcgctaccttgataagaccgagcagtggtctaccctgccacccgaaaccaaggatcacgccgtagatttgatccagaaaggctacatgcgcatccagcagtttcgaaaggcggacggttcctatgcagcctggctctctagggatagttctacctggcttacagcttttgtcctgaaagttctttctctagcccaggagcaggtcggaggctccccggagaagctgcaggaaacatcaaactggctcctgagccaacagcaagcggacggttccttccaagatccttgccctgtgcttgatcggtccatgcagggaggcctcgtgggaaatgacgagactgtagcgctgaccgcttttgtgactattgccctgcaccatggattagccgttttccaagacgaaggcgctgagccactgaagcagagagtggaggcctccattagtaaggcaaactctttcctcggcgagaaggcatccgctggactcctgggagcccatgctgccgcgattacagcctacgccctgaccctgaccaaagcccctgtggatcttctaggcgtggcccataacaaccttatggccatggctcaggaaacgggcgacaacctttattggggatccgtaacaggatcccagagcaacgctgttagccccacaccagccccccggaatccttctgatcctatgccccaggcacctgcactctggatagaaacaaccgcatatgccctgcttcatctgctccttcacgaaggcaaggccgagatggctgaccaggcttctgcatggctcaccaggcaaggaagtttccaagggggcttccggtccacccaggacaccgtgattgccctggacgccctgtctgcatactggatcgcctctcacacaaccgaagaacgcgggctgaacgtgactttaagctccactgggaggaatggatttaaatcgcacgccctgcagctgaacaacaggcaaatccgaggtctagaagaagaactgcagttttcattgggtagcaaaatcaatgtgaaagtcggtgggaacagcaagggcactcttaaagtgctgagaacatataacgtcctggacatgaaaaacaccacctgtcaggatttgcagattgaggtaacggtgaaggggcacgttgaatataccatggaggccaacgaggactacgaagactacgaatacgatgagctcccagcaaaggacgaccctgatgccccgctgcaacctgttaccccactccaactgttcgaggggcgaagaaaccgaagacgacgggaagcacccaagctcacatcgctctcagatcgttacgtttcgcattttgagacagaagggccccatgtgctgttgtattttgattccgtacctacatccagagagtgtgttgggtttgaggccgtgcaggaggtgcctgtcgggttggtgcagccggcttccgcaactttatacgattattacaaccccgaaagaaggtgttctgtcttctacggcgccccaagtaaatctaggctgttggctactctttgtagtgcagaggtgtgtcagtgcgcagagggtaagtgccctagacaacgccgcgcactagagcgaggtcttcaagatgaagatggataccgcatgaagtttgcctgctattacccccgtgtggaatacggtttccaggtcaaagtcctaagagaggactcccgggccgcgtttcgattattcgaaaccaagatcactcaggtactccactttaccaaagatgtgaaggctgccgctaaccagatgcgcaatttcctcgttagggcatcctgcagactgaggcttgagccaggcaaagagtatttaattatgggcttggacggagcaacttatgacctcgagggtcatccacagtaccttctcgacagtaactcctggatcgaggagatgccaagcgagaggctgtgtaggagcaccaggcagagggcagcgtgcgcgcaattgaatgatttcctgcaagagtacggcactcaggggtgccaggtgtag

SEQ ID NO: 88325 - DNA, 813 bp, Artificial Sequence
  derived and/or modified sequence
atgtgtccggaggacagtctacaagtgccactgaaagatgccaaatcctgcggtttgcaccaacttcttagagggccagaggtgcagctggtagcacactctccatggcttaaggacagtttaagtcgcaccacaaacatccaaggcatcaatctgctcttttcctctcgccgcggccatctgttcttacaaacagatcagccaatttacaacccaggtcaaagggtccggtatcgcgttttcgccctggatcaaaagatgcgccccagcacagatactatcaccgtaatggtagagaatagccacggattgcgtgtaaggaaaaaggaagtgtacatgccttcgagcattttccaagacgattttgtgatcccagacatttctgagcctggtacttggaaaatcagtgcccgcttctccgacggattagagtccaactctagcactcagttcgaggttaaaaagtacgtactccccaattttgaggtcaagatcacccctggcaaaccatacatcctgacggtcccgggacaccttgacgaaatgcagttggacatccaggcccgctacatctatggtaaacccgtgcagggagtggcatacgtccgtttcggtctactagatgaagacggtaagaagaccttctttcgtggcctggaatctcagacaaaacttgtcaatggtcagtcacatatctccttgagcaaagctgagtttcaagatgccctagaaaagctgaacatgggcatcacggacctgcagggtctgaggctgtacgttgccgcagcaataattgagtcccccggagggtag

SEQ ID NO: 88326 - DNA, 5097 bp, Artificial Sequence
  derived and/or modified sequence
atgagactgctgtggggccttatatgggcttcttctttttttaccttatccctccagaagcccaggctactcctgttttctccctccgtcgtccacctgggcgttccactctcagttggtgtgcagctccaagacgttccaagaggtcaagtggttaaaggatcggtattccttcgaaacccatcccgcaataatgtaccttgctccccaaaagtggactttacactgtcgtccgagcgcgatttcgccctgcttagtctgcaagtgcccctgaaagatgccaagtcctgtggactgcaccagctcctcagggggccagaggtacagcttgtagcgcatagcccgtggcttaaagactccctgtcacgcactactaatatccaaggaatcaacttattgttctccagcagacgagggcatcttttcctccaaaccgaccagccaatttacaatcccggccagagagtaagataccgtgtcttcgctttagaccagaaaatgagaccctctactgacactatcactgtgatggtggaaaacagccatggcttaagagtcagaaagaaagaagtctatatgcccagctctattttccaagacgatttcgtaatacccgatatctctgaacccggaacatggaagatttcagcgagatttagcgatggactggagagcaacagcagtacacagttcgaagtgaagaaatatgtgctccctaacttcgaagttaaaatcaccccaggcaagccctacatcttaaccgttcccggccacctagacgaaatgcagctggatattcaggctcgctacatatatggaaagcccgtgcagggcgtggcttacgtgagatttggactgctagatgaggacggtaagaaaacattttttagaggtctcgaatcgcaaactaagcttgtcaacggccagagccacatcagcctctctaaagccgaattccaggacgctcttgagaagttaaacatgggaatcacagacctccagggcttgagactctacgtcgctgctgccattattgagtcaccaggaggagaaatggaggaagctgagctgacaagttggtactttgtgtcgtcacccttcagtcttgatctgtctaaaactaagcggcacctcgttcccggcgcccctttcctcctgcaggcgttagtccgtgagatgagtggctcccctgcatccgggatcccagtgaaggtttccgccacagtcagtagtcccgggtccgtgccagaagtccaggatattcaacagaacaccgatggaagcggccaggtatctatccctatcattataccccaaaccatttcagaactccagctttcagtgtctgccgggtcccctcatcctgcaatcgcccgccttacggtcgctgccccccccagtggaggacccgggttcctgagcatcgagcgaccagatagtagaccaccccgcgtaggggacacactaaacttgaatctcagagccgtgggctccggagccactttctctcattattattacatgatcctcagccgcggccagatagtcttcatgaatagagaaccaaaaaggacattaactagtgtgtcagtttttgtcgaccatcatctggctccatctttttattttgtcgccttctattatcatggtgatcatcctgtggcaaacagtctcagggtagatgtccaagctggagcatgcgaaggtaaactggagttgtcagtagatggcgctaaacagtatcgcaacggcgagtctgtgaaactccatttggaaacagatagcttagcactcgtagccctgggcgctctcgacactgccttgtacgcagctggttcgaaatctcataagcctcttaatatgggcaaggtgtttgaggccatgaactcatatgacttaggatgcggccctggcgggggcgatagtgctctccaggtattccaggcagccggattagccttcagcgatggagatcaatggaccttatcaagaaaacgcctgtcttgccccaaggaaaagactacaaggaagaaaagaaacgtcaactttcagaaagccatcaacgaaaagctggggcagtatgcctccccgaccgctaaaagatgctgtcaggacggggtgacaaggctccccatgatgagaagctgcgagcaacgagctgctagagtccagcagccagactgcagagagccgtttctgtcatgttgtcaattcgctgagtcgttacgcaagaagtcaagggataaggggcaggccggacttcagagagcactggagatacttcaggaggaggaccttattgacgaagacgatatccccgtgagatccttctttccagaaaactggctttggcgcgttgaaacagtagacaggttccaaattctgacactgtggctgccagatagcctgactacttgggaaattcatggactttcactcagtaaaacaaaaggactatgtgtcgcgacgccagtgcagctgagagtgtttcgcgagtttcacttacacttacgactgcctatgagcgtccgtagatttgagcagttagaattgcggcccgtgctgtacaattatctggacaaaaatctgaccgtgtcggtgcacgtgtcacctgttgaaggattgtgtctcgccggaggaggtgggctggctcagcaggttctggttccagccgggtctgcgcgccctgtggcttttagcgtcgtgcccactgccgctgccgccgtgtctctaaaggtagtcgctcgggggtccttcgaatttccagtcggcgatgcagtctccaaagtcctacaaatcgaaaaagaaggtgctattcacagggaagagcttgtgtatgagctgaatccattagaccataggggtagaaccttagaaataccgggaaactctgaccctaatatgatccccgacggagacttcaatagctacgtgcgcgtgaccgccagtgatcccttagacactctcgggtctgaaggcgccctgagtcccggaggagtggcatctctgctgagactaccgagaggctgcggcgagcaaaccatgatatatctggcccccacacttgctgcctcacgatacctggataagaccgagcaatggagtaccctcccgcccgagaccaaggatcacgccgtcgatttaattcagaagggttacatgcgaatacaacaatttagaaaggctgacggttcttacgctgcatggctgtcacgcgatagctcaacttggctcacagccttcgtgctcaaagtgctgtcactggctcaggaacaggtcggcggatcacctgagaagctgcaggagacttctaattggctgctctcccagcagcaagcagacggctcttttcaagatccatgtcccgtccttgacagatcaatgcagggaggacttgtcggcaacgatgaaactgttgctctcaccgcatttgtaaccatagcacttcatcatggtctcgcagtatttcaggacgagggtgccgagcccttgaagcaacgagttgaggcctccataagtaaagccaattcttttctgggggagaaggcctcggcaggactcctcggagcccatgcagcagccattacagcctacgccctcaccttgacgaaagcacccgtcgacctgctgggggtggcacataacaacttaatggccatggcacaggaaaccggtgataatttgtattggggctccgtaactggctctcagtcgaatgcagtctcccctactccagcgcctaggaacccctccgatcccatgccacaagcacctgcactttggatagagacaacagcctatgccctcctgcatttattgctccacgaaggcaaagcggagatggctgaccaagcctccgcctggctaacaagacagggtagttttcaaggcggttttcgaagcactcaggataccgtgattgcattggacgccctatcagcttattggattgcctcccacacaaccgaagagcgcggcctaaacgttactctctcctccactgggcgcaacggcttcaagagtcatgccttacagttgaacaatagacagattaggggactcgaggaagaactgcaatttagtcttggctctaaaattaatgtgaaagttggcggcaattctaaagggacgcttaaggtactgcgcacatacaacgtgctggatatgaaaaatactacctgccaagatctccaaatagaggtgaccgtgaagggacacgtggaatacacaatggaggccaatgaagactacgaggactatgaatatgatgagttacctgctaaggatgaccctgacgccccgttacaacctgtcactcccttgcaactgtttgagggcagaaggaaccgtagaagaagagaagcccccaagctgactagtctctccgatcgttatgtgagccactttgaaactgagggtccccatgttcttctttattttgatagtgtgccaacaagtcgagaatgtgtcgggtttgaagccgtgcaagaagttcctgtggggcttgtacagccagcttctgctacattatatgactattataatcctgaaaggaggtgttctgtcttctatggggcccctagcaaaagtcggttactagctaccctgtgctcagccgaagtatgtcagtgtgctgaaggaaaatgtcctcgtcagagacgggccctggagcgcggacttcaagacgaagatggttaccgcatgaagtttgcttgttactatcctagggtggagtatggctttcaggtgaaggtccttcgggaggacagcagggctgcatttagactatttgaaactaaaattacccaggtcctgcacttcaccaaggacgtcaaggctgccgcaaaccagatgaggaatttcctagtgcgagccagttgccgcctgagactggagcccggaaaagaatatttaatcatggggttggacggagccacttatgatttagaggggcacccacagtatctgttagattccaatagttggatagaggaaatgccatcagagagactctgtaggtccacccgccagagagcagcatgcgcccagttgaatgacttcttacaagaatacggtactcaaggctgtcaggtgtag

SEQ ID NO: 88327 - DNA, 813 bp, Artificial Sequence
  derived and/or modified sequence
atgtgtcccgaagattcgctgcaggtccccctgaaggatgccaaaagctgtggcttacaccagctcctccgcggaccagaggtccagctagtggcccactcgccatggctcaaagactcgcttagtcggaccactaatattcaaggaataaatttacttttctcctctaggcgcggtcatttgttcttgcaaaccgatcagccaatttataacccaggccagagagtaaggtatagagtgtttgcattagaccagaaaatgcgacccagtaccgataccatcaccgtgatggttgagaatagtcacgggctgagggtgagaaagaaagaagtgtatatgcctagcagcatctttcaggacgactttgtgatacccgacattagtgaaccaggtacttggaagatttcggctagattctctgatgggctggagtcaaactcaagcacccaatttgaggtgaaaaaatacgtcctgccaaatttcgaggtaaaaatcactcccggaaaaccttacatcctcacagtccccggtcatctcgacgaaatgcagctggacattcaggctcgatacatttacggcaagcctgtgcagggagtagcctatgtgagatttggactgttagatgaagatggcaagaagacttttttccggggcctggagtcacagaccaagctggtaaatggccagtcgcatatttctctgtcaaaggccgagttccaggatgcgctagagaagctgaacatgggcattaccgatctgcaaggactgcgactgtacgtagcggcagccatcatagagtcacccggggggtag

SEQ ID NO: 88328 - DNA, 5269 bp, Artificial Sequence
  derived and/or modified sequence
gacagacagacggatctaacctctcttggatcctccagccatgaggctgctctgggggctgatctgggcatccagcttcttcaccttatctctgcagaagcccaggttgctcttgttctctccttctgtggttcatctgggggtccccctatcggtgggggtgcagctccaggatgtgccccgaggacaggtagtgaaaggatcagtgttcctgagaaacccatctcgtaataatgtcccctgctccccaaaggtggacttcacccttagctcagaaagagacttcgcactcctcagtctccaggtgcccttgaaagatgcgaagagctgtggcctccatcaactcctcagaggccctgaggtccagctggtggcccattcgccatggctaaaggactctctgtccagaacgacaaacatccagggtatcaacctgctcttctcctctcgccgggggcacctctttttgcagacggaccagcccatttacaaccctggccagcgggttcggtaccgggtctttgctctggatcagaagatgcgcccgagcactgacaccatcacagtcatggtggagaactctcacggcctccgcgtgcggaagaaggaggtgtacatgccctcgtccatcttccaggatgactttgtgatcccagacatctcagagccagggacctggaagatctcagcccgattctcagatggcctggaatccaacagcagcacccagtttgaggtgaagaaatatgtccttcccaactttgaggtgaagatcacccctggaaagccctacatcctgacggtgccaggccatcttgatgaaatgcagttagacatccaggccaggtacatctatgggaagccagtgcagggggtggcatatgtgcgctttgggctcctagatgaggatggtaagaagactttctttcgggggctggagagtcagaccaagctggtgaatggacagagccacatttccctctcaaaggcagagttccaggacgccctggagaagctgaatatgggcattactgacctccaggggctgcgcctctacgttgctgcagccatcattgagtctccaggtggggagatggaggaggcagagctcacatcctggtattttgtgtcatctcccttctccttggatcttagcaagaccaagcgacaccttgtgcctggggcccccttcctgctgcaggccttggtccgtgagatgtcaggctccccagcttctggcattcctgtcaaagtttctgccacggtgtcttctcctgggtctgttcctgaagtccaggacattcagcaaaacacagacgggagcggccaagtcagcattccaataattatccctcagaccatctcagagctgcagctctcagtatctgcaggctccccacatccagcgatagccaggctcactgtggcagccccaccttcaggaggccccgggtttctgtctattgagcggccggattctcgacctcctcgtgttggggacactctgaacctgaacttgcgagccgtgggcagtggggccaccttttctcattactactacatgatcctatcccgagggcagatcgtgttcatgaatcgagagcccaagaggaccctgacctcggtctcggtgtttgtggaccatcacctggcaccctccttctactttgtggccttctactaccatggagaccacccagtggccaactccctgcgagtggatgtccaggctggggcctgcgagggcaagctggagctcagcgtggacggtgccaagcagtaccggaacggggagtccgtgaagctccacttagaaaccgactccctagccctggtggcgctgggagccttggacacagctctgtatgctgcaggcagcaagtcccacaagcccctcaacatgggcaaggtctttgaagctatgaacagctatgacctcggctgtggtcctgggggtggggacagtgcccttcaggtgttccaggcagcgggcctggccttttctgatggagaccagtggaccttatccagaaagagactaagctgtcccaaggagaagacaacccggaaaaagagaaacgtgaacttccaaaaggcgattaatgagaaattgggtcagtatgcttccccgacagccaagcgctgctgccaggatggggtgacacgtctgcccatgatgcgttcctgcgagcagcgggcagcccgcgtgcagcagccggactgccgggagcccttcctgtcctgctgccaatttgctgagagtctgcgcaagaagagcagggacaagggccaggcgggcctccaacgagccctggagatcctgcaggaggaggacctgattgatgaggatgacattcccgtgcgcagcttcttcccagagaactggctctggagagtggaaacagtggaccgctttcaaatattgacactgtggctccccgactctctgaccacgtgggagatccatggcctgagcctgtccaaaaccaaaggcctatgtgtggccaccccagtccagctccgggtgttccgcgagttccacctgcacctccgcctgcccatgtctgtccgccgctttgagcagctggagctgcggcctgtcctctataactacctggataaaaacctgactgtgagcgtccacgtgtccccagtggaggggctgtgcctggctgggggcggagggctggcccagcaggtgctggtgcctgcgggctctgcccggcctgttgccttctctgtggtgcccacggcagccgccgctgtgtctctgaaggtggtggctcgagggtccttcgaattccctgtgggagatgcggtgtccaaggttctgcagattgagaaggaaggggccatccatagagaggagctggtctatgaactcaaccccttggaccaccgaggccggaccttggaaatacctggcaactctgatcccaatatgatccctgatggggactttaacagctacgtcagggttacagcctcagatccattggacactttaggctctgagggggccttgtcaccaggaggcgtggcctccctcttgaggcttcctcgaggctgtggggagcaaaccatgatctacttggctccgacactggctgcttcccgctacctggacaagacagagcagtggagcacactgcctcccgagaccaaggaccacgccgtggatctgatccagaaaggctacatgcggatccagcagtttcggaaggcggatggttcctatgcggcttggttgtcacgggacagcagcacctggctcacagcctttgtgttgaaggtcctgagtttggcccaggagcaggtaggaggctcgcctgagaaactgcaggagacatctaactggcttctgtcccagcagcaggctgacggctcgttccaggacccctgtccagtgttagacaggagcatgcaggggggtttggtgggcaatgatgagactgtggcactcacagcctttgtgaccatcgcccttcatcatgggctggccgtcttccaggatgagggtgcagagccattgaagcagagagtggaagcctccatctcaaaggcaaactcatttttgggggagaaagcaagtgctgggctcctgggtgcccacgcagctgccatcacggcctatgccctgacactgaccaaggcgcctgtggacctgctcggtgttgcccacaacaacctcatggcaatggcccaggagactggagataacctgtactggggctcagtcactggttctcagagcaatgccgtgtcgcccaccccggctcctcgcaacccatccgaccccatgccccaggccccagccctgtggattgaaaccacagcctacgccctgctgcacctcctgcttcacgagggcaaagcagagatggcagaccaggcttcggcctggctcacccgtcagggcagcttccaagggggattccgcagtacccaagacacggtgattgccctggatgccctgtctgcctactggattgcctcccacaccactgaggagaggggtctcaatgtgactctcagctccacaggccggaatgggttcaagtcccacgcgctgcagctgaacaaccgccagattcgcggcctggaggaggagctgcagttttccttgggcagcaagatcaatgtgaaggtgggaggaaacagcaaaggaaccctgaaggtccttcgtacctacaatgtcctggacatgaagaacacgacctgccaggacctacagatagaagtgacagtcaaaggccacgtcgagtacacgatggaagcaaacgaggactatgaggactatgagtacgatgagcttccagccaaggatgacccagatgcccctctgcagcccgtgacacccctgcagctgtttgagggtcggaggaaccgccgcaggagggaggcgcccaagctgacctccctctctgaccgttacgtgagtcactttgagaccgaggggccccacgtcctgctgtattttgactcggtccccacctcccgggagtgcgtgggctttgaggctgtgcaggaagtgccggtggggctggtgcagccggccagcgcaaccctgtacgactactacaaccccgagcgcagatgttctgtgttttacggggcaccaagtaagagcagactcttggccaccttgtgttctgctgaagtctgccagtgtgctgaggggaagtgccctcgccagcgtcgcgccctggagcggggtctgcaggacgaggatggctacaggatgaagtttgcctgctactacccccgtgtggagtacggcttccaggttaaggttctccgagaagacagcagagctgctttccgcctctttgagaccaagatcacccaagtcctgcacttcaccaaggatgtcaaggccgctgctaatcagatgcgcaacttcctggttcgagcctcctgccgccttcgcttggaacctgggaaagaatatttgatcatgggtctggatggggccacctatgacctcgagggacacccccagtacctgctggactcgaatagctggatcgaggagatgccctctgaacgcctgtgccggagcacccgccagcgggcagcctgtgcccagctcaacgacttcctccaggagtatggcactcaggggtgccaggtgtgagggctgccctcccacctccgctgggaggaacctgaacctgggaaccatgaagctggaagcactgctgtgtccgctttcatgaacacagcctgggaccagggcatattaaaggcttttggcagcaaagtgtca

SEQ ID NO: 88329 - DNA, 813 bp, Artificial Sequence
  derived and/or modified sequence
atgtgccccgaggacagtctccaggtgcccttgaaagatgcgaagagctgtggcctccatcaactcctcagaggccctgaggtccagctggtggcccattcgccatggctaaaggactctctgtccagaacgacaaacatccagggtatcaacctgctcttctcctctcgccgggggcacctctttttgcagacggaccagcccatttacaaccctggccagcgggttcggtaccgggtctttgctctggatcagaagatgcgcccgagcactgacaccatcacagtcatggtggagaactctcacggcctccgcgtgcggaagaaggaggtgtacatgccctcgtccatcttccaggatgactttgtgatcccagacatctcagagccagggacctggaagatctcagcccgattctcagatggcctggaatccaacagcagcacccagtttgaggtgaagaaatatgtccttcccaactttgaggtgaagatcacccctggaaagccctacatcctgacggtgccaggccatcttgatgaaatgcagttagacatccaggccaggtacatctatgggaagccagtgcagggggtggcatatgtgcgctttgggctcctagatgaggatggtaagaagactttctttcgggggctggagagtcagaccaagctggtgaatggacagagccacatttccctctcaaaggcagagttccaggacgccctggagaagctgaatatgggcattactgacctccaggggctgcgcctctacgttgctgcagccatcattgagtctccaggtgggtga

SEQ ID NO: 88330 - DNA, 5181 bp, Artificial Sequence
  derived and/or modified sequence
agagtcaactctgccccgaggcctagcttggccagaaggtagcagacagacagacggatctaacctctcttggatcctccagccatgaggctgctctgggggctgatctgggcatccagcttcttcaccttatctctgcagaagcccaggttgctcttgttctctccttctgtggttcatctgggggtccccctatcggtgggggtgcagctccaggatgtgccccgaggacaggtagtgaaaggatcagtgttcctgagaaacccatctcgtaataatgtcccctgctccccaaaggtggacttcacccttagctcagaaagagacttcgcactcctcagtctccaggtgcccttgaaagatgcgaagagctgtggcctccatcaactcctcagaggccctgaggtccagctggtggcccattcgccatggctaaaggactctctgtccagaacgacaaacatccagggtatcaacctgctcttctcctctcgccgggggcacctctttttgcagacggaccagcccatttacaaccctggccagcgggttcggtaccgggtctttgctctggatcagaagatgcgcccgagcactgacaccatcacagtcatggtggagaactctcacggcctccgcgtgcggaagaaggaggtgtacatgccctcgtccatcttccaggatgactttgtgatcccagacatctcagagccagggacctggaagatctcagcccgattctcagatggcctggaatccaacagcagcacccagtttgaggtgaagaaatatgtccttcccaactttgaggtgaagatcacccctggaaagccctacatcctgacggtgccaggccatcttgatgaaatgcagttagacatccaggccaggtacatctatgggaagccagtgcagggggtggcatatgtgcgctttgggctcctagatgaggatggtaagaagactttctttcgggggctggagagtcagaccaagctggtgaatggacagagccacatttccctctcaaaggcagagttccaggacgccctggagaagctgaatatgggcattactgacctccaggggctgcgcctctacgttgctgcagccatcattgagtatccaggtggggagatggaggaggcagagctcacatcctggtattttgtgtcatctcccttctccttggatcttagcaagaccaagcgacaccttgtgcctggggcccccttcctgctgcaggccttggtccgtgagatgtcaggctccccagcttctggcattcctgtcaaagtttctgccacggtgtcttctcctgggtctgttcctgaagtccaggacattcagcaaaacacagacgggagcggccaagtcagcattccaataattatccctcagaccatctcagagctgcagctctcagtatctgcaggctccccacatccagcgatagccaggctcactgtggcagccccaccttcaggaggccccgggtttctgtctattgagtggccggattctcgacctcctcgtgttggggacactctgaacctgaacttgcgagccgtgggcagtggggccaccttttctcattactactacatgatcctatcccgagggcagatcgtgttcatgaatcgagagcccaagaggaccctgacctcggtctcggtgtttgtggaccatcacctggcaccctccttctactttgtggccttctactaccatggagaccacccagtggccaactccctgcgagtggatgtccaggctggggcctgcgagggcaagctggagctcagcgtggacggtgccaagcagtaccggaacggggagtccgtgaagctccacttagaaaccgactccctagccctggtggcgctgggagccttggacacagctctgtatgctgcaggcagcaagtcccacaagcccctcaacatgggcaaggtctttgaagctatgaacagctatgacctcggctgtggtcctgggggtggggacagtgcccttcaggtgttccaggcagcgggcctggccttttctgatggagaccagtggaccttatccagaaagagactaagctgtcccaaggagaagacaacccggaaaaagagaaacgtgaacttccaaaaggcgattaatgagaaattgggtcagtatgcttccccgacagccaagcgctgctgccaggatggggtgacacgtctgcccatgatgcgttcctgcgagcagcgggcagcccgcgtgcagcagccggactgccgggagcccttcctgtcctgctgccaatttgctgagagtctgcgcaagaagagcagggacaagggccaggcgggcctccaacgagccctggagatcctgcaggaggaggacctgattgatgaggatgacattcccgtgcgcagcttcttcccagagaactggctctggagagtggaaacagtggaccgctttcaaatattgacactgtggctccccgactctctgaccacgtgggagatccatggcctgagcctgtccaaaaccaaaggcctatgtgtggccaccccagtccagctccgggtgttccgcgagttccacctgcacctccgcctgcccatgtctgtccgccgctttgagcagctggagctgcggcctgtcctctataactacctggataaaaacctgactgtgagcgtccacgtgtccccagtggaggggctgtgcctggctgggggcggagggctggcccagcaggtgctggtgcctgcgggctctgcccggcctgttgccttctctgtggtgcccacggcagccgccgctgtgtctctgaaggtggtggctcgagggtccttcgaattccctgtgggagatgcggtgtccaaggttctgcagattgagaaggaaggggccatccatagagaggagctggtctatgaactcaaccccttggaccaccgaggccggaccttggaaatacctggcaactctgatcccaatatgatccctgatggggactttaacagctacgtcagggttacagcctcagatccattggacactttaggctctgagggggccttgtcaccaggaggcgtggcctccctcttgaggcttcctcgaggctgtggggagcaaaccatgatctacttggctccgacactggctgcttcccgctacctggacaagacagagcagtggagcacactgcctcccgagaccaaggaccacgccgtggatctgatccagaaaggctacatgcggatccagcagtttcggaaggcggatggttcctatgcggcttggttgtcacgggacagcagcacctggctcacagcctttgtgttgaaggtcctgagtttggcccaggagcaggtaggaggctcgcctgagaaactgcaggagacatctaactggcttctgtcccagcagcaggctgacggctcgttccaggacccctgtccagtgttagacaggagcatgcaggggggtttggtgggcaatgatgagactgtggcactcacagcctttgtgaccatcgcccttcatcatgggctggccgtcttccaggatgagggtgcagagccattgaagcagagagtggaagcctccatctcaaaggcaaactcatttttgggggagaaagcaagtgctgggctcctgggtgcccacgcagctgccatcacggcctatgccctgacactgaccaaggcgcctgtggacctgctcggtgttgcccacaacaacctcatggcaatggcccaggagactggagataacctgtactggggctcagtcactggttctcagagcaatgccgtgtcgcccaccccggctcctcgcaacccatccgaccccatgccccaggccccagccctgtggattgaaaccacagcctacgccctgctgcacctcctgcttcacgagggcaaagcagagatggcagaccaggctgcggcctggctcacccgtcagggcagcttccaagggggattccgcagtacccaagacacggtgattgccctggatgccctgtctgcctactggattgcctcccacaccactgaggagaggggtctcaatgtgactctcagctccacaggccggaatgggttcaagtcccacgcgctgcagctgaacaaccgccagattcgcggcctggaggaggagctgcagttttccttgggcagcaagatcaatgtgaaggtgggaggaaacagcaaaggaaccctgaaggtccttcgtacctacaatgtcctggacatgaagaacacgacctgccaggacctacagatagaagtgacagtcaaaggccacgtcgagtacacgatggaagcaaacgaggactatgaggactatgagtacgatgagcttccagccaaggatgacccagatgcccctctgcagcccgtgacacccctgcagctgtttgagggtcggaggaaccgccgcaggagggaggcgcccaagctgacctccctctctgaccgttacgtgagtcactttgagaccgaggggccccacgtcctgctgtattttgactcggtccccacctcccgggagtgcgtgggctttgaggctgtgcaggaagtgccggtggggctggtgcagccggccagcgcaaccctgtacgactactacaaccccgagcgcagatgttctgtgttttacggggcaccaagtaagagcagactcttggccaccttgtgttctgctgaagtctgccagtgtgctgaggggaagtgccctcgccagcgtcgcgccctggagcggggtctgcaggacgaggatggctacaggatgaagtttgcctgctactacccccgtgtggagtacggcttccaggttaaggttctccgagaagacagcagagctgctttccgcctctttgagaccaagatcacccaagtcctgcacttcaccaaggatgtcaaggccgctgctaatcagatgcgcaacttcctggttcgagcctcctgccgccttcgcttggaacctgggaaagaatatttgatcatgggtctggatggggccacctatgacctcgagggacacccccagtacctgctggactcgaatagctggatcgaggagatgccctctgaacgcctgtgccggagcacccgccagcgggcagcctgtgcccagctcaacgacttcctccaggagtatggcactcaggggtgccaggtgtga

SEQ ID NO: 88331 - DNA, 5268 bp, Artificial Sequence
  derived and/or modified sequence
gacagacagacggatctaacctctcttggatcctccagccatgaggctgctctgggggctgatctgggcatccagcttcttcaccttatctctgcagaagcccaggttgctcttgttctctccttctgtggttcatctgggggtccccctatcggtgggggtgcagctccaggatgtgccccgaggacaggtagtgaaaggatcagtgttcctgagaaacccatctcgtaataatgtcccctgctccccaaaggtggacttcacccttagctcagaaagagacttcgcactcctcagtctccaggtgcccttgaaagatgcgaagagctgtggcctccatcaactcctcagaggccctgaggtccagctggtggcccattcgccatggctaaaggactctctgtccagaacgacaaacatccagggtatcaacctgctcttctcctctcgccgggggcacctctttttgcagacggaccagcccatttacaaccctggccagcgggttcggtaccgggtctttgctctggatcagaagatgcgcccgagcactgacaccatcacagtcatggtggagaactctcacggcctccgcgtgcggaagaaggaggtgtacatgccctcgtccatcttccaggatgactttgtgatcccagacatctcagagccagggacctggaagatctcagcccgattctcagatggcctggaatccaacagcagcacccagtttgaggtgaagaaatatgtccttcccaactttgaggtgaagatcacccctggaaagccctacatcctgacggtgccaggccatcttgatgaaatgcagttagacatccaggccaggtacatctatgggaagccagtgcagggggtggcatatgtgcgctttgggctcctagatgaggatggtaagaagactttctttcgggggctggagagtcagaccaagctggtgaatggacagagccacatttccctctcaaaggcagagttccaggacgccctggagaagctgaatatgggcattactgacctccaggggctgcgcctctacgttgctgcagccatcattgagtctccaggtggggagatggaggaggcagagctcacatcctggtattttgtgtcatctcccttctccttggatcttagcaagaccaagcgacaccttgtgcctggggcccccttcctgctgcaggccttggtccgtgagatgtcaggctccccagcttctggcattcctgtcaaagtttctgccacggtgtcttctcctgggtctgttcctgaagtccaggacattcagcaaaacacagacgggagcggccaagtcagcattccaataattatccctcagaccatctcagagctgcagctctcagtatctgcaggctccccacatccagcgatagccaggctcactgtggcagccccaccttcaggaggccccgggtttctgtctattgagcggccggattctcgacctcctcgtgttggggacactctgaacctgaacttgcgagccgtgggcagtggggccaccttttctcattactactacatgatcctatcccgagggcagatcgtgttcatgaatcgagagcccaagaggaccctgacctcggtctcggtgtttgtggaccatcacctggcaccctccttctactttgtggccttctactaccatggagaccacccagtggccaactccctgcgagtggatgtccaggctggggcctgcgagggcaagctggagctcagcgtggacggtgccaagcagtaccggaacggggagtccgtgaagctccacttagaaaccgactccctagccctggtggcgctgggagccttggacacagctctgtatgctgcaggcagcaagtcccacaagcccctcaacatgggcaaggtctttgaagctatgaacagctatgacctcggctgtggtcctgggggtggggacagtgcccttcaggtgttccaggcagcgggcctggccttttctgatggagaccagtggaccttatccagaaagagactaagctgtcccaaggagaagacaacccggaaaaagagaaacgtgaacttccaaaaggcgattaatgagaaattgggtcagtatgcttccccgacagccaagcgctgctgccaggatggggtgacacgtctgcccatgatgcgttcctgcgagcagcgggcagcccgcgtgcagcagccggactgccgggagcccttcctgtcctgctgccaatttgctgagagtctgcgcaagaagagcagggacaagggccaggcgggcctccaacgagccctggagatcctgcaggaggaggacctgattgatgaggatgacattcccgtgcgcagcttcttcccagagaactggctctggagagtggaaacagtggaccgctttcaaatattgacactgtggctccccgactctctgaccacgtgggagatccatggcctgagcctgtccaaaaccaaaggcctatgtgtggccaccccagtccagctccgggtgttccgcgagttccacctgcacctccgcctgcccatgtctgtccgccgctttgagcagctggagctgcggcctgtcctctataactacctggataaaaacctgactgtgagcgtccacgtgtccccagtggaggggctgtgcctggctgggggcggagggctggcccagcaggtgctggtgcctgcgggctctgcccggcctgttgccttctctgtggtgcccacggcagccgccgctgtgtctctgaaggtggtggctcgagggtccttcgaattccctgtgggagatgcggtgtccaaggttctgcagattgagaaggaaggggccatccatagagaggagctggtctatgaactcaaccccttggaccaccgaggccggaccttggaaatacctggcaactctgatcccaatatgatccctgatggggactttaacagctacgtcagggttacagcctcagatccattggacactttaggctctgagggggccttgtcaccaggaggcgtggcctccctcttgaggcttcctcgaggctgtggggagcaaaccatgatctacttggctccgacactggctgcttcccgctacctggacaagacagagcagtggagcacactgcctcccgagaccaaggaccacgccgtggatctgatccagaaaggctacatgcggatccagcagtttcggaaggcggatggttcctatgcggcttggttgtcacgggacagcagcacctggctcacagcctttgtgttgaaggtcctgagtttggcccaggagcaggtaggaggctcgcctgagaaactgcaggagacatctaactggcttctgtcccagcagcaggctgacggctcgttccaggacccctgtccagtgttagacaggagcatgcaggggggtttggtgggcaatgatgagactgtggcactcacagcctttgtgaccatcgcccttcatcatgggctggccgtcttccaggatgagggtgcagagccattgaagcagagagtggaagcctccatctcaaaggcaagctcatttttgggggagaaagcaagtgctgggctcctgggtgcccacgcagctgccatcacggcctatgccctgacactgaccaaggcgcctgtggacctgctcggtgttgcccacaacaacctcatggcaatggcccaggagactggagataacctgtactggggctcagtcactggttctcagagcaatgccgtgtcgcccaccccggctcctcgcaacccatccgaccccatgccccaggccccagccctgtggattgaaaccacagcctacgccctgctgcacctcctgcttcacgagggcaaagcagagatggcagaccaggctgcggcctggctcacccgtcagggcagcttccaagggggattccgcagtacccaagacacggtgattgccctggatgccctgtctgcctactggattgcctcccacaccactgaggagaggggtctcaatgtgactctcagctccacaggccggaatgggttcaagtcccacgcgctgcagctgaacaaccgccagattcgcggcctggaggaggagctgcagttttccttgggcagcaagatcaatgtgaaggtgggaggaaacagcaaaggaaccctgaaggtccttcgtacctacaatgtcctggacatgaagaacacgacctgccaggacctacagatagaagtgacagtcaaaggccacgtcgagtacacgatggaagcaaacgaggactatgaggactatgagtacgatgagcttccagccaaggatgacccagatgcccctctgcagcccgtgacacccctgcagctgtttgagggtcggaggaaccgccgcaggagggaggcgcccaagctgacctccctctctgaccgttacgtgagtcactttgagaccgaggggccccacgtcctgctgtattttgactcggtccccacctcccgggagtgcgtgggctttgaggctgtgcaggaagtgccggtggggctggtgcagccggccagcgcaaccctgtacgactactacaaccccgagcgcagatgttctgtgttttacggggcaccaagtaagagcagactcttggccaccttgtgttctgctgaagtctgccagtgtgctgaggggaagtgccctcgccagcgtcgcgccctggagcggggtctgcaggacgaggatggctacaggatgaagtttgcctgctactacccccgtgtggagtacggcttccaggttaaggttctccgagaagacagcagagctgctttccgcctctttgagaccaagatcacccaagtcctgcacttcaccaaggatgtcaaggccgctgctaatcagatgcgcaacttcctggttcgagcctcctgccgccttcgcttggaacctgggaaagaatatttgatcatgggtctggatggggccacctatgacctcgagggacacccccagtacctgctggactcgaatagctggatcgaggagatgccctctgaacgcctgtgccggagcacccgccagcgggcagcctgtgcccagctcaacgacttcctccaggagtatggcactcaggggtgccaggtgtgagggctgccctcccacctccgctgggaggaacctgaacctgggaaccatgaagctggaagcactgctgtgtccgctttcatgaacacagcctgggaccagggcatattaaaggcttttggcagcaaagtgtc

SEQ ID NO: 88332 - DNA, 5268 bp, Artificial Sequence
  derived and/or modified sequence
gacagacagacggatctaacctctcttggatcctccagccatgaggctgctctgggggctgatctgggcatccagcttcttcaccttatctctgcagaagcccaggttgctcttgttctctccttctgtggttcatctgggggtccccctatcggtgggggtgcagctccaggatgtgccccgaggacaggtagtgaaaggatcagtgttcctgagaaacccatctcgtaataatgtcccctgctccccaaaggtggacttcacccttagctcagaaagagacttcgcactcctcagtctccaggtgcccttgaaagatgcgaagagctgtggcctccatcaactcctcagaggccctgaggtccagctggtggcccattcgccatggctaaaggactctctgtccagaacgacaaacatccagggtatcaacctgctcttctcctctcgccgggggcacctctttttgcagacggaccagcccatttacaaccctggccagcgggttcggtaccgggtctttgctctggatcagaagatgcgcccgagcactgacaccatcacagtcatggtggagaactctcacggcctccgcgtgcggaagaaggaggtgtacatgccctcgtccatcttccaggatgactttgtgatcccagacatctcagagccagggacctggaagatctcagcccgattctcagatggcctggaatccaacagcagcacccagtttgaggtgaagaaatatgtccttcccaactttgaggtgaagatcacccctggaaagccctacatcctgacggtgccaggccatcttgatgaaatgcagttagacatccaggccaggtacatctatgggaagccagtgcagggggtggcatatgtgcgctttgggctcctagatgaggatggtaagaagactttctttcgggggctggagagtcagaccaagctggtgaatggacagagccacatttccctctcaaaggcagagttccaggacgccctggagaagctgaatatgggcattactgacctccaggggctgcgcctctacgttgctgcagccatcattgagtatccaggtggggagatggaggaggcagagctcacatcctggtattttgtgtcatctcccttctccttggatcttagcaagaccaagcgacaccttgtgcctggggcccccttcctgctgcaggccttggtccgtgagatgtcaggctccccagcttctggcattcctgtcaaagtttctgccacggtgtcttctcctgggtctgttcctgaagtccaggacattcagcaaaacacagacgggagcggccaagtcagcattccaataattatccctcagaccatctcagagctgcagctctcagtatctgcaggctccccacatccagcgatagccaggctcactgtggcagccccaccttcaggaggccccgggtttctgtctattgagcggccggattctcgacctcctcgtgttggggacactctgaacctgaacttgcgagccgtgggcagtggggccaccttttctcattactactacatgatcctatcccgagggcagatcgtgttcatgaatcgagagcccaagaggaccctgacctcggtctcggtgtttgtggaccatcacctggcaccctccttctactttgtggccttctactaccatggagaccacccagtggccaactccctgcgagtggatgtccaggctggggcctgcgagggcaagctggagctcagcgtggacggtgccaagcagtaccggaacggggagtccgtgaagctccacttagaaaccgactccctagccctggtggcgctgggagccttggacacagctctgtatgctgcaggcagcaagtcccacaagcccctcaacatgggcaaggtctttgaagctatgaacagctatgacctcggctgtggtcctgggggtggggacagtgcccttcaggtgttccaggcagcgggcctggccttttctgatggagaccagtggaccttatccagaaagagactaagctgtcccaaggagaagacaacccggaaaaagagaaacgtgaacttccaaaaggcgattaatgagaaattgggtcagtatgcttccccgacagccaagcgctgctgccaggatggggtgacacgtctgcccatgatgcgttcctgcgagcagcgggcagcccgcgtgcagcagccggactgccgggagcccttcctgtcctgctgccaatttgctgagagtctgcgcaagaagagcagggacaagggccaggcgggcctccaacgagccctggagatcctgcaggaggaggacctgattgatgaggatgacattcccgtgcgcagcttcttcccagagaactggctctggagagtggaaacagtggaccgctttcaaatattgacactgtggctccccgactctctgaccacgtgggagatccatggcctgagcctgtccaaaaccaaaggcctatgtgtggccaccccagtccagctccgggtgttccgcgagttccacctgcacctccgcctgcccatgtctgtccgccgctttgagcagctggagctgcggcctgtcctctataactacctggataaaaacctgactgtgagcgtccacgtgtccccagtggaggggctgtgcctggctgggggcggagggctggcccagcaggtgctggtgcctgcgggctctgcccggcctgttgccttctctgtggtgcccacggcagccgccgctgtgtctctgaaggtggtggctcgagggtccttcgaattccctgtgggagatgcggtgtccaaggttctgcagattgagaaggaaggggccatccatagagaggagctggtctatgaactcaaccccttggaccaccgaggccggaccttggaaatacctggcaactctgatcccaatatgatccctgatggggactttaacagctacgtcagggttacagcctcagatccattggacactttaggctctgagggggccttgtcaccaggaggcgtggcctccctcttgaggcttcctcgaggctgtggggagcaaaccatgatctacttggctccgacactggctgcttcccgctacctggacaagacagagcagtggagcacactgcctcccgagaccaaggaccacgccgtggatctgatccagaaaggctacatgcggatccagcagtttcggaaggcggatggttcctatgcggcttggttgtcacgggacagcagcacctggctcacagcctttgtgttgaaggtcctgagtttggcccaggagcaggtaggaggctcgcctgagaaactgcaggagacatctaactggcttctgtcccagcagcaggctgacggctcgttccaggacccctgtccagtgttagacaggagcatgcaggggggtttggtgggcaatgatgagactgtggcactcacagcctttgtgaccatcgcccttcatcatgggctggccgtcttccaggatgagggtgcagagccattgaagcagagagtggaagcctccatctcaaaggcaaactcatttttgggggagaaagcaagtgctgggctcctgggtgcccacgcagctgccatcacggcctatgccctgacactgaccaaggcgcctgtggacctgctcggtgttgcccacaacaacctcatggcaatggcccaggagactggagataacctgtactggggctcagtcactggttctcagagcaatgccgtgtcgcccaccccggctcctcgcaacccatccgaccccatgccccaggccccagccctgtggattgaaaccacagcctacgccctgctgcacctcctgcttcacgagggcaaagcagagatggcagaccaggctgcggcctggctcacccgtcagggcagcttccaagggggattccgcagtacccaagacacggtgattgccctggatgccctgtctgcctactggattgcctcccacaccactgaggagaggggtctcaatgtgactctcagctccacaggccggaatgggttcaagtcccacgcgctgcagctgaacaaccgccagattcgcggcctggaggaggagctgcagttttccttgggcagcaagatcaatgtgaaggtgggaggaaacagcaaaggaaccctgaaggtccttcgtacctacaatgtcctggacatgaagaacacgacctgccaggacctacagatagaagtgacagtcaaaggccacgtcgagtacacgatggaagcaaacgaggactatgaggactatgagtacgatgagcttccagccaaggatgacccagatgcccctctgcagcccgtgacacccctgcagctgtttgagggtcggaggaaccgccgcaggagggaggcgcccaagctgacctccctctctgaccgttacgtgagtcactttgagaccgaggggccccacgtcctgctgtattttgactcggtccccacctcccgggagtgcgtgggctttgaggctgtgcaggaagtgccggtggggctggtgcagccggccagcgcaaccctgtacgactactacaaccccgagcgcagatgttctgtgttttacggggcaccaagtaagagcagactcttggccaccttgtgttctgctgaagtctgccagtgtgctgaggggaagtgccctcgccagcgtcgcgccctggagcggggtctgcaggacgaggatggctacaggatgaagtttgcctgctactacccccgtgtggagtacggcttccaggttaaggttctccgagaagacagcagagctgctttccgcctctttgagaccaagatcacccaagtcctgcacttcaccaaggatgtcaaggccgctgctaatcagatgcgcaacttcctggttcgagcctcctgccgccttcgcttggaacctgggaaagaatatttgatcatgggtctagatggggccacctatgacctcgagggacacccccagtacctgctggactcgaatagctggatcgaggagatgccctctgaacgcctgtgccggagcacccgccagcgggcagcctgtgcccagctcaacgacttcctccaggagtatggcactcaggggtgccaggtgtgagggctgccctcccacctccgctgggaggaacctgaacctgggaaccatgaagctggaagcactgctgtgtccgctttcatgaacacagcctgggaccagggcatattaaaggcttttggcagcaaagtgtc

SEQ ID NO: 88333 - DNA, 5220 bp, Artificial Sequence
  derived and/or modified sequence
atgaggctgctctgggggctgatctgggcatccagcttcttcaccttatctctgcagaagcccaggttgctcttgttctctccttctgtggttcatctgggggtccccctatcggtgggggtgcagctccaggatgtgccccgaggacaggtagtgaaaggatcagtgttcctgagaaacccatctcgtaataatgtcccctgctccccaaaggtggacttcacccttagctcagaaagagacttcgcactcctcagtctccaggtgcccttgaaagatgcgaagagctgtggcctccatcaactcctcagaggccctgaggtccagctggtggcccattcgccatggctaaaggactctctgtccagaacgacaaacatccagggtatcaacctgctcttctcctctcgccgggggcacctctttttgcagacggaccagcccatttacaaccctggccagcgggttcggtaccgggtctttgctctggatcagaagatgcgcccgagcactgacaccatcacagtcatggtggagaactctcacggcctccgcgtgcggaagaaggaggtgtacatgccctcgtccatcttccaggatgactttgtgatcccagacatctcagagccagggacctggaagatctcagcccgattctcagatggcctggaatccaacagcagcacccagtttgaggtgaagaaatatgtccttcccaactttgaggtgaagatcacccctggaaagccctacatcctgacggtgccaggccatcttgatgaaatgcagttagacatccaggccaggtacatctatgggaagccagtgcagggggtggcatatgtgcgctttgggctcctagatgaggatggtaagaagactttctttcgggggctggagagtcagaccaagctggtgaatggacagagccacatttccctctcaaaggcagagttccaggacgccctggagaagctgaatatgggcattactgacctccaggggctgcgcctctacgttgctgcagccatcattgagtctccaggtggggagatggaggaggcagagctcacatcctggtattttgtgtcatctcccttctccttggatcttagcaagaccaagcgacaccttgtgcctggggcccccttcctgctgcaggccttggtccgtgagatgtcaggctccccagcttctggcattcctgtcaaagtttctgccacggtgtcttctcctgggtctgttcctgaagtccaggacattcagcaaaacacagacgggagcggccaagtcagcattccaataattatccctcagaccatctcagagctgcagctctcagtatctgcaggctccccacatccagcgatagccaggctcactgtggcagccccaccttcaggaggccccgggtttctgtctattgagcggccggattctcgacctcctcgtgttggggacactctgaacctgaacttgcgagccgtgggcagtggggccaccttttctcattactactacatgatcctatcccgagggcagatcgtgttcatgaatcgagagcccaagaggaccctgacctcggtctcggtgtttgtggaccatcacctggcaccctccttctactttgtggccttctactaccatggagaccacccagtggccaactccctgcgagtggatgtccaggctggggcctgcgagggcaagctggagctcagcgtggacggtgccaagcagtaccggaacggggagtccgtgaagctccacttagaaaccgactccctagccctggtggcgctgggagccttggacacagctctgtatgctgcaggcagcaagtcccacaagcccctcaacatgggcaaggtctttgaagctatgaacagctatgacctcggctgtggtcctgggggtggggacagtgcccttcaggtgttccaggcagcgggcctggccttttctgatggagaccagtggaccttatccagaaagagactaagctgtcccaaggagaagacaacccggaaaaagagaaacgtgaacttccaaaaggcgattaatgagaaattgggtcagtatgcttccccgacagccaagcgctgctgccaggatggggtgacacgtctgcccatgatgcgttcctgcgagcagcgggcagcccgcgtgcagcagccggactgccgggagcccttcctgtcctgctgccaatttgctgagagtctgcgcaagaagagcagggacaagggccaggcgggcctccaacgagccctggagatcctgcaggaggaggacctgattgatgaggatgacattcccgtgcgcagcttcttcccagagaactggctctggagagtggaaacagtggaccgctttcaaatattgacactgtggctccccgactctctgaccacgtgggagatccatggcctgagcctgtccaaaaccaaaggcctatgtgtggccaccccagtccagctccgggtgttccgcgagttccacctgcacctccgcctgcccatgtctgtccgccgctttgagcagctggagctgcggcctgtcctctataactacctggataaaaacctgactgtgagcgtccacgtgtccccagtggaggggctgtgcctggctgggggcggagggctggcccagcaggtgctggtgcctgcgggctctgcccggcctgttgccttctctgtggtgcccacggcagccaccgctgtgtctctgaaggtggtggctcgagggtccttcgaattccctgtgggagatgcggtgtccaaggttctgcagattgagaaggaaggggccatccatagagaggagctggtctatgaactcaaccccttggaccaccgaggccggaccttggaaatacctggcaactctgatcccaatatgatccctgatggggactttaacagctacgtcagggttacagcctcagatccattggacactttaggctctgagggggccttgtcaccaggaggcgtggcctccctcttgaggcttcctcgaggctgtggggagcaaaccatgatctacttggctccgacactggctgcttcccgctacctggacaagacagagcagtggagcacactgcctcccgagaccaaggaccacgccgtggatctgatccagaaaggctacatgcggatccagcagtttcggaaggcggatggttcctatgcggcttggttgtcacggggcagcagcacctggctcacagcctttgtgttgaaggtcctgagtttggcccaggagcaggtaggaggctcgcctgagaaactgcaggagacatctaactggcttctgtcccagcagcaggctgacggctcgttccaggacctctctccagtgatacataggagcatgcaggggggtttggtgggcaatgatgagactgtggcactcacagcctttgtgaccatcgcccttcatcatgggctggccgtcttccaggatgagggtgcagagccattgaagcagagagtggaagcctccatctcaaaggcaagctcatttttgggggagaaagcaagtgctgggctcctgggtgcccacgcagctgccatcacggcctatgccctgacactgaccaaggcccctgcggacctgcggggtgttgcccacaacaacctcatggcaatggcccaggagactggagataacctgtactggggctcagtcactggttctcagagcaatgccgtgtcgcccaccccggctcctcgcaacccatccgaccccatgccccaggccccagccctgtggattgaaaccacagcctacgccctgctgcacctcctgcttcacgagggcaaagcagagatggcagaccaggctgcggcctggctcacccgtcagggcagcttccaagggggattccgcagtacccaagacacggtgattgccctggatgccctgtctgcctactggattgcctcccacaccactgaggagaggggtctcaatgtgactctcagctccacaggccggaatgggttcaagtcccacgcgctgcagctgaacaaccgccagattcgcggcctggaggaggagctgcagttttccttgggcagcaagatcaatgtgaaggtgggaggaaacagcaaaggaaccctgaaggtccttcgtacctacaatgtcctggacatgaagaacacgacctgccaggacctacagatagaagtgacagtcaaaggccacgtcgagtacacgatggaagcaaacgaggactatgaggactatgagtacgatgagcttccagccaaggatgacccagatgcccctctgcagcccgtgacacccctgcagctgtttgagggtcggaggaaccgccgcaggagggaggcgcccaagctgacctccctctctgaccgttacgtgagtcactttgagaccgaggggccccacgtcctgctgtattttgactcggtccccacctcccgggagtgcgtgggctttgaggctgtgcaggaagtgccggtggggctggtgcagccggccagcgcaaccctgtacgactactacaaccccgagcgcagatgttctgtgttttacggggcaccaagtaagagcagactcttggccaccttgtgttctgctgaagtctgccagtgtgctgaggggaagtgccctcgccagcgtcgcgccctggagcggggtctgcaggacgaggatggctacaggatgaagtttgcctgctactacccccgtgtggagtacggcttccaggttaaggttctccgagaagacagcagagctgctttccgcctctttgagaccaagatcacccaagtcctgcacttcaccaaggatgtcaaggccgctgctaatcagatgcgcaacttcctggttcgagcctcctgccgccttcgcttggaacctgggaaagaatatttgatcatgggtctggatggggccacctatgacctcgagggacacccccagtacctgctggactcgaatagctggatcgaggagatgccctctgaacgcctgtgccggagcacccgccagcgggcagcctgtgcccagctcaacgacttcctccaggagtatggcactcaggggtgccaggtgtgagggctgccctcccacctccgctgggaggaacctgaacctgggaaccatgaagctggaagcactgctgtgtccgctttcatgaacacagcctgggaccagggcatattaaaggcttttggcagc

SEQ ID NO: 88334 - DNA, 982 bp, Artificial Sequence
  derived and/or modified sequence
atgtgccccgaggacagtctccaggtgcccttgaaagatgcgaagagctgtggcctccatcaactcctcagaggccctgaggtccagctggtggcccattcgccatggctaaaggactctctgtccagaacgacaaacatccagggtatcaacctgctcttctcctctcgccgggggcacctctttttgcagacggaccagcccatttacaaccctggccagcgggttcggtaccgggtctttgctctggatcagaagatgcgcccgagcactgacaccatcacagtcatggtggagaactctcacggcctccgcgtgcggaagaaggaggtgtacatgccctcgtccatcttccaggatgactttgtgatcccagacatctcagagccagggacctggaagatctcagcccgattctcagatggcctggaatccaacagcagcacccagtttgaggtgaagaaatatgtccttcccaactttgaggtgaagatcacccctggaaagccctacatcctgacggtgccaggccatcttgatgaaatgcagttagacatccaggccaggtacatctatgggaagccagtgcagggggtggcatatgtgcgctttgggctcctagatgaggatggtaagaagactttctttcgggggctggagagtcagaccaagctggtgaatggacagagccacatttccctctcaaaggcagagttccaggacgccctggagaagctgaatatgggcattactgacctccaggggctgcgcctctacgttgctgcagccatcattgagtctccaggtggggagatggaggaggcagagctcacatcctggtattttgtgtcatctcccttctccttggatcttagcaagaccaagcgacaccttgtgcctggggcccccttcctgctgcaggccttggtccgtgagatgtcaggctccccagcttctggcattcctgtcaaagtttctgcca

SEQ ID NO: 88335 - DNA, 5220 bp, Artificial Sequence
  derived and/or modified sequence
atgaggctgctctgggggctgatctgggcatccagcttcttcaccttatctctgcagaagcccaggttgctcttgttctctccttctgtggttcatctgggggtccccctatcggtgggggtgcagctccaggatgtgccccgaggacaggtagtgaaaggatcagtgttcctgagaaacccatctcgtaataatgtcccctgctccccaaaggtggacttcacccttagctcagaaagagactttgcactcctcagtctccaggtgcccttgaaagatgcgaagagctgtggcctccatcaactcctcagaggccctgaggtccagctggtggcccattcgccatggctaaaggactctctgtccagaacgacaaacatccagggtatcaacctgctcttctcctctcgccgggggcacctctttttgcagacggaccagcccatttacaaccctggccagcgggttcggtaccgggtctttgctctggatcagaagatgcgcccgagcactgacaccatcacagtcatggtggagaactctcacggcctccgcgtgcggaagaaggaggtgtacatgccctcgtccatcttccaggatgactttgtgatcccagacatctcagagccagggacctggaagatctcagcccgattctcagatggcctggaatccaacagcagcacccagtttgaggtgaagaaatatgtccttcccaactttgaggtgaagatcacccctggaaagccctacatcctgacggtgccaggccatcttgatgaaatgcagttagacatccaggccaggtacatctatgggaagccagtgcagggggtggcatatgtgcgctttgggctcctagatgaggatggtaagaagactttctttcgggggctggagagtcagaccaagctggtgaatggacagagccacatttccctctcaaaggcagagttccaggacgccctggagaagctgaatatgggcattactgacctccaggggctgcgcctctacgttgctgcagccatcattgagtctccaggtggggagatggaggaggcagagctcacatcctggtattttgtgtcatctcccttctccttggatcttagcaagaccaagcgacaccttgtgcctggggcccccttcctgctgcaggccttggtccgtgagatgtcaggctccccagcttctggcattcctgtcaaagtttctgccacggtgtcttctcctgggtctgttcctgaagtccaggacattcagcaaaacacagacgggagcggccaagtcagcattccaataattatccctcagaccatctcagagctgcagctctcagtatctgcaggctccccacatccagcgatagccaggctcactgtggcagccccaccttcaggaggccccgggtttctgtctattgagcggccggattctcgacctcctcgtgttggggacactctgaacctgaacttgcgagccgtgggcagtggggccaccttttctcattactactacatgatcctatcccgagggcagatcgtgttcatgaatcgagagcccaagaggaccctgacctcggtctcggtgtttgtggaccatcacctggcaccctccttctactttgtggccttctactaccatggagaccacccagtggccaactccctgcgagtggatgtccaggctggggcctgcgagggcaagctggagctcagcgtggacggtgccaagcagtaccggaacggggagtccgtgaagctccacttagaaaccgactccctagccctggtggcgctgggagccttggacacagctctgtatgctgcaggcagcaagtcccacaagcccctcaacatgggcaaggtctttgaagctatgaacagctatgacctcggctgtggtcctgggggtggggacagtgcccttcaggtgttccaggcagcgggcctggccttttctgatggagaccagtggaccttatccagaaagagactaagctgtcccaaggagaagacaacccggaaaaagagaaacgtgaacttccaaaaggcgattaatgagaaattgggtcagtatgcttccccgacagccaagcgctgctgccaggatggggtgacacgtctgcccatgatgcgttcctgcgagcagcgggcagcccgcgtgcagcagccggactgccgggagcccttcctgtcctgctgccaatttgctgagagtctgcgcaagaagagcagggacaagggccaggcgggcctccaacgagccctggagatcctgcaggaggaggacctgattgatgaggatgacattcccgtgcgcagcttcttcccagagaactggctctggagagtggaaacagtggaccgctttcaaatattgacactgtggctccccgactctctgaccacgtgggagatccatggcctgagcctgtccaaaaccaaaggcctatgtgtggccaccccagtccagctccgggtgttccgcgagttccacctgcacctccgcctgcccatgtctgtccgccgctttgagcagctggagctgcggcctgtcctctataactacctggataaaaacctgactgtgagcgtccacgtgtccccagtggaggggctgtgcctggctgggggcggagggctggcccagcaggtgctggtgcctgcgggctctgcccggcctgttgccttctctgtggtgcccacggcagccgccgctgtgtctctgaaggtggtggctcgagggtccttcgaattccctgtgggagatgcggtgtccaaggttctgcagattgagaaggaaggggccatccatagagaggagctggtctatgaactcaaccccttggaccaccgaggccggaccttggaaatacctggcaactctgatcccaatatgatccctgatggggactttaacagctacgtcagggttacagcctcagatccattggacactttaggctctgagggggccttgtcaccaggaggcgtggcctccctcttgaggcttcctcgaggctgtggggagcaaaccatgatctacttggctccgacactggctgcttcccgctacctggacaagacagagcagtggagcacactgcctcccgagaccaaggaccacgccgtggatctgatccagaaaggctacatgcggatccagcagtttcggaaggcggatggttcctatgcggcttggttgtcacggggcagcagcacctggctcacagcctttgtgttgaaggtcctgagtttggcccaggagcaggtaggaggctcgcctgagaaactgcaggagacatctaactggcttctgtcccagcagcaggctgacggctcgttccaggacctctctccagtgatacataggagcatgcaggggggtttggtgggcaatgatgagactgtggcactcacagcctttgtgaccatcgcccttcatcatgggctggccgtcttccaggatgagggtgcagagccattgaagcagagagtggaagcctccatctcaaaggcaaactcatttttgggggagaaagcaagtgctgggctcctgggtgcccacgcagctgccatcacggcctatgccctgacactgaccaaggcccctgcggacctgcggggtgttgcccacaacaacctcatggcaatggcccaggagactggagataacctgtactggggctcagtcactggttctcagagcaatgccgtgtcgcccaccccggctcctcgcaacccatccgaccccatgccccaggccccagccctgtggattgaaaccacagcctacgccctgctgcacctcctgcttcacgagggcaaagcagagatggcagaccaggctgcggcctggctcacccgtcagggcagcttccaagggggattccgcagtacccaagacacggtgattgccctggatgccctgtctgcctactggattgcctcccacaccactgaggagaggggtctcaatgtgactctcagctccacaggccggaatgggttcaagtcccacgcgctgcagctgaacaaccgccagattcgcggcctggaggaggagctgcagttttccttgggcagcaagatcaatgtgaaggtgggaggaaacagcaaaggaaccctgaaggtccttcgtacctacaatgtcctggacatgaagaacacgacctgccaggacctacagatagaagtgacagtcaaaggccacgtcgagtacacgatggaagcaaacgaggactatgaggactatgagtacgatgagcttccagccaaggatgacccagatgcccctctgcagcccgtgacacccctgcagctgtttgagggtcggaggaaccgccgcaggagggaggcgcccaagctgacctccctctctgaccgttacgtgagtcactttgagaccgaggggccccacgtcctgctgtattttgactcggtccccacctcccgggagtgcgtgggctttgaggctgtgcaggaagtgccggtggggctggtgcagccggccagcgcaaccctgtacgactactacaaccccgagcgcagatgttctgtgttttacggggcaccaagtaagagcagactcttggccaccttgtgttctgctgaagtctgccagtgtgctgaggggaagtgccctcgccagcgtcgcgccctggagcggggtctgcaggacgaggatggctacaggatgaagtttgcctgctactacccccgtgtggagtacggcttccaggttaaggttctccgagaagacagcagagctgctttccgcctctttgagaccaagatcacccaagtcctgcacttcaccaaggatgtcaaggccgctgctaatcagatgcgcaacttcctggttcgagcctcctgccgccttcgcttggaacctgggaaagaatatttgatcatgggtctggatggggccacctatgacctcgagggacacccccagtacctgctggactcgaatagctggatcgaggagatgccctctgaacgcctgtgccggagcacccgccagcgggcagcctgtgcccagctcaacgacttcctccaggagtatggcactcaggggtgccaggtgtgagggctgccctcccacctccgctgggaggaacctgaacctgggaaccatgaagctggaagcactgctgtgtccgctttcatgaacacagcctgggaccagggcatattaaaggcttttggcagc

SEQ ID NO: 88336 - DNA, 5268 bp, Artificial Sequence
  derived and/or modified sequence
gacagacagacggatctaacctctcttggatcctccagccatgaggctgctctgggggctgatctgggcatccagcttcttcaccttatctctgcagaagcccaggttgctcttgttctctccttctgtggttcatctgggggtccccctatcggtgggggtgcagctccaggatgtgccccgaggacaggtagtgaaaggatcagtgttcctgagaaacccatctcgtaataatgtcccctgctccccaaaggtggacttcacccttagctcagaaagagacttcgcactcctcagtctccaggtgcccttgaaagatgcgaagagctgtggcctccatcaactcctcagaggccctgaggtccagctggtggcccattcgccatggctaaaggactctctgtccagaacgacaaacatccagggtatcaacctgctcttctcctctcgccgggggcacctctttttgcagacggaccagcccatttacaaccctggccagcgggttcggtaccgggtctttgctctggatcagaagatgcgcccgagcactgacaccatcacagtcatggtggagaactctcacggcctccgcgtgcggaagaaggaggtgtacatgccctcgtccatcttccaggatgactttgtgatcccagacatctcagagccagggacctggaagatctcagcccgattctcagatggcctggaatccaacagcagcacccagtttgaggtgaagaaatatgtccttcccaactttgaggtgaagatcacccctggaaagccctacatcctgacggtgccaggccatcttgatgaaatgcagttagacatccaggccaggtacatctatgggaagccagtgcagggggtggcatatgtgcgctttgggctcctagatgaggatggtaagaagactttctttcgggggctggagagtcagaccaagctggtgaatggacagagccacatttccctctcaaaggcagagttccaggacgccctggagaagctgaatatgggcattactgacctccaggggctgcgcctctacgttgctgcagccatcattgagtctccaggtggggagatggaggaggcagagctcacatcctggtattttgtgtcatctcccttctccttggatcttagcaagaccaagcgacaccttgtgcctggggcccccttcctgctgcaggccttggtccgtgagatgtcaggctccccagcttctggcattcctgtcaaagtttctgccacggtgtcttctcctgggtctgttcctgaagtccaggacattcagcaaaacacagacgggagcggccaagtcagcattccaataattatccctcagaccatctcagagctgcagctctcagtatctgcaggctccccacatccagcgatagccaggctcactgtggcagccccaccttcaggaggccccgggtttctgtctattgagcggccggattctcgacctcctcgtgttggggacactctgaacctgaacttgcgagccgtgggcagtggggccaccttttctcattactactacatgatcctatcccgagggcagatcgtgttcatgaatcgagagcccaagaggaccctgacctcggtctcggtgtttgtggaccatcacctggcaccctccttctactttgtggccttctactaccatggagaccacccagtggccaactccctgcgagtggatgtccaggctggggcctgcgagggcaagctggagctcagcgtggacggtgccaagcagtaccggaacggggagtccgtgaagctccacttagaaaccgactccctagccctggtggcgctgggagccttggacacagctctgtatgctgcaggcagcaagtcccacaagcccctcaacatgggcaaggtctttgaagctatgaacagctatgacctcggctgtggtcctgggggtggggacagtgcccttcaggtgttccaggcagcgggcctggccttttctgatggagaccagtggaccttatccagaaagagactaagctgtcccaaggagaagacaacccggaaaaagagaaacgtgaacttccaaaaggcgattaatgagaaattgggtcagtatgcttccccgacagccaagcgctgctgccaggatggggtgacacgtctgcccatgatgcgttcctgcgagcagcgggcagcccgcgtgcagcagccggactgccgggagcccttcctgtcctgctgccaatttgctgagagtctgcgcaagaagagcagggacaagggccaggcgggcctccaacgagccctggagatcctgcaggaggaggacctgattgatgaggatgacattcccgtgcgcagcttcttcccagagaactggctctggagagtggaaacagtggaccgctttcaaatattgacactgtggctccccgactctctgaccacgtgggagatccatggcctgagcctgtccaaaaccaaaggcctatgtgtggccaccccagttcagctccgggtgttccgcgagttccacctgcacctccgcctgcccatgtctgtccgccgctttgagcagctggagctgcggcctgtcctctataactacctggataaaaacctgactgtgagcgtccacgtgtccccagtggaggggctgtgcctggctgggggcggagggctggcccagcaggtgctggtgcctgcgggctctgcccggcctgttgccttctctgtggtgcccacggcagccaccgctgtgtctctgaaggtggtggctcgagggtccttcgaattccctgtgggagatgcggtgtccaaggttctgcagattgagaaggaaggggccatccatagagaggagctggtctatgaactcaaccccttggaccaccgaggccggaccttggaaatacctggcaactctgatcccaatatgatccctgatggggactttaacagctacgtcagggttacagcctcagatccattggacactttaggctctgagggggccttgtcaccaggaggcgtggcctccctcttgaggcttcctcgaggctgtggggagcaaaccatgatctacttggctccgacactggctgcttcccgctacctggacaagacagagcagtggagcacactgcctcccgagaccaaggaccacgccgtggatctgatccagaaaggctacatgcggatccagcagtttcggaaggcggatggttcctatgcggcttggttgtcacggggcagcagcacctggctcacagcctttgtgttgaaggtcctgagtttggcccaggagcaggtaggaggctcgcctgagaaactgcaggagacatctaactggcttctgtcccagcagcaggctgacggctcgttccaggacctctctccagtgatacataggagcatgcaggggggtttggtgggcaatgatgagactgtggcactcacagcctttgtgaccatcgcccttcatcatgggctggccgtcttccaggatgagggtgcagagccattgaagcagagagtggaagcctccatctcaaaggcaagctcatttttgggggagaaagcaagtgctgggctcctgggtgcccacgcagctgccatcacggcctatgccctgacactgaccaaggcccctgcggacctgcggggtgttgcccacaacaacctcatggcaatggcccaggagactggagataacctgtactggggctcagtcactggttctcagagcaatgccgtgtcgcccaccccggctcctcgcaacccatccgaccccatgccccaggccccagccctgtggattgaaaccacagcctacgccctgctgcacctcctgcttcacgagggcaaagcagagatggcagaccaggctgcggcctggctcacccgtcagggcagcttccaagggggattccgcagtacccaagacacggtgattgccctggatgccctgtctgcctactggattgcctcccacaccactgaggagaggggtctcaatgtgactctcagctccacaggccggaatgggttcaagtcccacgcgctgcagctgaacaaccgccagattcgcggcctggaggaggagctgcagttttccttgggcagcaagatcaatgtgaaggtgggaggaaacagcaaaggaaccctgaaggtccttcgtacctacaatgtcctggacatgaagaacacgacctgccaggacctacagatagaagtgacagtcaaaggccacgtcgagtacacgatggaagcaaacgaggactatgaggactatgagtacgatgagcttccagccaaggatgacccagatgcccctctgcagcccgtgacacccctgcagctgtttgagggtcggaggaaccgccgcaggagggaggcgcccaagctgacctccctctctgaccgttacgtgagtcactttgagaccgaggggccccacgtcctgctgtattttgactcggtccccacctcccgggagtgcgtgggctttgaggctgtgcaggaagtgccggtggggctggtgcagccggccagcgcaaccctgtacgactactacaaccccgagcgcagatgttctgtgttttacggggcaccaagtaagagcagactcttggccaccttgtgttctgctgaagtctgccagtgtgctgaggggaagtgccctcgccagcgtcgcgccctggagcggggtctgcaggacgaggatggctacaggatgaagtttgcctgctactacccccgtgtggagtacggcttccaggttaaggttctccgagaagacagcagagctgctttccgcctctttgagaccaagatcacccaagtcctgcacttcaccaaggatgtcaaggccgctgctaatcagatgcgcaacttcctggttcgagcctcctgccgccttcgcttggaacctgggaaagaatatttgatcatgggtctggatggggccacctatgacctcgagggacacccccagtacctgctggactcgaatagctggatcgaggagatgccctctgaacgcctgtgccggagcacccgccagcgggcagcctgtgcccagctcaacgacttcctccaggagtatggcactcaggggtgccaggtgtgagggctgccctcccacctccgctgggaggaacctgaacctgggaaccatgaagctggaagcactgctgtgtccgctttcatgaacacagcctgggaccagggcatattaaaggcttttggcagcaaagtgtc

SEQ ID NO: 88337 - DNA, 5097 bp, Artificial Sequence
  derived and/or modified sequence
atgagactgctgtggggcctgatctgggccagcagcttcttcaccctgagcctgcagaagcccagactgctgctgttcagccccagcgtggtgcacctgggcgtgcccctgagcgtgggcgtgcagctgcaggacgtgcccagaggccaggtggtgaagggcagcgtgttcctgagaaaccccagcagaaacaacgtgccctgcagccccaaggtggacttcaccctgagcagcgagagagacttcgccctgctgagcctgcaggtgcccctgaaggacgccaagagctgcggcctgcaccagctgctgagaggccccgaggtgcagctggtggcccacagcccctggctgaaggacagcctgagcagaaccaccaacatccagggcatcaacctgctgttcagcagcagaagaggccacctgttcctgcagaccgaccagcccatctacaaccccggccagagagtgagatacagagtgttcgccctggaccagaagatgagacccagcaccgacaccatcaccgtgatggtggagaacagccacggcctgagagtgagaaagaaggaggtgtacatgcccagcagcatcttccaggacgacttcgtgatccccgacatcagcgagcccggcacctggaagatcagcgccagattcagcgacggcctggagagcaacagcagcacccagttcgaggtgaagaagtacgtgctgcccaacttcgaggtgaagatcacccccggcaagccctacatcctgaccgtgcccggccacctggacgagatgcagctggacatccaggccagatacatctacggcaagcccgtgcagggcgtggcctacgtgagattcggcctgctggacgaggacggcaagaagaccttcttcagaggcctggagagccagaccaagctggtgaacggccagagccacatcagcctgagcaaggccgagttccaggacgccctggagaagctgaacatgggcatcaccgacctgcagggcctgagactgtacgtggccgccgccatcatcgagagccccggcggcgagatggaggaggccgagctgaccagctggtacttcgtgagcagccccttcagcctggacctgagcaagaccaagagacacctggtgcccggcgcccccttcctgctgcaggccctggtgagagagatgagcggcagccccgccagcggcatccccgtgaaggtgagcgccaccgtgagcagccccggcagcgtgcccgaggtgcaggacatccagcagaacaccgacggcagcggccaggtgagcatccccatcatcatcccccagaccatcagcgagctgcagctgagcgtgagcgccggcagcccccaccccgccatcgccagactgaccgtggccgccccccccagcggcggccccggcttcctgagcatcgagagacccgacagcagaccccccagagtgggcgacaccctgaacctgaacctgagagccgtgggcagcggcgccaccttcagccactactactacatgatcctgagcagaggccagatcgtgttcatgaacagagagcccaagagaaccctgaccagcgtgagcgtgttcgtggaccaccacctggcccccagcttctacttcgtggccttctactaccacggcgaccaccccgtggccaacagcctgagagtggacgtgcaggccggcgcctgcgagggcaagctggagctgagcgtggacggcgccaagcagtacagaaacggcgagagcgtgaagctgcacctggagaccgacagcctggccctggtggccctgggcgccctggacaccgccctgtacgccgccggcagcaagagccacaagcccctgaacatgggcaaggtgttcgaggccatgaacagctacgacctgggctgcggccccggcggcggcgacagcgccctgcaggtgttccaggccgccggcctggccttcagcgacggcgaccagtggaccctgagcagaaagagactgagctgccccaaggagaagaccaccagaaagaagagaaacgtgaacttccagaaggccatcaacgagaagctgggccagtacgccagccccaccgccaagagatgctgccaggacggcgtgaccagactgcccatgatgagaagctgcgagcagagagccgccagagtgcagcagcccgactgcagagagcccttcctgagctgctgccagttcgccgagagcctgagaaagaagagcagagacaagggccaggccggcctgcagagagccctggagatcctgcaggaggaggacctgatcgacgaggacgacatccccgtgagaagcttcttccccgagaactggctgtggagagtggagaccgtggacagattccagatcctgaccctgtggctgcccgacagcctgaccacctgggagatccacggcctgagcctgagcaagaccaagggcctgtgcgtggccacccccgtgcagctgagagtgttcagagagttccacctgcacctgagactgcccatgagcgtgagaagattcgagcagctggagctgagacccgtgctgtacaactacctggacaagaacctgaccgtgagcgtgcacgtgagccccgtggagggcctgtgcctggccggcggcggcggcctggcccagcaggtgctggtgcccgccggcagcgccagacccgtggccttcagcgtggtgcccaccgccgccgccgccgtgagcctgaaggtggtggccagaggcagcttcgagttccccgtgggcgacgccgtgagcaaggtgctgcagatcgagaaggagggcgccatccacagagaggagctggtgtacgagctgaaccccctggaccacagaggcagaaccctggagatccccggcaacagcgaccccaacatgatccccgacggcgacttcaacagctacgtgagagtgaccgccagcgaccccctggacaccctgggcagcgagggcgccctgagccccggcggcgtggccagcctgctgagactgcccagaggctgcggcgagcagaccatgatctacctggcccccaccctggccgccagcagatacctggacaagaccgagcagtggagcaccctgccccccgagaccaaggaccacgccgtggacctgatccagaagggctacatgagaatccagcagttcagaaaggccgacggcagctacgccgcctggctgagcagagacagcagcacctggctgaccgccttcgtgctgaaggtgctgagcctggcccaggagcaggtgggcggcagccccgagaagctgcaggagaccagcaactggctgctgagccagcagcaggccgacggcagcttccaggacccctgccccgtgctggacagaagcatgcagggcggcctggtgggcaacgacgagaccgtggccctgaccgccttcgtgaccatcgccctgcaccacggcctggccgtgttccaggacgagggcgccgagcccctgaagcagagagtggaggccagcatcagcaaggccaacagcttcctgggcgagaaggccagcgccggcctgctgggcgcccacgccgccgccatcaccgcctacgccctgaccctgaccaaggcccccgtggacctgctgggcgtggcccacaacaacctgatggccatggcccaggagaccggcgacaacctgtactggggcagcgtgaccggcagccagagcaacgccgtgagccccacccccgcccccagaaaccccagcgaccccatgccccaggcccccgccctgtggatcgagaccaccgcctacgccctgctgcacctgctgctgcacgagggcaaggccgagatggccgaccaggccagcgcctggctgaccagacagggcagcttccagggcggcttcagaagcacccaggacaccgtgatcgccctggacgccctgagcgcctactggatcgccagccacaccaccgaggagagaggcctgaacgtgaccctgagcagcaccggcagaaacggcttcaagagccacgccctgcagctgaacaacagacagatcagaggcctggaggaggagctgcagttcagcctgggcagcaagatcaacgtgaaggtgggcggcaacagcaagggcaccctgaaggtgctgagaacctacaacgtgctggacatgaagaacaccacctgccaggacctgcagatcgaggtgaccgtgaagggccacgtggagtacaccatggaggccaacgaggactacgaggactacgagtacgacgagctgcccgccaaggacgaccccgacgcccccctgcagcccgtgacccccctgcagctgttcgagggcagaagaaacagaagaagaagagaggcccccaagctgaccagcctgagcgacagatacgtgagccacttcgagaccgagggcccccacgtgctgctgtacttcgacagcgtgcccaccagcagagagtgcgtgggcttcgaggccgtgcaggaggtgcccgtgggcctggtgcagcccgccagcgccaccctgtacgactactacaaccccgagagaagatgcagcgtgttctacggcgcccccagcaagagcagactgctggccaccctgtgcagcgccgaggtgtgccagtgcgccgagggcaagtgccccagacagagaagagccctggagagaggcctgcaggacgaggacggctacagaatgaagttcgcctgctactaccccagagtggagtacggcttccaggtgaaggtgctgagagaggacagcagagccgccttcagactgttcgagaccaagatcacccaggtgctgcacttcaccaaggacgtgaaggccgccgccaaccagatgagaaacttcctggtgagagccagctgcagactgagactggagcccggcaaggagtacctgatcatgggcctggacggcgccacctacgacctggagggccacccccagtacctgctggacagcaacagctggatcgaggagatgcccagcgagagactgtgcagaagcaccagacagagagccgcctgcgcccagctgaacgacttcctgcaggagtacggcacccagggctgccaggtgtag

SEQ ID NO: 88338 - DNA, 813 bp, Artificial Sequence
  derived and/or modified sequence
atgtgccccgaggacagcctgcaggtgcccctgaaggacgccaagagctgcggcctgcaccagctgctgagaggccccgaggtgcagctggtggcccacagcccctggctgaaggacagcctgagcagaaccaccaacatccagggcatcaacctgctgttcagcagcagaagaggccacctgttcctgcagaccgaccagcccatctacaaccccggccagagagtgagatacagagtgttcgccctggaccagaagatgagacccagcaccgacaccatcaccgtgatggtggagaacagccacggcctgagagtgagaaagaaggaggtgtacatgcccagcagcatcttccaggacgacttcgtgatccccgacatcagcgagcccggcacctggaagatcagcgccagattcagcgacggcctggagagcaacagcagcacccagttcgaggtgaagaagtacgtgctgcccaacttcgaggtgaagatcacccccggcaagccctacatcctgaccgtgcccggccacctggacgagatgcagctggacatccaggccagatacatctacggcaagcccgtgcagggcgtggcctacgtgagattcggcctgctggacgaggacggcaagaagaccttcttcagaggcctggagagccagaccaagctggtgaacggccagagccacatcagcctgagcaaggccgagttccaggacgccctggagaagctgaacatgggcatcaccgacctgcagggcctgagactgtacgtggccgccgccatcatcgagagccccggcggctag

SEQ ID NO: 88339 - DNA, 5097 bp, Artificial Sequence
  derived and/or modified sequence
atgagactgctgtggggcctgatctgggccagcagcttcttcaccctgagcctgcagaagcccagactgctgctgttcagccccagcgtggtgcacctgggcgtgcccctgagcgtgggcgtgcagctgcaggacgtgcccagaggccaggtggtgaagggcagcgtgttcctgagaaaccccagcagaaacaacgtgccctgcagccccaaggtggacttcaccctgagcagcgagagagacttcgccctgctgagcctgcaggtgcccctgaaggacgccaagagctgcggcctgcaccagctgctgagaggccccgaggtgcagctggtggcccacagcccctggctgaaggacagcctgagcagaaccaccaacatccagggcatcaacctgctgttcagcagcagaagaggccacctgttcctgcagaccgaccagcccatctacaaccccggccagagagtgagatacagagtgttcgccctggaccagaagatgagacccagcaccgacaccatcaccgtgatggtggagaacagccacggcctgagagtgagaaagaaggaggtgtacatgcccagcagcatcttccaggacgacttcgtgatccccgacatcagcgagcccggcacctggaagatcagcgccagattcagcgacggcctggagagcaacagcagcacccagttcgaggtgaagaagtacgtgctgcccaacttcgaggtgaagatcacccccggcaagccctacatcctgaccgtgcccggccacctggacgagatgcagctggacatccaggccagatacatctacggcaagcccgtgcagggcgtggcctacgtgagattcggcctgctggacgaggacggcaagaagaccttcttcagaggcctggagagccagaccaagctggtgaacggccagagccacatcagcctgagcaaggccgagttccaggacgccctggagaagctgaacatgggcatcaccgacctgcagggcctgagactgtacgtggccgccgccatcatcgagtaccccggcggcgagatggaggaggccgagctgaccagctggtacttcgtgagcagccccttcagcctggacctgagcaagaccaagagacacctggtgcccggcgcccccttcctgctgcaggccctggtgagagagatgagcggcagccccgccagcggcatccccgtgaaggtgagcgccaccgtgagcagccccggcagcgtgcccgaggtgcaggacatccagcagaacaccgacggcagcggccaggtgagcatccccatcatcatcccccagaccatcagcgagctgcagctgagcgtgagcgccggcagcccccaccccgccatcgccagactgaccgtggccgccccccccagcggcggccccggcttcctgagcatcgagtggcccgacagcagaccccccagagtgggcgacaccctgaacctgaacctgagagccgtgggcagcggcgccaccttcagccactactactacatgatcctgagcagaggccagatcgtgttcatgaacagagagcccaagagaaccctgaccagcgtgagcgtgttcgtggaccaccacctggcccccagcttctacttcgtggccttctactaccacggcgaccaccccgtggccaacagcctgagagtggacgtgcaggccggcgcctgcgagggcaagctggagctgagcgtggacggcgccaagcagtacagaaacggcgagagcgtgaagctgcacctggagaccgacagcctggccctggtggccctgggcgccctggacaccgccctgtacgccgccggcagcaagagccacaagcccctgaacatgggcaaggtgttcgaggccatgaacagctacgacctgggctgcggccccggcggcggcgacagcgccctgcaggtgttccaggccgccggcctggccttcagcgacggcgaccagtggaccctgagcagaaagagactgagctgccccaaggagaagaccaccagaaagaagagaaacgtgaacttccagaaggccatcaacgagaagctgggccagtacgccagccccaccgccaagagatgctgccaggacggcgtgaccagactgcccatgatgagaagctgcgagcagagagccgccagagtgcagcagcccgactgcagagagcccttcctgagctgctgccagttcgccgagagcctgagaaagaagagcagagacaagggccaggccggcctgcagagagccctggagatcctgcaggaggaggacctgatcgacgaggacgacatccccgtgagaagcttcttccccgagaactggctgtggagagtggagaccgtggacagattccagatcctgaccctgtggctgcccgacagcctgaccacctgggagatccacggcctgagcctgagcaagaccaagggcctgtgcgtggccacccccgtgcagctgagagtgttcagagagttccacctgcacctgagactgcccatgagcgtgagaagattcgagcagctggagctgagacccgtgctgtacaactacctggacaagaacctgaccgtgagcgtgcacgtgagccccgtggagggcctgtgcctggccggcggcggcggcctggcccagcaggtgctggtgcccgccggcagcgccagacccgtggccttcagcgtggtgcccaccgccgccgccgccgtgagcctgaaggtggtggccagaggcagcttcgagttccccgtgggcgacgccgtgagcaaggtgctgcagatcgagaaggagggcgccatccacagagaggagctggtgtacgagctgaaccccctggaccacagaggcagaaccctggagatccccggcaacagcgaccccaacatgatccccgacggcgacttcaacagctacgtgagagtgaccgccagcgaccccctggacaccctgggcagcgagggcgccctgagccccggcggcgtggccagcctgctgagactgcccagaggctgcggcgagcagaccatgatctacctggcccccaccctggccgccagcagatacctggacaagaccgagcagtggagcaccctgccccccgagaccaaggaccacgccgtggacctgatccagaagggctacatgagaatccagcagttcagaaaggccgacggcagctacgccgcctggctgagcagagacagcagcacctggctgaccgccttcgtgctgaaggtgctgagcctggcccaggagcaggtgggcggcagccccgagaagctgcaggagaccagcaactggctgctgagccagcagcaggccgacggcagcttccaggacccctgccccgtgctggacagaagcatgcagggcggcctggtgggcaacgacgagaccgtggccctgaccgccttcgtgaccatcgccctgcaccacggcctggccgtgttccaggacgagggcgccgagcccctgaagcagagagtggaggccagcatcagcaaggccaacagcttcctgggcgagaaggccagcgccggcctgctgggcgcccacgccgccgccatcaccgcctacgccctgaccctgaccaaggcccccgtggacctgctgggcgtggcccacaacaacctgatggccatggcccaggagaccggcgacaacctgtactggggcagcgtgaccggcagccagagcaacgccgtgagccccacccccgcccccagaaaccccagcgaccccatgccccaggcccccgccctgtggatcgagaccaccgcctacgccctgctgcacctgctgctgcacgagggcaaggccgagatggccgaccaggccgccgcctggctgaccagacagggcagcttccagggcggcttcagaagcacccaggacaccgtgatcgccctggacgccctgagcgcctactggatcgccagccacaccaccgaggagagaggcctgaacgtgaccctgagcagcaccggcagaaacggcttcaagagccacgccctgcagctgaacaacagacagatcagaggcctggaggaggagctgcagttcagcctgggcagcaagatcaacgtgaaggtgggcggcaacagcaagggcaccctgaaggtgctgagaacctacaacgtgctggacatgaagaacaccacctgccaggacctgcagatcgaggtgaccgtgaagggccacgtggagtacaccatggaggccaacgaggactacgaggactacgagtacgacgagctgcccgccaaggacgaccccgacgcccccctgcagcccgtgacccccctgcagctgttcgagggcagaagaaacagaagaagaagagaggcccccaagctgaccagcctgagcgacagatacgtgagccacttcgagaccgagggcccccacgtgctgctgtacttcgacagcgtgcccaccagcagagagtgcgtgggcttcgaggccgtgcaggaggtgcccgtgggcctggtgcagcccgccagcgccaccctgtacgactactacaaccccgagagaagatgcagcgtgttctacggcgcccccagcaagagcagactgctggccaccctgtgcagcgccgaggtgtgccagtgcgccgagggcaagtgccccagacagagaagagccctggagagaggcctgcaggacgaggacggctacagaatgaagttcgcctgctactaccccagagtggagtacggcttccaggtgaaggtgctgagagaggacagcagagccgccttcagactgttcgagaccaagatcacccaggtgctgcacttcaccaaggacgtgaaggccgccgccaaccagatgagaaacttcctggtgagagccagctgcagactgagactggagcccggcaaggagtacctgatcatgggcctggacggcgccacctacgacctggagggccacccccagtacctgctggacagcaacagctggatcgaggagatgcccagcgagagactgtgcagaagcaccagacagagagccgcctgcgcccagctgaacgacttcctgcaggagtacggcacccagggctgccaggtgtag

SEQ ID NO: 88340 - DNA, 5097 bp, Artificial Sequence
  derived and/or modified sequence
atgagactgctgtggggcctgatctgggccagcagcttcttcaccctgagcctgcagaagcccagactgctgctgttcagccccagcgtggtgcacctgggcgtgcccctgagcgtgggcgtgcagctgcaggacgtgcccagaggccaggtggtgaagggcagcgtgttcctgagaaaccccagcagaaacaacgtgccctgcagccccaaggtggacttcaccctgagcagcgagagagacttcgccctgctgagcctgcaggtgcccctgaaggacgccaagagctgcggcctgcaccagctgctgagaggccccgaggtgcagctggtggcccacagcccctggctgaaggacagcctgagcagaaccaccaacatccagggcatcaacctgctgttcagcagcagaagaggccacctgttcctgcagaccgaccagcccatctacaaccccggccagagagtgagatacagagtgttcgccctggaccagaagatgagacccagcaccgacaccatcaccgtgatggtggagaacagccacggcctgagagtgagaaagaaggaggtgtacatgcccagcagcatcttccaggacgacttcgtgatccccgacatcagcgagcccggcacctggaagatcagcgccagattcagcgacggcctggagagcaacagcagcacccagttcgaggtgaagaagtacgtgctgcccaacttcgaggtgaagatcacccccggcaagccctacatcctgaccgtgcccggccacctggacgagatgcagctggacatccaggccagatacatctacggcaagcccgtgcagggcgtggcctacgtgagattcggcctgctggacgaggacggcaagaagaccttcttcagaggcctggagagccagaccaagctggtgaacggccagagccacatcagcctgagcaaggccgagttccaggacgccctggagaagctgaacatgggcatcaccgacctgcagggcctgagactgtacgtggccgccgccatcatcgagagccccggcggcgagatggaggaggccgagctgaccagctggtacttcgtgagcagccccttcagcctggacctgagcaagaccaagagacacctggtgcccggcgcccccttcctgctgcaggccctggtgagagagatgagcggcagccccgccagcggcatccccgtgaaggtgagcgccaccgtgagcagccccggcagcgtgcccgaggtgcaggacatccagcagaacaccgacggcagcggccaggtgagcatccccatcatcatcccccagaccatcagcgagctgcagctgagcgtgagcgccggcagcccccaccccgccatcgccagactgaccgtggccgccccccccagcggcggccccggcttcctgagcatcgagagacccgacagcagaccccccagagtgggcgacaccctgaacctgaacctgagagccgtgggcagcggcgccaccttcagccactactactacatgatcctgagcagaggccagatcgtgttcatgaacagagagcccaagagaaccctgaccagcgtgagcgtgttcgtggaccaccacctggcccccagcttctacttcgtggccttctactaccacggcgaccaccccgtggccaacagcctgagagtggacgtgcaggccggcgcctgcgagggcaagctggagctgagcgtggacggcgccaagcagtacagaaacggcgagagcgtgaagctgcacctggagaccgacagcctggccctggtggccctgggcgccctggacaccgccctgtacgccgccggcagcaagagccacaagcccctgaacatgggcaaggtgttcgaggccatgaacagctacgacctgggctgcggccccggcggcggcgacagcgccctgcaggtgttccaggccgccggcctggccttcagcgacggcgaccagtggaccctgagcagaaagagactgagctgccccaaggagaagaccaccagaaagaagagaaacgtgaacttccagaaggccatcaacgagaagctgggccagtacgccagccccaccgccaagagatgctgccaggacggcgtgaccagactgcccatgatgagaagctgcgagcagagagccgccagagtgcagcagcccgactgcagagagcccttcctgagctgctgccagttcgccgagagcctgagaaagaagagcagagacaagggccaggccggcctgcagagagccctggagatcctgcaggaggaggacctgatcgacgaggacgacatccccgtgagaagcttcttccccgagaactggctgtggagagtggagaccgtggacagattccagatcctgaccctgtggctgcccgacagcctgaccacctgggagatccacggcctgagcctgagcaagaccaagggcctgtgcgtggccacccccgtgcagctgagagtgttcagagagttccacctgcacctgagactgcccatgagcgtgagaagattcgagcagctggagctgagacccgtgctgtacaactacctggacaagaacctgaccgtgagcgtgcacgtgagccccgtggagggcctgtgcctggccggcggcggcggcctggcccagcaggtgctggtgcccgccggcagcgccagacccgtggccttcagcgtggtgcccaccgccgccgccgccgtgagcctgaaggtggtggccagaggcagcttcgagttccccgtgggcgacgccgtgagcaaggtgctgcagatcgagaaggagggcgccatccacagagaggagctggtgtacgagctgaaccccctggaccacagaggcagaaccctggagatccccggcaacagcgaccccaacatgatccccgacggcgacttcaacagctacgtgagagtgaccgccagcgaccccctggacaccctgggcagcgagggcgccctgagccccggcggcgtggccagcctgctgagactgcccagaggctgcggcgagcagaccatgatctacctggcccccaccctggccgccagcagatacctggacaagaccgagcagtggagcaccctgccccccgagaccaaggaccacgccgtggacctgatccagaagggctacatgagaatccagcagttcagaaaggccgacggcagctacgccgcctggctgagcagagacagcagcacctggctgaccgccttcgtgctgaaggtgctgagcctggcccaggagcaggtgggcggcagccccgagaagctgcaggagaccagcaactggctgctgagccagcagcaggccgacggcagcttccaggacccctgccccgtgctggacagaagcatgcagggcggcctggtgggcaacgacgagaccgtggccctgaccgccttcgtgaccatcgccctgcaccacggcctggccgtgttccaggacgagggcgccgagcccctgaagcagagagtggaggccagcatcagcaaggccagcagcttcctgggcgagaaggccagcgccggcctgctgggcgcccacgccgccgccatcaccgcctacgccctgaccctgaccaaggcccccgtggacctgctgggcgtggcccacaacaacctgatggccatggcccaggagaccggcgacaacctgtactggggcagcgtgaccggcagccagagcaacgccgtgagccccacccccgcccccagaaaccccagcgaccccatgccccaggcccccgccctgtggatcgagaccaccgcctacgccctgctgcacctgctgctgcacgagggcaaggccgagatggccgaccaggccgccgcctggctgaccagacagggcagcttccagggcggcttcagaagcacccaggacaccgtgatcgccctggacgccctgagcgcctactggatcgccagccacaccaccgaggagagaggcctgaacgtgaccctgagcagcaccggcagaaacggcttcaagagccacgccctgcagctgaacaacagacagatcagaggcctggaggaggagctgcagttcagcctgggcagcaagatcaacgtgaaggtgggcggcaacagcaagggcaccctgaaggtgctgagaacctacaacgtgctggacatgaagaacaccacctgccaggacctgcagatcgaggtgaccgtgaagggccacgtggagtacaccatggaggccaacgaggactacgaggactacgagtacgacgagctgcccgccaaggacgaccccgacgcccccctgcagcccgtgacccccctgcagctgttcgagggcagaagaaacagaagaagaagagaggcccccaagctgaccagcctgagcgacagatacgtgagccacttcgagaccgagggcccccacgtgctgctgtacttcgacagcgtgcccaccagcagagagtgcgtgggcttcgaggccgtgcaggaggtgcccgtgggcctggtgcagcccgccagcgccaccctgtacgactactacaaccccgagagaagatgcagcgtgttctacggcgcccccagcaagagcagactgctggccaccctgtgcagcgccgaggtgtgccagtgcgccgagggcaagtgccccagacagagaagagccctggagagaggcctgcaggacgaggacggctacagaatgaagttcgcctgctactaccccagagtggagtacggcttccaggtgaaggtgctgagagaggacagcagagccgccttcagactgttcgagaccaagatcacccaggtgctgcacttcaccaaggacgtgaaggccgccgccaaccagatgagaaacttcctggtgagagccagctgcagactgagactggagcccggcaaggagtacctgatcatgggcctggacggcgccacctacgacctggagggccacccccagtacctgctggacagcaacagctggatcgaggagatgcccagcgagagactgtgcagaagcaccagacagagagccgcctgcgcccagctgaacgacttcctgcaggagtacggcacccagggctgccaggtgtag

SEQ ID NO: 88341 - DNA, 5097 bp, Artificial Sequence
  derived and/or modified sequence
atgagactgctgtggggcctgatctgggccagcagcttcttcaccctgagcctgcagaagcccagactgctgctgttcagccccagcgtggtgcacctgggcgtgcccctgagcgtgggcgtgcagctgcaggacgtgcccagaggccaggtggtgaagggcagcgtgttcctgagaaaccccagcagaaacaacgtgccctgcagccccaaggtggacttcaccctgagcagcgagagagacttcgccctgctgagcctgcaggtgcccctgaaggacgccaagagctgcggcctgcaccagctgctgagaggccccgaggtgcagctggtggcccacagcccctggctgaaggacagcctgagcagaaccaccaacatccagggcatcaacctgctgttcagcagcagaagaggccacctgttcctgcagaccgaccagcccatctacaaccccggccagagagtgagatacagagtgttcgccctggaccagaagatgagacccagcaccgacaccatcaccgtgatggtggagaacagccacggcctgagagtgagaaagaaggaggtgtacatgcccagcagcatcttccaggacgacttcgtgatccccgacatcagcgagcccggcacctggaagatcagcgccagattcagcgacggcctggagagcaacagcagcacccagttcgaggtgaagaagtacgtgctgcccaacttcgaggtgaagatcacccccggcaagccctacatcctgaccgtgcccggccacctggacgagatgcagctggacatccaggccagatacatctacggcaagcccgtgcagggcgtggcctacgtgagattcggcctgctggacgaggacggcaagaagaccttcttcagaggcctggagagccagaccaagctggtgaacggccagagccacatcagcctgagcaaggccgagttccaggacgccctggagaagctgaacatgggcatcaccgacctgcagggcctgagactgtacgtggccgccgccatcatcgagtaccccggcggcgagatggaggaggccgagctgaccagctggtacttcgtgagcagccccttcagcctggacctgagcaagaccaagagacacctggtgcccggcgcccccttcctgctgcaggccctggtgagagagatgagcggcagccccgccagcggcatccccgtgaaggtgagcgccaccgtgagcagccccggcagcgtgcccgaggtgcaggacatccagcagaacaccgacggcagcggccaggtgagcatccccatcatcatcccccagaccatcagcgagctgcagctgagcgtgagcgccggcagcccccaccccgccatcgccagactgaccgtggccgccccccccagcggcggccccggcttcctgagcatcgagagacccgacagcagaccccccagagtgggcgacaccctgaacctgaacctgagagccgtgggcagcggcgccaccttcagccactactactacatgatcctgagcagaggccagatcgtgttcatgaacagagagcccaagagaaccctgaccagcgtgagcgtgttcgtggaccaccacctggcccccagcttctacttcgtggccttctactaccacggcgaccaccccgtggccaacagcctgagagtggacgtgcaggccggcgcctgcgagggcaagctggagctgagcgtggacggcgccaagcagtacagaaacggcgagagcgtgaagctgcacctggagaccgacagcctggccctggtggccctgggcgccctggacaccgccctgtacgccgccggcagcaagagccacaagcccctgaacatgggcaaggtgttcgaggccatgaacagctacgacctgggctgcggccccggcggcggcgacagcgccctgcaggtgttccaggccgccggcctggccttcagcgacggcgaccagtggaccctgagcagaaagagactgagctgccccaaggagaagaccaccagaaagaagagaaacgtgaacttccagaaggccatcaacgagaagctgggccagtacgccagccccaccgccaagagatgctgccaggacggcgtgaccagactgcccatgatgagaagctgcgagcagagagccgccagagtgcagcagcccgactgcagagagcccttcctgagctgctgccagttcgccgagagcctgagaaagaagagcagagacaagggccaggccggcctgcagagagccctggagatcctgcaggaggaggacctgatcgacgaggacgacatccccgtgagaagcttcttccccgagaactggctgtggagagtggagaccgtggacagattccagatcctgaccctgtggctgcccgacagcctgaccacctgggagatccacggcctgagcctgagcaagaccaagggcctgtgcgtggccacccccgtgcagctgagagtgttcagagagttccacctgcacctgagactgcccatgagcgtgagaagattcgagcagctggagctgagacccgtgctgtacaactacctggacaagaacctgaccgtgagcgtgcacgtgagccccgtggagggcctgtgcctggccggcggcggcggcctggcccagcaggtgctggtgcccgccggcagcgccagacccgtggccttcagcgtggtgcccaccgccgccgccgccgtgagcctgaaggtggtggccagaggcagcttcgagttccccgtgggcgacgccgtgagcaaggtgctgcagatcgagaaggagggcgccatccacagagaggagctggtgtacgagctgaaccccctggaccacagaggcagaaccctggagatccccggcaacagcgaccccaacatgatccccgacggcgacttcaacagctacgtgagagtgaccgccagcgaccccctggacaccctgggcagcgagggcgccctgagccccggcggcgtggccagcctgctgagactgcccagaggctgcggcgagcagaccatgatctacctggcccccaccctggccgccagcagatacctggacaagaccgagcagtggagcaccctgccccccgagaccaaggaccacgccgtggacctgatccagaagggctacatgagaatccagcagttcagaaaggccgacggcagctacgccgcctggctgagcagagacagcagcacctggctgaccgccttcgtgctgaaggtgctgagcctggcccaggagcaggtgggcggcagccccgagaagctgcaggagaccagcaactggctgctgagccagcagcaggccgacggcagcttccaggacccctgccccgtgctggacagaagcatgcagggcggcctggtgggcaacgacgagaccgtggccctgaccgccttcgtgaccatcgccctgcaccacggcctggccgtgttccaggacgagggcgccgagcccctgaagcagagagtggaggccagcatcagcaaggccaacagcttcctgggcgagaaggccagcgccggcctgctgggcgcccacgccgccgccatcaccgcctacgccctgaccctgaccaaggcccccgtggacctgctgggcgtggcccacaacaacctgatggccatggcccaggagaccggcgacaacctgtactggggcagcgtgaccggcagccagagcaacgccgtgagccccacccccgcccccagaaaccccagcgaccccatgccccaggcccccgccctgtggatcgagaccaccgcctacgccctgctgcacctgctgctgcacgagggcaaggccgagatggccgaccaggccgccgcctggctgaccagacagggcagcttccagggcggcttcagaagcacccaggacaccgtgatcgccctggacgccctgagcgcctactggatcgccagccacaccaccgaggagagaggcctgaacgtgaccctgagcagcaccggcagaaacggcttcaagagccacgccctgcagctgaacaacagacagatcagaggcctggaggaggagctgcagttcagcctgggcagcaagatcaacgtgaaggtgggcggcaacagcaagggcaccctgaaggtgctgagaacctacaacgtgctggacatgaagaacaccacctgccaggacctgcagatcgaggtgaccgtgaagggccacgtggagtacaccatggaggccaacgaggactacgaggactacgagtacgacgagctgcccgccaaggacgaccccgacgcccccctgcagcccgtgacccccctgcagctgttcgagggcagaagaaacagaagaagaagagaggcccccaagctgaccagcctgagcgacagatacgtgagccacttcgagaccgagggcccccacgtgctgctgtacttcgacagcgtgcccaccagcagagagtgcgtgggcttcgaggccgtgcaggaggtgcccgtgggcctggtgcagcccgccagcgccaccctgtacgactactacaaccccgagagaagatgcagcgtgttctacggcgcccccagcaagagcagactgctggccaccctgtgcagcgccgaggtgtgccagtgcgccgagggcaagtgccccagacagagaagagccctggagagaggcctgcaggacgaggacggctacagaatgaagttcgcctgctactaccccagagtggagtacggcttccaggtgaaggtgctgagagaggacagcagagccgccttcagactgttcgagaccaagatcacccaggtgctgcacttcaccaaggacgtgaaggccgccgccaaccagatgagaaacttcctggtgagagccagctgcagactgagactggagcccggcaaggagtacctgatcatgggcctggacggcgccacctacgacctggagggccacccccagtacctgctggacagcaacagctggatcgaggagatgcccagcgagagactgtgcagaagcaccagacagagagccgcctgcgcccagctgaacgacttcctgcaggagtacggcacccagggctgccaggtgtag

SEQ ID NO: 88342 - DNA, 5097 bp, Artificial Sequence
  derived and/or modified sequence
atgagactgctgtggggcctgatctgggccagcagcttcttcaccctgagcctgcagaagcccagactgctgctgttcagccccagcgtggtgcacctgggcgtgcccctgagcgtgggcgtgcagctgcaggacgtgcccagaggccaggtggtgaagggcagcgtgttcctgagaaaccccagcagaaacaacgtgccctgcagccccaaggtggacttcaccctgagcagcgagagagacttcgccctgctgagcctgcaggtgcccctgaaggacgccaagagctgcggcctgcaccagctgctgagaggccccgaggtgcagctggtggcccacagcccctggctgaaggacagcctgagcagaaccaccaacatccagggcatcaacctgctgttcagcagcagaagaggccacctgttcctgcagaccgaccagcccatctacaaccccggccagagagtgagatacagagtgttcgccctggaccagaagatgagacccagcaccgacaccatcaccgtgatggtggagaacagccacggcctgagagtgagaaagaaggaggtgtacatgcccagcagcatcttccaggacgacttcgtgatccccgacatcagcgagcccggcacctggaagatcagcgccagattcagcgacggcctggagagcaacagcagcacccagttcgaggtgaagaagtacgtgctgcccaacttcgaggtgaagatcacccccggcaagccctacatcctgaccgtgcccggccacctggacgagatgcagctggacatccaggccagatacatctacggcaagcccgtgcagggcgtggcctacgtgagattcggcctgctggacgaggacggcaagaagaccttcttcagaggcctggagagccagaccaagctggtgaacggccagagccacatcagcctgagcaaggccgagttccaggacgccctggagaagctgaacatgggcatcaccgacctgcagggcctgagactgtacgtggccgccgccatcatcgagagccccggcggcgagatggaggaggccgagctgaccagctggtacttcgtgagcagccccttcagcctggacctgagcaagaccaagagacacctggtgcccggcgcccccttcctgctgcaggccctggtgagagagatgagcggcagccccgccagcggcatccccgtgaaggtgagcgccaccgtgagcagccccggcagcgtgcccgaggtgcaggacatccagcagaacaccgacggcagcggccaggtgagcatccccatcatcatcccccagaccatcagcgagctgcagctgagcgtgagcgccggcagcccccaccccgccatcgccagactgaccgtggccgccccccccagcggcggccccggcttcctgagcatcgagagacccgacagcagaccccccagagtgggcgacaccctgaacctgaacctgagagccgtgggcagcggcgccaccttcagccactactactacatgatcctgagcagaggccagatcgtgttcatgaacagagagcccaagagaaccctgaccagcgtgagcgtgttcgtggaccaccacctggcccccagcttctacttcgtggccttctactaccacggcgaccaccccgtggccaacagcctgagagtggacgtgcaggccggcgcctgcgagggcaagctggagctgagcgtggacggcgccaagcagtacagaaacggcgagagcgtgaagctgcacctggagaccgacagcctggccctggtggccctgggcgccctggacaccgccctgtacgccgccggcagcaagagccacaagcccctgaacatgggcaaggtgttcgaggccatgaacagctacgacctgggctgcggccccggcggcggcgacagcgccctgcaggtgttccaggccgccggcctggccttcagcgacggcgaccagtggaccctgagcagaaagagactgagctgccccaaggagaagaccaccagaaagaagagaaacgtgaacttccagaaggccatcaacgagaagctgggccagtacgccagccccaccgccaagagatgctgccaggacggcgtgaccagactgcccatgatgagaagctgcgagcagagagccgccagagtgcagcagcccgactgcagagagcccttcctgagctgctgccagttcgccgagagcctgagaaagaagagcagagacaagggccaggccggcctgcagagagccctggagatcctgcaggaggaggacctgatcgacgaggacgacatccccgtgagaagcttcttccccgagaactggctgtggagagtggagaccgtggacagattccagatcctgaccctgtggctgcccgacagcctgaccacctgggagatccacggcctgagcctgagcaagaccaagggcctgtgcgtggccacccccgtgcagctgagagtgttcagagagttccacctgcacctgagactgcccatgagcgtgagaagattcgagcagctggagctgagacccgtgctgtacaactacctggacaagaacctgaccgtgagcgtgcacgtgagccccgtggagggcctgtgcctggccggcggcggcggcctggcccagcaggtgctggtgcccgccggcagcgccagacccgtggccttcagcgtggtgcccaccgccgccaccgccgtgagcctgaaggtggtggccagaggcagcttcgagttccccgtgggcgacgccgtgagcaaggtgctgcagatcgagaaggagggcgccatccacagagaggagctggtgtacgagctgaaccccctggaccacagaggcagaaccctggagatccccggcaacagcgaccccaacatgatccccgacggcgacttcaacagctacgtgagagtgaccgccagcgaccccctggacaccctgggcagcgagggcgccctgagccccggcggcgtggccagcctgctgagactgcccagaggctgcggcgagcagaccatgatctacctggcccccaccctggccgccagcagatacctggacaagaccgagcagtggagcaccctgccccccgagaccaaggaccacgccgtggacctgatccagaagggctacatgagaatccagcagttcagaaaggccgacggcagctacgccgcctggctgagcagaggcagcagcacctggctgaccgccttcgtgctgaaggtgctgagcctggcccaggagcaggtgggcggcagccccgagaagctgcaggagaccagcaactggctgctgagccagcagcaggccgacggcagcttccaggacctgagccccgtgatccacagaagcatgcagggcggcctggtgggcaacgacgagaccgtggccctgaccgccttcgtgaccatcgccctgcaccacggcctggccgtgttccaggacgagggcgccgagcccctgaagcagagagtggaggccagcatcagcaaggccagcagcttcctgggcgagaaggccagcgccggcctgctgggcgcccacgccgccgccatcaccgcctacgccctgaccctgaccaaggcccccgccgacctgagaggcgtggcccacaacaacctgatggccatggcccaggagaccggcgacaacctgtactggggcagcgtgaccggcagccagagcaacgccgtgagccccacccccgcccccagaaaccccagcgaccccatgccccaggcccccgccctgtggatcgagaccaccgcctacgccctgctgcacctgctgctgcacgagggcaaggccgagatggccgaccaggccgccgcctggctgaccagacagggcagcttccagggcggcttcagaagcacccaggacaccgtgatcgccctggacgccctgagcgcctactggatcgccagccacaccaccgaggagagaggcctgaacgtgaccctgagcagcaccggcagaaacggcttcaagagccacgccctgcagctgaacaacagacagatcagaggcctggaggaggagctgcagttcagcctgggcagcaagatcaacgtgaaggtgggcggcaacagcaagggcaccctgaaggtgctgagaacctacaacgtgctggacatgaagaacaccacctgccaggacctgcagatcgaggtgaccgtgaagggccacgtggagtacaccatggaggccaacgaggactacgaggactacgagtacgacgagctgcccgccaaggacgaccccgacgcccccctgcagcccgtgacccccctgcagctgttcgagggcagaagaaacagaagaagaagagaggcccccaagctgaccagcctgagcgacagatacgtgagccacttcgagaccgagggcccccacgtgctgctgtacttcgacagcgtgcccaccagcagagagtgcgtgggcttcgaggccgtgcaggaggtgcccgtgggcctggtgcagcccgccagcgccaccctgtacgactactacaaccccgagagaagatgcagcgtgttctacggcgcccccagcaagagcagactgctggccaccctgtgcagcgccgaggtgtgccagtgcgccgagggcaagtgccccagacagagaagagccctggagagaggcctgcaggacgaggacggctacagaatgaagttcgcctgctactaccccagagtggagtacggcttccaggtgaaggtgctgagagaggacagcagagccgccttcagactgttcgagaccaagatcacccaggtgctgcacttcaccaaggacgtgaaggccgccgccaaccagatgagaaacttcctggtgagagccagctgcagactgagactggagcccggcaaggagtacctgatcatgggcctggacggcgccacctacgacctggagggccacccccagtacctgctggacagcaacagctggatcgaggagatgcccagcgagagactgtgcagaagcaccagacagagagccgcctgcgcccagctgaacgacttcctgcaggagtacggcacccagggctgccaggtgtag

SEQ ID NO: 88343 - DNA, 807 bp, Artificial Sequence
  derived and/or modified sequence
atgtgccccgaggacagcctgcaggtgcccctgaaggacgccaagagctgcggcctgcaccagctgctgagaggccccgaggtgcagctggtggcccacagcccctggctgaaggacagcctgagcagaaccaccaacatccagggcatcaacctgctgttcagcagcagaagaggccacctgttcctgcagaccgaccagcccatctacaaccccggccagagagtgagatacagagtgttcgccctggaccagaagatgagacccagcaccgacaccatcaccgtgatggtggagaacagccacggcctgagagtgagaaagaaggaggtgtacatgcccagcagcatcttccaggacgacttcgtgatccccgacatcagcgagcccggcacctggaagatcagcgccagattcagcgacggcctggagagcaacagcagcacccagttcgaggtgaagaagtacgtgctgcccaacttcgaggtgaagatcacccccggcaagccctacatcctgaccgtgcccggccacctggacgagatgcagctggacatccaggccagatacatctacggcaagcccgtgcagggcgtggcctacgtgagattcggcctgctggacgaggacggcaagaagaccttcttcagaggcctggagagccagaccaagctggtgaacggccagagccacatcagcctgagcaaggccgagttccaggacgccctggagaagctgaacatgggcatcaccgacctgcagggcctgagactgtacgtggccgccgccatcatcgagagcccctag

SEQ ID NO: 88344 - DNA, 5097 bp, Artificial Sequence
  derived and/or modified sequence
atgagactgctgtggggcctgatctgggccagcagcttcttcaccctgagcctgcagaagcccagactgctgctgttcagccccagcgtggtgcacctgggcgtgcccctgagcgtgggcgtgcagctgcaggacgtgcccagaggccaggtggtgaagggcagcgtgttcctgagaaaccccagcagaaacaacgtgccctgcagccccaaggtggacttcaccctgagcagcgagagagacttcgccctgctgagcctgcaggtgcccctgaaggacgccaagagctgcggcctgcaccagctgctgagaggccccgaggtgcagctggtggcccacagcccctggctgaaggacagcctgagcagaaccaccaacatccagggcatcaacctgctgttcagcagcagaagaggccacctgttcctgcagaccgaccagcccatctacaaccccggccagagagtgagatacagagtgttcgccctggaccagaagatgagacccagcaccgacaccatcaccgtgatggtggagaacagccacggcctgagagtgagaaagaaggaggtgtacatgcccagcagcatcttccaggacgacttcgtgatccccgacatcagcgagcccggcacctggaagatcagcgccagattcagcgacggcctggagagcaacagcagcacccagttcgaggtgaagaagtacgtgctgcccaacttcgaggtgaagatcacccccggcaagccctacatcctgaccgtgcccggccacctggacgagatgcagctggacatccaggccagatacatctacggcaagcccgtgcagggcgtggcctacgtgagattcggcctgctggacgaggacggcaagaagaccttcttcagaggcctggagagccagaccaagctggtgaacggccagagccacatcagcctgagcaaggccgagttccaggacgccctggagaagctgaacatgggcatcaccgacctgcagggcctgagactgtacgtggccgccgccatcatcgagagccccggcggcgagatggaggaggccgagctgaccagctggtacttcgtgagcagccccttcagcctggacctgagcaagaccaagagacacctggtgcccggcgcccccttcctgctgcaggccctggtgagagagatgagcggcagccccgccagcggcatccccgtgaaggtgagcgccaccgtgagcagccccggcagcgtgcccgaggtgcaggacatccagcagaacaccgacggcagcggccaggtgagcatccccatcatcatcccccagaccatcagcgagctgcagctgagcgtgagcgccggcagcccccaccccgccatcgccagactgaccgtggccgccccccccagcggcggccccggcttcctgagcatcgagagacccgacagcagaccccccagagtgggcgacaccctgaacctgaacctgagagccgtgggcagcggcgccaccttcagccactactactacatgatcctgagcagaggccagatcgtgttcatgaacagagagcccaagagaaccctgaccagcgtgagcgtgttcgtggaccaccacctggcccccagcttctacttcgtggccttctactaccacggcgaccaccccgtggccaacagcctgagagtggacgtgcaggccggcgcctgcgagggcaagctggagctgagcgtggacggcgccaagcagtacagaaacggcgagagcgtgaagctgcacctggagaccgacagcctggccctggtggccctgggcgccctggacaccgccctgtacgccgccggcagcaagagccacaagcccctgaacatgggcaaggtgttcgaggccatgaacagctacgacctgggctgcggccccggcggcggcgacagcgccctgcaggtgttccaggccgccggcctggccttcagcgacggcgaccagtggaccctgagcagaaagagactgagctgccccaaggagaagaccaccagaaagaagagaaacgtgaacttccagaaggccatcaacgagaagctgggccagtacgccagccccaccgccaagagatgctgccaggacggcgtgaccagactgcccatgatgagaagctgcgagcagagagccgccagagtgcagcagcccgactgcagagagcccttcctgagctgctgccagttcgccgagagcctgagaaagaagagcagagacaagggccaggccggcctgcagagagccctggagatcctgcaggaggaggacctgatcgacgaggacgacatccccgtgagaagcttcttccccgagaactggctgtggagagtggagaccgtggacagattccagatcctgaccctgtggctgcccgacagcctgaccacctgggagatccacggcctgagcctgagcaagaccaagggcctgtgcgtggccacccccgtgcagctgagagtgttcagagagttccacctgcacctgagactgcccatgagcgtgagaagattcgagcagctggagctgagacccgtgctgtacaactacctggacaagaacctgaccgtgagcgtgcacgtgagccccgtggagggcctgtgcctggccggcggcggcggcctggcccagcaggtgctggtgcccgccggcagcgccagacccgtggccttcagcgtggtgcccaccgccgccgccgccgtgagcctgaaggtggtggccagaggcagcttcgagttccccgtgggcgacgccgtgagcaaggtgctgcagatcgagaaggagggcgccatccacagagaggagctggtgtacgagctgaaccccctggaccacagaggcagaaccctggagatccccggcaacagcgaccccaacatgatccccgacggcgacttcaacagctacgtgagagtgaccgccagcgaccccctggacaccctgggcagcgagggcgccctgagccccggcggcgtggccagcctgctgagactgcccagaggctgcggcgagcagaccatgatctacctggcccccaccctggccgccagcagatacctggacaagaccgagcagtggagcaccctgccccccgagaccaaggaccacgccgtggacctgatccagaagggctacatgagaatccagcagttcagaaaggccgacggcagctacgccgcctggctgagcagaggcagcagcacctggctgaccgccttcgtgctgaaggtgctgagcctggcccaggagcaggtgggcggcagccccgagaagctgcaggagaccagcaactggctgctgagccagcagcaggccgacggcagcttccaggacctgagccccgtgatccacagaagcatgcagggcggcctggtgggcaacgacgagaccgtggccctgaccgccttcgtgaccatcgccctgcaccacggcctggccgtgttccaggacgagggcgccgagcccctgaagcagagagtggaggccagcatcagcaaggccaacagcttcctgggcgagaaggccagcgccggcctgctgggcgcccacgccgccgccatcaccgcctacgccctgaccctgaccaaggcccccgccgacctgagaggcgtggcccacaacaacctgatggccatggcccaggagaccggcgacaacctgtactggggcagcgtgaccggcagccagagcaacgccgtgagccccacccccgcccccagaaaccccagcgaccccatgccccaggcccccgccctgtggatcgagaccaccgcctacgccctgctgcacctgctgctgcacgagggcaaggccgagatggccgaccaggccgccgcctggctgaccagacagggcagcttccagggcggcttcagaagcacccaggacaccgtgatcgccctggacgccctgagcgcctactggatcgccagccacaccaccgaggagagaggcctgaacgtgaccctgagcagcaccggcagaaacggcttcaagagccacgccctgcagctgaacaacagacagatcagaggcctggaggaggagctgcagttcagcctgggcagcaagatcaacgtgaaggtgggcggcaacagcaagggcaccctgaaggtgctgagaacctacaacgtgctggacatgaagaacaccacctgccaggacctgcagatcgaggtgaccgtgaagggccacgtggagtacaccatggaggccaacgaggactacgaggactacgagtacgacgagctgcccgccaaggacgaccccgacgcccccctgcagcccgtgacccccctgcagctgttcgagggcagaagaaacagaagaagaagagaggcccccaagctgaccagcctgagcgacagatacgtgagccacttcgagaccgagggcccccacgtgctgctgtacttcgacagcgtgcccaccagcagagagtgcgtgggcttcgaggccgtgcaggaggtgcccgtgggcctggtgcagcccgccagcgccaccctgtacgactactacaaccccgagagaagatgcagcgtgttctacggcgcccccagcaagagcagactgctggccaccctgtgcagcgccgaggtgtgccagtgcgccgagggcaagtgccccagacagagaagagccctggagagaggcctgcaggacgaggacggctacagaatgaagttcgcctgctactaccccagagtggagtacggcttccaggtgaaggtgctgagagaggacagcagagccgccttcagactgttcgagaccaagatcacccaggtgctgcacttcaccaaggacgtgaaggccgccgccaaccagatgagaaacttcctggtgagagccagctgcagactgagactggagcccggcaaggagtacctgatcatgggcctggacggcgccacctacgacctggagggccacccccagtacctgctggacagcaacagctggatcgaggagatgcccagcgagagactgtgcagaagcaccagacagagagccgcctgcgcccagctgaacgacttcctgcaggagtacggcacccagggctgccaggtgtag

SEQ ID NO: 88345 - RNA, 5097 nt, Artificial Sequence
  derived and/or modified sequence
augcggcuacuuuggggacucaucugggccaguucuuucuucaccuuaagccugcagaaaccucggcuguugcuguucagcccaucagugguccaucucggcgugccacugagcguggguguacaauugcaagauguuccccguggacagguggugaaagggucgguguuccuccgcaauccuuccagaaacaauguaccauguucgcccaagguagauuuuacccucuccuccgagcgggacuucgcacuccugagucuucaggucccucuuaaggaugcgaaaagcuguggucuccaucagcuucugagagggccagaaguucagcugguugcacacucccccuggcugaaggacucacuuuccagaacaaccaauauucagggcaucaaucuucucuucaguuccagacgaggccacuuauuucuccagaccgaucagcccauauauaacccgggccagcgagugcguuauaggguguuugcauuagaccagaaaaugcgcccaaguaccgauacuaucacugugaugguggaaaacucccacgggcuuagaguccggaaaaaggaaguguauaugccaucuaguaucuuccaggacgacuuuguaauaccugacauuucagaacccgggacguggaaaauuagugcccgguuuagugacggccuggaauccaacucuuccacccaguuugaagugaaaaaguacguacugcccaauuucgaagucaaaaucacaccgggcaaaccuuauauucuuacugugccaggucaucuggaugaaaugcagcucgauauccaagccagguacauauacggaaagccugugcagggcguagccuacgucagauuuggacugcucgacgaggacggcaagaagacguucuuccgcggucuagaaucccagaccaagcuugugaauggccagucccacaucucauugagcaaggcagaauuccaagaugcucuggagaaacuaaauaugggaauaacugaucugcagggucuacgucuauauguggcagcggcuauuauugaguaucccgguggggagauggaagaagccgagcugaccagcugguauuucgugagcucacccuucucucuggaucucuccaagaccaagcgacaccuggugccaggagccccauuccuccugcaagcucugguucgcgaaaugagcggcucaccugccuccggaauuccugugaaggugagcgcaacagucagcagucccggaucuguucccgagguacaagacauucagcaaaacacagacggcucuggacaggucucuaucccaauuauuauuccucaaacuauuuccgaacugcaacugagugugucugcagggaguccucacccagcaaucgcgagacuuacaguugccgcuccaccaaguggaggcccaggguuccugaguauugaacgcccugacucccgcccuccucgggugggcgauacacugaaccuuaauuugagagcugugggcaguggggcuacuuuuucccauuauuauuacaugauucuaaguagaggccagauuguuuucaugaaccgcgagcccaagaggacauugaccucagugagcguguucguagaccaccaccuugcccccagcuucuacuuugucgcguuuuacuaucacggagaccaccccguugccaauagccuacgcgucgacgugcaggccggagcgugugaggggaagcuugaacuuuccguggacggagcaaagcaguaccggaacggggagucagugaagcuccacuuagaaacugauucacuugcucuuguggcccucggcgcgcuggauaccgcacuguacgccgccggguccaaaagccauaagccucuuaacaugggcaaggucuuugaggccaugaacaguuaugaucuggguugcgguccaggcgggggggauucggcgcugcaaguguuucaagcagccgggcuggcuuucucugacggagaccaguggacccuuucucguaagcggcucuccugccccaaggaaaaaacuacccgcaaaaagcgcaaugugaauuuccagaaggccauuaaugaaaaacucggccaauacgcuucccccacagcaaagcgcuguugucaagacggggugaccagacugcccaugaugcguaguugcgagcagcgugcugcucggguccagcaaccugauugccgggaaccauuucuaagcugcugucaguuugcggagucacuccgcaaaaaauccagagauaaaggacaagcgggauuacagcgcgcucuggaaauccugcaggaggaagacuuaauugacgaggaugauaucccgguccgaucuuucuuuccggagaacuggcuuuggcgcguagagacuguggacagguuccagauuuugacuuuguggcugcccgauagccugacaacaugggaaauccauggucucucgcuuucuaaaacaaaaggcuuguguguggcuaccccuguccagcugcgcguguuuagagaguuccaucugcaucuucgccuuccaaugagugugcggagauuugaacagcuagaacugaggccgguucucuacaacuacuuggauaaaaaccucacagugucaguucaugucucuccgguggaaggccugugucuggcagggggggguggacuggcacagcagguccuaguuccugcaggcucagcucgcccagucgcauuuaguguagugccaaccgcagcagcugccgucagucucaagguugucgccagggggagcuuugaauuuccggugggcgacgcagugucaaaaguucuccagaucgagaaggagggagcaauacaccgugaggaguuggucuacgaacucaacccccuggaucaucgcgggaggacccucgagauuccugggaauagcgacccaaauaugauuccggacggagacuuuaacuccuauguccgggugacugcuucugauccucuggacaccuugggcucugaaggcgcccugagucccggggggguggccucgcuacuccgacugccuaggggauguggugaacagaccaugaucuaucuggcuccaacucuggcugccuccagauaccuagauaagaccgagcaguggagcacuuugccuccagagacuaaggaccaugcaguagaccucauccaaaaaggauacaugcgaauccaacaguucaggaaggccgacgggagcuacgccgcuuggcugagcagaggaagcucuacguggcugacagcuuucguauuaaaaguguuaucccuugcccaagaacagguuggcggcucuccagagaaacugcaggagaccucgaacuggcugcuaucacagcagcaagccgacgggucuuuccaggaucucuccccugucauccaucgcuccaugcaggguggacuugugggaaaugacgaaacagucgcucugaccgccuucguaacaaucgcgcugcaccacggccuggccguauuccaggacgaaggggccgaaccacucaaacagcguguggaagccucgaucuccaaggcauccagcuuucugggagagaaggcuucagcgggacucuugggugcccacgccgcagcuauaaccgccuaugcccucacacucacuaaagcgccagcugaucugagaggagucgcacauaauaaccucauggccauggcccaagaaaccggcgacaaccucuauuggggcucugugacaggaucucaguccaacgcagucucgccuaccccagcuccacgaaauccaucagacccuaugccccaggcacccgccuuauggaucgagacaacagcauacgcucuccuucaccuccuccuucacgaggggaaagcugaaauggccgaccaggcggccgccuggcucacucggcagggaaguuuccaagguggcuuuagaaguacacaggacaccguuaucgcguuagaugcgcuaucugcauacuggaucgcuucucacaccacugaagagaggggacugaacgucacguugagcucgaccgggaggaauggguuuaagagccacgcucuucaguuaaauaauagacagaucaggggguuagaggaggagcuccaguuuucucugggcucuaagaucaaugugaagguaggagguaacagcaaaggaacccugaaagugcugagaacauauaaugugcucgauaugaaaaacaccaccugccaggaccugcaaaucgagguuacuguuaagggccacguggaguauacgauggaggccaaugaagauuacgaggauuaugaguaugacgagcuaccagcuaaagaugacccagacgcaccccuucaacccguuacaccccuccaacuguuugagggacggagaaaucggaggagacgcgaagcgcccaaacugacgucccugagugauagauaugucucccauuucgaaacagaaggcccacacgugcugcuguauuuugauaguguccccacgucucgggaaugugucggcuucgaggcugugcaggaagucccagugggcuugguccaaccagcauccgccacucucuaugauuacuacaacccagaacgccgauguagcgucuucuauggugcaccauccaaaucccgccuucuagcaacucugugcucagccgaaguuugccaaugugcagagggcaagugcccccgccagagaagagcccuggagcgcggacuccaagacgaggacggauaccggaugaaguuugcuuguuacuacccuagaguugaguacgguuuccagguaaagguacuaagagaggauagcagggcggcuuuucgccuguuugagaccaaaaucacucagguccuacacuuuacaaaggacgugaaggccgccgccaaucaaaugcgcaauuuucugguccgcgccucuugccguuugagguuggagccuggcaaagaauaccucaucaugggcuuggacggcgcuaccuacgaccuugaggggcauccccaguaucuucuggacucaaauaguuggauagaggagaugccgucugaaagacucugccgaagcacucgccagagagccgcgugcgcucagcucaacgauuuuuuacaggaguacgggacccaggggugucagguuuag

SEQ ID NO: 88346 - RNA, 5097 nt, Artificial Sequence
  derived and/or modified sequence
augcgacuguuguggggacuuaucugggcaucuuccuuuuuuacacuuuccuugcagaaaccccgcuuacugcuguucaguccaucugugguucaccuaggcguuccacugucaguggggguccaguuacaggacguaccucgaggccaaguugugaagggaagcguguuucucagaaacccaucaaggaauaaugugccaugcagcccuaagguggauuuuacacuuuccucugagagggauuucgcacuccugucacugcaggugccccucaaggaugcaaagagcuguggguugcaccagcuccuucgcggcccagagguacaacuggucgcccauagucccuggcuaaaggacagcuuaagccggacuacgaauauucaggguaucaacuugcuauuuucuucgcggagggggcacuuauuccuccaaacugaucagccuauauacaauccaggucagcgcgugcguuaccgaguuuucgcuuuagaccagaaaaugaggcccaguaccgauacaaucaccgucaugguugagaauagucauggccugaggguacgcaagaaggaaguguacaugccuagcagcaucuuccaggacgacuuuguuaucccugacaucucagagccuggaacuuggaaaaucucugcgcgcuuuagugacggacuagagaguaauagcucuacccaguucgaagugaagaaauacgugcugcccaacuucgaagucaagauuacuccugggaaaccauauauacugacggucccaggccaccuggaugagaugcaauuagacauccaggccagguauauauauggcaagccaguucaagggguugcguacguucguuucggucugcuggacgaggaugggaaaaaaaccuuuuucagagggcuggaaucucagaccaaauuagugaacggccagagucauaucucucucuccaaagcagaguuccaggacgcacuggaaaaacugaauaugggcaucaccgacuugcagggccucaggcucuacguagccgccgccauaauugaauaccccgggggcgaaauggaagaagcugaguuaacaaguugguacuucgucucuagcccuuucagccucgaucucucuaagaccaaacggcaccuugugccgggggcccccuuuuuauugcaggcccuggugagagagaugaguggcucuccggcaucaggaaucccagugaaggugagcgcuacagucucguccccagggagcgugccugagguacaggacauucagcagaauacugauggaagcggucaggugucaaucccuaucauuauuccucagaccauuuccgagcuacaacucucuguuagcgccggauccccccauccagcaaucgcccgucugaccguggcagcuccuccaagcggggguccuggauuucuuaguauagaaaggccagauagccggcccccgagagugggugauacauugaacuuaaauuugcgcgcaguagguagcggagcaacuuucucacacuauuauuacaugauuuuaucacguggacagaucgucuuuaugaacagagaaccaaaacggaccuuaaccucuguauccguauucguugaccaccaccucgcaccuucuuuuuauuucguggccuucuauuaucacggcgaucaccccguggcgaauucucuccgcguggaugugcaggccggcgcaugcgagggcaaacucgagcugucgguggacggggccaaacaguauaggaacggcgaaucagucaaacugcaucuggagaccgauucacuggcccucguggcccugggugcacuugauaccgcacuguacgcugccggaucaaagucacacaaaccucuuaauauggggaaagucuucgaggccaugaacagcuacgaccuggggugugggccugggggcggcgacucagcgcugcaaguguuucaggcugccggccuugcguucuccgauggggaucaguggaccuugagccgaaagaggcugucuugucccaaggaaaaaacaacuaggaagaagcgcaauguuaauuuccaaaaggcuauaaacgaaaagcuaggacaguacgccucuccaacugccaaacgcugcugccaagacggcgugacuagacugccaaugaugagguccugugagcagagggcugcccgggugcagcagcccgacugucgcgaaccauuucugucaugcugucaguuugccgagucccugagaaaaaaaucucgcgacaaaggacaggccggacuucaaagggcucuugagauauugcaggaagaggaccugaucgaugaggacgacauccccguuaggucuuucuuccccgagaacuggcuuuggagaguugaaacuguagaucgguuccagauccugacccuguggcuuccagacucgcugacaacgugggaaauucauggacugucucucucuaagacaaaagggcucugcguagccaccccaguucagcuuagaguguuuagggaauuucaucugcaccuucgacugccaaugucggucagaagguucgagcagcuagagcugcgaccggugcuguauaauuaccucgacaagaaccuaacugucagugugcauguaucucccgucgagggccuuugccuugcagguggaggcggucuggcucagcagguccugguccccgccggaucugcucggcccguggccuucuccguggucccaacagccgcugcugcggugagcuuaaaaguggucgcucgcggcucauuugaauucccuguuggcgaugcagucuccaaaguccuucagaucgaaaaggagggcgcaauccaucgugaggagcugguguaugaacuuaacccucucgaucauaggggcagaacauuagaaauaccugguaacucagaucccaacaugaucccugauggagacuuuaacaguuacgugcgagucaccgccucagauccucuggauacucuggggucggagggcgcccugucaccaggggggguggccagucugcugcgucugccucgaggcugcggugagcagaccaugaucuaccuugcaccgacgcuggcggcaucacgcuaucuggacaagacagaacaauggagcacauugccaccugaaaccaaggaucaugccguggaccugauccagaagggcuacaugcggauacagcaguucagaaaagcagaugguuccuacgcagcuuggcucuccagaggcuccagcaccuggcugacagcauuugugcugaaggugcugagucuggcccaggaacaagugggagggucuccagagaagcuccaagagacuaguaacuggcuucucagccagcagcaggcagaugguagcuuucaggaucuaagcccuguuauucaccgaucuaugcagggcgguuugguggggaacgaugagaccguggcauugacagcuuuugugacaaucgcucuccaccacgggcucgccgucuuucaggacgaaggugcagagccucugaagcagcgcguggaggccagcaucaguaaagcaucuucauuccugggagagaaagccucggccggauuacugggggcgcaugcggcagcuaucacugcauacgccuuaacacugacuaaggccccugcagaucuucgcggcguugcacauaacaaccuaauggcaauggcacaggagacuggcgauaauuuguacugggguucugugacagggucccaaaguaacgccgucagucccacuccugcgccacgaaauccuagugacccuaugccccaagcucccgcucuguggaucgaaaccacagcuuacgccuuguuacaucuguuacugcacgaaggaaaggccgaaauggcggaucaggccgcagcguggcugacuagacaagguuccuuucagggagguuuccgcagcacacaggauacugugaucgcucuggacgcccugucagcauacuggauagccagucacacuacugaagaaagaggcuuaaacgugacccuuucuagcacaggccggaacggauucaaaucucacgcccuucaacugaacaauagacagauccgcggauuagaggaggaacuccaauuuagucugggcucuaagaucaaugucaaggugggagggaacucaaagggaacacuuaagguccugcgaacuuauaauguguuagauaugaagaauaccacaugccaagaccugcaaauugaggugacagucaaggggcacguagaauauaccauggaagcuaaugaggacuacgaagauuacgaauacgaugaacucccggcaaaagaugauccugacgcgccuuuacagccagugacuccguuacaacuguuugagggacggcggaaucgacgaaggcgagaggcaccaaaacuuacgagucugagugacagauaugugagccacuucgagaccgaaggaccacauguucugcucuauuucgacaguguuccgacuagccgagaaugcguaggauucgaagcaguacaagaagucccagucggacucgugcagccugcuucggcaacccuguaugauuauuauaacccagaaaggcguuguucaguguuuuauggugcgcccagcaagaguaggcuacuggccacccucuguuccgccgaggugugucagugugcagaggggaaauguccgcggcaaaggcgcgcccuggaaagaggucugcaggacgaagacggguaucggaugaaguucgcauguuacuauccccggguggaguauggcuuucaagugaaagugcugagagaggacucucgcgccgccuuuaggcuuuucgagaccaaaauuacccaagugcuccauuucaccaaggacguaaaggcggccgcaaaucagaugcgcaacuucuuaguccgggcaaguuguagacuucggcucgagccaggcaaggaauaccuaaucaugggauuagauggggcuacauaugaccuagaaggccauccacaguaccuccuugacaguaauucauggaucgaagagaugcccagcgagagacuuugucgguccacuagacagcgcgcugcuugcgcacaacugaacgauuuucuucaggaguauggaacacagggcugccagguguag

SEQ ID NO: 88347 - RNA, 5097 nt, Artificial Sequence
  derived and/or modified sequence
augagacugcuguggggacucauuugggcaucuucauucuucacgcugucauugcaaaaaccucggcuacuccuguucucucccucuguuguacaucucggggugccgcugagugugggcguccaguugcaagacgugccucgaggucaggucgugaaagguagcgucuuucugagaaacccgucccgaaacaaugugccuuguagucccaagguggacuuuaccuuaucaucugaacgcgauuuugcucuacuaucccuccaggugccccugaaggacgccaaauccugcggacuucaucagcuucugagagggccagaaguucagcugguugcacacucccccuggcugaaggacucacuuuccagaacaaccaauauucagggcaucaaucuucucuucaguuccagacgaggccacuuauuucuccagaccgaucagcccauauauaacccgggccagcgagugcguuauaggguguuugcauuagaccagaaaaugcgcccaaguaccgauacuaucacugugaugguggaaaacucccacgggcuuagaguccggaaaaaggaaguguauaugccaucuaguaucuuccaggacgauuuugucauaccagauaucucagagcccggcacuuggaagauuucugcccgcuuuagugauggucucgaaagcaauagcucaacccaguucgaagugaagaaauauguccugccuaauuucgagguuaagaucacccccgguaaaccguacauccuuacugugccaggucacuuggacgagaugcagcuggacauccaggcaagauauaucuauggcaaaccuguacagggcgucgccuacgugcgauucggacuucucgacgaagaugggaaaaaaacauucuuuagaggacuggagagucagacaaaacuagucaaugggcagucacacauuucccuguccaaagccgaauuucaagaugcgcuggagaagcucaacaugggcaucacagaccuacaggggcucagacuguaugucgcugcugcaaucauagaauacccuggaggggagauggaagaggcagaacucacaucaugguauuucgucagcucaccauucagccuagacuuaaguaagacaaaaagacaucuuguccccggagcuccuuuccugcugcaagcucuuguccgcgaaauguccggcucacccgcaucuggcauccccgugaaaguguccgccacaguaaguaguccaggaucggugcccgaagugcaggauauccagcaaaauaccgacggaucuggacaggugucuauucccauaaucaucccacagaccauuucagaacugcaacuauccguauccgcuggcaguccccacccugccauugcccgguugacaguggcugcgccacccuccggagguccugguuuccuaagcauugaacgaccugacucucggccuccuagaguaggagacacucuuaaccuuaaccugagagcuguuggcucaggugcuaccuucagccauuauuauuacaugauuuuauccagaggccaaauuguguucaugaacagagagccaaaaaggacacugacaucuguaagcguuuucguugaccaucacuuagcacccucauucuauuuuguggccuuuuauuaucacggagaccaucccguggccaacagccuaagaguggacguccaggccggggccugcgaaggcaaauuagagcugagcguugacggagcaaagcaauauagaaacggggagaguguuaaacuccaccuagagacagauucacucgcacucguugcucuuggcgcacuggacaccgccuuguacgcggcuggcucuaagucacauaagccacuaaacauggggaaagucuuugaggcuaugaauuccuacgaucucggauguggacccggagggggggacagugcccuccaaguuuuucaagccgccggccuggcuuucagcgacggagaccaauggaccuuauccaggaaacgccugucauguccuaaggagaaaacaacccgaaaaaagcguaacgugaacuuucagaaagcaaucaaugaaaaguugggucaguaugcaaguccuacugcuaagagguguugccaggacggcgucacaagacuaccuaugaugagauccugcgagcagcgcgcagcccggguccaacagccugacugccgcgaaccuuuucuaagcugcugucaguuugcugaaagccugagaaagaaguccagagauaaaggacaagccggacuacaacgggcacuggaaauucuucaggaggaagauuuaauagacgaagacgauaucccaguccgcuccuuuuucccugaaaauuggcuuuggagagucgaaaccguggaucgcuuccagauucuaacucugugguugccagauucauugacuaccugggagauacacgggcuuucucuaucaaaaaccaaaggacuaugcguagcuacucccguucaguuaaggguguuuagagaguuccacuugcaccugagauugcccaugaguguucgcagguucgaacaacuugaacugagacccguuuuauauaauuaccuggauaagaacuugacuguaucuguacaugugaguccaguagagggacuguguuuagcagggggaggaggacucgcccaacaggugcuggugccugccggcucugcucguccaguggccuucuccguugugccaacagcagcugcagcggugucacuaaagguaguugcuagaggcagcuuugaauuuccggugggcgaugcgguguccaaagugcuccaaauagaaaaggaaggcgcaauccacagagaagagcugguguaugaacugaauccgcucgaucaccggggccguacccuagagauuccuggaaauucugacccaaacaugauccccgauggugauuucaauagcuaugugagagugaccgcuuccgacccucucgacacguugggcagcgaaggggcccugucaccaggugguguggcaucccugcugcguuugccaagaggguguggggaacaaacaaugaucuaucucgccccaacacuggccgccucacgguaccuagacaagacagagcaauggagcacccuccccccggagacaaaagaccacgcuguugaucuuauucaaaaaggguauaugagaauccagcaguuucguaaggcugacgggagcuacgccgcauggcuuagucgaggaucuagcaccuggcugaccgcauuuguucuaaaaguucuuucucuagcacaggaacaggucgggggcucaccagagaaauuacaagaaacaucuaauuggcugcucucucagcaacaggcggacggcagcuuccaggaccugucccccguaauccauagauccaugcaaggaggacuuguuggcaaugacgagacaguggcccugacagcauucguuacgauugcuuugcaccauggcuuggcaguguuccaagacgagggugcggaaccucugaagcagagaguugaagcuuccauuucuaaagccuccucauuuuugggcgaaaaggcuagcgccggacuccugggggcccacgcugcagcaauuacugccuaugcccucacccucacaaaagccccugcagaccucagggguguggcacacaacaaccuaauggcuauggcucaagagaccggcgauaacuuguacuggggcucuguuacaggaagucagagcaaugcuguuucaccuacacccgcucccagaaauccuucugacccaaugccucaggcucccgcccucuggaucgaaacgaccgcauacgcacugcuacaccucuugcugcaugaaggcaaggcagaaauggcugaucaggccgcagcuuggcugacucgucaagguuccuuccagggcggcuuccggucuacacaggauacaguuaucgccuuggaugcauugagugccuacuggauugcuucucacaccaccgaggagcgcggauugaacgugacccugucaucuacuggccguaaugguuuuaagucccacgccuugcaacuuaacaacagacagauuaggggguuagaggaggaguuacaguucucccugggcagcaagaucaacgucaaggucggcgggaauucuaaaggaacuuugaagguccuacgcaccuacaacgugcucgacaugaagaacacuacaugccaagaccugcagaucgagguuacuguuaagggccacguggaguauacgauggaggccaaugaagauuacgaggauuaugaguaugacgagcuaccagcuaaagaugacccagacgcaccccuucaacccguuacaccccuccaacuguuugagggacggagaaaucggaggagacgcgaagcgcccaaacugacgucccugagugauagauaugucucccauuucgaaacagaaggcccacacgugcugcuguauuuugauaguguccccacgucucgggaaugugucggcuucgaggcugugcaggaagucccagugggcuugguccaaccagcauccgccacucucuaugauuacuacaacccagaacgccgauguagcgucuucuauggugcaccauccaaaucccgccuucuagcaacucugugcucagccgaaguuugccaaugugcagagggcaagugcccccgccagagaagagcccuggagcgcggacuccaagacgaggacggauaccggaugaaguuugcuuguuacuacccuagaguugaguacgguuuccagguaaagguacuaagagaggauagcagggcggcuuuucgccuguuugagaccaaaauuacccagguuuugcauuucacuaaggaugugaaagcugccgcuaaccaaaugagaaauuuccuggugcgcgcaucguguagacugcguuuggagccaggcaaggaauaucuaauuaugggauuggauggagcaacuuaugaccucgaaggccacccacaguaccuauuagauuccaauucuuggaucgaagagaugccaucagagagauugugccggucuacaaggcagagagcagcaugugcccaguugaacgacuucuuacaggaguacgggacccagggcugucaggucuag

SEQ ID NO: 88348 - RNA, 5097 nt, Artificial Sequence
  derived and/or modified sequence
augcgauuacuguggggacucaucugggcaucuucuuucuucacacuuagccugcagaagccacgccuguuacuuuuuuccccuucuguggugcaccucggugucccucuguccgugggcguucagcuucaagauguuccccgcgggcaaguggucaaagggucaguuuuccugagaaacccuaguagaaacaacguuccaugcagcccaaagguggauuuuaccuuauccagugagcgcgacuuugcauugcugucauuacaggugccacugaaagaugcaaaaucaugcggacuccaccaguuacuucgcgggccugaaguucaauuaguggcgcacagcccguggcuuaaggauagccuuaguagaaccacaaauauccaagguaucaaucuccucuuuaguagcagacggggccaucucuucuuacaaaccgaccagcccaucuacaacccuggccaaagagugagguacagagucuuugcacucgaucagaaaaugagacccucaaccgacacaaucacagucaugguggagaacucucacggcuugcgcguucgaaaaaaagagguuuacaugccgaguucaaucuuccaggaugacuucgucauacccgacauuagcgaacccgguacauggaagauuucugcccgcuucucugauggcuuagaaaguaacucaucuacccaguuugagguaaagaaauacgugcuccccaacuuugaggugaagauaacgccuggaaaaccauauauuuuaacaguucccggucaucuggaugagaugcagcucgacauccaggcccgguacauuuacggcaaaccaguacagggaguggcauacgugcguuucggacuccuagacgaggauggcaagaagaccuucuuuagaggacucgagucccaaacaaagcuggucaauggccagagucacauuagucuaaguaaagccgaguuucaggaugcccuggaaaaauugaacaugggcauuacagaccugcagggccuaagacuuuaugucgccgcggcaaucauagaauaccccgggggugaaauggaagaagccgaacugaccucuugguacuucguguccaguccuuuuagccuagauuuguccaagacuaaacgccaccuggugccaggagcccccuuccuccuccaagcacuggucagagaaaugagcggcucccccgcuagcgguauuccugugaagguuucugcuacugucuccucaccaggcucaguucccgaagugcaggacauccaacagaacacugauggcucuggccaggucagcauaccaauaaucaucccacagaccauuuccgaacuccagcugucagucucggccggaagcccacaccccgccauagcccgucugaccguugcagccccccccuccgguggaccuggguuucugucuaucgagagacccgauucaagaccuccuaggguaggugacacauugaaccuuaaccuccgagcuguuggaucuggcgccacauuuucacacuacuacuauaugauccugagucgaggccaaauaguguuuaugaaucgugaacccaaaagaacucucacuucagucagcgucuuuguugaucaccaccucgccccgaguuucuacuucguggccuuuuauuaucauggcgaucacccagucgcaaauagccugcgagucgaugugcaagcaggagcuugugagggaaaacuggaacuuagcguugauggagccaagcaauacagaaacggagagagcgugaagcuucaucuugagacugacucuuuggcccucguggcacugggugcacuggacacagcccuguacgcugcaggaucgaagagccacaaaccucugaauauggguaagguguucgaagccaugaauuccuaugauuugggcugcggaccaggcggcggugauuccgcucugcaagucuuccaagcggcuggucuugccuucagcgauggcgaucaauggacccucuccagaaaaagauugagcugccccaaagaaaagacgacuagaaaaaaacguaacgugaacuuccagaaggccauuaacgagaagcugggccaauacgccucaccgaccgccaagcggugcugccaggaugguguuacuagauuaccgaugaugcgguccugugaacaacgcgccgccaggguucaacaaccagacuguagggaaccauuucuaagcuguugucaguucgccgaaucgcugaggaaaaaaucuagggacaaagggcaggcgggacugcagcgugcgcuagagauccuccaagaagaggaccugaucgacgaagacgacauucccguaagaucuuucuuucccgaaaauuggcuuuggagagucgaaacuguggaucgauuucagauccugacacuuuggcugccagacagccuaacaacuugggaaauacauggauugagccuguccaagacuaaaggucuuugcguggcaaccccaguccagcuccguguuuuucgcgaguuucacuugcaccuacgccucccuaugagugugcggcgguucgaacaacuggaacuucggcccguguuauacaacuacuuagacaaaaaucuaaccguuuccguucacguuucaccuguggaggggcugugucucgcaggaggaggaggauuagcccagcaggucuuaguccccgccggcucggcacguccaguugccuuuagcguaguacccaccgcugcagccgcggugucacugaagguaguugcucggggcaguuuugaauucccagucggggaugcuguguccaaagugcugcagauagaaaaggaaggcgcuauucaucgggaagagcuuguuuaugaguugaacccccuggaccaccguggucggacucuagaaauuccuggcaauucugaccccaauaugauuccagacggcgauuuuaauucuuaugugcgcgugaccgcgucugauccacuggacacccucggaucugaaggagcuuuguccccuggcgguguggcuagccuguuacgcuugccacgggguuguggggaacagacaaugaucuaucucgcuccaacauuagccgcaucacguuaccuugacaaaaccgaacaguggucaacccucccccccgaaacaaaagaucacgccguggaccucauacagaaagguuauaugcgcauacaacaguuccgcaaggcugacggcuccuacgcagccugguugucuagaggcaguucaaccuggcuuacugccuuuguccucaaggugcugagccuugcccaagaacagguaggcggcucaccugagaaacuucaagagaccucuaacuggcucuuaucucagcagcaagcagacggcuccuuccaagaccuaucucccgugauucaucgaaguaugcagggaggauuaguggguaacgaugaaaccguagcucucacugccuuugugacaaucgcacugcaccacggucuggcaguuuuucaggaugagggugcugaacccuugaaacagcggguugaagccuccaucagcaaggcuuccaguuuccuuggcgaaaaggcauccgccggccugcugggugcccacgcugccgcaaucaccgccuaugcucugacacucacaaaagcgccagcagaucugcguggcguagcacacaacaaccugauggcaauggcacaggaaacuggcgacaaccucuauugggggagcgugacgggcagccaaucgaaugcaguuucuccuaccccagcgccccgcaauccaucagacccaaugccccaagcaccagccuuauggauagaaacgacagcguaugcccugcuucauuuauuguuacaugagggaaaagcagaaauggccgaucaggcagccgcauggcugacacggcaggguagcuuccaagguggcuuccgcucuacacaggauaccgucauugcccucgaugcacucuccgcauacuggaucgcuucucacacuaccgaggaaagaggacugaacguuacgcugucaucuacaggccgcaacggauucaaaucacacgcccuucaacuuaacaaccggcagauacgggggcuggaagaagaacugcaguuuucucuugggaguaagauaaauguaaaagucggugguaauaguaaagggacacuaaaaguccuuagaaccuacaacguccucgauaugaaaaacacuaccugccaggacuuacagaucgagguuaccguuaagggucaugucgaauacaccauggaggccaaugaagacuacgaggacuacgaguaugaugaauugccagcaaaagacgacccggaugcccccuugcagcccgugaccccccugcaguuguucgaggggagaaggaacagacgcagaagggaggcuccaaaacuaaccagccugucugaccgauacguaagccacuucgagacagagggcccucacguucuccuauauuucgacucggugccaaccaguagagaguguguuggauucgaagcagugcaagaagucccugugggucucgugcaaccggcuagcgcaacucucuaugacuauuauaaccccgaaagacguuguucaguuuuuuauggagcuccauccaaaucccggcuguuggcaacauugugcucagcagaaguuugucagugugcggaagguaaguguccgagacagagaagagcucuggagaggggccugcaggaugaggauggcuaccguaugaaguucgcaugcuauuauccaagaguggaauauggauuccaggucaaggugcugagagaggauucuagagcugccuuucgguuauucgaaacaaaaauuacucaaguucuacauuucaccaaggacguuaaggccgcagcaaaccaaaugagaaacuuccugguccgggcuagcugcagauuacguuuggagccagggaaggaauaucuaaucaugggacuugauggcgccacauaugaucucgagggccauccgcaauaucuccucgauaguaacuccuggauugaagagaugccuagcgagagauugugccgguccacacgccagagagcugccugcgcccaacugaaugacuuccugcaggaauacgguacccagggcugccagguuuag

SEQ ID NO: 88349 - protein, 387 aa, Artificial Sequence
  derived and/or modified sequence
MELLRTITYQPAASTKMCEQALGKGCGADSKKKRPPQPPEESQPPQSQAQVPPEISRIIVDPTTGKRYCRGKVLGKGGFAKCYEMTDLTNNKVYAAKIIPHSRVAKPHQREKIDKEIELHRILHHKHVVQFYHYFEDKENIYILLEYCSRRSMAHILKARKVLTEPEVRYYLRQIVSGLKYLHEQEILHRDLKLGNFFINEAMELKVGDFGLAARLEPLEHRRRTICGTPNYLSPEVLNKQGHGCESDIWALGCVMYTMLLGRPPFETTNLKETYRCIREARYTMPSSLLAPAKHLIASMLSKNPEDRPSLDDIIRHDFFCRASLRTDCLLAVVIQFQISTYQAQLRISLRKQLLLFLVAKKTKQDILTHIIECLKKMKTSTSLGMI

SEQ ID NO: 88350 - DNA, 1164 bp, Artificial Sequence
  derived and/or modified sequence
atggaactccttagaactatcacttatcaacctgccgcatccaccaagatgtgcgagcaagcactgggaaagggctgtggtgccgactccaaaaaaaagcggccgccacagccgcctgaagagtctcagcctcctcaatcccaggcccaggtccccccggaaatcagcagaatcattgtggatccaactactggcaagaggtattgcagaggaaaggtgctcggtaaagggggctttgcaaagtgttatgagatgaccgatctgacaaacaacaaagtatacgccgctaagataattccacactcacgggttgccaagccgcaccaaagggaaaagatagacaaggaaattgaactacatagaattctgcaccataaacacgtggtgcagttctaccattacttcgaggataaggagaacatttatatcctgctggaatactgctcgcgtagatccatggctcatatcctgaaagcgcggaaggttctaaccgagcccgaggtccggtattatctgaggcagattgtgtcaggcctaaaatacctacacgagcaagaaattctgcaccgcgacctgaagctagggaattttttcattaatgaggctatggagctaaaggttggcgattttggcctcgccgcccggctagaacctttggaacatcgcagaaggacgatttgtggaactcctaactatctttccccagaggtcttgaataaacagggccacggctgcgaatccgatatttgggctttaggatgtgtgatgtatacgatgttgctgggtagacctccattcgagaccactaatcttaaggagacatatagatgcatccgggaggcgagatatacaatgcccagctcgttgctcgctcccgcaaagcacttaatcgcctccatgctttccaagaaccctgaggatcggccgtctctcgatgacattattcgccacgacttcttctgcagggcatccttacgtaccgattgcctgctggccgttgtgatccaatttcagatctctacataccaagcccagctacgcatcagcctcagaaaacagctgctcctctttttggtcgccaagaaaaccaagcaggatattcttacgcacatcattgagtgtttaaaaaagatgaaaactagcacatcattgggtatgatatag

SEQ ID NO: 88351 - DNA, 1164 bp, Artificial Sequence
  derived and/or modified sequence
atggagctgctgcggaccatcacctaccagcctgctgccagcaccaagatgtgtgagcaggccctgggcaagggctgtggggctgacagcaagaagaagaggcctccccagcccccagaggagagccagcccccccagagccaggcccaggtgcccccagagatcagccgcatcatcgtggaccccaccaccgggaagcgctactgccggggcaaggtgctgggcaagggcggctttgccaagtgctatgagatgacagacctgaccaacaacaaggtgtatgctgccaagatcatcccccacagccgggtggccaagccccaccagcgggagaagattgacaaggagattgagctgcaccgcatcctgcaccacaagcacgtggtgcagttctaccactactttgaggacaaggagaacatctacatcctgctggagtactgcagccgccgctccatggcccacatcctgaaggccaggaaggtgctgacagagcctgaggtgcgctactacctgcggcagatcgtgtctggcctgaagtacctgcacgagcaggagatcctgcaccgggacctgaagctgggcaacttcttcatcaatgaggccatggagctgaaggtgggggactttggcctggccgcccggctggagcccctggagcacagaagaaggaccatctgtggcacccccaactacctgagccctgaggtgctgaacaagcagggccacggctgtgagagtgacatctgggccctgggctgtgtgatgtacaccatgctgctgggccggcccccatttgagaccaccaacctgaaggagacctaccgctgcatccgggaggcccgctacaccatgcccagcagcctgctggccccagccaagcacctgattgcctccatgctgagcaagaaccctgaggaccggcccagcctggatgacatcatcagacatgacttcttctgccgggccagcctgaggacagactgcctgctggccgtggtgatccagttccagatcagcacctaccaggcccagctgcgcatcagcctgaggaagcagctgctgctcttcctggtggccaagaagaccaagcaggacatcctgacccacatcattgaatgtctgaagaagatgaagaccagcaccagcctgggcatgatctag

SEQ ID NO: 88352 - DNA, 1164 bp, Artificial Sequence
  derived and/or modified sequence
atggagctgctgcggaccatcacctaccagcccgccgccagcaccaagatgtgcgaacaggctctgggaaaagggtgcggcgccgatagcaagaaaaaacgtcctccacaacctcccgaagagtcacaaccgccccagtctcaggcccaggtgcccccagagattagcagaattattgtagaccccaccacagggaagcgctattgcagaggcaaggtattgggcaagggcggattcgcgaagtgctacgaaatgacagatctcacaaataataaggtgtacgctgctaagataatcccacattcgagggtcgccaagccccaccaacgagaaaaaattgacaaagagattgagctccatcgcattctccatcataagcatgttgtgcaattttatcattacttcgaggacaaggaaaatatatacattttattggagtattgctcccgcagatctatggctcatatcctcaaggcacgcaaagtgcttactgagcctgaggtccgctactatcttcgccagattgtaagtggactgaagtatttgcacgaacaggagatactgcaccgtgatctaaagttgggaaacttcttcattaacgaggcaatggaacttaaggtgggcgattttgggctcgcagctagattagagcccctcgagcaccgacgtcggaccatatgtggaactccgaattacctatccccagaggtgcttaacaaacaagggcatggatgtgaatcagacatctgggctcttggatgtgttatgtataccatgttgttggggcgccccccatttgaaacgaccaatctgaaggagacttacagatgtatcagggaagcccgatacactatgccaagcagcctgctcgctcccgctaagcacctaattgcctcaatgctgagcaagaatcctgaggatcggccatccctggacgatatcatccgccatgacttcttctgtcgcgccagtttgagaaccgactgtctgctggccgtggtgatccagtttcagatcagcacataccaagcgcagctcaggatttctctccggaagcagctcctcctgtttttagtggccaagaaaactaaacaggacatcctgacccacatcattgagtgcttgaagaagatgaagacgtcaacctccctcggcatgatttag

SEQ ID NO: 88353 - DNA, 1489 bp, Artificial Sequence
  derived and/or modified sequence
acaagtggaccggggtgttgggtgctagtcggcaccagaggcaagggtgcgaggaccacggccggctcggacgtgtgaccgcgcctagggggtggcagcgggcagtgcggggcggcaaggcgaccatggagcttttgcggactatcacctaccagccagccgccagcaccaaaatgtgcgagcaggcgctgggcaagggttgcggagcggactcgaagaagaagcggccgccgcagccccccgaggaatcgcagccacctcagtcccaggcgcaagtgcccccggagatctcgcggattatcgtcgaccccacgactgggaagcgctactgccggggcaaagtgctgggaaagggtggctttgcaaaatgttacgagatgacagatttgacaaataacaaagtctacgccgcaaaaattattcctcacagcagagtagctaaacctcatcaaagggaaaagattgacaaagaaatagagcttcacagaattcttcatcataagcatgtagtgcagttttaccactacttcgaggacaaagaaaacatttacattctcttggaatactgcagtagaaggtcaatggctcatattttgaaagcaagaaaggtgttgacagagccagaagttcgatactacctcaggcagattgtgtctggactgaaataccttcatgaacaagaaatcttgcacagagatctcaaactagggaacttttttattaatgaagccatggaactaaaagttggggacttcggtctggcagccaggctagaacccttggaacacagaaggagaacgatatgtggtaccccaaattatctctctcctgaagtcctcaacaaacaaggacatggctgtgaatcagacatttgggccctgggctgtgtaatgtatacaatgttactagggaggcccccatttgaaactacaaatctcaaagaaacttataggtgcataagggaagcaaggtatacaatgccgtcctcattgctggctcctgccaagcacttaattgctagtatgttgtccaaaaacccagaggatcgtcccagtttggatgacatcattcgacatgactttttttgcagggcttcactccggacagactgtcttctagctgttgtcatacagttccagatttccacttatcaagcccagctaagaatttctttaagaaagcagctgctgctctttttggtggcaaaaaagacaaagcaagatatattgacacacataatagagtgtctaaagaagatgaagacatctacaagcttaggcatgatttgaaaaagacttcaataactcagcaacccagcaaacacaggacagatgaggagctccagccacctaccaccacagttgccaggtctggaacacccgcagtagaaaacaagcagcagattggggatgctattcggatgatagtcagagggactcttggcagctgtagcagcagcagtgaatgccttgaagacagtaccatggga

SEQ ID NO: 88354 - DNA, 1164 bp, Artificial Sequence
  derived and/or modified sequence
atggaattactgagaacaattacgtaccaacctgcagcctccactaagatgtgcgagcaggcactggggaaagggtgcggcgcagatagtaagaaaaagcggccacctcaaccccctgaggaaagccagcccccacagtcccaggcgcaggtccctccagagattagtcggattattgtggatcctaccaccgggaagcggtattgtcgcggaaaggttcttgggaaggggggatttgccaaatgttacgaaatgacggatctgacgaacaacaaagtatatgcagccaaaatcattcctcacagtagggtggcgaaacctcaccaacgggagaagatagacaaggagatagaattgcaccgtatactgcatcacaagcatgtcgtgcagttctatcactacttcgaggacaaggagaacatctacatcctcctcgagtattgttcaaggcgcagtatggcccacatacttaaggcacgcaaggtgttgaccgaaccagaagttagatattacctacgacagatcgtatccggcttaaagtacctgcacgagcaggaaatcctccatcgcgaccttaaattgggaaatttctttataaatgaagctatggagttgaaggtaggggatttcggcctggccgctcggctcgaaccactcgagcaccgcaggagaacgatctgtggcacgcctaattacttatcaccagaggtgcttaacaaacaggggcacggatgtgaatccgacatttgggctttgggttgcgttatgtataccatgttactcggcagacccccattcgaaacgaccaatttgaaggaaacctatcgctgtatcagggaggccaggtacactatgccaagctcccttctggcaccagccaaacatctaattgcttcaatgctctccaagaaccccgaggacagaccgagtctcgatgatattattaggcatgattttttctgtagggcttcactgcgaaccgattgcctgttagccgttgtgattcagttccagatatcaacttatcaggctcagctgcggatcagtcttcggaaacagttacttctcttcctggtggctaaaaagacgaagcaagatatcctgactcacattatagagtgcctgaagaagatgaagacctccacatccctgggcatgatttag

SEQ ID NO: 88355 - DNA, 1164 bp, Artificial Sequence
  derived and/or modified sequence
atggagctgctgagaaccatcacctaccagcccgccgccagcaccaagatgtgcgagcaggccctgggcaagggctgcggcgccgacagcaagaagaagagacccccccagccccccgaggagagccagcccccccagagccaggcccaggtgccccccgagatcagcagaatcatcgtggaccccaccaccggcaagagatactgcagaggcaaggtgctgggcaagggcggcttcgccaagtgctacgagatgaccgacctgaccaacaacaaggtgtacgccgccaagatcatcccccacagcagagtggccaagccccaccagagagagaagatcgacaaggagatcgagctgcacagaatcctgcaccacaagcacgtggtgcagttctaccactacttcgaggacaaggagaacatctacatcctgctggagtactgcagcagaagaagcatggcccacatcctgaaggccagaaaggtgctgaccgagcccgaggtgagatactacctgagacagatcgtgagcggcctgaagtacctgcacgagcaggagatcctgcacagagacctgaagctgggcaacttcttcatcaacgaggccatggagctgaaggtgggcgacttcggcctggccgccagactggagcccctggagcacagaagaagaaccatctgcggcacccccaactacctgagccccgaggtgctgaacaagcagggccacggctgcgagagcgacatctgggccctgggctgcgtgatgtacaccatgctgctgggcagaccccccttcgagaccaccaacctgaaggagacctacagatgcatcagagaggccagatacaccatgcccagcagcctgctggcccccgccaagcacctgatcgccagcatgctgagcaagaaccccgaggacagacccagcctggacgacatcatcagacacgacttcttctgcagagccagcctgagaaccgactgcctgctggccgtggtgatccagttccagatcagcacctaccaggcccagctgagaatcagcctgagaaagcagctgctgctgttcctggtggccaagaagaccaagcaggacatcctgacccacatcatcgagtgcctgaagaagatgaagaccagcaccagcctgggcatgatctag

SEQ ID NO: 88356 - protein, 613 aa, Artificial Sequence
  derived and/or modified sequence
MSQPGIPASGGAPASLQAQNGAALASGSPYTNGPVQNALLSSQESVSQGYNFQLPGSYPHPIPAKTLNPVSGQSNYGGSQGSGQTLNRPPVASNPVTPSLHSGPAPRMPLPASQNPATTPMPSSSFLPEANLPPPLNWQYNYPSTASQTNHCPRASSQPTVSGNTSLTTNHQYVSSGYPSLQNSFIKSGPSVPPLVNPPLPTTFQPGAPHGPPPAGGPPPVRALTPLTSSYRDVPQPLFNSAVNQEGITSNTNNGSMVVHSSYDEIEGGGLLATPQLTNKNPKMSRSVGYSYPSLPPGYQNTTPPGATGVPPSSLNYPSGPQAFTQTPLGANHLTTSMSGLSLQPEGLRVVNLLQERNMLPSTPLKPPVPNLHEDIQKLNCNPELFRCTLTSIPQTQALLNKAKLPLGLLLHPFKDLVQLPVVTSSTIVRCRSCRTYINPFVSFLDQRRWKCNLCYRVNDVPEEFLYNPLTRVYGEPHRRPEVQNATIEFMAPSEYMLRPPQPPVYLFVFDVSHNAVETGYLNSVCQSLLDNLDLLPGNTRTKIGFITFDSTIHFYGLQESLSQPQMLIVSDIEDVFIPMPENLLVNLNESKESVIGVSSEETLITCLEIAMR

SEQ ID NO: 88357 - DNA, 1842 bp, Artificial Sequence
  derived and/or modified sequence
atgagccagcccggcatccccgccagcggcggcgcccccgccagcctgcaggcccagaacggcgccgccctggccagcggcagcccctacaccaacggccccgtgcagaacgccctgctgagcagccaggagagcgtgagccagggctacaacttccagctgcccggcagctacccccaccccatccccgccaagaccctgaaccccgtgagcggccagagcaactacggcggcagccagggcagcggccagaccctgaacagaccccccgtggccagcaaccccgtgacccccagcctgcacagcggccccgcccccagaatgcccctgcccgccagccagaaccccgccaccacccccatgcccagcagcagcttcctgcccgaggccaacctgcccccccccctgaactggcagtacaactaccccagcaccgccagccagaccaaccactgccccagagccagcagccagcccaccgtgagcggcaacaccagcctgaccaccaaccaccagtacgtgagcagcggctaccccagcctgcagaacagcttcatcaagagcggccccagcgtgccccccctggtgaacccccccctgcccaccaccttccagcccggcgccccccacggccccccccccgccggcggccccccccccgtgagagccctgacccccctgaccagcagctacagagacgtgccccagcccctgttcaacagcgccgtgaaccaggagggcatcaccagcaacaccaacaacggcagcatggtggtgcacagcagctacgacgagatcgagggcggcggcctgctggccaccccccagctgaccaacaagaaccccaagatgagcagaagcgtgggctacagctaccccagcctgccccccggctaccagaacaccaccccccccggcgccaccggcgtgccccccagcagcctgaactaccccagcggcccccaggccttcacccagacccccctgggcgccaaccacctgaccaccagcatgagcggcctgagcctgcagcccgagggcctgagagtggtgaacctgctgcaggagagaaacatgctgcccagcacccccctgaagccccccgtgcccaacctgcacgaggacatccagaagctgaactgcaaccccgagctgttcagatgcaccctgaccagcatcccccagacccaggccctgctgaacaaggccaagctgcccctgggcctgctgctgcaccccttcaaggacctggtgcagctgcccgtggtgaccagcagcaccatcgtgagatgcagaagctgcagaacctacatcaaccccttcgtgagcttcctggaccagagaagatggaagtgcaacctgtgctacagagtgaacgacgtgcccgaggagttcctgtacaaccccctgaccagagtgtacggcgagccccacagaagacccgaggtgcagaacgccaccatcgagttcatggcccccagcgagtacatgctgagacccccccagccccccgtgtacctgttcgtgttcgacgtgagccacaacgccgtggagaccggctacctgaacagcgtgtgccagagcctgctggacaacctggacctgctgcccggcaacaccagaaccaagatcggcttcatcaccttcgacagcaccatccacttctacggcctgcaggagagcctgagccagccccagatgctgatcgtgagcgacatcgaggacgtgttcatccccatgcccgagaacctgctggtgaacctgaacgagagcaaggagagcgtgatcggcgtgagcagcgaggagaccctgatcacctgcctggagatcgccatgagatag

SEQ ID NO: 88358 - DNA, 1842 bp, Artificial Sequence
  derived and/or modified sequence
atgagccagcccggcattcctgcgtcggggggtgcaccggcctcgctgcaggcccaaaacggagcggcgctggcatctgggtccccatatactaacggtcccgtacaaaatgcccttctgtcctctcaggagtctgtgtcccaaggatacaattttcagttgccagggtcatacccccaccctataccagcaaaaaccctcaaccctgttagtggccagtccaattatggcggatcccagggctccggacaaacgctgaatcggccacctgttgcgtctaatccagttacccccagcctgcactcaggtcccgccccccgaatgccgctccccgcctctcagaatcccgccaccacccctatgcctagcagctcctttctccctgaggcaaatctaccgcccccattaaattggcaatacaattatccaagcaccgctagtcaaacaaaccattgcccacgggcctcttcccaacccacagtatccggtaacacttctctgacaacgaaccaccagtacgtgtcttcaggctatccaagcttacagaatagctttattaagagcgggccctcagtccccccattagttaacccacctctaccaactaccttccagccaggcgcccctcacgggcccccaccagctggcggcccaccacccgtaagagcactgactcctctgacatccagctatcgggacgtaccccaaccgctgtttaatagtgcggtcaatcaagaaggaatcacatctaacaccaacaatgggagcatggtggttcatagctcgtacgatgaaattgagggcggagggctgttggccaccccacagctcacaaataaaaaccctaagatgtcaaggtccgtcgggtatagctatccatccttgcctcccggctatcagaatacgaccccacccggcgcaactggggtgcctccgtcctccctgaactatccatctggccctcaggcctttactcagacgcctctaggggccaatcatttaactacatcaatgtccgggttgtccctgcagccggaagggctgcgagtagtaaatctcctccaggaacgcaatatgctcccaagcacgcctctcaagcctcccgtccccaatctccacgaggatattcagaagttaaactgcaatccagagttgtttcggtgcacccttacctccattccgcagactcaggctctgttgaacaaagcgaaattgccattagggctgctgctgcatcctttcaaggatctggtgcaactgccggtggtcacttccagcacaatcgtgcgctgccggtcgtgtcggacttacattaacccgttcgtgtccttcttagatcagcggaggtggaagtgcaacctgtgttaccgtgtgaacgacgtccctgaagagttcttatataaccccctcacacgcgtgtatggtgagccacatcgacggccagaggtccagaacgccaccatcgaatttatggctccctcagagtatatgctgagacctcctcagccaccagtgtacctgtttgtgttcgacgtgtcccacaacgccgtagagaccggttacctcaatagtgtgtgccagtctctcctcgacaatttggaccttctgcctggcaatacacgcactaaaattggcttcattaccttcgatagcaccatccacttttacggcctgcaggaaagtttatcacagccccagatgttaatagtgtccgacattgaggacgtgttcatcccaatgccggaaaacctgttggtcaatcttaatgagagcaaggaaagcgttattggcgtgtcaagtgaggagacactcataacatgtctcgaaattgctatgaggtag

SEQ ID NO: 88359 - DNA, 1842 bp, Artificial Sequence
  derived and/or modified sequence
atgagccagcccggcatcccagccagcggcggggccccagccagcctgcaggcccagaatggagctgccctggccagcggcagcccctacaccaacggccctgtgcagaatgccctgctgagcagccaggagagcgtgtcccagggctacaacttccagctgcccggcagctacccccaccccatcccagccaagaccctgaaccctgtgtctggccagagcaactacggcggcagccagggcagcggccagaccctgaacagacctcctgtggccagcaaccctgtgacccccagcctgcacagcggccctgcccccaggatgcccctgcctgccagccagaacccagccaccacccccatgcccagcagcagcttcctgcctgaggccaacctgcccccacccctgaactggcagtacaactaccccagcacagccagccagaccaaccactgcccccgggccagcagccagcccaccgtgtctggcaacaccagcctgaccaccaaccaccagtatgtgagcagcggctaccccagcctgcagaacagcttcatcaagagcggccccagcgtgccccccctggtgaacccccccctgcccaccaccttccagcccggggccccccacggccccccacctgctgggggccccccacctgtgcgggccctgacccccctgaccagcagctacagagatgtgccccagcccctcttcaacagcgctgtgaaccaggagggcatcaccagcaacaccaacaacggctccatggtggtgcacagcagctatgatgaaattgagggcggcggcctgctggccaccccccagctgaccaacaagaaccccaagatgagccgctctgtgggctacagctaccccagcctgcccccaggctaccagaacaccaccccacctggggccaccggggtgccccccagcagcctgaactaccccagcggcccccaggccttcacccagacccccctgggcgccaaccacctgaccacctccatgagcggcctgagcctgcagcctgagggcctgcgggtggtgaacctgctgcaggagaggaacatgctgcccagcacccccctgaagccccctgtgcccaacctgcacgaggacatccagaagctgaactgcaaccctgagctgttccgctgcaccctgaccagcatcccccagacccaggccctgctgaacaaggccaagctgcccctgggcctgctgctgcaccccttcaaggacctggtgcagctgcctgtggtgaccagcagcaccatcgtgcgctgccgcagctgcaggacctacatcaacccctttgtgtccttcctggaccagaggcgctggaagtgcaacctgtgctacagagtgaatgatgtgcctgaggagttcctgtacaaccccctgaccagggtgtatggagagccccacagaagacctgaggtgcagaatgccaccatcgagttcatggcccccagcgagtacatgctgcggcccccccagccccctgtgtacctgtttgtgtttgatgtgagccacaatgctgtggagaccggctacctgaacagcgtgtgccagagcctgctggacaacctggacctgctgcccggcaacaccaggaccaagattggcttcatcacctttgacagcaccatccacttctacggcctgcaggagagcctgagccagccccagatgctgattgtgtctgacattgaagatgtgttcatccccatgcctgagaacctgctggtgaacctgaatgaaagcaaggagagcgtcatcggcgtgagcagcgaggagaccctcatcacctgcctggagatcgccatgaggtag

SEQ ID NO: 88360 - DNA, 1842 bp, Artificial Sequence
  derived and/or modified sequence
atgagccagcccggcatccccgccagcggcggcgcccccgccagcttgcaggctcagaacggggccgcactggccagcggtagcccatacactaacggcccagtccagaatgctctactaagtagccaagagtctgtatctcagggatacaacttccagttgccaggatcgtatccacacccaatccccgccaaaacactgaatccagtctccgggcagagcaactacggggggtcccagggatccgggcaaaccctgaacaggccccccgttgcgtcaaatcccgttaccccttctctgcacagtggaccagccccccggatgcctctcccagccagtcagaacccagcaacaacaccaatgcctagcagttcatttctaccggaagccaatcttccccctcccctcaactggcagtataactaccccagcactgcgagtcaaacaaatcattgtcccagagcctccagtcagcccactgtaagtggcaatacatctttgactactaatcaccagtacgtaagctccggataccccagcttacagaattcattcatcaaaagcgggccgtcggtccctcccctggtgaatccacccctacccaccacgtttcagcctggcgctccacatggtccaccacccgcaggcgggcccccccctgtccgagcactgactcctcttacctcctcctaccgggatgtcccccagcccctctttaactcagccgtcaatcaggaaggcattacttcgaacactaacaacggctctatggtcgtgcactctagttacgacgagatagaaggtggcggattgcttgccacgccccagctaaccaacaaaaatccaaagatgtcccgatctgtgggctatagttaccctagtctgcccccaggttatcagaatactaccccacccggggccactggcgtccctccgtcctctctcaattatcccagtgggccacaggctttcactcaaaccccgctaggcgccaaccacttaactacaagcatgagcgggctgtccttgcagccagagggcctgagagtagtcaacctgttgcaggaaaggaacatgcttccttccacacccttgaagcctcctgtaccaaatctccatgaagatatacaaaaactcaattgcaatcctgagctgtttagatgcacattgacctcaatcccacaaacgcaggcgctgctcaataaggccaagctcccgttaggtctcctactccacccttttaaagacctcgttcagctcccagtagtcaccagcagtacaatagtgcggtgtcgatcctgtcgtacatacattaacccatttgtctcctttctggaccagcgtaggtggaagtgcaacctatgctatcgcgttaatgatgttccggaagagtttctgtataacccactgacacgggtgtatggcgagcctcatcggcgtccagaggtgcagaatgctactatcgaattcatggcaccatctgagtatatgctcaggccgccacagccccccgtctatctgttcgttttcgatgtgtctcacaacgctgtggaaactggatacctgaactcagtgtgtcagtccctgttagacaacctggatcttctgcctggcaatacaaggacgaaaattggcttcataacctttgattcaacaatacatttttacggcttgcaggagtctctgtcccaacctcagatgctgatcgtgtcagacattgaggacgtgttcatcccaatgcctgagaatctgctggttaaccttaacgagtccaaggaaagcgtaataggcgtctcgagcgaggagacgctaattacatgcctggaaatagcaatgagatag

SEQ ID NO: 88361 - DNA, 1842 bp, Artificial Sequence
  derived and/or modified sequence
atgagccagcctggcatccctgcttccgggggagcccctgcgtctcttcaggctcagaacggtgccgctcttgccagcggatcaccctatactaacggcccagtccagaatgccctgctttcttctcaagagagcgtctctcagggctataattttcaactgcccggaagctaccctcaccccataccagccaaaaccctgaatcccgtcagtgggcagtcaaattacggagggagccagggcagcggccaaaccctgaatcgccctccagtggcatccaatcccgtgacaccgtcactgcactccggccctgcaccccgtatgcccctccccgcttcacaaaaccctgcaacgacccccatgcctagctcctcattcctgcccgaggccaacctgccaccacccttgaactggcaatataactatcctagcacggcatctcagacaaaccattgtcctcgcgcttcttcacagcccaccgtgagtggaaacacttcactgactactaatcaccagtacgtgtcatctggctacccttcacttcagaactcttttattaaatccgggccttccgtccctccactggtgaatcctcctttacccaccaccttccaacccggtgcgccacacggcccacctccggcaggtggcccaccgccagtccgggctctcactcccctaacctcaagttatagagacgtaccacagcctctgttcaactctgctgttaaccaagaaggaattacctccaatactaacaacggaagcatggtcgtgcactcttcctatgacgaaatcgaaggcggtgggcttcttgccactcctcagcttacaaacaaaaaccccaaaatgtctaggagtgtaggatacagctatccttccctgccgccaggctaccagaatacaaccccacctggcgctaccggcgtgcccccttcatctttgaactatcctagtggccctcaggccttcacccagacgcctctgggggctaatcacctcacaaccagtatgtctggtttgtccctccagcccgagggactgagagtggtgaacctgctccaggagagaaatatgttgccgtcgacccctctcaaaccaccagtgccaaatctacacgaggatatccagaaattgaactgcaacccggaactgttccggtgtactttgacctctatccctcaaacacaggccctgctaaataaggctaagctgccactggggctactgctgcacccatttaaggaccttgtccaattgcccgttgttacatcatcaaccatcgttcggtgccgcagttgcaggacgtatattaatccattcgtctcgtttcttgatcaacgaagatggaagtgcaatttatgctaccgtgtgaatgatgtgccagaagaatttttgtataaccccctgacgagagtctatggagagccacatagacgaccagaagtccagaatgccactatcgagttcatggctccgagcgagtatatgctccgcccaccccaacctcccgtgtatctatttgtctttgacgtgtcacataatgctgtggagacaggctacttaaattccgtgtgtcagtctctcctggacaatctcgatctcctccctggtaatacccggactaagattggctttatcacatttgactcaacaattcatttttacggattacaggagagcctgtcacaacctcagatgcttatagtcagtgacattgaggacgtgtttattcccatgccggagaacctgctggtgaacctcaatgagtctaaggaatccgtaatcggcgtgtccagcgaagagactttgatcacgtgcctggaaatagccatgcggtag

SEQ ID NO: 88362 - DNA, 2700 bp, Artificial Sequence
  derived and/or modified sequence
ctgccgccttctagccgggcgttcgcggccccgccggcccgactctcaagcctcagctcccaggctaggctgtggccgccggtggcctggggagagtgcggcgccatgcctcgggcttaatgcgcccccccctcttctcccagtcttcagtcttaagtcgttagcctcctccctccgctttcagcagtggtctttcagctctcttcttgtgcgctgttgtcgaccccgaccagccccttccaacccagtcatcatgtcccagccgggaataccggcctccggcggcgccccagccagcctccaggcccagaacggagccgccttggcctcggggtctccctacaccaacggtcctgtccaaaatgcattgctgtcttcacaagagtcagtgagccaaggatacaatttccagcttccaggatcctaccctcatccaataccagcaaagactttgaatccagtctctggacagtctaactatggtggttctcagggatctgggcagactcttaatagaccacctgtggcctctaatccagtgacaccttcgcttcatagtggtcctgctccccgaatgccattacctgcttctcagaacccagctactacaccaatgccttctagtagctttcttcctgaagccaacctgccaccacctttgaattggcaatataactatccatccacagcctcacaaacaaaccattgtcctcgtgcatcatcccaaccaactgtatctggaaatacaagtttaaccacaaatcatcaatatgtttcttctggatatccttcacttcaaaatagcttcataaagtcaggtccttctgtacctcccttagtgaatccacctctgcctacaacttttcaaccaggagctcctcatgggccccctccagctggaggcccacccccagtgagggccctcacgcccctgacatcatcatatagagatgtaccccagcccttatttaattcagctgtcaaccaagaaggtattacatcaaataccaataacggatctatggtggtccacagtagttacgacgagattgaaggaggtggcttattggcaacaccacagcttactaacaagaatcccaaaatgagccgaagtgttggatattcatatccctccttaccacctggttatcagaacacaacaccacctggtgcaactggagtaccaccctcttccttgaattacccaagtgggccacaagcctttactcagactcccttaggtgctaatcatttaaccacaagcatgagtggattaagtctacaaccagagggtctaagagttgtcaatcttcttcaagaaagaaacatgcttccgtcaacacctttgaagcctccagttccaaatttgcatgaagacatccagaaactcaactgtaacccagagttatttcgatgcacgctgactagcattcctcagacgcaggccttattgaataaagccaaacttcctttggggctgctgcttcatcctttcaaagacttagtgcaattgcctgtggttacctccagtacaattgtgagatgccgttcatgcaggacgtacatcaatcctttcgtcagctttcttgatcaaaggagatggaagtgtaacttatgttatcgagtcaatgatgttcctgaagaattcttgtacaaccctttgaccagagtttatggagaacctcacagaagaccagaagttcaaaatgctactattgagtttatggctccttcagaatacatgttacgaccacctcagcctccagtgtatctctttgtatttgatgtgtctcacaatgcagtcgaaactggatacttgaattcagtttgccagagtttgttagacaatctggatttgcttcctggcaacactagaacaaaaattggcttcataacatttgacagtacaatccatttctacggtcttcaggaaagtctctctcaacctcagatgctaatagtttcagatattgaagatgtttttatacctatgccagagaacttattagtaaacttaaatgaaagtaaagagagtgtcattggggtcagttcagaagaaactcttattacctgcctggaaattgccatgagataatacagtgagaggtgaacagaatgtgtctgaaggggggatgttgtctaccctgtacatgcatatatgccgtaggggtaacattttaactagcaagtctatggtctctgctgttggcaatggtgactgtgccatagtgcgaagtatttttttccccattaactctatttgtacaacctaacctgtaaaggtagttgtttttcttttgtagtgatattactagttggcaaagttactggatatcttagatttgcaacagggaagagctaaactcgctttggaacttacaagaataaagtatgtagaggtgatggagaaggccatatttcatggcattaaaatacatcaaatctctaaactgtgatggttcttttggatacattttggacttatagtcttgctggactactgcatgtgcaagaactgtaaggcccaactttgatttgtcttgcttgccaatttataatgttgacttaaaatggctttcttgtcatttgaccaacttcattgtttagtgtctgtagattctctgaccatcatcatgactcaatgtcttgtctattgtatgagatactgacttaatgtgaaataaaattttaattatgaca

SEQ ID NO: 88363 - protein, 693 aa, Artificial Sequence
  derived and/or modified sequence
MLNNLLLFSLQISLIGTTLGGNVLIWPMEGSHWLNVKIIIDELIKKEHNVTVLVASGALFITPTSNPSLTFEIYRVPFGKERIEGVIKDFVLTWLENRPSPSTIWRFYQEMAKVIKDFHMVSQEICDGVLKNQQLMAKLKKSKFEVLVSDPVFPCGDIVALKLGIPFMYSLRFSPASTVEKHCGKVPYPPSYVPAVLSELTDQMSFTDRIRNFISYHLQDYMFETLWKSWDSYYSKALDGSHWLNIKIILEELIQRNHNVTVLASSATLFINSNPDSPVNFEVIPVSYKKSNIDSLIEHMIMLWIDHRPTPLTIWAFYKELGKLLDTFFQINIQLCDGVLKNPKLMARLQKGGFDVLVADPVTICGDLVALKLGIPFMYTLRFSPASTVERHCGKIPAPVSYVPAALSELTDQMTFGERIKNTISYSLQDYIFQSYWGEWNSYYSKILGRPTTLCETMGKAEIWLIRTYWDFEFPRPYLPNFEFVGGLHCKPAKPLPKVLWRYKGKKPATLGNNTQLFDWIPQNDLLGHPKTKAFITHGGTNGIYEAIYHGVPMVGVPMFADQPDNIAHMKAKGAAVEVNLNTMTSVDLLSALRTVINEPSYKENAMRLSRIHHDQPVKPLDRAVFWIEFVMRHKGAKHLRVAAHDLTWFQYHSLDVIGFLLVCVTTAIFLVIQCCLFSCQKFGKIGKKKKRE

SEQ ID NO: 88364 - DNA, 2082 bp, Artificial Sequence
  derived and/or modified sequence
atgctgaacaacctgctgctgttcagcctgcagatcagcctgatcggcaccaccctgggcggcaacgtgctgatctggcccatggagggcagccactggctgaacgtgaagatcatcatcgacgagctgatcaagaaggagcacaacgtgaccgtgctggtggccagcggcgccctgttcatcacccccaccagcaaccccagcctgaccttcgagatctacagagtgcccttcggcaaggagagaatcgagggcgtgatcaaggacttcgtgctgacctggctggagaacagacccagccccagcaccatctggagattctaccaggagatggccaaggtgatcaaggacttccacatggtgagccaggagatctgcgacggcgtgctgaagaaccagcagctgatggccaagctgaagaagagcaagttcgaggtgctggtgagcgaccccgtgttcccctgcggcgacatcgtggccctgaagctgggcatccccttcatgtacagcctgagattcagccccgccagcaccgtggagaagcactgcggcaaggtgccctacccccccagctacgtgcccgccgtgctgagcgagctgaccgaccagatgagcttcaccgacagaatcagaaacttcatcagctaccacctgcaggactacatgttcgagaccctgtggaagagctgggacagctactacagcaaggccctggacggcagccactggctgaacatcaagatcatcctggaggagctgatccagagaaaccacaacgtgaccgtgctggccagcagcgccaccctgttcatcaacagcaaccccgacagccccgtgaacttcgaggtgatccccgtgagctacaagaagagcaacatcgacagcctgatcgagcacatgatcatgctgtggatcgaccacagacccacccccctgaccatctgggccttctacaaggagctgggcaagctgctggacaccttcttccagatcaacatccagctgtgcgacggcgtgctgaagaaccccaagctgatggccagactgcagaagggcggcttcgacgtgctggtggccgaccccgtgaccatctgcggcgacctggtggccctgaagctgggcatccccttcatgtacaccctgagattcagccccgccagcaccgtggagagacactgcggcaagatccccgcccccgtgagctacgtgcccgccgccctgagcgagctgaccgaccagatgaccttcggcgagagaatcaagaacaccatcagctacagcctgcaggactacatcttccagagctactggggcgagtggaacagctactacagcaagatcctgggcagacccaccaccctgtgcgagaccatgggcaaggccgagatctggctgatcagaacctactgggacttcgagttccccagaccctacctgcccaacttcgagttcgtgggcggcctgcactgcaagcccgccaagcccctgcccaaggtgctgtggagatacaagggcaagaagcccgccaccctgggcaacaacacccagctgttcgactggatcccccagaacgacctgctgggccaccccaagaccaaggccttcatcacccacggcggcaccaacggcatctacgaggccatctaccacggcgtgcccatggtgggcgtgcccatgttcgccgaccagcccgacaacatcgcccacatgaaggccaagggcgccgccgtggaggtgaacctgaacaccatgaccagcgtggacctgctgagcgccctgagaaccgtgatcaacgagcccagctacaaggagaacgccatgagactgagcagaatccaccacgaccagcccgtgaagcccctggacagagccgtgttctggatcgagttcgtgatgagacacaagggcgccaagcacctgagagtggccgcccacgacctgacctggttccagtaccacagcctggacgtgatcggcttcctgctggtgtgcgtgaccaccgccatcttcctggtgatccagtgctgcctgttcagctgccagaagttcggcaagatcggcaagaagaagaagagagagtag

SEQ ID NO: 88365 - DNA, 2082 bp, Artificial Sequence
  derived and/or modified sequence
atgttgaataatctactccttttttcactgcaaatctcattaatagggacaaccttggggggaaatgtcctgatctggccaatggaagggtcacactggctcaatgtgaagataattatcgacgagttgatcaagaaggagcacaacgttactgtcctggtggcctcaggagctttgttcataactcctacttccaatccctctctcacttttgagatctatcgagtccccttcggtaaagaacggattgaaggagttatcaaggactttgtcctgacttggctggaaaatcgcccctccccttccaccatttggagattctatcaggaaatggccaaggtaattaaggactttcatatggttagtcaggaaatttgtgatggcgtcctgaaaaatcagcaattgatggccaagctgaagaagtctaaattcgaagtcctggtgagcgacccagtcttcccgtgtggagacatagtggccttgaagctgggcatcccgtttatgtattctctgcgtttctcgcctgcctccaccgttgagaagcactgtggcaaagtcccttatcccccttcttacgtgccggccgtgctcagtgaacttacagaccagatgtcattcaccgatagaatccgcaatttcatttcctaccatctgcaggattatatgttcgaaacactgtggaagtcgtgggactcctactatagcaaagctttggatgggtctcattggttgaacataaagataattctggaggaactgatacaacgtaaccataacgtgacggtcctggcctcgtcggccaccctgttcatcaattccaacccagattccccggttaacttcgaggtgattcctgtcagttacaaaaaaagcaacatcgactcattgatcgagcacatgataatgttatggattgatcaccgacctacgccgctcactatatgggcattttataaggaattgggcaagctcctggacactttctttcagattaatatccagctgtgcgatggagttctgaagaatcccaagttgatggccaggttacagaagggaggttttgacgtgcttgtggctgatcccgtgaccatctgcggggatctggttgctttgaagcttggtataccgttcatgtatacactcagattctccccggccagcaccgtggaaagacactgcgggaaaattccagcccccgttagctacgtccctgcagccctcagcgagctgacagatcagatgaccttcggagagaggatcaagaatacaatctcttacagccttcaggactatattttccagtcctattggggcgagtggaacagctactatagtaaaattcttggccggcccacgacactgtgcgagacaatgggcaaggctgaaatttggctcatccgaacctactgggacttcgaattcccacgtccttatctgccgaattttgaattcgttggaggtctccattgtaaaccagccaagccactcccaaaagtcctctggagatacaaaggcaaaaaaccagccactctgggaaacaacacccaactattcgattggatccctcaaaacgatttgctgggccacccaaaaacaaaagctttcattacccacggaggcacaaatggcatctacgaggcaatctaccatggcgtgcccatggtaggcgtgccgatgttcgcggaccaaccggataacatcgcacacatgaaagcgaaaggtgccgcagtggaggttaatttgaataccatgacttcggtggatctactctcagcactgcgcaccgtgataaacgaaccatcttacaaggagaacgctatgaggttgtcacgcatacatcacgatcaacctgtcaaaccattggaccgcgccgttttttggatcgagttcgtgatgcgtcacaaaggtgctaaacacttaagagtggccgcacatgatctaacttggttccagtaccattctctggacgtcatcggctttctgctggtgtgtgtcacgaccgcaatttttctagtgatccagtgctgcctgttttcatgccaaaagttcggcaaaatagggaaaaagaaaaagagggagtag

SEQ ID NO: 88366 - DNA, 2082 bp, Artificial Sequence
  derived and/or modified sequence
atgctgaacaacctgctgctcttcagcctgcagatcagcctgattggcaccaccctgggcggcaatgtgctgatctggcccatggagggcagccactggctgaatgtgaagatcatcattgatgagctgatcaagaaggagcacaacgtgacagtgctggtggccagcggggccctcttcatcacccccaccagcaaccccagcctgacctttgagatctacagagtgccctttgggaaggagagaattgaaggagtcatcaaggactttgtgctgacctggctggagaaccggcccagccccagcaccatctggaggttctaccaggagatggccaaggtgatcaaggacttccacatggtgtcccaggagatctgtgatggagtgctgaagaaccagcagctgatggccaagctgaagaagagcaagtttgaggtgctggtgtctgaccctgtgttcccctgtggggacatcgtggccctgaagctgggcatccccttcatgtacagcctgcgcttctccccagccagcacagtggagaagcactgcggcaaggtgccctacccacccagctatgtgcctgctgtgctgtctgagctgacagaccagatgtccttcacagaccgcatccggaacttcatctcctaccacctgcaggactacatgtttgagaccctgtggaagtcctgggacagctactacagcaaggccctggatggcagccactggctgaacatcaagatcatcctggaggagctgatccagaggaaccacaacgtgacagtgctggccagcagcgccaccctcttcatcaacagcaacccagacagccctgtgaactttgaagtcatccctgtgtcctacaagaagagcaacatcgacagcctgattgagcacatgatcatgctgtggattgaccaccggcccacccccctgaccatctgggccttctacaaggagctgggcaagctgctggacaccttcttccagatcaacatccagctgtgtgatggagtgctgaagaaccccaagctgatggcccggctgcagaagggcggctttgatgtgctggtggccgaccctgtgaccatctgtggggacctggtggccctgaagctgggcatccccttcatgtacaccctgcgcttctccccagccagcacagtggagcggcactgcggcaagatcccagcccctgtgtcctatgtgcctgctgccctgtctgagctgacagaccagatgaccttcggggagcgcatcaagaacaccatctcctacagcctgcaggactacatcttccagagctactggggcgagtggaacagctactacagcaagatcctgggccggcccaccaccctgtgtgagaccatgggcaaggccgagatctggctgatccgcacctactgggactttgagttcccccggccctacctgcccaactttgaatttgtgggcggcctgcactgcaagccagccaagcccctgcccaaggtgctgtggagatacaagggcaagaagccagccaccctgggcaacaacacccagctgtttgactggatcccccagaatgacctgctgggccaccccaagaccaaggccttcatcacccacggcggcaccaacggcatctatgaggccatctaccacggcgtgcccatggtgggcgtgcccatgtttgctgaccagcctgacaacatcgcccacatgaaggccaagggagctgctgtggaggtgaacctgaacaccatgacctctgtggacctgctgagcgccctgaggacagtcatcaatgagcccagctacaaggaaaatgccatgaggctgagccgcatccaccacgaccagcctgtgaagcccctggacagagctgtgttctggattgaatttgtgatgaggcacaagggggccaagcacctgcgggtggccgcccatgacctgacctggttccagtaccacagcctggatgtgattggcttcctgctggtgtgtgtgaccacagccatcttcctggtgatccagtgctgcctcttcagctgccagaagtttgggaagattggcaagaagaagaagcgggagtag

SEQ ID NO: 88367 - DNA, 2082 bp, Artificial Sequence
  derived and/or modified sequence
atgctgaacaacctgctgctgttcagcctgcagatcagcctgatcggcaccaccctgggcggaaatgtattaatttggcccatggaagggagccactggctcaacgtaaaaattatcatcgatgagttgattaaaaaggaacataatgtgacagtcctggtggcgagcggcgccctgttcattaccccaacctcaaacccatcattaactttcgagatatatcgggtccctttcggcaaggagcggattgagggagtaataaaggatttcgtgctaacctggttggaaaaccgccctagcccctccaccatatggcgcttttatcaggaaatggccaaagtgatcaaagatttccacatggtcagccaagaaatttgtgacggcgtgctcaagaaccagcagctgatggcaaaattgaaaaagtctaagtttgaggttctcgtgtcagatcccgtgtttccttgtggagacatcgtggctctgaagttgggtatccccttcatgtatagcctgaggttcagtcccgcctcaaccgtggaaaaacactgcggtaaagtgccatatcctcctagctatgttccagctgtgctgagtgaactgactgatcagatgtctttcaccgatcgaatacggaacttcataagttaccatctccaggattatatgtttgagacactgtggaaaagctgggacagctactactctaaggctctggacgggtcccattggcttaatatcaagattatactggaggagctgatccagcggaatcataatgtgaccgtgcttgcttcaagcgccactctgttcattaattcaaatcccgactcaccagtgaatttcgaagtcatccccgtgtcttataagaaaagcaatattgatagtttaatagagcatatgattatgctgtggatcgaccaccggccaactccactgacaatttgggctttttataaggaattggggaaattgctagataccttcttccagattaacattcagctgtgcgacggcgtcctcaagaaccccaagctgatggcccgactgcagaaaggcggcttcgatgtcctcgtcgctgatcctgtgactatttgcggagacctggttgcccttaaactcgggattcctttcatgtacacgctgcgtttctcacctgcaagcaccgtcgaaagacactgtggcaaaatcccagcgcccgtgtcatatgttcccgccgccttgagcgaattgacagatcagatgacctttggagagaggattaagaacacaatcagttactcgctccaagattatatcttccaatcctattggggagaatggaacagctattatagtaagatcctcggacggcccaccacgctgtgcgagaccatgggtaaagcagaaatttggctgattcggacatactgggatttcgaattcccccgcccttacctgcccaatttcgagtttgtgggtggactgcactgtaagccagcaaaacctttgccaaaggttctgtggcgctataagggaaaaaagcctgccaccctgggtaacaacacccagttattcgactggataccacaaaatgacctgctcggacaccccaagactaaggcatttataacacacggcggcactaatggaatttacgaagctatctaccacggcgtgccaatggttggagtgcctatgttcgccgatcagccagataatattgcgcatatgaaggctaagggcgccgccgttgaggtgaatctcaacaccatgactagcgtggatcttctctcagcactcaggactgtaatcaatgaacccagctacaaggaaaatgcaatgaggctgtctcgcatccatcacgaccagccagtcaaacctttggacagggccgtgttctggatcgaattcgtgatgcgtcataaaggcgctaagcatctgagagtcgccgcgcacgatttaacctggttccagtaccatagtctggatgtcataggatttctattagtctgtgtaactaccgctatcttcctggtgatccagtgctgtctcttcagttgccaaaagtttggaaagatcggaaaaaagaagaaaagagagtag

SEQ ID NO: 88368 - DNA, 2082 bp, Artificial Sequence
  derived and/or modified sequence
atgcttaataatttactactgtttagccttcaaatcagtcttatagggactacactggggggtaatgtcttgatatggccaatggagggctcacactggttgaacgtgaaaattattattgatgaattgattaaaaaggaacacaacgttaccgtgttggttgctagcggcgcattgttcattacgcctacctctaacccctctctcaccttcgaaatttaccgtgtcccattcggaaaggaacgcattgagggtgttataaaggatttcgtactcacctggttggagaaccggccatcccctagtaccatttggcggttttatcaggagatggccaaagtaattaaggactttcacatggtgagtcaggagatctgcgacggagtattgaagaatcaacagctgatggcgaagctcaaaaaatccaaatttgaagttctcgttagcgatcccgtgtttccctgcggcgatattgtcgcccttaagctgggaatcccctttatgtactcacttagatttagtccagctagtaccgtagagaagcactgtggcaaggtgccgtacccaccaagctacgtaccagcagtcctaagtgagctcaccgatcagatgtcattcactgatcggattcgcaattttatctcctaccaccttcaggactacatgttcgagaccctgtggaaatcatgggacagttactactccaaggcacttgatggctcccactggctgaacataaaaatcattctggaagaactgattcaacgcaaccataacgttacagtgttagcttcaagtgccactcttttcatcaacagcaaccctgacagtcccgtaaacttcgaggtgatcccagtgtcttacaagaagagcaacattgactcccttatcgaacacatgattatgctttggatagatcatcgccctacaccactgaccatctgggcgttttacaaggagctggggaaactgctggacacattctttcagattaatatccagctctgtgacggcgttctcaagaaccccaaacttatggctagactccagaagggaggttttgatgtcctggtggctgacccagttactatttgtggcgacctggttgctctcaaactcgggattccgtttatgtacactcttaggttctcacccgcatctacagtggaaaggcattgcggaaagatccccgctcctgtgtcctatgtccccgcagccctgtcagagctcacagatcagatgacttttggtgagcggattaaaaacaccatatcctactccctgcaggattatattttccagtcctattggggcgagtggaattcttattattccaaaatccttggaagaccgaccaccctctgtgaaaccatgggcaaggctgaaatttggctgatcagaacatattgggattttgaattcccacgaccttatctgccaaattttgaattcgtgggtggcctccactgtaaacctgcaaagccccttcccaaagtcctctggcggtacaaggggaaaaaacctgcaacgctggggaacaatactcagctcttcgactggatcccacaaaacgacctgttgggacatcccaaaacaaaagcctttatcacacatggtgggaccaacggcatttatgaagccatctaccacggagttccaatggtgggtgtgcccatgtttgccgaccagcctgataatatcgcgcatatgaaagctaagggtgcagccgttgaggtcaacctaaataccatgacctcagtggacctgctctctgctctcagaactgtgattaacgagccatcctacaaggagaacgcaatgagactcagccggattcaccatgatcagcccgtgaaaccactggatagggctgtcttctggatcgagtttgttatgcggcataaaggcgcaaaacatctgcgagtcgccgcacacgacctgacgtggttccagtatcacagtctcgacgtgattggattcctcctggtgtgtgtgactaccgctatcttcctcgtgattcagtgctgcctgttctcgtgccagaaattcggcaagattggaaagaagaagaagagagagtag

SEQ ID NO: 88369 - DNA, 2376 bp, Artificial Sequence
  derived and/or modified sequence
ttacattcggcttcttcctaatgtcaaatgagtgctgttaaagttcctccaggaaacttcagcagagaaaaacatttgcttcacatctcatcaaatcttctgcatcaagccacatcatgttaaacaaccttctgctgttctcccttcagataagtctcataggaaccactcttggtgggaatgttttgatttggccaatggaaggtagtcattggctaaatgttaagataattatagatgagctcattaaaaaggagcataatgtgactgtcctagttgcctctggtgcacttttcatcacaccaacctctaacccatctctgacatttgaaatatatagggtgccctttggcaaagaaagaatagaaggagtaattaaggacttcgttttgacatggctggaaaatagaccatctccttcaaccatttggagattctatcaggagatggccaaagtaatcaaggacttccacatggtgtctcaggagatctgtgatggcgttcttaaaaaccaacagctgatggcaaagctaaagaaaagcaagtttgaagtcctggtgtctgatccagtatttccttgtggcgatatagtagctttaaaacttggaattccatttatgtactccttgaggttttctccagcctcaacagtggaaaagcactgtgggaaggtaccataccctccttcctatgttcctgctgttttatcagaactcaccgaccaaatgtctttcactgacagaataagaaatttcatctcctaccacctacaggactacatgtttgaaactctttggaaatcatgggattcatactatagtaaagctttagatggtagccattggttaaatattaagattattctagaagagttgattcaaagaaatcacaatgtgactgtactggcttcatcagcaactctattcatcaactccaatcccgattctcctgtgaattttgaagtgatacctgtttcctacaagaagagcaatatagattccttaattgagcatatgataatgctgtggattgaccatagaccaactcctctcacaatatgggctttctacaaagaactaggaaaacttctagacactttctttcaaattaacatacaactctgtgatggtgtactaaagaacccaaagttgatggcaagacttcagaaaggtggttttgatgtgttggtagcagacccagtaacaatctgtggtgatcttgttgctctgaaattaggaattccatttatgtacacattgaggttctctccagcatcaacagtggagagacactgtgggaaaatcccagcaccagtctcctatgtaccggcagccttatcagagctcactgaccagatgacctttggtgaaaggattaaaaataccatatcttattctctgcaagactatatatttcagtcctactggggagaatggaattcatactatagcaaaattttaggaagacccactacgttatgtgagactatggggaaagctgaaatttggttaatccgaacatattgggattttgaatttcctcgtccatacttacctaattttgagtttgttggaggattgcactgcaaacctgccaaacctttacctaaggttttatggagatacaaaggaaagaaaccagccacattaggaaacaatactcagctctttgattggataccccagaatgatcttcttggacatcccaaaaccaaagcttttatcactcatggtggaactaatgggatctacgaagctatttaccacggagtccctatggtgggagttcccatgtttgctgatcagcctgataacattgctcacatgaaggccaaaggagcagctgtggaagtgaacctaaacacaatgacaagtgtggatttgcttagcgctttgagaacagtcattaatgaaccttcttataaagagaatgctatgaggttatcaagaattcaccatgatcaacctgtaaagcccctggatcgagcagtcttctggatcgagtttgtcatgcgccacaaaggagccaagcaccttcgggttgcagcccatgacctcacctggttccagtaccactctttggatgtaattgggttcttgctggtctgtgtgacaacggctatatttttggtcatacaatgttgtttgttttcctgtcaaaaatttggtaagataggaaagaagaaaaaaagagaataggtcaagaaaaagaggaaatatatatatttttaagtttggcaaaatcctgagtagtgtagtcctattaattccagacaaaaggagtttaacaaaaacacgtctcccatcctgtttccaaattttctatttctctacctgcgataagcctactgataaagcctagattttggcatgatta

SEQ ID NO: 88370 - protein, 527 aa, Artificial Sequence
  derived and/or modified sequence
MLNNLLLFSLQISLIGTTLGGNVLIWPMEGSHWLNVKIIIDELIKKEHNVTVLVASGALFITPTSNPSLTFEIYRVPFGKERIEGVIKDFVLTWLENRPSPSTIWRFYQEMAKVIKDFHMVSQEICDGVLKNQQLMAKLKKSKFEVLVSDPVFPCGDIVALKLGIPFMYSLRFSPASTVEKHCGKVPYPPSYVPAVLSELTDQMSFTDRIRNFISYHLQDYMFETLWKSWDSYYSKALGGLLLCCPGWSAVADLGSLQPLLPGFKRFSRLSLHCSWDYRLPAGRPTTLCETMGKAEIWLIRTYWDFEFPRPYLPNFEFVGGLHCKPAKPLPKVLWRYKGKKPATLGNNTQLFDWIPQNDLLGHPKTKAFITHGGTNGIYEAIYHGVPMVGVPMFADQPDNIAHMKAKGAAVEVNLNTMTSVDLLSALRTVINEPSYKENAMRLSRIHHDQPVKPLDRAVFWIEFVMRHKGAKHLRVAAHDLTWFQYHSLDVIGFLLVCVTTAIFLVIQCCLFSCQKFGKIGKKKKRE

SEQ ID NO: 88371 - DNA, 1584 bp, Artificial Sequence
  derived and/or modified sequence
atgctgaacaacctgctgctgttcagcctgcagatcagcctgatcggcaccaccctgggcggcaacgtgctgatctggcccatggagggcagccactggctgaacgtgaagatcatcatcgacgagctgatcaagaaggagcacaacgtgaccgtgctggtggccagcggcgccctgttcatcacccccaccagcaaccccagcctgaccttcgagatctacagagtgcccttcggcaaggagagaatcgagggcgtgatcaaggacttcgtgctgacctggctggagaacagacccagccccagcaccatctggagattctaccaggagatggccaaggtgatcaaggacttccacatggtgagccaggagatctgcgacggcgtgctgaagaaccagcagctgatggccaagctgaagaagagcaagttcgaggtgctggtgagcgaccccgtgttcccctgcggcgacatcgtggccctgaagctgggcatccccttcatgtacagcctgagattcagccccgccagcaccgtggagaagcactgcggcaaggtgccctacccccccagctacgtgcccgccgtgctgagcgagctgaccgaccagatgagcttcaccgacagaatcagaaacttcatcagctaccacctgcaggactacatgttcgagaccctgtggaagagctgggacagctactacagcaaggccctgggcggcctgctgctgtgctgccccggctggagcgccgtggccgacctgggcagcctgcagcccctgctgcccggcttcaagagattcagcagactgagcctgcactgcagctgggactacagactgcccgccggcagacccaccaccctgtgcgagaccatgggcaaggccgagatctggctgatcagaacctactgggacttcgagttccccagaccctacctgcccaacttcgagttcgtgggcggcctgcactgcaagcccgccaagcccctgcccaaggtgctgtggagatacaagggcaagaagcccgccaccctgggcaacaacacccagctgttcgactggatcccccagaacgacctgctgggccaccccaagaccaaggccttcatcacccacggcggcaccaacggcatctacgaggccatctaccacggcgtgcccatggtgggcgtgcccatgttcgccgaccagcccgacaacatcgcccacatgaaggccaagggcgccgccgtggaggtgaacctgaacaccatgaccagcgtggacctgctgagcgccctgagaaccgtgatcaacgagcccagctacaaggagaacgccatgagactgagcagaatccaccacgaccagcccgtgaagcccctggacagagccgtgttctggatcgagttcgtgatgagacacaagggcgccaagcacctgagagtggccgcccacgacctgacctggttccagtaccacagcctggacgtgatcggcttcctgctggtgtgcgtgaccaccgccatcttcctggtgatccagtgctgcctgttcagctgccagaagttcggcaagatcggcaagaagaagaagagagagtag

SEQ ID NO: 88372 - DNA, 1584 bp, Artificial Sequence
  derived and/or modified sequence
atgttgaataatctgttactgttctccctgcagattagtctgatcgggacaaccttaggcgggaacgttctcatctggccaatggaggggtcccactggctgaacgtcaaaattattatagatgagctcattaagaaagagcacaacgtaaccgtgctcgtggctagcggtgccctgttcattacgcctacttcaaatccatcgctaacattcgagatctatcgcgtgccatttggtaaagaacgcatcgagggagttatcaaggactttgtattaacttggctggaaaatcgccccagtccatccactatctggcggttttaccaagaaatggcaaaagtgatcaaggacttccacatggtgagtcaagagatctgcgatggggtgcttaaaaatcaacagctgatggccaaactgaagaagtctaaattcgaagttctggtcagcgatccggtgtttccatgtggggacattgttgcgttgaagctagggatcccatttatgtactctctgcggttttcccctgcttcaacagtggagaagcactgtgggaaggtcccttacccaccgtcatacgtgcccgccgttctctcagagctcaccgaccagatgtcgttcactgacaggatcagaaactttatctcatatcatctccaagattatatgttcgaaacattgtggaagagctgggactcatactacagcaaggccctgggagggttattgttgtgttgtcccgggtggagcgccgttgccgacttggggtcactgcaaccccttcttcctggctttaaacggttttcccgccttagccttcactgcagctgggattatcgcctgccagcgggccgccccacaacgctctgtgaaacaatgggaaaggcagaaatctggctaatccgaacttattgggattttgaattcccaagaccttatctcccgaacttcgaattcgtgggtggcctccattgcaaacctgctaagccgctgcctaaggtactctggaggtataaagggaagaagccggctacccttggcaacaacactcagcttttcgattggattccccagaatgatctgcttggtcacccgaagactaaagccttcattacacacggaggcacgaatggtatctacgaagcaatatatcatggcgtccctatggtaggagttcccatgttcgctgaccagccagacaacatagcccatatgaaggccaaaggcgcagccgtggaagtgaacctgaataccatgacaagcgtggatctgcttagcgccctaaggaccgtgattaatgagcctagttacaaggaaaacgctatgcgattgagcaggatccaccacgaccagccagtgaaacctctcgatcgcgcagttttttggatcgagttcgtaatgcggcacaagggtgcaaagcaccttcgcgtggccgcccacgacctcacctggttccaataccacagcctggacgtcatcggtttcctccttgtttgcgttacaacggcaatctttctagtcattcagtgttgcctgttctcatgccagaagtttggaaagattggaaagaagaagaaacgtgagtag

SEQ ID NO: 88373 - DNA, 1584 bp, Artificial Sequence
  derived and/or modified sequence
atgctgaacaacctgctgctcttcagcctgcagatcagcctgattggcaccaccctgggcggcaatgtgctgatctggcccatggagggcagccactggctgaatgtgaagatcatcattgatgagctgatcaagaaggagcacaacgtgacagtgctggtggccagcggggccctcttcatcacccccaccagcaaccccagcctgacctttgagatctacagagtgccctttgggaaggagagaattgaaggagtcatcaaggactttgtgctgacctggctggagaaccggcccagccccagcaccatctggaggttctaccaggagatggccaaggtgatcaaggacttccacatggtgtcccaggagatctgtgatggagtgctgaagaaccagcagctgatggccaagctgaagaagagcaagtttgaggtgctggtgtctgaccctgtgttcccctgtggggacatcgtggccctgaagctgggcatccccttcatgtacagcctgcgcttctccccagccagcacagtggagaagcactgcggcaaggtgccctacccacccagctatgtgcctgctgtgctgtctgagctgacagaccagatgtccttcacagaccgcatccggaacttcatctcctaccacctgcaggactacatgtttgagaccctgtggaagtcctgggacagctactacagcaaggccctgggcggcctgctgctgtgctgccccggctggagcgctgtggccgacctgggcagcctgcagcccctgctgcccggcttcaagcgcttcagccggctgagcctgcactgctcctgggactaccgcctgcctgctggccggcccaccaccctgtgtgagaccatgggcaaggccgagatctggctgatccgcacctactgggactttgagttcccccggccctacctgcccaactttgaatttgtgggcggcctgcactgcaagccagccaagcccctgcccaaggtgctgtggagatacaagggcaagaagccagccaccctgggcaacaacacccagctgtttgactggatcccccagaatgacctgctgggccaccccaagaccaaggccttcatcacccacggcggcaccaacggcatctatgaggccatctaccacggcgtgcccatggtgggcgtgcccatgtttgctgaccagcctgacaacatcgcccacatgaaggccaagggagctgctgtggaggtgaacctgaacaccatgacctctgtggacctgctgagcgccctgaggacagtcatcaatgagcccagctacaaggaaaatgccatgaggctgagccgcatccaccacgaccagcctgtgaagcccctggacagagctgtgttctggattgaatttgtgatgaggcacaagggggccaagcacctgcgggtggccgcccatgacctgacctggttccagtaccacagcctggatgtgattggcttcctgctggtgtgtgtgaccacagccatcttcctggtgatccagtgctgcctcttcagctgccagaagtttgggaagattggcaagaagaagaagcgggagtag

SEQ ID NO: 88374 - DNA, 1584 bp, Artificial Sequence
  derived and/or modified sequence
atgctgaacaacctgctgctgttcagcctgcagatcagcctgatcgggaccacactgggcgggaatgtattaatatggcccatggaaggttcccactggcttaacgtgaagattatcatcgatgagcttataaagaaggaacataatgtgactgtcctggttgcttctggggcattgttcatcacgcccactagtaatccatctctaacattcgagatctaccgcgttccatttggaaaagagcggatcgagggggtaattaaggactttgtgctgacctggctcgagaatagaccaagcccctcgacaatttggcgtttctatcaggagatggccaaggtaataaaggatttccacatggtttcccaggaaatttgtgatggcgttcttaagaaccagcagctgatggcaaagttgaagaagagcaaattcgaagtactggtatccgatcctgttttcccatgcggggatatcgtggccctgaaactggggatcccctttatgtattctttgagattttcaccggcctccaccgtcgagaaacactgcggcaaagttccttatcctccttcctatgtacctgcagtgctgagtgagctgaccgatcaaatgtcatttaccgaccggatccggaacttcatctcctatcacctccaggattatatgttcgagacactctggaaatcatgggatagctattactcgaaagcgttggggggtctgctcctttgttgcccaggctggtcagccgtagccgatttgggatccctgcagcccctactgccaggcttcaaacgtttcagccgcctcagtctgcattgcagttgggattatcgcctgcccgccggtcgcccgactacattatgtgaaactatgggcaaagctgagatatggctgatcaggacatattgggacttcgagttcccaaggccatatctgcctaactttgagttcgtcgggggcttgcattgcaaacccgccaagcctctgcctaaggtgctatggcgctacaaaggaaagaaacccgcaaccctggggaataacacccagttgtttgactggataccccagaatgatctgttggggcacccaaagaccaaggcctttattacacacggcggcacgaacggaatctatgaggccatttaccacggtgttcccatggtgggagtacctatgtttgcagaccaaccggacaacatcgcccatatgaaggccaagggcgccgccgtagaagttaacctgaatacaatgacgtctgttgatctcctgtccgcccttagaactgtgatcaacgaaccttcatacaaagaaaacgccatgcgcctctctcgtatccatcacgaccagcccgtgaagcctctagacagggcagtgttctggatcgagttcgtcatgcgccataagggtgctaagcatttgcgggtcgcagcacacgatctcacatggttccaataccattcactggatgtcatcggattcttgttagtttgtgtcactaccgccatttttttagtgatacagtgctgtttgttctcgtgtcagaagttcggtaagattgggaagaaaaagaaaagagagtag

SEQ ID NO: 88375 - DNA, 1584 bp, Artificial Sequence
  derived and/or modified sequence
atgctcaataatctgctcctattctctcttcagattagcttgataggaactacgctgggtggtaatgtgctgatttggccaatggaagggagccactggttgaacgttaagattattattgatgagctcattaagaaggagcataacgtcacggtgctggtggcaagcggggctttgttcataacccctacaagcaacccaagccttacgttcgaaatttaccgggttccattcggaaaggagcggatagagggcgtgataaaagatttcgtgctcacgtggctcgaaaataggcccagtccttcgaccatatggagattctatcaagaaatggccaaggttatcaaagactttcacatggtgagtcaagagatctgcgacggcgtcctgaagaatcagcagctcatggcaaaacttaagaaatccaaattcgaagtgctggtaagcgatcctgttttcccttgtggggatattgtggccctgaaactcggcattccgttcatgtactctctccgcttcagccccgcttctacagtggaaaagcactgtggtaaagtgccatacccaccctcatacgtgccagccgtgctcagcgaattaacagaccagatgtctttcactgaccggattaggaacttcataagctatcacttgcaggattatatgtttgaaaccttgtggaaatcctgggacagctattacagtaaggctctgggcggtctactgctgtgttgcccaggatggagcgccgttgccgatctgggatcactccagcctctgttgcccggattcaagcggttctctagactgtctttacactgcagttgggattatagactcccggctgggagacctactactctttgtgagaccatgggcaaggctgagatctggctcataaggacgtattgggatttcgagttcccacgcccatatctgccgaacttcgaatttgtggggggactgcattgtaaacctgcaaaacccctgcccaaagtgttatggcgatataaaggaaaaaagccagctacattgggcaacaatacacagttatttgactggataccccaaaatgacctgctggggcacccgaaaactaaagcttttatcacccatggaggcactaatggaatttatgaagcaatatatcatggggtgccgatggttggcgttccgatgtttgcggaccagcctgacaacatcgctcacatgaaggctaaaggcgcagctgtcgaggttaacctgaatacaatgacatctgtcgatttactcagcgccctaagaaccgtgattaacgaaccatcatataaagaaaacgcaatgcgactgtcacgcatccatcatgatcagcctgtaaagcccctggaccgggcagtcttctggatagagtttgtgatgagacacaaaggagcaaaacacctgcgcgttgccgctcacgatcttacgtggtttcagtaccactccctggacgtgattggtttcctgttggtgtgtgtgacaacggcaatttttctggtgatccaatgttgcctattcagttgtcaaaagttcggcaaaatcggaaaaaaaaaaaaaagagaatag

SEQ ID NO: 88376 - DNA, 1698 bp, Artificial Sequence
  derived and/or modified sequence
acattcggcttcttcctaatgtcaaatgagtgctgttaaagttcctccaggaaacttcagcagagaaaaacatttgcttcacatctcatcaaatcttctgcatcaagccacatcatgttaaacaaccttctgctgttctcccttcagataagtctcataggaaccactcttggtgggaatgttttgatttggccaatggaaggtagtcattggctaaatgttaagataattatagatgagctcattaaaaaggagcataatgtgactgtcctagttgcctctggtgcacttttcatcacaccaacctctaacccatctctgacatttgaaatatatagggtgccctttggcaaagaaagaatagaaggagtaattaaggacttcgttttgacatggctggaaaatagaccatctccttcaaccatttggagattctatcaggagatggccaaagtaatcaaggacttccacatggtgtctcaggagatctgtgatggcgttcttaaaaaccaacagctgatggcaaagctaaagaaaagcaagtttgaagtcctggtgtctgatccagtatttccttgtggcgatatagtagctttaaaacttggaattccatttatgtactccttgaggttttctccagcctcaacagtggaaaagcactgtgggaaggtaccataccctccttcctatgttcctgctgttttatcagaactcaccgaccaaatgtctttcactgacagaataagaaatttcatctcctaccacctacaggactacatgtttgaaactctttggaaatcatgggattcatactatagtaaagctttaggtggactcttactctgttgcccaggctggagtgcagtggcggatcttggctcactgcaacctctgcttcccgggttcaagcgattctcccgcctcagcctccattgtagttgggattacaggctgccagcaggaagacccactacgttatgtgagactatggggaaagctgaaatttggttaatccgaacatattgggattttgaatttcctcgtccatacttacctaattttgagtttgttggaggattgcactgcaaacctgccaaacctttacctaaggttttatggagatacaaaggaaagaaaccagccacattaggaaacaatactcagctctttgattggataccccagaatgatcttcttggacatcccaaaaccaaagcttttatcactcatggtggaactaatgggatctacgaagctatttaccacggagtccctatggtgggagttcccatgtttgctgatcagcctgataacattgctcacatgaaggccaaaggagcagctgtggaagtgaacctaaacacaatgacaagtgtggatttgcttagcgctttgagaacagtcattaatgaaccttcttataaagagaatgctatgaggttatcaagaattcaccatgatcaacctgtaaagcccctggatcgagcagtcttctggatcgagtttgtcatgcgccacaaaggagccaagcaccttcgggttgcagcccatgacctcacctggttccagtaccactctttggatgtaattgggttcttgctggtctgtgtgacaacggctatatttttggtcatacaatgttgtttgttttcctgtcaaaaatttggtaagataggaaagaagaaaaaaagagaatag

SEQ ID NO: 88377 - protein, 319 aa, Artificial Sequence
  derived and/or modified sequence
MGSASPGLSSVSPSHLLLPPDTVSRTGLEKAAAGAVGLERRDWSPSPPATPEQGLSAFYLSYFDMLYPEDSSWAAKAPGASSREEPPEEPEQCPVIDSQAPAGSLDLVPGGLTLEEHSLEQVQSMVVGEVLKDIETACKLLNITADPMDWSPSNVQKWLLWTEHQYRLPPMGKAFQELAGKELCAMSEEQFRQRSPLGGDVLHAHLDIWKSASTSEESWTDSEVDSSCSGQPIHLWQFLKELLLKPHSYGRFIRWLNKEKGIFKIEDSAQVARLWGIRKNRPAMNYDKLSRSIRQYYKKGIIRKPDISQRLVYQFVHPI

SEQ ID NO: 88378 - DNA, 960 bp, Artificial Sequence
  derived and/or modified sequence
atgggtagcgctagtccaggcctcagcagtgtcagtcctagccaccttttacttccccccgatacggtcagccgaacagggctggagaaggcagctgctggggcggtaggcctggagagaagggattggagtccttcacctccagcgacaccggaacaggggctttctgccttttacttgtcttacttcgatatgctttacccagaagacagctcctgggccgccaaggcgccaggggcatccagccgagaggagccaccagaagagcctgaacaatgccccgtgatcgatagccaagctcccgcagggtcactagacctcgtgccaggaggcctgactctcgaggaacattcactggagcaggtccagagcatggtggtaggagaagttttgaaagacatagagaccgcatgtaaattgctcaatattaccgctgaccccatggactggagcccctccaatgtgcagaagtggctgctgtggaccgagcaccagtatcgccttcctcccatgggcaaggcatttcaggaacttgccggcaaagagctgtgcgccatgagcgaagagcagttcaggcagcgctcaccactgggaggcgacgtcttgcacgctcacctggatatttggaagagcgcatcaaccagcgaggaatcatggacagactccgaggtcgactccagctgtagcggccagcccattcacctgtggcagtttcttaaggaactgctcctgaaacctcattcatacggcaggttcatccgctggcttaacaaggaaaaagggatatttaaaattgaggattctgcacaggtggctcgtctatggggaattagaaaaaacagacctgcgatgaattacgacaagctgtctagatccatcagacagtattacaagaagggcattatcagaaagcctgatatctcacagagacttgtctatcagtttgtgcacccaatttag

SEQ ID NO: 88379 - DNA, 960 bp, Artificial Sequence
  derived and/or modified sequence
atgggcagcgccagccctggcctgagctctgtgagccccagccacctgctgctgcccccagacacagtgtccaggacaggcctggagaaggctgctgctggagctgtgggcctggagcggcgggactggagccccagccccccagccaccccagagcagggcctgagcgccttctacctgagctactttgacatgctgtacccagaggacagctcctgggccgccaaggcccctggggccagcagccgggaggagcccccagaggagcctgagcagtgccctgtgattgacagccaggccccagctggcagcctggacctggtgcctgggggcctgaccctggaggagcacagcctggagcaggtgcagagcatggtggtgggggaggtgctgaaggacatcgagacagcctgcaagctgctgaacatcacagctgaccccatggactggagccccagcaatgtgcagaagtggctgctgtggacagagcaccagtaccgcctgccccccatgggcaaggccttccaggagctggccggcaaggagctgtgtgccatgtctgaggagcagttccggcagaggagccccctgggcggagatgtgctgcacgcccacctggacatctggaagagcgccagcaccagcgaggagagctggacagacagcgaggtggacagcagctgcagcggccagcccatccacctgtggcagttcctgaaggagctgctgctgaagccccacagctatggccgcttcatccgctggctgaacaaggagaagggcatcttcaagattgaggacagcgcccaggtggcccggctgtggggcatcaggaagaacagacctgccatgaactatgacaagctgagccgcagcatccggcagtactacaagaagggcatcatcaggaagccagacatcagccagaggctggtgtaccagtttgtgcaccccatctag

SEQ ID NO: 88380 - DNA, 960 bp, Artificial Sequence
  derived and/or modified sequence
atgggcagcgccagccccggcctgagcagcgtgagccccagccacctcttactccccccagacacagtgagtaggaccggcctcgagaaagcagctgccggcgcagtcgggctagagcgccgtgactggtcgccctcgccccccgcaacccctgaacagggtttgtctgccttctatttatcctatttcgacatgctttacccagaggattcctcctgggccgctaaggcccccggagcaagcagccgtgaggagccccctgaggaaccagagcaatgccccgtgattgactcacaggcaccagcaggatccctcgacctcgtacccggcgggctaactctggaagaacactccctggaacaggttcagtccatggtggtgggcgaggttctgaaggacatcgagaccgcgtgtaagctgctcaacatcacagccgaccctatggattggtccccatctaacgtgcaaaaatggctgctttggactgaacaccagtatcgattgccacctatgggcaaggcttttcaggaactggcaggtaaggagctatgcgcaatgtccgaggagcagtttcggcagagaagtccccttggaggtgacgtgctgcacgcccacctcgatatatggaaatcagcctccacgtcggaggagtcttggactgactccgaggtcgatagttcttgttcaggacaacccatacacctctggcagttcctgaaggaacttctgctgaagccacactcttatggccgattcattcgatggttaaataaggagaaaggtattttcaagattgaggactccgcccaagtggctcgtctgtggggcattaggaagaatcggccggccatgaactacgacaaattgtctcgcagcattagacagtattacaagaaaggtattataaggaagcctgacatctcccagagattagtctatcagtttgttcacccaatttag

SEQ ID NO: 88381 - DNA, 960 bp, Artificial Sequence
  derived and/or modified sequence
atgggttccgcctcaccaggcctctcttctgtatcgccctcccacctactgctcccaccagatacagtctcacggacagggctggagaaggctgctgccggtgccgtgggcttagagcgacgcgactggtccccctcgcccccagccaccccagaacaaggactgtctgccttctatctgtcctatttcgacatgctgtaccccgaggatagcagttgggcagctaaggctcccggagcaagttctcgcgaggaaccacccgaggagccagagcaatgccccgtgatagactcgcaggctccggcagggagcctggacctcgtccccggtggccttacactcgaagagcactctttagagcaagtccaaagcatggtagtgggagaagtcctgaaagacatcgaaacagcgtgtaaactgcttaacattacagccgatcccatggactggagcccaagtaatgtgcaaaaatggctcctgtggaccgagcaccagtaccgcttaccccctatgggaaaagcattccaagagctggccggtaaagagctctgcgccatgtccgaggaacagttcagacagcggagccctctaggcggagatgtgctacatgcacatctggacatttggaagagtgcttccacctctgaggagagctggacagattccgaggtcgactcttcctgtagtggccagcctattcatttgtggcagttcctcaaggagctcctgctgaagccccatagctatgggaggtttattcgatggttgaacaaggagaaaggaatatttaagattgaggattccgctcaagtggcccgactgtgggggattagaaagaatagacccgcaatgaattatgacaaactgagtaggagcattaggcaatattacaagaaaggtattatcaggaaaccagacattagccagagactggtttaccagttcgtgcatcctatatag

SEQ ID NO: 88382 - DNA, 960 bp, Artificial Sequence
  derived and/or modified sequence
atgggcagcgccagccccggcctgagcagcgtgagccccagccacctgctgctgccccccgacaccgtgagcagaaccggcctggagaaggccgccgccggcgccgtgggcctggagagaagagactggagccccagcccccccgccacccccgagcagggcctgagcgccttctacctgagctacttcgacatgctgtaccccgaggacagcagctgggccgccaaggcccccggcgccagcagcagagaggagccccccgaggagcccgagcagtgccccgtgatcgacagccaggcccccgccggcagcctggacctggtgcccggcggcctgaccctggaggagcacagcctggagcaggtgcagagcatggtggtgggcgaggtgctgaaggacatcgagaccgcctgcaagctgctgaacatcaccgccgaccccatggactggagccccagcaacgtgcagaagtggctgctgtggaccgagcaccagtacagactgccccccatgggcaaggccttccaggagctggccggcaaggagctgtgcgccatgagcgaggagcagttcagacagagaagccccctgggcggcgacgtgctgcacgcccacctggacatctggaagagcgccagcaccagcgaggagagctggaccgacagcgaggtggacagcagctgcagcggccagcccatccacctgtggcagttcctgaaggagctgctgctgaagccccacagctacggcagattcatcagatggctgaacaaggagaagggcatcttcaagatcgaggacagcgcccaggtggccagactgtggggcatcagaaagaacagacccgccatgaactacgacaagctgagcagaagcatcagacagtactacaagaagggcatcatcagaaagcccgacatcagccagagactggtgtaccagttcgtgcaccccatctag

SEQ ID NO: 88383 - protein, 150 aa, Artificial Sequence
  derived and/or modified sequence
MSKISQQNSTPGVNGISVIHTQAHASGLQQVPQLVPAGPGGGGKAVAPSKQSKKSSPMDRNSDEYRQRRERNNMAVKKSRLKSKQKAQDTLQRVNQLKEENERLEAKIKLLTKELSVLKDLFLEHAHNLADNVQSISTENTTADGDNAGQ

SEQ ID NO: 88384 - DNA, 3750 bp, Artificial Sequence
  derived and/or modified sequence
ggcggcgcgcgcggccccggcgagcaggggaagccggtggccgcggctgcggaacgggcggaggctgccggtttcgtaaccgtcgctcctcctcgctgactcgcgggctgtgaggcctgggtcggctcgggccgcaccgcgcggggccgctcggagtggaggccgcctgggggcaggcgggctagaggagcaggtacatgtgaagattttttggcagcttagcgtggaaaccattgatcaccctgctctcatttctacctgttctgtgttggcaagggagagtgcccaaatgagcaagatatcgcagcaaaacagcactccaggggtgaacggaattagtgttatccatacccaggcacatgccagcggcttacagcaggttcctcagctggtgcctgctggccctgggggaggaggcaaagctgtggctcccagcaagcagagcaaaaagagttcgcccatggatcgaaacagtgacgagtatcggcaacgccgagagaggaacaacatggctgtgaaaaagagccggttgaaaagcaagcagaaagcacaagacacactgcagagagtcaatcagctcaaagaagagaatgaacggttggaagcaaaaatcaaattgctgaccaaggaattaagtgtactcaaagatttgtttcttgagcatgcacacaaccttgcagacaacgtacagtccattagcactgaaaatacgacagcagatggcgacaatgcaggacagtagacctcaccctttccagactttagagcttgtggcttgaatgttaaaggtgtgaccaccgacaccactcatgtcaatggctgaaagttgtccatttccatgactcaaagacccattggaggctattttctgggatcagcactgaagagttgattagctaaaaatgttagccttgtaattcgaatatctggttttaaatgatagaggtttttgtgggaatcaaaatcccccaaatgttaaggtatatggtaaaaaaagaaatatctgggatcccgatgttcttaataaatcctgacttcccaagaaatgcttcttttttaagttgacaaaaggaatggggaactggcaggccgcgcagaaggttcttggttttaatggataggctgaattggattaagaaaagttgaatgccacctatggtaatctatttgtgattttcttctaaattatgtattataaattcgtagagctatagaaagcaatgagtgtgtaatttggagtgattttatatatggcataaactttgttttaacataattagtactgttttcccccaaaagtacaagtttttgagtagcaatgtcaggttaagtaaagaaacttcatcacatcttataggtagtgtgtggccaattgacttaaaaaatacaaataacatttaggaagcaaatagattaaacacaaaaataaaactaaagcataggaattatgtttttgagatacctttgggcttagattggcattgttttattctaaaaacccaactcagtggtgtagagaaacttgtgtaccaaaattttagtttctgcagatgctagtgtttttttggatacaattttgacaaccaagttagtaaacaaaatatcttaacagtttgatgacacaagctactgatgagggtttggaatattaattcagaaggtagtttctcttgtgttcaaaatagctgccatggggctgttacttttaaagtcaaaattttcttctgaaggctcattttggtatttgatcttaaccaagtgattattagagaaatgtatcaactccatgccatctcccaaaataattgtctaagaaaacttgaaagtgtaaggttttaacctttaatttatttctcttaaatacatcttttgatattgttgttgtgacatttctttttctggttagtgggctttccagactttgtaccactgcttctgtttattcatttatatgcttttgtgtcccataaattatttcagaaaatgctgataaaactcaggatattgacatttttgttgagactaaaaaatggcagtcgctaaagtagggactctagagtctggcttacgtcagtgttggtagtttagattgtctttgtcaacgttttttcttctctcttttgctttcttttctttctctttttttcttagcacagttctagctcaaatttgtgtattttttgtgtgcctgggctggagatgagagactgagtcataactgatttaaaagtttgtgttatcaggtatcttatttgaacatggtcatttttggccacattgctgtttcatactaggacttgggatgatgtagccagaataaaactcaagttgcaccctccggttggtggaagattgctgaccgtgccgtttctgggcaggagaagacatcatggtgtccagcaactcagcaaagccattcttaagagtcgtgaggtccttctgaatgtaaaactggagcccaggagaagctgtcccaggagggctgttaactccctatagagccaggagacaggataggggtttctagggtccaacaccagcttaccttggagtatgaatctacccatgaaggatgagagatgttttgaaaaactagccaggacacacccacaggatcctactggctccttagcagctgattggtgttacataattaacttaattggagatgcattaggtcacttgaatgtataagcaagcacctatggtaggcgctacagacatttaaatctcttgggaattcgatgctcccatggaatttataccagttatatgaattgacttaagtatcttgaaaaagaaactttagagaaagcatcaggggtgtgtactcagtatttcaaatcagaacacaagattggaacttttggaaaaatgggttcaagctttcctattagccatggaaatgcaaagtttagcagaagcaagcaattaggcagagaacaaaaatgttaagcatggtgttgtctatcttattgaagtggttggaaatgaaagcttttaatttgatagatttatcagtataaaattagggaaaccacgtgtggggaatgaatcaatttagagcttcgggaattgtgaggtgacttttgtaacttttgttctgtgtgtgacctgtgaaccactaggatgtgatctgcccttgtgggcaggtccagcatagttaggagttaggctttagcataaatttctagctgcatctgagtctcctgggatgggtgctctttggctggttttggctgcggatggtgagatcagagcagctcttcctgctgctggcccctgcaatcagttgttgggatgccagtgcagatcactaagtagtaagattttaatcaaacacgaccaggtccgaaatgcaggtcatgagtgtgaaattctcaaatttacataaaaagtagaagtatagacagtttaacatttggtattaaaggagaggaaattgtagcagcttttcacgtttcccagtccccattagagggcttgagaccttgtacctgaacaacccattttgcactcagtgctttctgatgccttaggagaattgttttgtttcacaaaagctgggaaggaagaagtccattctgcagctgttagatctgcctctcaggaaaaagtactaacttgttctttttgttcctggctttcatcagtttgtgagatttctctattttttttaaatataattttatttctttcaacaaatataaaataaaaaacaactttggaacaatgaaaaaaaaaaaaaaa

SEQ ID NO: 88385 - DNA, 453 bp, Artificial Sequence
  derived and/or modified sequence
atgtcgaagatctcccaacagaactctacacccggagttaatggaatcagcgttattcacacgcaggcccacgctagcggactacagcaggttccgcagctagtgcctgcaggtcccggcggcggcggtaaggcagtcgcaccctccaaacaatccaagaagagttccccaatggataggaactcagatgagtatcggcagagaagagaaagaaataatatggccgtgaaaaaaagcagactgaaaagcaaacaaaaagcacaagatacactgcagcgggtcaaccaactcaaagaggagaacgaacgactggaggctaaaatcaaactgctaacgaaagaattatctgtacttaaagacctgtttctcgagcacgctcacaacttagctgacaacgtccagtctatttcaactgagaacacaaccgccgacggggataacgccgggcaatag

SEQ ID NO: 88386 - DNA, 453 bp, Artificial Sequence
  derived and/or modified sequence
atgagcaagatcagccagcagaacagcaccccaggagtgaatggcatcagcgtcatccacacccaggcccacgccagcggcctgcagcaggtgccccagctggtgcctgctggccctgggggcggcggcaaggctgtggcccccagcaagcagagcaagaagagcagccccatggacaggaacagtgatgagtaccggcagaggcgggagaggaacaacatggctgtgaagaagagccggctgaagagcaagcagaaggcccaggacaccctgcagagggtgaaccagctgaaggaggagaatgaaaggctggaggccaagatcaagctgctgaccaaggagctgtctgtgctgaaggacctcttcctggagcacgcccacaacctggccgacaacgtgcagagcatcagcacagagaacaccacagcagatggagacaatgccggccagtag

SEQ ID NO: 88387 - DNA, 453 bp, Artificial Sequence
  derived and/or modified sequence
atgagcaagatcagccagcagaacagcacccccggcgtgaacggcatctccgtgatccatacccaagcgcatgcctccggcctgcagcaagtcccccagctcgttccagccggtccgggcggcggaggaaaggctgtggcaccttcaaagcagtctaagaaaagctcccccatggacaggaactcagatgagtatcggcagcgcagagaacgcaataatatggccgtgaagaaatcacgcctaaagtctaagcaaaaagcccaggataccctccaaagagtgaatcagctgaaggaagaaaacgagagactggaagcaaagatcaagcttctgacaaaggagctgtctgtgctgaaagatctttttctcgaacatgcccacaacctggccgacaacgttcaatctattagtacggaaaatacaaccgctgacggtgataacgcagggcaatag

SEQ ID NO: 88388 - DNA, 453 bp, Artificial Sequence
  derived and/or modified sequence
atgtctaaaattagccaacagaattccaccccaggagtaaacgggatcagtgtgatacacactcaggcacacgcttctggcttacaacaggtgccccagctggttcctgcaggacctggtggaggcggaaaggcggtcgctccctcaaagcagtccaaaaaaagctcacctatggaccggaactctgacgagtaccgtcaacgccgagagcgaaacaatatggccgtgaagaagtcgcgcctcaaatcaaaacagaaggctcaggacacccttcaaagggtgaatcagttgaaagaagaaaacgagcgcctggaggcaaaaatcaagcttctcaccaaggaactcagcgttttaaaggatttatttctggagcacgcgcacaacctggcggacaacgtccagtccatctctaccgagaatactaccgcggacggcgacaacgccggtcaatag

SEQ ID NO: 88389 - DNA, 3735 bp, Artificial Sequence
  derived and/or modified sequence
ggcggcgcgcgcggccccggcgagcaggggaagccggtggccgcggctgcggaacgggcggaggctgccggtttcgtaaccgtcgctcctcctcgctgactcgcgggctgtgaggcctgggtcggctcgggccgcaccgcgcggggccgctcggagtggaggccgcctgggggcaggcgggctagaggagcaggtacatgtgaagattttttggcagcttagcgtggaaaccattgatcaccctgctctcatttctacctgttctgtgttggcaagggagagtgcccaaatgagcaagatatcgcagcaaaacagcactccaggggtgaacggaattagtgttatccatacccaggcacatgccagcggcttacagcaggttcctcagctggtgcctgctggccctgggggaggaggcaaagctgtggctcccagcaagcagagcaaaaagagttcgcccatggatcgaaacagtgacgagtatcggcaacgccgagagaggaacaacatggctgtgaaaaagagccggttgaaaagcaagcagaaagcacaagacacactgcagagagtcaatcagctcaaagaagagaatgaacggttggaagcaaaaatcaaattgctgaccaaggaattaagtgtactcaaagatttgtttcttgagcatgcacacaaccttgcagacaacgtacagtccattagcactgaaaatacgacagcagatggcgacaatgcaggacagtagacctcaccctttccagactttagagcttgtggcttgaatgttaaaggtgtgaccaccgacaccactcatgtcaatggctgaaagttgtccatttccatgactcaaagacccattggaggctattttctgggatcagcactgaagagttgattagctaaaaatgttagccttgtaattcgaatatctggttttaaatgatagaggtttttgtgggaatcaaaatcccccaaatgttaaggtatatggtaaaaaaagaaatatctgggatcccgatgttcttaataaatcctgacttcccaagaaatgcttcttttttaagttgacaaaaggaatggggaactggcaggccgcgcagaaggttcttggttttaatggataggctgaattggattaagaaaagttgaatgccacctatggtaatctatttgtgattttcttctaaattatgtattataaattcgtagagctatagaaagcaatgagtgtgtaatttggagtgattttatatatggcataaactttgttttaacataattagtactgttttcccccaaaagtacaagtttttgagtagcaatgtcaggttaagtaaagaaacttcatcacatcttataggtagtgtgtggccaattgacttaaaaaatacaaataacatttaggaagcaaatagattaaacacaaaaataaaactaaagcataggaattatgtttttgagatacctttgggcttagattggcattgttttattctaaaaacccaactcagtggtgtagagaaacttgtgtaccaaaattttagtttctgcagatgctagtgtttttttggatacaattttgacaaccaagttagtaaacaaaatatcttaacagtttgatgacacaagctactgatgagggtttggaatattaattcagaaggtagtttctcttgtgttcaaaatagctgccatggggctgttacttttaaagtcaaaattttcttctgaaggctcattttggtatttgatcttaaccaagtgattattagagaaatgtatcaactccatgccatctcccaaaataattgtctaagaaaacttgaaagtgtaaggttttaacctttaatttatttctcttaaatacatcttttgatattgttgttgtgacatttctttttctggttagtgggctttccagactttgtaccactgcttctgtttattcatttatatgcttttgtgtcccataaattatttcagaaaatgctgataaaactcaggatattgacatttttgttgagactaaaaaatggcagtcgctaaagtagggactctagagtctggcttacgtcagtgttggtagtttagattgtctttgtcaacgttttttcttctctcttttgctttcttttctttctctttttttcttagcacagttctagctcaaatttgtgtattttttgtgtgcctgggctggagatgagagactgagtcataactgatttaaaagtttgtgttatcaggtatcttatttgaacatggtcatttttggccacattgctgtttcatactaggacttgggatgatgtagccagaataaaactcaagttgcaccctccggttggtggaagattgctgaccgtgccgtttctgggcaggagaagacatcatggtgtccagcaactcagcaaagccattcttaagagtcgtgaggtccttctgaatgtaaaactggagcccaggagaagctgtcccaggagggctgttaactccctatagagccaggagacaggataggggtttctagggtccaacaccagcttaccttggagtatgaatctacccatgaaggatgagagatgttttgaaaaactagccaggacacacccacaggatcctactggctccttagcagctgattggtgttacataattaacttaattggagatgcattaggtcacttgaatgtataagcaagcacctatggtaggcgctacagacatttaaatctcttgggaattcgatgctcccatggaatttataccagttatatgaattgacttaagtatcttgaaaaagaaactttagagaaagcatcaggggtgtgtactcagtatttcaaatcagaacacaagattggaacttttggaaaaatgggttcaagctttcctattagccatggaaatgcaaagtttagcagaagcaagcaattaggcagagaacaaaaatgttaagcatggtgttgtctatcttattgaagtggttggaaatgaaagcttttaatttgatagatttatcagtataaaattagggaaaccacgtgtggggaatgaatcaatttagagcttcgggaattgtgaggtgacttttgtaacttttgttctgtgtgtgacctgtgaaccactaggatgtgatctgcccttgtgggcaggtccagcatagttaggagttaggctttagcataaatttctagctgcatctgagtctcctgggatgggtgctctttggctggttttggctgcggatggtgagatcagagcagctcttcctgctgctggcccctgcaatcagttgttgggatgccagtgcagatcactaagtagtaagattttaatcaaacacgaccaggtccgaaatgcaggtcatgagtgtgaaattctcaaatttacataaaaagtagaagtatagacagtttaacatttggtattaaaggagaggaaattgtagcagcttttcacgtttcccagtccccattagagggcttgagaccttgtacctgaacaacccattttgcactcagtgctttctgatgccttaggagaattgttttgtttcacaaaagctgggaaggaagaagtccattctgcagctgttagatctgcctctcaggaaaaagtactaacttgttctttttgttcctggctttcatcagtttgtgagatttctctattttttttaaatataattttatttctttcaacaaatataaaataaaaaacaactttggaacaatg

SEQ ID NO: 88390 - DNA, 453 bp, Artificial Sequence
  derived and/or modified sequence
atgagcaagatcagccagcagaacagcacccccggcgtgaacggcatcagcgtgatccacacccaggcccacgccagcggcctgcagcaggtgccccagctggtgcccgccggccccggcggcggcggcaaggccgtggcccccagcaagcagagcaagaagagcagccccatggacagaaacagcgacgagtacagacagagaagagagagaaacaacatggccgtgaagaagagcagactgaagagcaagcagaaggcccaggacaccctgcagagagtgaaccagctgaaggaggagaacgagagactggaggccaagatcaagctgctgaccaaggagctgagcgtgctgaaggacctgttcctggagcacgcccacaacctggccgacaacgtgcagagcatcagcaccgagaacaccaccgccgacggcgacaacgccggccagtag

SEQ ID NO: 88391 - protein, 792 aa, Artificial Sequence
  derived and/or modified sequence
MAPALPSPHKAVARPELLLDTAAHSGKLRAPDGGEGAECAGHNGGPSWGVGQGQSQEPSRQGIPQAPWLVSWQRRGFPPSSFCPGPLRTEKLRAGRCPLLLCGGAAGEPEAGSDYVKFSKEKYILDSSPEKLHKELEEELKLSSTDLRSHAWYHGRIPREVSETLVQRNGDFLIRDSLTSLGDYVLTCRWRNQALHFKINKVVVKAGESYTHIQYLFEQESFDHVPALVRYHVGSRKAVSEQSGAIIYCPVNRTFPLRYLEASYGLGQGSSKPASPVSPSGPKGSHMKRRSVTMTDGLTADKVTRSDGCPTSTSLPRPRDSIRSCALSMDQIPDLHSPMSPISESPSSPAYSTVTRVHAAPAAPSATALPASPVARRSSEPQLCPGSAPKTHGESDKGPHTSPSHTLGKASPSPSLSSYSDPDSGHYCQLQPPVRGSREWAATETSSQQARSYGERLKELSENGAPEGDWGKTFTVPIVEVTSSFNPATFQSLLIPRDNRPLEVGLLRKVKELLAEVDARTLARHVTKVDCLVARILGVTKEMQTLMGVRWGMELLTLPHGRQLRLDLLERFHTMSIMLAVDILGCTGSAEERAALLHKTIQLAAELRGTMGNMFSFAAVMGALDMAQISRLEQTWVTLRQRHTEGAILYEKKLKPFLKSLNEGKEGPPLSNTTFPHVLPLITLLECDSAPPEGPEPWGSTEHGVEVVLAHLEAARTVAHHGGLYHTNAEVKLQGFQARPELLEVFSTEFQMRLLWGSQGASSSQARRYEKFDKVLTALSHKLEPAVRSSEL

SEQ ID NO: 88392 - DNA, 2379 bp, Artificial Sequence
  derived and/or modified sequence
atggcccccgccctgcccagcccccacaaggccgtggccagacccgagctgctgctggacaccgccgcccacagcggcaagctgagagcccccgacggcggcgagggcgccgagtgcgccggccacaacggcggccccagctggggcgtgggccagggccagagccaggagcccagcagacagggcatcccccaggccccctggctggtgagctggcagagaagaggcttcccccccagcagcttctgccccggccccctgagaaccgagaagctgagagccggcagatgccccctgctgctgtgcggcggcgccgccggcgagcccgaggccggcagcgactacgtgaagttcagcaaggagaagtacatcctggacagcagccccgagaagctgcacaaggagctggaggaggagctgaagctgagcagcaccgacctgagaagccacgcctggtaccacggcagaatccccagagaggtgagcgagaccctggtgcagagaaacggcgacttcctgatcagagacagcctgaccagcctgggcgactacgtgctgacctgcagatggagaaaccaggccctgcacttcaagatcaacaaggtggtggtgaaggccggcgagagctacacccacatccagtacctgttcgagcaggagagcttcgaccacgtgcccgccctggtgagataccacgtgggcagcagaaaggccgtgagcgagcagagcggcgccatcatctactgccccgtgaacagaaccttccccctgagatacctggaggccagctacggcctgggccagggcagcagcaagcccgccagccccgtgagccccagcggccccaagggcagccacatgaagagaagaagcgtgaccatgaccgacggcctgaccgccgacaaggtgaccagaagcgacggctgccccaccagcaccagcctgcccagacccagagacagcatcagaagctgcgccctgagcatggaccagatccccgacctgcacagccccatgagccccatcagcgagagccccagcagccccgcctacagcaccgtgaccagagtgcacgccgcccccgccgcccccagcgccaccgccctgcccgccagccccgtggccagaagaagcagcgagccccagctgtgccccggcagcgcccccaagacccacggcgagagcgacaagggcccccacaccagccccagccacaccctgggcaaggccagccccagccccagcctgagcagctacagcgaccccgacagcggccactactgccagctgcagccccccgtgagaggcagcagagagtgggccgccaccgagaccagcagccagcaggccagaagctacggcgagagactgaaggagctgagcgagaacggcgcccccgagggcgactggggcaagaccttcaccgtgcccatcgtggaggtgaccagcagcttcaaccccgccaccttccagagcctgctgatccccagagacaacagacccctggaggtgggcctgctgagaaaggtgaaggagctgctggccgaggtggacgccagaaccctggccagacacgtgaccaaggtggactgcctggtggccagaatcctgggcgtgaccaaggagatgcagaccctgatgggcgtgagatggggcatggagctgctgaccctgccccacggcagacagctgagactggacctgctggagagattccacaccatgagcatcatgctggccgtggacatcctgggctgcaccggcagcgccgaggagagagccgccctgctgcacaagaccatccagctggccgccgagctgagaggcaccatgggcaacatgttcagcttcgccgccgtgatgggcgccctggacatggcccagatcagcagactggagcagacctgggtgaccctgagacagagacacaccgagggcgccatcctgtacgagaagaagctgaagcccttcctgaagagcctgaacgagggcaaggagggcccccccctgagcaacaccaccttcccccacgtgctgcccctgatcaccctgctggagtgcgacagcgccccccccgagggccccgagccctggggcagcaccgagcacggcgtggaggtggtgctggcccacctggaggccgccagaaccgtggcccaccacggcggcctgtaccacaccaacgccgaggtgaagctgcagggcttccaggccagacccgagctgctggaggtgttcagcaccgagttccagatgagactgctgtggggcagccagggcgccagcagcagccaggccagaagatacgagaagttcgacaaggtgctgaccgccctgagccacaagctggagcccgccgtgagaagcagcgagctgtag

SEQ ID NO: 88393 - DNA, 2379 bp, Artificial Sequence
  derived and/or modified sequence
atggcccccgctctgcccagcccacacaaggcagtcgcccgacctgagcttcttctggacactgccgctcactcaggcaaactcagagctcccgatggcggtgagggtgccgaatgcgccggtcacaatggcggtccttcctggggcgtcggccaaggacagtcacaagagccctcgcgacaagggatcccacaggccccttggttggtctcctggcagcgacgcggttttccaccttcttctttctgtccaggtcctttgaggacagagaagcttcgggcgggccgctgtccattactgctatgcggcggagccgccggcgagcctgaggcgggcagcgattatgtgaagttttctaaagagaagtacattctcgattcatcaccggagaaactccacaaagaactggaggaggaattgaagttgagtagcaccgacctacgttcacacgcctggtaccacggacgtatacctagggaagtgtctgaaactctggtgcaaaggaatggcgattttctgatcagagactcactgacctcccttggcgactatgtcctaacctgccggtggcggaaccaggctctgcatttcaagatcaacaaggtggtagtgaaggctggggaaagctacacccacatccaatatctgttcgaacaggaaagcttcgaccacgttcctgccctggtcaggtatcatgtgggctcaaggaaagcggtcagcgaacagtcaggcgccattatctattgccccgtgaatcgcacatttcctctgagatacctggaggctagttatggtctcggccagggtagctccaagccggcgagtcccgtgtcaccttccggccccaagggctctcacatgaaacgcaggtctgtgactatgacagacggactgactgctgacaaagtcaccagatcagatggctgccctacatccaccagtctgccgcgaccccgtgatagtattagaagttgtgcccttagcatggatcagatcccagacctgcacagtcccatgtccccaatcagcgagagtccgagttctcctgcctacagtaccgttacccgggtgcacgcggcaccagcagcccctagcgctacagcactgcccgctagccccgtagctagacgcagcagcgagccccaactgtgccctggatccgcaccgaaaacacacggcgagtctgacaaggggccacacacctctcccagccacactctgggtaaggcaagtccgtctcctagcctctcatcctattcagatccagattctggacactattgccagttgcagccacctgtacgagggagtagggaatgggctgcaaccgagacgtcttctcagcaggcacgaagttatggagaacgccttaaggagctgagcgagaatggcgcgcctgaaggcgattggggcaagacctttacagttccaattgtggaagtgacctcatcctttaatcctgcaacctttcagagcctgctgattcctagagacaacaggcctctggaggtggggctcttaaggaaggtgaaggagcttttggcagaagtggacgccagaacgctcgcacgccatgttacaaaagttgattgtctggtcgctaggattctgggtgtgacaaaggagatgcaaacacttatgggcgtgcggtggggtatggagcttctcactctgccgcacggacgccagctccgcctcgatctcttggagcgttttcacaccatgagtataatgctggcagtggatatactggggtgcacggggtctgccgaggagcgggcagcactactccacaaaaccattcagctggccgcagaactacgaggcactatgggaaatatgttttctttcgctgccgttatgggagccctggacatggcgcagattagcaggctggaacagacctgggtgacactcagacagagacacaccgaaggcgccatactgtacgagaaaaaacttaagcccttcctgaagagtctcaatgagggtaaagaggggccacctctgtctaacactacatttcctcatgtgctgccgctgatcaccctgttggaatgtgactcggccccacccgaaggacccgaaccctgggggagcacggagcacggtgtcgaggtcgtactcgcgcacctggaagctgcacggacagtcgctcatcatggggggctgtaccacactaacgcagaggtgaaacttcagggctttcaggccaggcctgaactgctcgaagtcttctccaccgagtttcaaatgcggctgctgtgggggtcccaaggtgcgagtagctcccaggcccggagatatgaaaaatttgataaagtgctgacagctctgtctcataaactcgagccagccgtgcgctctagcgagttgtag

SEQ ID NO: 88394 - DNA, 2807 bp, Artificial Sequence
  derived and/or modified sequence
atggcccctgctctgccttctcctcacaaggctgtcgcccgtcctgagctcctgctggacactgcagcccactcaggaaaactgagggctccagacggtggagagggagcagaatgtgctgggcacaatggtggcccatcttggggagtggggcagggccaaagccaagagccttcccggcagggaatcccacaggccccatggctggtgtcctggcagagacggggctttccacccagctctttttgcccagggcctttaaggactgagaagctcagagcaggcaggtgcccgttgcttctctgcggtggggctgctggagagccagaggctggcagcgactatgtgaagttctccaaggagaagtacatcctggactcatcgccagagaaactccacaaggaattggaggaggagctcaaactcagcagcacggatctccgcagccatgcctggtaccatggccgcatcccccgagaggtctcggagaccttggtacaacgcaacggcgacttcctcatccgggactcactcaccagcctgggcgactatgtgctcacgtgccgctggcgcaaccaggccttgcacttcaagatcaacaaggtggtggtgaaggcaggcgagagctacacacacatccagtacctgtttgagcaggagagctttgaccacgtgcccgccctcgtgcgctatcatgtgggcagccgcaaggctgtgtcagagcagagtggtgccatcatctactgcccggtgaaccgcaccttcccactgcgctacctcgaggccagctatggcctgggacaggggagtagcaagcctgctagccccgtcagcccctcaggccccaagggcagccacatgaagcggcgcagcgtcaccatgaccgatgggctcactgctgacaaggtcacccgcagcgatggctgccccaccagtacgtcgctgccccgccctcgggactccatccgcagctgtgccctcagcatggaccagatcccagacctgcactcacccatgtcgcccatctccgagagccctagctcccctgcctacagcactgtaacccgtgtccatgccgcccctgcagccccttctgccacagcattgcctgcctcccctgtcgcccgccgttccagtgagccccagctgtgtcccggaagtgccccaaagacccatggggagtcagacaagggcccccacaccagcccctcccacacccttggcaaggcctccccgtcaccatcactcagcagctacagtgacccggactctggccactactgccagctccagcctcccgtgcgtggcagccgagagtgggcagcgactgagacctccagccagcaggccaggagctatggggagaggctaaaggaactgtcagaaaatggggcccctgaaggggactggggcaagaccttcacagtccccatcgtggaagtcacttcttccttcaacccggccaccttccagtcactactgatccccagggataaccggccactggaggtgggccttctgcgcaaggtcaaggagctgctggcagaagtggatgcccggacgctggcccggcatgtcaccaaggtggactgcctggttgctaggatactgggcgttaccaaggagatgcagaccctaatgggagtccgctggggcatggaactgctcaccctcccccatggccggcagctacgcctagacctgctggaaaggttccacaccatgtccatcatgctggccgtggacatcctgggctgcaccggctctgcggaggagcgggcagcgctgctgcacaagaccattcagctggcggccgagctgcgggggactatgggcaacatgttcagcttcgcggcggtcatgggtgccctggacatggcccagatttctcggctggagcagacatgggtgaccctgcggcagcgacacacagagggtgccatcctgtacgagaagaagctcaagccttttctcaagagcctcaacgagggcaaagaaggcccgccgctgagcaacaccacgtttcctcatgtgctgcccctcatcaccctgctggagtgtgactcggccccaccagagggccctgagccctggggcagcacggagcacggcgtggaggtggtgctggctcacctggaggccgcccgcacagtggcacaccacggaggcctgtaccacaccaatgctgaagtcaagctgcaggggttccaggcccggccggagctcctggaggtgttcagcacggagttccagatgcgccttctctggggcagtcagggtgccagcagcagccaggcccggcgctatgagaagttcgacaaggtcctcactgccctgtcccacaagctggaacctgctgtccgctccagcgagctgtgaccccagggacatttcccctctgcagctgcggacagcgtcaggggcagaggggcacacaactttccccagagcaccccaaggacactgtgatcaacccgagaatgttctgggttcaactcaagcatctcccttgcacctccagggtcctgcgtggactctgggttccatcccacctgctacatgctcaccaggtctccattgaggaagaacaggaacgccggttcccccaccagcttttgctgctccccttcctgctggggttccctgttttcgagccatgggaggcaggctgctcacgcctcctcactctctgtctgtccctcaccaacaccaaggcctccatctcactgtaaataagtctctgttctgtaaatagatgtacagaagccatgttatttctttcatataataaacttttatgactcttt

SEQ ID NO: 88395 - DNA, 2379 bp, Artificial Sequence
  derived and/or modified sequence
atggccccagccctgcccagcccccacaaggctgtggcccggcctgagctgctgctggacacagctgcccacagcggcaagctgcgggccccagatggaggagagggcgcagaatgtgccggccacaatggaggccccagctggggcgtgggccagggccagagccaggagcccagccggcagggcatcccccaggccccctggctggtgtcctggcagaggcggggcttcccccccagcagcttctgccccggccccctgaggacagagaagctgcgggccggccgctgccccctgctgctgtgtggcggggccgccggggagcctgaggccggcagtgactatgtgaagttcagcaaggagaagtacatcctggacagcagccctgagaagctgcacaaggagctggaggaggagctgaagctgagcagcacagacctgcggagccacgcctggtaccacggccgcatcccccgggaggtgtctgagaccctggtgcagagaaatggagacttcctgatccgggacagcctgaccagcctgggggactatgtgctgacctgccgctggaggaaccaggccctgcacttcaagatcaacaaggtggtggtgaaggccggggagagctacacccacatccagtacctgtttgagcaggagagctttgaccacgtgcctgccctggtgcgctaccacgtgggcagcaggaaggctgtgtctgagcagagcggggccatcatctactgccctgtgaacagaaccttccccctgcgctacctggaggccagctatggcctgggccagggcagcagcaagccagccagccctgtgagccccagcggccccaagggcagccacatgaagagaagatctgtgaccatgacagatggcctgacagctgacaaggtgaccaggagtgatggctgccccaccagcaccagcctgccccggccccgggacagcatccgcagctgtgccctgtccatggaccagatcccagacctgcacagccccatgagccccatcagcgagagccccagcagccctgcctacagcacagtgaccagggtgcatgctgccccagctgcccccagcgccacagccctgcctgccagccctgtggcccggcgcagcagcgagccccagctgtgccccggcagcgcccccaagacccacggggagagtgacaagggcccccacaccagccccagccacaccctgggcaaggccagccccagccccagcctgagcagctacagcgaccctgacagcggccactactgccagctgcagccccctgtgcggggcagccgggagtgggccgccacagagaccagcagccagcaggcccggagctatggagagcggctgaaggagctgtctgaaaatggagcccctgagggggactggggcaagaccttcaccgtgcccatcgtggaggtgaccagcagcttcaacccagccaccttccagagcctgctgatcccccgggacaaccggcccctggaggtgggcctgctgaggaaggtgaaggagctgctggccgaggtggatgcccggaccctggcccggcacgtgaccaaggtggactgcctggtggcccgcatcctgggcgtgaccaaggagatgcagaccctgatgggcgtgcgctggggcatggagctgctgaccctgccccacggccggcagctgcggctggacctgctggagcgcttccacaccatgagcatcatgctggccgtggacatcctgggctgcaccggcagcgctgaggagcgggccgccctgctgcacaagaccatccagctggccgctgagctgcggggcaccatgggcaacatgttctcctttgctgctgtgatgggcgccctggacatggcccagatcagccggctggagcagacctgggtgaccctgcggcagaggcacacagagggcgccatcctgtatgagaagaagctgaagcccttcctgaagagcctgaatgaaggcaaggagggcccccccctgagcaacaccaccttcccccacgtgctgcccctcatcaccctgctggagtgtgacagcgcccctcctgagggccctgagccctggggcagcacagaacatggagtggaggtggtgctggcccacctggaggccgccaggacagtggcccaccacggcggcctgtaccacaccaatgctgaggtgaagctgcagggcttccaggcccggcctgagctgctggaggtgttcagcacagagttccagatgaggctgctgtggggcagccagggcgccagcagcagccaggccaggagatatgagaagtttgacaaggtgctgacagccctgagccacaagctggagcctgctgtgcgcagcagcgagctgtag

SEQ ID NO: 88396 - DNA, 2379 bp, Artificial Sequence
  derived and/or modified sequence
atggcccccgccctgcccagcccccacaaggccgtggcccggcccgagctgctactcgatacagcagcgcattccggtaaattacgcgcaccagatggaggggagggggcagaatgcgccggccataatggcgggcctagctggggagtcgggcagggccaatcccaggagccatcccggcaaggcataccccaggccccttggctggtgtcctggcagaggcgagggtttcccccctcgagcttctgccctggcccattaagaaccgagaagttgcgggccggccgctgtccgctcctgctttgcggtggtgctgctggagaacctgaagctggaagtgattacgtcaagttttctaaagagaagtacattttggattcaagcccagagaagctgcacaaggagttagaagaagagctcaagctgtcctctactgacctccgctcccacgcctggtaccatggccgcattccccgagaagtttccgaaacactggtccagagaaacggcgacttcctgatacgcgattcactcacatccctgggcgattatgttctgacttgtaggtggagaaatcaggccctgcactttaaaatcaacaaagtagtcgtcaaagcgggggaaagttacacccatatacagtacctgttcgaacaagaatctttcgatcacgtgcccgccctcgtgaggtaccacgtaggctcgcgaaaggccgtgtccgaacagagtggcgctataatatactgtccggtcaaccgcacttttccactgcggtacctagaggcttcctacgggttggggcagggctctagtaagcccgctagccctgtgtccccgtctggaccaaagggtagccatatgaaacgtcgctcagtcaccatgaccgacggcctaactgctgacaaagtgacccgatcggacgggtgtcctacctcgacttccttaccccggccaagggattctattaggtcctgcgccctgtcaatggaccaaattccagacctgcacagtcccatgagcccgatctccgagtccccttccagccctgcttattcaaccgtgactcgcgtgcatgcagcccccgcagctccaagcgccaccgccctgcccgcatcccctgttgcacgcagatctagcgagccccaactgtgccctggtagcgcgccaaagacccatggcgagtcagataagggaccccacacgtccccaagtcatacactgggtaaggcctcgccatccccgtctctgagttcatactctgacccagattctgggcactactgccagctgcagcctcctgtgcggggctcaagggaatgggctgcgactgagacatcctctcaacaggcccgctcatacggtgagagactcaaggagctgagtgagaacggagcccccgagggcgactggggcaagaccttcacggtcccaatcgtagaggtaacctcttcttttaacccggccacatttcagtctctcctaatccctagagataaccgccctctcgaggtgggactgctcaggaaggtcaaggaactgttggccgaggtcgacgccagaacgctggcccggcacgttacaaaagttgactgcttagtcgcccggatcttgggtgtgactaaggaaatgcagaccctgatgggggttaggtggggaatggaattgttgacattgccacatggccgccagcttcgtctggatttgctggagcgtttccacactatgtctatcatgttggccgtggacatcctcggttgcacagggtctgccgaggagagggcagccctgctgcacaagactattcaactggccgccgagcttcggggaacaatgggcaacatgttctctttcgctgcagtcatgggggccctggatatggcccagatctcgcggttagagcagacttgggtgacgttaaggcagcggcacactgagggggccatcctatatgaaaagaagttgaagcccttcctgaagtccctaaatgagggcaaggaaggccctcccttgagtaatacgacattcccacatgtgcttccactaattaccctgttagaatgcgacagtgctccccctgaggggccagagccctggggcagcacggagcatggcgtcgaagtagtcctcgcccacctggaggctgctcgaaccgttgcccatcacggaggtttgtatcataccaacgccgaggtcaagctgcaagggtttcaggcccgccccgagctactcgaagtgtttagcacagaatttcaaatgcgcctgctgtggggttcccagggagcatcatcgtctcaggcccgtagatatgaaaagtttgataaagtgcttacagccctgtcccataaactggaaccggccgtccggtcttccgaattgtag

SEQ ID NO: 88397 - DNA, 2379 bp, Artificial Sequence
  derived and/or modified sequence
atggcaccagcactgccatcccctcataaggctgttgcacgcccagagcttctactcgacaccgccgctcatagcggaaaacttagagctcccgatgggggtgagggagccgaatgtgcgggtcataacggcggaccgtcttggggggtggggcagggacagagccaagaacccagtcgacaggggatacctcaggctccgtggttagtttcatggcagcgtcggggatttccacccagtagcttctgcccaggacccttgcggacggagaaactgagggctgggcgatgcccactcttgctgtgcgggggagccgctggggagcccgaggctggtagcgattatgtgaagttcagtaaagagaagtacattttggacagttctcctgagaagctgcataaggaactggaagaggaactgaagttatcatcgactgacctcagatcccatgcatggtaccacggcaggatccctcgtgaggtgagtgagactctcgtacagcggaatggtgactttctcatccgcgatagcctgacttcgctcggtgactacgtcctgacgtgtagatggcggaaccaagccctacatttcaaaattaacaaagtcgtggtcaaggcaggcgagtcttacactcacatacaatacctgtttgagcaggagagctttgatcacgtgccggcactggttcggtaccacgtgggtagtcgcaaggccgtttccgagcagtcaggggctattatctactgcccagtgaataggaccttcccacttcgttatctggaagcttcttatggcttggggcaggggtcctcaaagccggcaagtccggtctcccccagcgggcctaaggggtctcacatgaagcggaggagcgtgactatgaccgacgggctcactgccgacaaagtcacacgcagtgacggatgtcccaccagtacctccctacccaggcctcgcgactccatcagaagttgtgccctgagtatggatcagataccagacttgcacagtcctatgtctcccatatcagaaagcccctcaagtcccgcttatagcacagtaacaagagttcacgctgccccagccgctccttctgccaccgctcttccggcaagcccagtggcccgacggtcgtcggaaccgcagctctgtcccggatcggcaccaaagacacatggcgaaagtgacaagggaccccatacatcaccaagccacacactcggaaaggccagcccgtcgccctcactctcttcttacagcgacccggacagtggacattactgccagcttcagccccctgtcaggggtagcagggagtgggctgccacggaaactagttcccagcaagccagatcttatggggaaagactcaaggaactgagcgagaatggcgcacccgagggcgactggggcaaaactttcacggttcccatagtggaagtgaccagttctttcaatccagccaccttccagtctttgctgatacccagagacaatcgcccactggaggtggggctgctccgtaaggttaaggagctcctggctgaggtagatgccaggactctggcaagacatgttactaaggttgactgcttagtggccaggattttgggagtcactaaagaaatgcagactttgatgggggtgcgctggggtatggagttgctgaccctgccacacggcagacaactcaggctggacctgctagagcggttccacactatgagcatcatgctggctgtcgacatattgggatgtactgggagcgcggaggaaagggccgctcttctccacaaaactatacagctggcagctgaactgagaggtactatgggaaacatgttcagtttcgccgcagttatgggggctctcgacatggcccagatctctcggctggagcaaacctgggttacattgcgtcagcgccatactgagggggcaattctatatgagaagaaactaaagccatttttgaaatctcttaatgaaggaaaggaaggcccaccattgtccaacacaacgtttcctcacgtcctaccactcattacgctgctggagtgcgactctgcacctccagaaggcccagagccatggggaagcaccgagcacggcgtggaagtagtgcttgcccacctggaagcagcgaggactgtggcccaccacggcggtctctatcacactaacgccgaagtcaaactgcaaggcttccaagcccgacctgagctcttggaggtgttcagtactgaattccagatgcggctgctatgggggtcacaaggcgcttctagtagccaggcgagaaggtatgaaaaattcgataaagtattaactgctttgagccataagctggaaccagccgtgagatcgagcgaattatag

SEQ ID NO: 88398 - DNA, 2529 bp, Artificial Sequence
  derived and/or modified sequence
atggacttcaaagtcggagcagatggaaccgttttcgccactcgggaactgcaggtgccttcagaacaggttgctttcactgtaacagcctgggacagccagacggccgagaagtgggacgctgtcgttagacttttggtcgcccagactagctcaccccatagcgggcacaaaccacaaaagggaaagaaggtggttgccctggacccctcgccccctcctaaagatacactcctaccctggccccagcaccagaacgctaatggtcttcgtcggagaaagagagattgggtaattccacccattaacgtgcccgagaacagccgcggcccattccctcagcaactggtgcggattcgatcagacaaagataatgatatacctatccggtacagcatcactggggtgggggccgaccagccgcctatggaggtcttctccatcgattcaatgtccggacgaatgtatgttactcgccccatggaccgagaggagcatgcaagttaccatcttcgggcccacgccgtggacatgaatggaaacaaggtggaaaatcccatagacctgtacatctacgtcattgacatgaatgataacagacccgagttcataaatcaggtgtacaacggcagcgtcgacgaggggtctaaacccggcacatacgttatgacagtcaccgccaatgatgctgatgatagcacaaccgcaaacggcatggtgaggtaccgaatagtcacacagacccctcagtctcccagccagaatatgttcacaattaattccgaaactggagatattgtgacagtggcagcaggacttgatagagaaaaggtgcagcagtatactgttatcgttcaggccactgacatggaaggcaatctaaattatggattgagtaatacggcgaccgccataatcacagtgactgacgtcaatgataaccccccagagtttaccgctagcacatttgccggtgaggtgccggagaatcgggtggaaacagtggtggcaaatctgactgtgatggatcgggatcagccacactcccctaattggaatgcagtgtaccggatcatcagcggtgatccttcaggtcacttctcagtacgcaccgatccagtcaccaacgaagggatggttactgtcgtgaaggcagtagactatgagctgaatcgcgccttcatgctgaccgtgatggtctccaatcaggctcccttggcatccgggattcagatgagttttcaaagcactgctggagtcacaataagtatcatggatattaatgaagctccttattttcccagcaaccacaagctgatccgactggaagaaggagtccctccgggaaccgtcctgacaacatttagcgccgttgatcccgataggtttatgcagcaagcggttagatatagcaaattaagcgacccagcttcatggcttcacatcaacgcgacaaacggtcagataaccaccgcggccgtgctggatagggagagtctctacacaaaaaacaacgtatatgaagcgacctttctggccgcagataatgggatcccgccggcttccggcaccggcacacttcaaatttacctcattgatattaacgacaacgccccagaattgcttccaaaagaagcacagatctgtgagaaacctaacttgaatgcaatcaatatcactgccgcagatgcagacgtagacccaaacattggcccttacgtttttgaactgccattcgtgccggcggcagtgaggaagaattggacaattaccagactgaacggggattacgctcagttgtctctccgcatcttgtacctcgaagcaggtatgtacgacgtgccaatcattgtcacagactcaggcaaccctcctttgtccaacacgtcaatcataaaagtgaaggtatgcccctgcgatgataatggggactgtactaccatcggagctgtagcagcagcggggctgggcacgggagcaatcgttgcaatcctaatttgtattctgattctcttgacgatggttctgctgtttgttatgtggatgaaacgccgcgagaaggaaagacatactaagcagctgctgattgatccagaggatgacgtaagagacaatatccttaaatatgatgaggagggcggcggggaggaggatcaagactacgatctgtctcagcttcagcagcctgaagccatgggacacgttccaagtaaggcgccaggcgtccgccgagttgatgaaaggcccgtgggagccgagccccaataccccattcgccccatggtaccccaccctggggacatcggagactttattaacgaggggctgcgggccgctgacaatgacccgaccgcccctccatatgatagcctgctggttttcgattacgaaggttcaggaagtacggcggggagcgtgagttcactaaactcctcctcaagcggcgatcaagattacgattatctgaatgattggggtccacgcttcaaaaagttggccgacatgtacggggggggggaggaagattag

SEQ ID NO: 88399 - DNA, 2529 bp, Artificial Sequence
  derived and/or modified sequence
atggacttcaaggtgggcgcagatggcaccgtgtttgccacccgggagctgcaggtgcccagcgagcaggtggccttcaccgtgacagcctgggacagccagacagctgagaagtgggatgctgtggtgcggctgctggtggcccagaccagcagcccccacagcggccacaagccccagaagggcaagaaggtggtggccctggaccccagccccccacccaaggacaccctgctgccctggccccagcaccagaatgccaacggcctgcggcggaggaagagggactgggtgatcccccccatcaacgtgcctgagaacagccggggccccttcccccagcagctggtgcgcatccgcagtgacaaggacaatgacatccccatccgctacagcatcaccggggtgggcgctgaccagccccccatggaggtgttcagcattgacagcatgagcggccgcatgtatgtgacccggcccatggaccgggaggagcacgccagctaccacctgcgggcccatgctgtggacatgaatggaaacaaggtggagaaccccatcgacctgtacatctacgtgattgacatgaatgacaacagacctgagttcatcaaccaggtgtacaatggatctgtggatgagggcagcaagccaggcacctacgtgatgacagtgacagccaatgatgctgatgacagcaccacagccaacggcatggtgcgctaccgcatcgtgacccagaccccccagagccccagccagaacatgttcaccatcaacagcgagactggagacatcgtgacagtggccgccggcctggaccgggagaaggtgcagcagtacaccgtcatcgtgcaggccacagacatggagggcaacctgaactacggcctgagcaacacagccacagccatcatcaccgtgacagatgtgaatgacaaccccccagagttcaccgccagcacctttgctggggaggtgcctgaaaatagagtggagaccgtggtggccaacctgactgtgatggaccgggaccagccccacagccccaactggaatgctgtgtaccgcatcatcagcggggaccccagcggccacttctctgtgaggacagatcctgtgaccaatgaaggcatggtgacagtggtgaaggctgtggactatgagctgaacagagccttcatgctgactgtgatggtgagcaaccaggcccccctggccagcggcatccagatgtccttccagagcacagctggggtgaccatcagcatcatggacatcaatgaggccccctacttccccagcaaccacaagctgatccggctggaggagggcgtgcccccaggcaccgtgctgaccaccttctctgctgtggaccctgaccgcttcatgcagcaggccgtgcgctacagcaagctgagtgaccctgcctcctggctgcacatcaatgccaccaacggccagatcaccacagctgctgtgctggaccgggagagcctgtacaccaagaacaacgtgtatgaggccaccttcctggccgctgacaatggcatccccccagccagcggcaccggcaccctgcagatctacctgattgacatcaatgacaatgcccctgagctgctgcccaaggaggcccagatctgtgagaagcccaacctgaatgccatcaacatcacagctgctgatgctgatgtggaccccaacatcggcccctacgtgtttgagctgccctttgtgcctgctgctgtgaggaagaactggaccatcacccggctgaatggagactatgcccagctgagcctgcgcatcctgtacctggaggccggcatgtatgatgtgcccatcatcgtgacagattctggcaacccccccctgagcaacaccagcatcatcaaggtgaaggtgtgcccctgtgatgacaacggggactgcaccaccatcggggctgtggccgccgccggcctgggcaccggggccatcgtggccatcctgatctgcatcctgatcctgctgaccatggtgctgctgtttgtgatgtggatgaagaggcgggagaaggagcggcacaccaagcagctgctgattgatcctgaagatgatgtgcgggacaacatcctgaagtatgatgaggagggcggcggggaggaggaccaggactatgacctgagccagctgcagcagcctgaggccatgggccacgtgcccagcaaggcccctggggtgagaagagtggatgagaggcctgtgggcgctgagccccagtaccccatccggcccatggtgccccaccctggggacatcggggacttcatcaatgaaggcctgcgggctgctgacaatgaccccacagccccaccctatgacagcctgctggtgtttgattatgagggcagcggcagcacagctggctctgtgagcagcctgaacagcagcagcagcggggaccaggactatgactacctgaatgactggggcccccgcttcaagaagctggccgacatgtatggaggaggagaggaggactag

SEQ ID NO: 88400 - DNA, 2529 bp, Artificial Sequence
  derived and/or modified sequence
atggacttcaaggtgggcgccgacggcaccgtgttcgccacccgggagctgcaggtgccttcggagcaggttgcctttactgtcaccgcctgggatagtcagacggccgagaagtgggacgcagtagtcagattactggtagcccagaccagctccccccatagcgggcataaaccacagaaaggaaaaaaggtggtcgcccttgacccctccccccctccaaaagatacacttctcccctggccacagcatcagaacgctaacggtcttagacggcgtaagagggattgggtgattcctcctattaatgtgccagaaaatagcagaggtccctttccacaacagttggtgcggattcggtccgacaaggacaacgatattcctatacgatatagcattaccggagtgggggccgatcagccgccgatggaagtgttttccatagatagcatgtctgggcgtatgtacgtcacgcgccccatggaccgtgaagaacatgcctcatatcacctgcgggctcatgccgttgacatgaacggcaacaaggtggagaatcctatcgatctttacatctacgtaatcgatatgaacgacaatagacctgaattcataaatcaggtttataacggttcagtcgatgaaggttctaagcctggaacttacgtaatgacagtcactgccaacgacgccgacgacagcaccacagcaaacggcatggtcagataccggatcgtcacacaaactccacagagccctagtcagaacatgttcacaatcaactcagaaaccggagacatcgtcactgtagccgccgggttggatcgagaaaaagtccagcagtatacagtgattgtgcaggctaccgatatggaagggaacttgaactacgggctatctaacacggctacagccattataaccgttactgacgttaatgacaacccgccagagttcacagcatccaccttcgcaggcgaagtcccagaaaatagggtcgagaccgtggtagccaacttaaccgtcatggaccgggatcagcctcactctccaaattggaacgccgtctatcgaattatcagcggagacccatctggacacttcagcgtgaggaccgatcccgttaccaatgaggggatggtcacggtggtgaaagccgtggactatgagctcaaccgtgcgtttatgctcacagttatggtttctaaccaggcccccctggcttcggggatccagatgtcatttcagagcactgctggcgtgacaatttccattatggacataaacgaagctccctacttcccctccaaccacaagctcataaggctggaagagggtgtgccacccggcacagtacttacaactttctctgccgtggatcctgaccgcttcatgcagcaggcagtgaggtactctaagctttctgatccagcctcttggctccacatcaatgctacaaatggccagattactaccgctgctgtattggatcgggaaagcctgtacaccaaaaacaacgtgtacgaagccacctttctggcagccgacaatgggatccctcctgccagcgggacgggtacccttcagatctacttgatcgacattaacgataacgccccagagctgctgcctaaggaagcgcagatttgcgaaaagcccaacctcaacgccatcaatattacggctgccgacgctgatgtggaccctaacataggtccatatgtttttgagttgcccttcgtgccagctgctgttcgtaaaaattggaccattacccgtcttaacggcgactatgctcagctgtcgcttagaatcctgtacctggaagcagggatgtacgacgtaccaataatcgtaaccgactccggcaaccctcccctgtcaaatacatccattattaaggtcaaggtttgtccctgcgatgacaatggagactgcaccacaatcggggctgtggctgctgccggtctcgggaccggagcgatagtggccattttgatatgtatcctgatcttgcttactatggttctcctattcgttatgtggatgaagcggcgcgaaaaagagcggcatactaagcagctgctgatcgaccctgaggatgatgtgcgtgacaatattcttaaatacgacgaggagggtggcggggaggaagatcaagactacgacctctcacagttgcagcaaccagaggctatgggtcatgttccaagcaaggctcccggcgtgagacgggtggacgagcgccccgtcggggccgaaccccagtaccctattcgacccatggtaccccatcctggggatataggcgactttatcaacgaagggctcagagcagcggacaacgatccaactgcgcctccgtacgattcccttctggtattcgactacgagggttcggggagtactgccgggagtgtgtcttcgctgaacagttcctcctctggcgatcaggactacgactatctgaacgactggggacccagatttaaaaagctcgccgacatgtatgggggtggagaggaggactag

SEQ ID NO: 88401 - DNA, 2529 bp, Artificial Sequence
  derived and/or modified sequence
atggacttcaaagtgggcgctgatggcaccgtgtttgccactagggagttgcaggtacctagcgagcaggtagccttcaccgtcaccgcctgggactcccagactgctgaaaagtgggacgcagtggttcgcttgctggtggcacagacatcctccccacactcaggccataagcctcaaaaaggaaagaaagtcgttgcattggatccatccccaccacccaaagacacactgctgccctggccccaacaccaaaacgccaacggccttcgtcggaggaaaagggactgggtgattcctcccatcaacgtccctgagaattcacgcggaccattcccgcagcagcttgtgcgcatccggagcgataaggataatgacattcccattcgctactcaatcactggcgtcggagctgaccagcctccaatggaggttttctccattgactcaatgtcgggccgaatgtacgttacccgtcctatggaccgagaggaacatgcttcgtaccatttacgtgcccacgccgtcgacatgaacggaaataaggtagagaatccaatcgacttgtacatctacgtaatcgatatgaacgacaaccggcctgagttcatcaaccaggtctataatggaagcgtggatgagggttctaaacccggaacctacgtcatgaccgtgactgccaacgatgctgacgattcgacaaccgctaatgggatggtgagataccgcattgttactcagacgccacagagcccgtcacagaacatgtttacaattaattcagaaacaggtgacattgttaccgtggctgccggactggatcgcgaaaaagtgcagcagtatacagtgatcgtccaagccacagacatggagggtaatctgaattatggactgtcaaacactgccacagctattattaccgtgactgacgtcaacgataaccctccagagttcactgccagcactttcgctggcgaggtgccagagaatcgagtggagactgtggtggccaatctaacagtgatggaccgggatcagcctcacagtcccaactggaatgccgtgtaccggattatatcaggcgatcccagcggacattttagcgttaggactgatcccgttactaacgagggcatggtgactgtagtcaaggccgtggattacgaacttaatagagcttttatgttgactgttatggtctctaaccaggccccactggcaagtggaatccaaatgtccttccagagtacagctggcgttacaataagtattatggatattaatgaagccccatatttcccttcgaaccataagctgattcgattggaggagggagtgcctcccggtacggtgttgaccacattttccgcagttgacccggatcgattcatgcagcaggctgtccgttactctaagctttcagatcccgcaagctggctgcacataaacgccactaatggtcagatcactactgccgctgtgttggaccgcgaaagcctgtatacaaagaataatgtgtatgaggccacgtttctggcagctgacaacgggattccacccgcttccgggactggaactctgcaaatctacctcattgatattaatgataatgccccagagttgctgccaaaagaggcccagatatgtgagaagccgaacctgaatgccatcaatataacagcagcggacgctgatgtggaccccaatatcggcccatatgtgtttgagctgcccttcgtccctgctgccgtgagaaagaactggacgattaccagactcaacggggattacgcccagctgagcctgagaatactgtatcttgaagcaggaatgtatgatgtcccaataattgtcacagactctgggaatcccccactctcaaacaccagcattataaaggtcaaggtatgcccgtgtgacgataacggggactgcaccaccatcggagcggttgccgctgcagggctgggcaccggagccattgtggctatactgatctgcattctgattctactgaccatggtcctgctgtttgtgatgtggatgaagcgcagagagaaggagcggcacaccaagcagcttctgattgatcccgaggatgatgtacgggataatattctgaagtacgacgaggagggcggtggtgaggaagatcaagactatgacctcagtcaactccagcagccggaggccatggggcacgtgccttcaaaggcccctggtgtgcgaagggtcgatgagcggccagtgggcgctgagccccagtaccccattagacccatggtgccccaccccggtgacatcggggactttattaatgagggtctccgggctgccgacaacgaccccacagcgccaccctacgattcattgcttgtgtttgactacgagggaagcggcagtactgctggatctgtgtcttcattaaacagttcaagctctggcgatcaagattacgactatctcaacgactggggaccgagatttaaaaaactggcggacatgtacggcggtggcgaggaagattag

SEQ ID NO: 88402 - DNA, 3100 bp, Artificial Sequence
  derived and/or modified sequence
ttcttctttctccctctgccttaatgatgctgcccctttcctgttcctggttgaagctgaagcccgcttcccttcgccgcacacaacacaggagcaatcttctcagccgtgcactcacagcttggaaaataaagggaggaaggagtcccagccacagggtagaggaacggcctctccacagagaagctgctgctgctgagctgaagtgacagtcaagttcagcagctgtgtggggaccaaggggacacaatatgagaccaacagcatggacttcaaagttggggcagatgggacagtcttcgccacccgggagctgcaggtcccctccgagcaggtggcgttcacggtgactgcatgggacagccagacagcagagaaatgggacgccgtggtgcggttgctggtggcccagacctcgtccccgcactctggacacaagccgcagaaaggaaagaaggtcgtggctctggacccctctccgcctccgaaggacaccctgctgccgtggccccagcaccagaacgccaacgggctgaggcggcgcaaacgggactgggtcatcccgcccatcaacgtgcccgagaactcgcgcgggcccttcccgcagcagctcgtgaggatccggtccgacaaagacaatgacatccccatccggtacagcatcacgggagtgggcgccgaccagccccccatggaggtcttcagcattgactccatgtccggccggatgtacgtcacaaggcccatggaccgggaggagcacgcctcttaccacctccgagcccacgctgtggacatgaatggcaacaaggtggagaaccccatcgacctgtacatctacgtcatcgacatgaatgacaaccgccctgagttcatcaaccaggtctacaacggctccgtggacgagggctccaagccaggcacctacgtgatgaccgtcacggccaacgatgctgacgacagcaccacggccaacgggatggtgcggtaccggatcgtgacccagaccccacagagcccgtcccagaatatgttcaccatcaacagcgagactggagatatcgtcacagtggcggctggcctggaccgagagaaagttcagcagtacacagtcatcgttcaggccacagatatggaaggaaatctcaactatggcctctcaaacacagccacagccatcatcacggtgacagatgtgaatgacaacccgccagaatttaccgccagcacgtttgcaggggaggtccccgaaaaccgcgtggagaccgtggtcgcaaacctcacggtgatggaccgagatcagccccactctccaaactggaatgccgtttaccgcatcatcagtggggatccatccgggcacttcagcgtccgcacagaccccgtaaccaacgagggcatggtcaccgtggtgaaggcagtcgactacgagctcaacagagctttcatgctgacagtgatggtgtccaaccaggcgcccctggccagcggaatccagatgtccttccagtccacggcaggggtgaccatctccatcatggacatcaacgaggctccctacttcccctcaaaccacaagctgatccgcctggaggagggcgtgccccccggcaccgtgctgaccacgttttcagctgtggaccctgaccggttcatgcagcaggctgtgagatactcaaagctgtcagacccagcgagctggctgcacatcaatgccaccaacggccagatcaccacggcggcagtgctggaccgtgagtccctctacaccaaaaacaacgtctacgaggccaccttcctggcagctgacaatgggatacccccggccagcggcaccgggaccctccagatctatctcattgacatcaacgacaacgcccctgagctgctgcccaaggaggcgcagatctgcgagaagcccaacctgaacgccatcaacatcacggcggccgacgctgacgtcgaccccaacatcggcccctacgtcttcgagctgccctttgtcccggcggccgtgcggaagaactggaccatcacccgcctgaacggtgactatgcccaactcagcttgcgcatcctgtacctggaggccgggatgtatgacgtccccatcatcgtcacagactctggaaaccctcccctgtccaacacgtccatcatcaaagtcaaggtgtgcccatgtgatgacaacggggactgcaccaccattggcgcagtggcagcggctggtctgggcaccggtgccatcgtggccatcctcatctgcatcctcatcctgctgaccatggtcctgctgtttgtcatgtggatgaagcggcgagagaaggagcgccacacgaagcagctgctcattgaccccgaggacgacgtccgcgacaacatcctcaagtatgacgaggaaggcggtggcgaggaggaccaggactacgacctcagccagctgcagcagccggaagccatggggcacgtgccaagcaaagcccctggcgtgcgtcgcgtggatgagcggccggtgggcgctgagccccagtacccgatcaggcccatggtgccgcacccaggcgacatcggtgacttcatcaatgagggactccgcgctgctgacaacgaccccacggcacccccctatgactccctgctggtcttcgactacgaggggagcggctccaccgcaggctccgtcagctccctgaactcatccagttccggggaccaagactacgattacctcaacgactgggggcccagattcaagaagctggcggacatgtatggaggtggtgaagaggattgactgacctcgcatcttcggaccgaagtgagagccgtgctcggacgccggaggagcaggactgagcagaggcggccggtcttcccgactccctgcggctgtgtccttagtgctgttaggaggccccccaatccccacgttgagctgtctagcatgagcacccacccccacagcgccctgcacccggccgctgcccagcaccgcgctggctggcactgaaggacagcaagaggcactctgtcttcacttgaatttcctagaacagaagcactgtttttaaaaaaaaaaaaaaaaaaagaagaaagaaag

SEQ ID NO: 88403 - DNA, 2529 bp, Artificial Sequence
  derived and/or modified sequence
atggacttcaaggtgggcgccgacggcaccgtgttcgccaccagagagctgcaggtgcccagcgagcaggtggccttcaccgtgaccgcctgggacagccagaccgccgagaagtgggacgccgtggtgagactgctggtggcccagaccagcagcccccacagcggccacaagccccagaagggcaagaaggtggtggccctggaccccagccccccccccaaggacaccctgctgccctggccccagcaccagaacgccaacggcctgagaagaagaaagagagactgggtgatcccccccatcaacgtgcccgagaacagcagaggccccttcccccagcagctggtgagaatcagaagcgacaaggacaacgacatccccatcagatacagcatcaccggcgtgggcgccgaccagccccccatggaggtgttcagcatcgacagcatgagcggcagaatgtacgtgaccagacccatggacagagaggagcacgccagctaccacctgagagcccacgccgtggacatgaacggcaacaaggtggagaaccccatcgacctgtacatctacgtgatcgacatgaacgacaacagacccgagttcatcaaccaggtgtacaacggcagcgtggacgagggcagcaagcccggcacctacgtgatgaccgtgaccgccaacgacgccgacgacagcaccaccgccaacggcatggtgagatacagaatcgtgacccagaccccccagagccccagccagaacatgttcaccatcaacagcgagaccggcgacatcgtgaccgtggccgccggcctggacagagagaaggtgcagcagtacaccgtgatcgtgcaggccaccgacatggagggcaacctgaactacggcctgagcaacaccgccaccgccatcatcaccgtgaccgacgtgaacgacaacccccccgagttcaccgccagcaccttcgccggcgaggtgcccgagaacagagtggagaccgtggtggccaacctgaccgtgatggacagagaccagccccacagccccaactggaacgccgtgtacagaatcatcagcggcgaccccagcggccacttcagcgtgagaaccgaccccgtgaccaacgagggcatggtgaccgtggtgaaggccgtggactacgagctgaacagagccttcatgctgaccgtgatggtgagcaaccaggcccccctggccagcggcatccagatgagcttccagagcaccgccggcgtgaccatcagcatcatggacatcaacgaggccccctacttccccagcaaccacaagctgatcagactggaggagggcgtgccccccggcaccgtgctgaccaccttcagcgccgtggaccccgacagattcatgcagcaggccgtgagatacagcaagctgagcgaccccgccagctggctgcacatcaacgccaccaacggccagatcaccaccgccgccgtgctggacagagagagcctgtacaccaagaacaacgtgtacgaggccaccttcctggccgccgacaacggcatcccccccgccagcggcaccggcaccctgcagatctacctgatcgacatcaacgacaacgcccccgagctgctgcccaaggaggcccagatctgcgagaagcccaacctgaacgccatcaacatcaccgccgccgacgccgacgtggaccccaacatcggcccctacgtgttcgagctgcccttcgtgcccgccgccgtgagaaagaactggaccatcaccagactgaacggcgactacgcccagctgagcctgagaatcctgtacctggaggccggcatgtacgacgtgcccatcatcgtgaccgacagcggcaacccccccctgagcaacaccagcatcatcaaggtgaaggtgtgcccctgcgacgacaacggcgactgcaccaccatcggcgccgtggccgccgccggcctgggcaccggcgccatcgtggccatcctgatctgcatcctgatcctgctgaccatggtgctgctgttcgtgatgtggatgaagagaagagagaaggagagacacaccaagcagctgctgatcgaccccgaggacgacgtgagagacaacatcctgaagtacgacgaggagggcggcggcgaggaggaccaggactacgacctgagccagctgcagcagcccgaggccatgggccacgtgcccagcaaggcccccggcgtgagaagagtggacgagagacccgtgggcgccgagccccagtaccccatcagacccatggtgccccaccccggcgacatcggcgacttcatcaacgagggcctgagagccgccgacaacgaccccaccgcccccccctacgacagcctgctggtgttcgactacgagggcagcggcagcaccgccggcagcgtgagcagcctgaacagcagcagcagcggcgaccaggactacgactacctgaacgactggggccccagattcaagaagctggccgacatgtacggcggcggcgaggaggactag

SEQ ID NO: 88404 - protein, 824 aa, Artificial Sequence
  derived and/or modified sequence
MPKSTGMLHGGRENAGVKFSSCVGTKGTQYETSSPHSGHKPQKGKKVVALDPSPPPKDTLLPWPQHQNANGLRRRKRDWVIPPINVPENSRGPFPQQLVRIRSDKDNDIPIRYSITGVGADQPPMEVFSIDSMSGRMYVTRPMDREEHASYHLRAHAVDMNGNKVENPIDLYIYVIDMNDNRPEFINQVYNGSVDEGSKPGTYVMTVTANDADDSTTANGMVRYRIVTQTPQSPSQNMFTINSETGDIVTVAAGLDREKVQQYTVIVQATDMEGNLNYGLSNTATAIITVTDVNDNPPEFTASTFAGEVPENRVETVVANLTVMDRDQPHSPNWNAVYRIISGDPSGHFSVRTDPVTNEGMVTVVKAVDYELNRAFMLTVMVSNQAPLASGIQMSFQSTAGVTISIMDINEAPYFPSNHKLIRLEEGVPPGTVLTTFSAVDPDRFMQQAVRYSKLSDPASWLHINATNGQITTAAVLDRESLYTKNNVYEATFLAADNGIPPASGTGTLQIYLIDINDNAPELLPKEAQICEKPNLNAINITAADADVDPNIGPYVFELPFVPAAVRKNWTITRLNGDYAQLSLRILYLEAGMYDVPIIVTDSGNPPLSNTSIIKVKVCPCDDNGDCTTIGAVAAAGLGTGAIVAILICILILLTMVLLFVMWMKRREKERHTKQLLIDPEDDVRDNILKYDEEGGGEEDQDYDLSQLQQPEAMGHVPSKAPGVRRVDERPVGAEPQYPIRPMVPHPGDIGDFINEGLRAADNDPTAPPYDSLLVFDYEGSGSTAGSVSSLNSSSSGDQDYDYLNDWGPRFKKLADMYGGGEED

SEQ ID NO: 88405 - protein, 153 aa, Artificial Sequence
  derived and/or modified sequence
VDMDGVLADFEAGLLRGFRRRFPEEPHVPLEQRRGFLAREQYRALRPDLADKVASVYEAPGFFLDLEPIPGALDAVREMNDLPDTQVFICTSPLLKYHHCVGEKEETPSWEHILFTCCHNRHLVLPPTRRRLLSWSDNWREILDSKRGAAQRE

SEQ ID NO: 88406 - DNA, 462 bp, Artificial Sequence
  derived and/or modified sequence
gtggatatggatggggtgctagccgacttcgaagctggcctgctgagaggttttcggcgccgtttcccagaggagccacatgtgcccttagagcaacgacgaggtttcttggccagggaacaatatagagctcttaggcccgatctggcggataaggtcgcttccgtgtatgaggctccaggcttcttcctggatctggagcctatccctggggcactcgatgcggtgcgggaaatgaatgacctacccgatacccaagtctttatttgcacttcgccactgctaaaataccaccattgcgtgggggaaaaggaggaaacgccctcctgggagcatatcctgttcacctgctgccataatcggcacctggtgttgcctccgaccaggaggagattgctgtcttggtctgataactggcgggagattctagactcaaagcggggcgccgctcagagagaatag

SEQ ID NO: 88407 - DNA, 462 bp, Artificial Sequence
  derived and/or modified sequence
gtggacatggatggagtgctggccgactttgaggccggcctgctgcggggcttcagaagacgcttccctgaggagccccacgtgcccctggagcagaggcggggcttcctggcccgggagcagtaccgggccctgcggccagacctggccgacaaggtggcctctgtgtatgaggcccctggcttcttcctggacctggagcccatccctggggccctggatgctgtgcgggagatgaatgacctgcctgacacccaggtgttcatctgcaccagccccctgctgaagtaccaccactgtgtgggggagaaggaggagacccccagctgggagcacatcctcttcacctgctgccacaacagacacctggtgctgccccccacccggcggcggctgctgtcctggagcgacaactggagggagatcctggacagcaagagaggagctgcccagcgggagtag

SEQ ID NO: 88408 - DNA, 462 bp, Artificial Sequence
  derived and/or modified sequence
gtggacatggacggcgtgctggccgacttcgaggccggcctgctgcgtgggttcagaaggaggtttcctgaagaaccccatgtgccattagaacaaagacgcggattcctggcacgggagcagtatagagcccttaggcccgatctggcagacaaggtcgcttcagtgtacgaggcccccggatttttccttgatcttgagccgattcctggagccttggatgcagtcagggaaatgaacgacttgccagatactcaggtttttatttgtacctcccctcttcttaagtatcaccactgtgttggcgaaaaggaggagacgcccagctgggaacacattctgtttacatgttgccacaatcgacacttggttctgccccctacaagacgcaggctgctctcctggtcggataactggcgagagatcttggacagcaagaggggcgccgcccaaagggagtag

SEQ ID NO: 88409 - DNA, 462 bp, Artificial Sequence
  derived and/or modified sequence
gttgatatggacggggttctagccgacttcgaagctggcctgctccggggatttaggagacgcttccccgaagaacctcacgtcccactcgaacagcgcaggggcttcttggctagggagcagtatagagctctgaggcccgatttggctgacaaggttgcctctgtatacgaggctccagggttctttctggacctggaacccatccccggtgccctggacgctgtacgggaaatgaacgatctgcctgatacccaggtcttcatttgcaccagccctctacttaagtaccaccattgcgtgggtgagaaagaggagaccccttcctgggagcatatccttttcacttgttgccacaatcggcaccttgttctgcccccaacccgccgtcggctgctttcatggtccgacaattggagagaaatcttggattctaagaggggagccgctcagagggagtag

SEQ ID NO: 88410 - DNA, 720 bp, Artificial Sequence
  derived and/or modified sequence
gtggacatggacggcgtcctggccgacttcgaggccggcctcctgcggggcttccgccgccgcttccctgaggagccgcacgtgccgctggagcaacgccgcggcttcctggcccgcgagcagtaccgcgccctgcggcccgacctggcggataaagtggccagtgtgtacgaagccccgggctttttcctggacctggagcccatcccgggagccttggacgctgtgcgggagatgaacgacctaccggacacgcaggtcttcatctgcaccagccccctgctgaagtaccaccactgtgtgggtgagaaggaggagaccccaagctgggagcacatcttgttcacctgctgccacaatcggcacctggtcctgcccccgacaaggagacggctgctctcctggagtgacaactggagggagatcttagatagcaagcgcggagctgcgcagcgggaatgagcggggatgccgcgggcagcagctggagctaaaggaagggcaggcccacaggggccaccgcagagccgagtcggggcggcatcgtgctggtgcctctggccccgtggagtggagcaggcagataccgttaagcgctgtgctaccgggccccaggcccagccacccggtacctcccgagaggctgtccctggaccctggctggcatggaaatacagtgggaaaaccagtcgggacctttaataaaagaccttggctttc

SEQ ID NO: 88411 - DNA, 462 bp, Artificial Sequence
  derived and/or modified sequence
gtggacatggacggcgtgctggccgacttcgaggccggcctgctgagaggcttcagaagaagattccccgaggagccccacgtgcccctggagcagagaagaggcttcctggccagagagcagtacagagccctgagacccgacctggccgacaaggtggccagcgtgtacgaggcccccggcttcttcctggacctggagcccatccccggcgccctggacgccgtgagagagatgaacgacctgcccgacacccaggtgttcatctgcaccagccccctgctgaagtaccaccactgcgtgggcgagaaggaggagacccccagctgggagcacatcctgttcacctgctgccacaacagacacctggtgctgccccccaccagaagaagactgctgagctggagcgacaactggagagagatcctggacagcaagagaggcgccgcccagagagagtag

SEQ ID NO: 88412 - DNA, 2519 bp, Artificial Sequence
  derived and/or modified sequence
gcggcggggctgaggcgctgaggcggccgtggcggcggcggcggcggcggcggcagcggcggccaagcggccaggttggcggccggggctccgggccgcgcgaggccacggccacgccgcgccgctgcgcacaaccaacgaggcagagcgccgcccggcgcgagactgcggccgaagcgtggggcgcgcgtgcggaggaccaggcgcggcgcggctgcggctgagcataattgatatactgtggttactctacctatttgtgtaggcctctcaggtcattgaaacaagatgttgtacaaattagcagatgacactggcgcatggaggaatggtttgtattttaattttcactgtataacattttagtaaagcttttactgcaggtagtgtatattttgagaacagcgtgaggtttattctactaatggaaatttacaaaaataccagtttgaatgattgagaaatctaagttaaagaacccttgaatagaaatgtcgctgttcagtgcgttgatcgattctcacatctgaagccagctgtgtattcttgagtggagcctttcaggctggcatggagagcttaaggggcaactgaaggagacacactggccaagcgcggagttctgcttacttcagtcctgctgagatactctctcagtccgctcgcaccgaaggaagctgccttgggatcagagcagacataaagctagaaaaatttcaaggaagctgtcagtgtggtgttgggcctgattgattcgcatcagctcaggtggcgtcctattggaaggtcggcagtgggagagcagctggccagttcctcccgcctgcaaggcaggggagtgtacaaggtgtgtaccccaggggcaggatgctaacactgcactgactgagaaaagaatttgtcttacctgtacctgacaggtgtgtacctgaaagagatgaaattgaaatggccaatgagcacaccctcattcatccagcgagcattgaggaccccctagaggccaggcccatgagtgatgaagatcccgaggatgaagacgccttgccagccaggtggaagaaagaaatgggaagaaaaaggaagagaaccatagctacgttgtgagggcattgcttcaactctggtaacttcatgtgaaatgactacaaaatgaattaatatgcagtaagagagccagtgccccaccagggcacctttccacttgctggcacacagatttaccacaattaggatactgcttgtcctgtcatgccgggagagtctaaattactctgactttcaagaaaccaaaaatatgcatttttgatgttaggaagatttactgtgcattgggctgtgtcatttgatgaggaaaaaaccaaatgatctctttatgaaaatgaagaattgtagcctgtggaggtgaccaaggaaccagatcccaagaggcctctgccactgaaaggagatttttattacttgcgtttcctagacgggggggcactcgcgccaagcaggcccacggggcacactggtgtcagtcaaggggcagaaaggagccacaggaaagcccaggacagagcctgagtggggtttctgtgggaaaggcagggcagggcacccgtgtaggaatggctagtgtgaacagttccagtgggccctgggctgtaggagagatcactagctgcctgctaccaggccctggggtgatttcgggcaggcgggcagttagataagggaggtgggtagagccgaccacctgcctggaaccctgtgctggctataagccctgggagggccagtctctccctgtgtctgtaaggcccacaaatgccaaagcattaggaataagaaaatggacgtaatagaattgatcctgtgaggactggatgcctaactgccacatacagaatgtgagaaagcacagaacaactgccttcattgacaagatggtgcccagagctcaagacaggcacacagcaggaggatgccggcaggatccctcaacaagcttaccgtggtatctttcacaatgttaactgtcatcccagatgaacttttaatgacagtgtatctctgaagattgtgcttttagcgtattttcacttaaagtcatatctcatttagtagacctgccagattcctgaaaagttacacacaagccagctgacatgacctttgccagtcatgttgaccacgttctcaccgagctgtggactcctcactaggagcctttacctacggccagatggctgttgtcactgcctgtggtggggttacggtttcggactcacctgatccgttctgccgggattacctacggccagatggctgttgtcactgcctgtggtggggttatggtttcggacttacctgatccgttctgccgggattacctacggccagatggctgttgtcactgcctgtggtggggttatggtttcggacgcacctgatccgttctgccgggattttaaagtatgggagtttaggcatactttgcaagttgtttcttgaatatacttttctgaattatg

SEQ ID NO: 88413 - protein, 635 aa, Artificial Sequence
  derived and/or modified sequence
MEGRGPYRIYDPGGSVPSGEASAAFERLVKENSRLKEKMQGIKMLGELLEESQMEATRLRQKAEELVKDNELLPPPSPSLGSFDPLAELTGKDSNVTASPTAPACPSDKPAPVQKPPSSGTSSEFEVVTPEEQNSPESSSHANAMALGPLPREDGNLMLHLQRLETTLSVCAEEPDHGQLFTHLGRMALEFNRLASKVHKNEQRTSILQTLCEQLRKENEALKAKLDKGLEQRDQAAERLREENLELKKLLMSNGNKEGASGRPGSPKMEGTGKKAVAGQQQASVTAGKVPEVVALGAAEKKVKMLEQQRSELLEVNKQWDQHFRSMKQQYEQKITELRQKLADLQKQVTDLEAEREQKQRDFDRKLLLAKSKIEMEETDKEQLTAEAKELRQKVKYLQDQLSPLTRQREYQEKEIQRLNKALEEALSIQTPPSSPPTAFGSPEGAGALLRKQELVTQNELLKQQVKIFEEDFQRERSDRERMNEEKEELKKQVEKLQAQVTLSNAQLKAFKDEEKAREALRQQKRKAKASGERYHVEPHPEHLCGAYPYAYPPMPAMVPHHGFEDWSQIRYPPPPMAMEHPPPLPNSRLFHLPEYTWRLPCGGVRNPNQSSQVMDPPTARPTEPEPADLRLPRN

SEQ ID NO: 88414 - DNA, 1908 bp, Artificial Sequence
  derived and/or modified sequence
atggagggcagaggcccctacagaatctacgaccccggcggcagcgtgcccagcggcgaggccagcgccgccttcgagagactggtgaaggagaacagcagactgaaggagaagatgcagggcatcaagatgctgggcgagctgctggaggagagccagatggaggccaccagactgagacagaaggccgaggagctggtgaaggacaacgagctgctgcccccccccagccccagcctgggcagcttcgaccccctggccgagctgaccggcaaggacagcaacgtgaccgccagccccaccgcccccgcctgccccagcgacaagcccgcccccgtgcagaagccccccagcagcggcaccagcagcgagttcgaggtggtgacccccgaggagcagaacagccccgagagcagcagccacgccaacgccatggccctgggccccctgcccagagaggacggcaacctgatgctgcacctgcagagactggagaccaccctgagcgtgtgcgccgaggagcccgaccacggccagctgttcacccacctgggcagaatggccctggagttcaacagactggccagcaaggtgcacaagaacgagcagagaaccagcatcctgcagaccctgtgcgagcagctgagaaaggagaacgaggccctgaaggccaagctggacaagggcctggagcagagagaccaggccgccgagagactgagagaggagaacctggagctgaagaagctgctgatgagcaacggcaacaaggagggcgccagcggcagacccggcagccccaagatggagggcaccggcaagaaggccgtggccggccagcagcaggccagcgtgaccgccggcaaggtgcccgaggtggtggccctgggcgccgccgagaagaaggtgaagatgctggagcagcagagaagcgagctgctggaggtgaacaagcagtgggaccagcacttcagaagcatgaagcagcagtacgagcagaagatcaccgagctgagacagaagctggccgacctgcagaagcaggtgaccgacctggaggccgagagagagcagaagcagagagacttcgacagaaagctgctgctggccaagagcaagatcgagatggaggagaccgacaaggagcagctgaccgccgaggccaaggagctgagacagaaggtgaagtacctgcaggaccagctgagccccctgaccagacagagagagtaccaggagaaggagatccagagactgaacaaggccctggaggaggccctgagcatccagaccccccccagcagcccccccaccgccttcggcagccccgagggcgccggcgccctgctgagaaagcaggagctggtgacccagaacgagctgctgaagcagcaggtgaagatcttcgaggaggacttccagagagagagaagcgacagagagagaatgaacgaggagaaggaggagctgaagaagcaggtggagaagctgcaggcccaggtgaccctgagcaacgcccagctgaaggccttcaaggacgaggagaaggccagagaggccctgagacagcagaagagaaaggccaaggccagcggcgagagataccacgtggagccccaccccgagcacctgtgcggcgcctacccctacgcctacccccccatgcccgccatggtgccccaccacggcttcgaggactggagccagatcagatacccccccccccccatggccatggagcaccccccccccctgcccaacagcagactgttccacctgcccgagtacacctggagactgccctgcggcggcgtgagaaaccccaaccagagcagccaggtgatggacccccccaccgccagacccaccgagcccgagcccgccgacctgagactgcccagaaactag

SEQ ID NO: 88415 - DNA, 1908 bp, Artificial Sequence
  derived and/or modified sequence
atggaggggcggggaccatacaggatctatgacccaggtggttcagtaccatcgggtgaggctagcgcagcatttgagcgccttgttaaggaaaacagcagattgaaagaaaaaatgcaggggatcaagatgctcggggagttgttagaagagtcacagatggaggccaccaggctcagacaaaaggcagaggagttggtgaaggataacgaattgctgccgcccccaagcccctccctcggcagcttcgatccgctggcagagctgaccggcaaagactctaacgttacagcatctcccactgccccagcctgccccagcgataagcctgcccctgtccagaagcctcccagcagcggtacatcttccgagttcgaggtggtaacccctgaggagcagaactcgccagagagtagcagccacgcgaatgctatggctttaggtcctctgccaagagaggatggcaacctcatgctgcacttgcagaggctggaaactacattgagtgtgtgcgcggaggagcccgatcacggtcagctgtttactcatctcggtaggatggccttggaatttaaccgcctggcgtccaaggtgcacaagaacgagcagaggacctccatactgcaaactctgtgtgaacagctccggaaggagaatgaagccttgaaggccaaacttgacaagggcctggagcagcgtgatcaagctgccgagcgcttacgcgaagagaatctggagttgaaaaagctgttaatgagtaacggtaacaaggaaggtgcctccggccgaccggggtcacccaagatggagggaaccggtaagaaagccgtggcagggcagcaacaggcatcagtgaccgcaggaaaagtccccgaagttgttgccctcggtgcggccgagaagaaagtgaaaatgctcgagcagcaaagaagcgagctcttagaagtgaacaagcagtgggaccagcattttagaagtatgaagcagcagtatgagcagaaaattacagagctcaggcaaaaacttgctgacctgcaaaaacaagtgacagacttggaagccgagcgggagcaaaagcagcgcgatttcgacagaaaattacttctggccaaatctaaaattgaaatggaagagacagataaggaacagttaaccgcggaagcaaaagagctgcggcaaaaggtgaaatatttgcaggaccagttatcacctttgactcgccaacgtgagtaccaggagaaggagatccagcggctcaacaaggctctggaggaggccctgtctattcagacccctccgtcctccccccccacagcttttggcagccctgaaggagcgggagctttgctgcggaaacaggagttggtcacccagaatgagctgctaaagcagcaggtcaagatttttgaagaggacttccagcgcgagagaagcgatcgggagcgaatgaacgaggaaaaagaagaactgaagaagcaagtcgagaagttacaagctcaggtaactctgtctaatgcgcaattaaaagccttcaaggatgaggagaaggcccgcgaggcattgcgacagcagaaacggaaagccaaggcgtccggcgaacgctaccacgtggagccacaccccgagcacttgtgtggcgcctatccctacgcctatccccctatgcctgccatggtgccccatcacggatttgaggattggtcacaaattcggtatcccccacctcctatggctatggaacacccacctccgctgccaaacagcaggctgtttcacctccccgaatatacgtggcggttaccttgcggtggcgttcggaatccaaatcagtcttctcaagtgatggacccacctactgcaagaccaaccgagcccgagcctgcagacctgcgcctccccaggaattag

SEQ ID NO: 88416 - DNA, 1908 bp, Artificial Sequence
  derived and/or modified sequence
atggagggaaggggcccctatcgcatatatgaccctgggggatccgtaccgagtggcgaagcaagcgcagcctttgagaggctggtgaaagaaaactcccgcctcaaggaaaaaatgcagggcatcaaaatgctgggagagctcctcgaagaatcacagatggaggccacccgactacgccagaaagccgaagaactggtcaaagataacgaactgcttccacctcccagcccaagcctaggtagtttcgaccctctcgctgagctgactggcaaggactctaatgtgaccgcttcacccactgctcccgcatgcccatccgataaacccgcccctgtacagaagccgccaagctctggtacctcctccgaattcgaagtggtgacccctgaggaacagaacagtccagaaagttcgagtcacgccaatgctatggccctgggcccgctgcccagagaggatggcaacctgatgctgcacctgcagcgacttgagacaactctgtctgtctgtgctgaggaacccgaccacggccagctgtttacccatctcggccggatggctctagaatttaatagactggcttccaaggttcataagaatgagcagcgcacttcaatactgcagacactctgcgagcagctccggaaggagaacgaggctctgaaggccaaacttgacaaagggctggaacagagagaccaggcagcagagcggctccgggaggagaatctggagctgaagaagctgctgatgagcaacggaaataaagagggcgcgtctgggcggcctgggagcccaaaaatggaaggtacagggaagaaggccgtggcgggtcaacagcaggctagtgttacagctggaaaagtccctgaagtcgtggcccttggggccgccgagaagaaagtgaaaatgctggagcagcagcgcagtgaactgctcgaagtcaacaagcagtgggaccagcatttccgaagcatgaaacagcaatatgagcagaaaatcactgaacttcgccagaagctcgccgaccttcagaagcaggtaaccgatctagaggcagagagagaacagaaacaacgggactttgaccgcaaattactgctggctaaaagcaaaatcgagatggaagaaacagataaggaacagctgacagcagaagccaaggaactccgacagaaggtaaagtaccttcaggaccagctaagccccctgactaggcagagagaataccaggaaaaggaaattcagagattaaataaggctcttgaagaggccctgagcatccagacaccccctagcagcccacccaccgcgttcgggagtccagaaggagctggagcattgctgagaaaacaggaattggtcacacagaacgagctcctcaagcagcaggtgaagattttcgaggaggacttccagagggagcgctcagacagagagcgaatgaatgaagagaaggaggaactgaagaagcaggttgagaaactgcaggctcaagtaaccttatccaacgcccagttaaaggcatttaaggatgaggaaaaagcccgggaagccctccgccagcaaaagcgaaaggcgaaagcctcaggcgaaaggtatcacgtggagcctcatcctgaacacctgtgtggcgcctatccatatgcatacccccccatgcctgctatggtgccccaccacggtttcgaagactggtctcagatccggtatcctccaccaccaatggcgatggaacatccacctccactgccaaattcccgcctgttccacctgcccgagtacacctggcggctcccctgcggaggtgttcgtaacccaaatcagagttctcaggtcatggatccacccaccgctaggccgactgagcctgagcccgcagatcttaggctgccacggaattag

SEQ ID NO: 88417 - DNA, 1908 bp, Artificial Sequence
  derived and/or modified sequence
atggagggccggggcccctaccgcatctatgaccccggcggctctgtgcccagcggggaggccagcgctgcctttgagcggctggtgaaggagaacagccggctgaaggagaagatgcagggcatcaagatgctgggggagctgctggaggagagccagatggaggccacccggctgcggcagaaggccgaggagctggtgaaggacaatgagctgctgcccccacccagccccagcctgggcagctttgaccccctggccgagctgaccgggaaggacagcaatgtgacagccagccccacagccccagcctgccccagcgacaagccagcccctgtgcagaagccacccagcagcggcaccagcagcgagtttgaggtggtgaccccagaggagcagaacagccctgagagcagcagccacgccaatgccatggccctgggccccctgcccagagaagatggcaacctgatgctgcacctgcagaggctggagaccaccctgtctgtgtgtgccgaggagccagaccacggccagctgttcacccacctgggccgcatggccctggagttcaaccggctggccagcaaggtgcacaagaatgagcagaggaccagcatcctgcagaccctgtgtgagcagctgaggaaagaaaatgaggccctgaaggccaagctggacaagggcctggagcagagggaccaggccgctgagcggctgcgggaggagaacctggagctgaagaagctgctgatgagcaatggaaacaaggagggcgccagcggccggcccggcagccccaagatggagggcaccgggaagaaggctgtggccggccagcagcaggcctctgtgacagctgggaaggtgcctgaggtggtggccctgggcgctgctgagaagaaggtgaagatgctggagcagcagaggtctgagctgctggaggtgaacaagcagtgggaccagcacttccgctccatgaagcagcagtatgagcagaagatcacagagctgcggcagaagctggccgacctgcagaagcaggtgacagacctggaggccgagcgggagcagaagcagagggactttgacaggaagctgctgctggccaagagcaagattgagatggaggagacagacaaggagcagctgacagctgaggccaaggagctgcggcagaaggtgaagtacctgcaggaccagctgagccccctgacccggcagcgggagtaccaggagaaggagatccagaggctgaacaaggccctggaggaggccctgagcatccagaccccacccagcagccccccaacagccttcggcagccctgagggcgctggggccctgctgaggaagcaggagctggtgacccagaatgagctgctgaagcagcaggtgaagatctttgaggaggacttccagcgggagaggagtgaccgggagaggatgaatgaggagaaggaggagctgaagaagcaggtggagaagctgcaggcccaggtgaccctgagcaatgcccagctgaaggccttcaaggatgaggagaaggcccgggaggccctgcggcagcagaagaggaaggccaaggccagcggggagcgctaccacgtggagccccaccctgagcacctgtgtggggcctacccctatgcctacccacccatgcctgccatggtgccccaccacggctttgaggactggagccagatccgctacccacctccacccatggccatggagcaccccccacccctgcccaacagccgcctcttccacctgcctgagtacacctggaggctgccctgtggcggcgtgaggaaccccaaccagagcagccaggtgatggaccccccaacagcccggcccacagagcctgagcctgctgacctgcggctgcccaggaactag

SEQ ID NO: 88418 - DNA, 1908 bp, Artificial Sequence
  derived and/or modified sequence
atggagggccggggcccctaccggatctacgaccccggcggcagcgtgccctccggcgaggcttccgccgctttcgagaggcttgttaaggagaattctaggctaaaggaaaagatgcagggaataaaaatgctcggggagttgcttgaggagagccagatggaagcaaccaggttaagacagaaagctgaagaactggtcaaagataacgagttgctgccccctcccagcccgtctctgggcagctttgatccactcgctgaactgacgggcaaggattctaacgtgacagcctctcctacagcacccgcctgccctagtgacaaaccggctcccgtccagaaaccccccagtagcggtacctcctcagaattcgaagtcgttacccctgaagagcaaaactcccctgagtcctcctctcatgccaatgcaatggcattggggccattacccagggaggacgggaacctgatgctgcacttacaacgccttgagaccacgctcagcgtttgcgcggaggagccggatcacggtcagttgtttacccaccttggaaggatggcactcgaattcaaccgcctcgccagtaaagtccataaaaatgaacagcgcacctccattctccaaactctgtgcgagcaactgaggaaggagaacgaggccctgaaggccaagctggataaaggcctagagcagagagaccaggcggctgagcggctccgggaagaaaacttagaactgaagaagctcctcatgagtaatgggaataaggagggggcctcaggccgcccaggatcacctaaaatggaggggacgggcaaaaaggcagttgccggtcagcagcaagcctccgttactgccggtaaagttcccgaagtagtggctctaggtgccgctgaaaagaaggtgaaaatgctagagcaacagagatcggagctgctggaagtaaataaacagtgggatcaacactttagatccatgaaacaacagtacgagcagaagatcacagaactgcggcagaagctcgctgatctccaaaagcaggtgactgatctggaagccgagcgcgagcagaaacaaagggatttcgatagaaagcttctcctggccaagagcaagattgaaatggaggaaaccgacaaagagcagttgaccgctgaggctaaagagcttcgacagaaggtgaaatatcttcaggatcagttatcacccctcacacggcagcgggagtaccaggagaaggagattcaaaggttaaataaagccctcgaagaagccttgagtatacaaactcccccctcctcccctcctactgctttcgggtctcccgagggagcaggcgctctgctccggaagcaggagctagtgactcagaatgagctgctaaagcagcaggtaaaaatattcgaggaagacttccagagagaacgatctgaccgggagcgtatgaacgaagaaaaagaagagcttaagaaacaagtagagaaactgcaagcccaagtgaccttgtcgaacgcccagttgaaggcttttaaggacgaagagaaagctagagaagcgctgagacagcaaaaacgaaaggccaaggcttctggcgaacggtaccatgtcgagcctcatccagagcacctttgtggcgcctacccctatgcttaccctcccatgcccgcaatggtgcctcatcacgggttcgaggattggtctcaaatcaggtaccctcctccacccatggccatggaacaccctccaccactgcctaatagtagactctttcaccttcccgaatacacctggcggctgccctgcggtggcgtgaggaatccaaaccagtcctcccaggtgatggatccgcccacagcccgaccaacagaacccgaacctgccgatctgcgcctgccacgcaactag

SEQ ID NO: 88419 - DNA, 1908 bp, Artificial Sequence
  derived and/or modified sequence
atggagggccggggcccctaccggatctacgaccccggcggcagcgtgcctagcggggaagcgtctgccgcatttgaacgcctggttaaggagaacagcaggctcaaagaaaagatgcaaggaatcaagatgttgggggagctgctggaagagagtcaaatggaggcaacaaggttaagacagaaggcagaggaactggtcaaggataatgaactgctgccccctccatctccgtccttgggcagcttcgatccgcttgccgaactgacaggcaaagattcgaatgtgaccgcatcgcctactgcgccagcttgtccctcagacaaacctgctcctgtacagaaacctcctagctctgggacctcctccgagtttgaggtcgtaactcctgaagagcagaactctcctgaatcctcctcacacgctaatgccatggctctaggacccctgcctagagaggacgggaacctcatgctccacctgcagagactggagaccacccttagcgtctgcgcagaggagcccgatcatgggcagctgttcacacacctcggacggatggccctcgagtttaatcgtttagcctccaaagtgcataaaaacgaacagagaactagcatacttcagactctctgtgagcagcttcggaaggaaaacgaagccctcaaggctaagttggataagggattggaacagagagaccaggctgcagagcggctgagggaggagaacctggagctgaaaaaactcttaatgtccaacggcaataaagagggcgcatctgggcggcccggatcccctaaaatggagggtaccggcaagaaagctgtggcgggacagcagcaggcttctgtcaccgctggtaaagtcccagaggtggtggccctgggcgctgccgagaagaaagtgaagatgttagaacagcagcgatccgagttactggaggtgaacaagcagtgggatcagcattttcgcagcatgaagcaacagtacgagcagaagatcaccgagctcaggcaaaagctagcagatctacagaaacaggtaacagacctggaagctgagagagaacagaagcagcgcgacttcgatagaaagttgttgcttgcaaagtccaaaattgaaatggaggagaccgacaaagaacaactgactgctgaagctaaggagttgcgccaaaaggtaaaatatctgcaggaccagttgtcccccctaacaaggcagagggaatatcaagagaaggaaattcagagactcaataaagccctggaggaggcactgtctatccaaactcccccctcctcaccccctacagccttcggcagcccagaaggcgccggtgccctcctccgcaaacaggaacttgttacccagaacgaactgctcaaacagcaggttaaaatctttgaggaggatttccagcgcgagcgcagcgatagagagcgaatgaacgaggaaaaggaagaactgaagaaacaggttgagaagctccaggcccaggtgacgctgtctaatgcccagctaaaggcgtttaaagacgaggaaaaggccagagaagctctgcgtcagcaaaagagaaaggcgaaggcttctggcgaacgataccatgtcgagccccaccccgagcacctctgcggtgcctacccctatgcataccctcctatgcctgccatggtccctcatcatggattcgaagactggagccagatcagataccctcctccccccatggccatggagcaccctcctccgctgccgaactcaaggctgtttcaccttcctgagtacacttggagactgccctgcggcggggtcaggaatcctaaccagagttctcaagtgatggaccctcctaccgcccgtccaaccgaaccagagccagccgatctccggctgccacgcaactag

SEQ ID NO: 88420 - DNA, 1908 bp, Artificial Sequence
  derived and/or modified sequence
atggaaggccgtggcccataccggatttacgatccaggaggatctgtgcccagtggagaggcctcagccgcttttgagcgtctcgttaaagaaaattcccgcctgaaagagaagatgcagggaatcaagatgctaggcgagcttctggaggaatcacagatggaagcaacacgactgagacaaaaggcagaagagctcgtgaaggataatgagctgttaccacctccttcgccttcgctgggcagctttgatcctctggccgagctgaccggcaaggatagcaacgtgaccgcttctcccacagccccagcctgtccttctgacaagcctgcacccgtgcaaaagcctcctagctctggaaccagctcagaattcgaggtggtgactccagaggaacagaacagccccgagtcttctagtcacgccaatgcaatggctctgggcccactgccacgagaagacgggaacttgatgctgcacctgcagcggttggagaccaccttgtctgtctgcgccgaggagcccgatcacggacagctgtttacgcacctgggtcggatggctctcgaattcaataggctggcttccaaagtgcataaaaatgaacagcggacaagcatactgcagacactatgtgagcagctcagaaaagaaaacgaggccctgaaagccaagctggataaaggcctggaacaacgagaccaggctgcagaaaggttgcgagaagaaaacttagaactgaagaaattgttgatgagtaacggcaacaaagagggcgcttcaggtcgccctggctctccaaagatggaagggactggaaagaaggctgttgcaggccaacagcaggcctccgtgactgcaggaaaagtaccagaagtcgtggccctcggcgctgccgaaaagaaggtgaaaatgctggagcaacaaagatctgagttgcttgaggtgaacaagcagtgggaccagcactttcggtcaatgaagcagcagtacgagcagaagataaccgagctgagacaaaagcttgcagatctgcagaagcaggtcaccgacctggaggcggaacgggaacaaaaacagagggacttcgacagaaagctgctactcgccaaatcaaagatcgagatggaggaaactgacaaggaacagctgactgctgaagctaaagagcttaggcagaaggtcaagtatctccaggaccagctcagtcctctgactcgtcagcgggaataccaggagaaagagattcaacgcttgaacaaagcactggaggaggcgttgtcaatacagacgcccccaagctcaccgccaaccgcctttggctcccctgaaggcgctggtgcactgctgaggaagcaagaacttgtgactcaaaacgaactgttgaaacagcaggtcaaaattttcgaggaggattttcagagggagcgatccgatcgtgaacgaatgaacgaggaaaaggaagagctgaagaaacaagttgagaagctgcaggcgcaggtgacattatcaaatgcgcagcttaaggcgtttaaagacgaagagaaggctagggaggccctacgtcagcagaagagaaaagctaaggcctctggtgagcgctatcatgtcgagccacaccccgaacacctctgtggggcttatccttatgcctatcctcctatgccagcaatggtgcctcaccatgggttcgaggattggtctcagataaggtatccgcctcctccaatggcaatggaacatcccccacccctaccgaactctcggctcttccacctgcccgagtatacctggaggctgccgtgcggaggcgttcggaaccctaaccagtcatctcaggtgatggacccgcctacagccagacctacggaaccagaacccgctgatttacggctgccacggaattag

SEQ ID NO: 88421 - DNA, 1908 bp, Artificial Sequence
  derived and/or modified sequence
atggagggccgtggaccttacaggatttatgacccgggtggcagcgttccatccggagaggcaagcgcggcattcgaacgcctcgtcaaagaaaattcgcggctcaaggagaagatgcagggtattaaaatgctgggcgagctgctggaggaatcacagatggaagcgacgcgactcaggcagaaggccgaggagctggtcaaagacaacgagctgctgcctccacccagtccctcactgggcagtttcgacccgcttgccgagctgactggtaaggatagcaacgtgactgcttcacccactgctccggcttgcccctcagacaagccggctcccgtccagaagcctccttcttccggtacatctagtgagtttgaggtggtcacaccagaagaacagaactcacccgaatcatcctctcatgctaacgcaatggccctgggccctctgcctagagaggacggcaatctcatgctgcacttacagaggctagagaccactctctcagtctgtgcggaggaacctgaccacggacagctgtttacacacctaggtcgtatggccctggagtttaatcggcttgcgagtaaagtccataagaacgagcagagaaccagcattctgcagactctgtgcgagcaactgaggaaggaaaatgaagctctcaaggccaagctggataagggacttgagcaacgcgatcaagcagcagagcgtctccgcgaagaaaacttagaacttaagaagctcctcatgagtaatgggaacaaggaaggggcaagcggcagaccaggctctcctaaaatggaaggaacaggcaagaaagcagttgccggtcaacagcaggcatccgtcaccgcaggaaaagtgcccgaagtcgtcgccttgggtgctgccgaaaaaaaagtgaaaatgttagaacagcagcggtcagagctcctcgaggtcaacaaacagtgggaccagcactttcggagcatgaaacagcagtatgagcagaaaattacagaactacggcagaaacttgcagacctccagaaacaggttactgatctggaggctgaaagggaacagaaacagcgcgacttcgatcgtaagctcttgctggcaaaaagcaaaatcgagatggaggagacagataaggagcagttgacagccgaagccaaagaattgcggcagaaggtgaaataccttcaagatcagctttcccctctaacccgccagagagaatatcaggagaaagaaatccaacgactcaacaaggcattggaagaagcgctatccatacaaacaccacctagcagccctcccaccgccttcgggagtcccgaaggtgccggagcactactcagaaaacaggaacttgtcacccaaaatgaactgttaaaacagcaagtgaaaatattcgaggaggatttccagagagagaggagcgatagggagagaatgaacgaggagaaagaagaactgaaaaaacaggtcgaaaaacttcaagctcaggtcaccttgtctaacgctcagcttaaggccttcaaggatgaggagaaggcgagagaagcacttcggcagcagaaacgcaaagctaaagctagcggggaaagatatcatgtggagcctcatcccgagcacttgtgtggcgcttacccctatgcttatccgcctatgccggctatggtgcctcatcacggctttgaggattggtcccaaattcggtaccccccaccacccatggccatggaacatccgcctccgctgccgaacagtaggctattccatctgccagaatatacctggcggctgccctgcggcggtgtcagaaaccccaatcagtccagccaggtgatggatccccctacagctcggccaactgagcccgagcccgcagatcttcgcctgccaaggaactag

SEQ ID NO: 88422 - DNA, 2200 bp, Artificial Sequence
  derived and/or modified sequence
gactttcccaggggtggggcggcccggccaggcccccggcacttcctcgtcctcggcccgggtgccctgcccccgtccaggagccctaggagtgctacggggggccggagccttgcccgggccgctgccccgtccctggattcggggctggacgcagcaagcggggcgctgtgtccccaagctccccgtcctcggccaggcgggcaccacggcaggggctgagctaccctcatggaagggagaggaccgtaccggatctacgaccctgggggcagcgtgccctcaggagaggcatccgcagcttttgagcgcctagtgaaggagaattcccggctgaaggaaaaaatgcaagggataaagatgttaggggagcttttggaagagtcccagatggaagcgaccaggctccggcagaaggcagaggagctagtgaaggacaacgagctgctcccaccaccttctccctccttgggctccttcgaccccctggctgagctcacaggaaaggactcaaatgtcacagcatctcccacagcccctgcatgccccagtgacaagccagcaccagtccagaagcctccatccagtggcacctcctctgaatttgaagtggtcactcctgaggagcagaattcaccagagagcagcagccatgccaatgcgatggcgctgggccccctgccccgtgaggacggcaacctgatgctgcacctgcagcgcctggagaccacgctgagtgtgtgtgccgaggagccggaccacggccagctcttcacccacctgggccgcatggccctggagttcaaccgactggcatccaaggtgcacaagaatgagcagcgcacctccattctgcagaccctgtgtgagcagcttcggaaggagaacgaggctctgaaggccaagttggataagggcctggaacagcgggatcaggctgccgagaggctgcgggaggaaaatttggagctcaagaagttgttgatgagcaatggcaacaaagagggtgcgtctgggcggccaggctcaccgaagatggaagggacaggcaagaaggcagtggctggacagcagcaggctagtgtgacggcaggtaaggtcccagaggtggtggccttgggcgcagccgagaagaaggtgaagatgctggagcagcagcgcagtgagctgctggaagtgaacaagcagtgggaccagcatttccggtccatgaagcagcagtatgagcagaagatcactgagctgcgtcagaagctggctgatttgcagaagcaggtgactgacctggaggccgagcgggagcagaagcagcgtgactttgaccgcaagctcctcctggccaagtccaagattgaaatggaggagaccgacaaggagcagctgacagcagaggccaaggagctgcgccaaaaggtcaagtacctgcaggatcagctgagcccactcacccgacagcgtgagtaccaggaaaaggagatccagcggctcaacaaggccctggaggaagcactgagcatccaaaccccgccatcatctccaccaacagcatttgggagcccagaaggagcaggggccctcctaaggaaacaggagctggtcacgcagaatgagttgctgaaacagcaggtgaagatcttcgaggaggacttccagagggagcgcagtgatcgtgagcgcatgaatgaggagaaggaagagctgaagaagcaagtggagaagctgcaggcccaggtcaccctgtcaaatgcccagctaaaagcattcaaagatgaggagaaggcaagagaagccctcagacagcagaagaggaaagcaaaggcctcaggagagcgttaccatgtggagccccacccagaacatctctgcggggcctacccctacgcctacccgcccatgccagccatggtgccacaccatggcttcgaggactggtcccagatccgctacccccctccccccatggccatggagcacccgcccccactccccaactcgcgcctcttccatctgccggaatacacctggcgtctaccctgtggaggggttcgaaatccaaatcagagctcccaagtgatggaccctcccacagccaggcctacagaaccagagccagctgatctcagattgccaagaaactagaagccacttgcacggtgtggccagagcctcagctggatgagaggctgagatgggtggccag

SEQ ID NO: 88423 - DNA, 2711 bp, Artificial Sequence
  derived and/or modified sequence
agtgagccgaggagccttcatagggacagccgcccctggtgcacacaccctcgtattctcctgcccttccccagccaggcgggcaccacggcaggggctgagctaccctcatggaagggagaggaccgtaccggatctacgaccctgggggcagcgtgccctcaggagaggcatccgcagcttttgagcgcctagtgaaggagaattcccggctgaaggaaaaaatgcaagggataaagatgttaggggagcttttggaagagtcccagatggaagcgaccaggctccggcagaaggcagaggagctagtgaaggacaacgagctgctcccaccaccttctccctccttgggctccttcgaccccctggctgagctcacaggaaaggactcaaatgtcacagcatctcccacagcccctgcatgccccagtgacaagccagcaccagtccagaagcctccatccagtggcacctcctctgaatttgaagtggtcactcctgaggagcagaattcaccagagagcagcagccatgccaatgcgatggcgctgggccccctgccccgtgaggacggcaacctgatgctgcacctgcagcgcctggagaccacgctgagtgtgtgtgccgaggagccggaccacggccagctcttcacccacctgggccgcatggccctggagttcaaccgactggcatccaaggtgcacaagaatgagcagcgcacctccattctgcagaccctgtgtgagcagcttcggaaggagaacgaggctctgaaggccaagttggataagggcctggaacagcgggatcaggctgccgagaggctgcgggaggaaaatttggagctcaagaagttgttgatgagcaatggcaacaaagagggtgcgtctgggcggccaggctcaccgaagatggaagggacaggcaagaaggcagtggctggacagcagcaggctagtgtgacggcaggtaaggtcccagaggtggtggccttgggcgcagccgagaagaaggtgaagatgctggagcagcagcgcagtgagctgctggaagtgaacaagcagtgggaccagcatttccggtccatgaagcagcagtatgagcagaagatcactgagctgcgtcagaagctggctgatttgcagaagcaggtgactgacctggaggccgagcgggagcagaagcagcgtgactttgaccgcaagctcctcctggccaagtccaagattgaaatggaggagaccgacaaggagcagctgacagcagaggccaaggagctgcgccaaaaggtcaagtacctgcaggatcagctgagcccactcacccgacagcgtgagtaccaggaaaaggagatccagcggctcaacaaggccctggaggaagcactgagcatccaaaccccgccatcatctccaccaacagcatttgggagcccagaaggagcaggggccctcctaaggaaacaggagctggtcacgcagaatgagttgctgaaacagcaggtgaagatcttcgaggaggacttccagagggagcgcagtgatcgtgagcgcatgaatgaggagaaggaagagctgaagaagcaagtggagaagctgcaggcccaggtcaccctgtcaaatgcccagctaaaagcattcaaagatgaggagaaggcaagagaagccctcagacagcagaagaggaaagcaaaggcctcaggagagcgttaccatgtggagccccacccagaacatctctgcggggcctacccctacgcctacccgcccatgccagccatggtgccacaccatggcttcgaggactggtcccagatccgctacccccctccccccatggccatggagcacccgcccccactccccaactcgcgcctcttccatctgccggaatacacctggcgtctaccctgtggaggggttcgaaatccaaatcagagctcccaagtgatggaccctcccacagccaggcctacagaaccagagccagctgatctcagattgccaagaaactagaagccacttgcacggtgtggccagagcctcagctggatgagaggctgagatgggtggccagcttgtacaccagtccctgaactgagctgtttacaggactggggaggctccacccagaaggctttcatttgtactctgctgggagtgactgggaaaaactccttccctgctgctgagtggagagaggcctcatccggctttgacccaccatccgttgcagaagcctccaggagcagcaatcctaagagtgggaggcagccaagacccccttccttcaaaacctcccggaagtggtttcaggccctctagttgccatgaccaatttgtgtgtgtgtttaatttttgcttcaagctctgtagcaggacctgccccacgcacacccctacccctctgtgaggagctgtgggaagtgtgggtttgtctccagaacagaagagaatgatggatattctggctctggggccctctccaccaccactcacagtagccttgctgaagccatcacagatgggagaaggccatgccagccacgtccgccgaggggcgccagcctgaagctgccaggccctgaggttcagaccctggaccccatagctggaggcctgtggtgccagaagcccagattagggtggctgtccatccctggatagctatttgcacgaatcatggacataaatccaagttgaagaaga

SEQ ID NO: 88424 - protein, 64 aa, Artificial Sequence
  derived and/or modified sequence
MPPRKKRRQPSQKAPLLFHQQPLEGPKHSCASTQLPITHTRQVPSKPIDHSTITSWVSPDFDTA

SEQ ID NO: 88425 - protein, 238 aa, Artificial Sequence
  derived and/or modified sequence
MPPRKKRRQPSQKAPLLFHQQPLEGPKHSCASTQLPITHTRQVPSKPIDHSTITSWVSPDFDTAAGSLFPAYQKHQNRARHSSRKPTTSKFPHLTFESPQSSSSETLGIPLIRECPSESEKDVSRRPLVPVLSPQSCGNMSVQALQSLPYVFIPPDIQTPESSSVKEELIPQDQKENSLLSCTLHTGTPNSPEPGPVLVKDTPEDKYGIKVTWRRRQHLLAYLRERGKLSRSQFLVKS

SEQ ID NO: 88426 - protein, 132 aa, Artificial Sequence
  derived and/or modified sequence
MPPRKKRRQPSQKAPLLFHQQPLEGPKHSCASTQLPITHTRQVPSKPIDHSTITSWVSPDFDTAAGSLFPAYQKHQNRARHSSRKPTTSKFPHLTFESPQSSSSETLGIPLIRECPSESEKDVSRRPLVPVL

SEQ ID NO: 88427 - protein, 105 aa, Artificial Sequence
  derived and/or modified sequence
MPPRKKRRQPSQKAPLLFHQQPLEGPKHSCASTQLPITHTRQVPSKPIDHSTITSWVSPDFDTAAGSLFPAYQKHQNRARHSSRKPTTSKFPHLTFESPQSSSSE

SEQ ID NO: 88428 - DNA, 195 bp, Artificial Sequence
  derived and/or modified sequence
atgcccccgcggaaaaaaaggagacaaccttcacaaaaagctcctctgttgtttcaccagcagccgctggagggtcccaaacactcctgtgcgtcaactcagctacccatcacgcacactcgccaggtccccagcaagcctatcgaccactctaccatcacatcttgggttagccccgattttgataccgcctag

SEQ ID NO: 88429 - DNA, 717 bp, Artificial Sequence
  derived and/or modified sequence
atgccaccacgaaaaaaacgtaggcaaccttcccagaaggcccccctgctgtttcatcaacagccacttgagggcccgaaacacagttgtgcctctacacagctacctattacccatacacgccaggttccttcaaagccaatcgaccactccactatcactagctgggtcagccccgactttgacaccgctgctggctctctgtttccagcctatcagaagcaccaaaaccgtgcaaggcattccagcaggaaaccaaccacgagcaaattcccacacctgacctttgagtcacctcaatcgtcttcctcggagacactgggaatccccctgatccgagagtgtccatccgagagcgagaaggacgttagccggcgtcctttggtccccgttcttagtccacagtcctgtgggaatatgagcgtgcaagcactgcaatccttaccctacgtatttatacctccagacatccagactcccgaatcaagtagcgtgaaagaagaattaattccccaggatcaaaaagagaactctctgttatcctgcacattgcacactggaacacctaattccccagaacccggccccgtgctcgtcaaagatacccccgaggacaagtacggtattaaagtcacctggcgccgcagacagcatctgttagcctatctgagagaacgaggcaaactcagccgctcccagtttcttgttaaatcatag

SEQ ID NO: 88430 - DNA, 399 bp, Artificial Sequence
  derived and/or modified sequence
atgccaccgcgtaagaaaaggcggcagccatcccaaaaagcgccgttgctattccatcaacagcccctggaggggccaaaacattcatgtgcctcaactcagcttccgatcacccatacgagacaggtgccatccaagcccatcgatcacagcaccattacttcttgggttagtccggacttcgacactgctgcggggtctctctttccagcttaccagaaacatcagaacagggctagacattcgagcaggaagccaaccacgagcaagttccctcatctcacctttgagtcaccccagtccagctccagtgagacacttgggatcccactaatcagggaatgtccctccgagagtgaaaaggacgtctccagacggccactcgttcctgttctttag

SEQ ID NO: 88431 - DNA, 318 bp, Artificial Sequence
  derived and/or modified sequence
atgcctccacgcaaaaaacgccggcagccttctcaaaaagcacccttgctgtttcaccaacagccactagaaggacccaaacattcttgcgcatcaactcaactgccaatcacccatacaaggcaagttccctcaaagcccattgaccactctactattaccagctgggtcagcccagattttgacactgctgccggctcactctttcccgcctaccagaagcaccagaatcgcgctcgccacagtagccgtaaacccaccacgtctaaatttccacatttgacttttgaatctccccagagctcgtcttctgagtag

SEQ ID NO: 88432 - DNA, 195 bp, Artificial Sequence
  derived and/or modified sequence
atgccacccaggaagaagaggcggcagcccagccagaaggcccccctgctcttccaccagcagcccctggagggccccaagcacagctgtgccagcacccagctgcccatcacccacacccggcaggtgcccagcaagcccatcgaccacagcaccatcacctcctgggtgtccccagactttgacacagcctag

SEQ ID NO: 88433 - DNA, 717 bp, Artificial Sequence
  derived and/or modified sequence
atgccacccaggaagaagaggcggcagcccagccagaaggcccccctgctcttccaccagcagcccctggagggccccaagcacagctgtgccagcacccagctgcccatcacccacacccggcaggtgcccagcaagcccatcgaccacagcaccatcacctcctgggtgtccccagactttgacacagctgctggcagcctcttccctgcctaccagaagcaccagaacagagcccggcacagcagcaggaagcccaccaccagcaagttcccccacctgacctttgagagcccccagagcagcagcagcgagaccctgggcatccccctcatccgggagtgccccagcgagagcgagaaggatgtgtccagaagacccctggtgcctgtgctgagcccccagagctgtggcaacatgtctgtgcaggccctgcagagcctgccctacgtgttcatccccccagacatccagaccccagagagcagctctgtgaaggaggagctgatcccccaggaccagaaggagaacagcctgctgagctgcaccctgcacacaggcacccccaacagccctgagcccggccctgtgctggtgaaggacaccccagaggacaagtatggcatcaaggtgacctggaggcggcggcagcacctgctggcctacctgcgggagcggggcaagctgagccgcagccagttcctggtgaagagctag

SEQ ID NO: 88434 - DNA, 399 bp, Artificial Sequence
  derived and/or modified sequence
atgccacccaggaagaagaggcggcagcccagccagaaggcccccctgctcttccaccagcagcccctggagggccccaagcacagctgtgccagcacccagctgcccatcacccacacccggcaggtgcccagcaagcccatcgaccacagcaccatcacctcctgggtgtccccagactttgacacagctgctggcagcctcttccctgcctaccagaagcaccagaacagagcccggcacagcagcaggaagcccaccaccagcaagttcccccacctgacctttgagagcccccagagcagcagcagcgagaccctgggcatccccctcatccgggagtgccccagcgagagcgagaaggatgtgtccagaagacccctggtgcctgtgctgtag

SEQ ID NO: 88435 - DNA, 318 bp, Artificial Sequence
  derived and/or modified sequence
atgccacccaggaagaagaggcggcagcccagccagaaggcccccctgctcttccaccagcagcccctggagggccccaagcacagctgtgccagcacccagctgcccatcacccacacccggcaggtgcccagcaagcccatcgaccacagcaccatcacctcctgggtgtccccagactttgacacagctgctggcagcctcttccctgcctaccagaagcaccagaacagagcccggcacagcagcaggaagcccaccaccagcaagttcccccacctgacctttgagagcccccagagcagcagcagcgagtag

SEQ ID NO: 88436 - DNA, 195 bp, Artificial Sequence
  derived and/or modified sequence
atgcccccccggaagaagcggcggcagcccagccagaaggcccccttgcttttccatcagcagcctctcgaaggccccaagcactcctgtgcgagcacccagctgcccatcacccatacaagacaggtgccatccaagcccatcgatcactccactattacctcctgggtctccccagatttcgatacggcgtag

SEQ ID NO: 88437 - DNA, 717 bp, Artificial Sequence
  derived and/or modified sequence
atgcccccccggaagaagcggcggcagcccagccagaaggcccccttgctgttccatcagcaacctctcgaaggccccaaacatagctgcgcctctacgcaactgcctatcacgcacaccaggcaagtaccttccaagcctatagaccattcaacaattaccagctgggtatcccctgactttgataccgctgccggaagcttatttcctgcataccagaagcatcagaatagagccagacacagcagcagaaaaccaaccacaagtaagtttcctcaccttaccttcgagtctcctcaaagcagcagctcagagactttgggtattcctctgatccgggagtgcccctcggaatcagaaaaggacgtctctcggagaccgctcgtcccagtgctttcaccccagagttgtggcaatatgagtgtacaggcgctgcagtccttaccctacgtatttatccctccagacatccaaactcctgaatcaagctctgttaaagaggaattgataccacaggatcagaaggaaaattcactcctaagctgtactttgcacaccgggaccccaaacagtcctgagccagggcccgtgctggtgaaggacacccccgaggataagtacggcatcaaggtgacctggagacgacgacaacaccttctcgcatacctgagggaaaggggaaaactttctagatctcagtttctggtgaagtcttag

SEQ ID NO: 88438 - DNA, 399 bp, Artificial Sequence
  derived and/or modified sequence
atgcccccccggaagaagcggcggcagcccagccagaaggcccccctactcttccatcagcagcctctggaagggcccaaacacagctgcgccagcacacagcttccaataacccacacaagacaggtaccctccaaacccatcgaccacagcaccattacctcttgggtttccccggatttcgacacagccgcgggcagcttatttcctgcctatcaaaagcaccagaatagagcgagacattccagtcggaaaccgacaacctccaaatttcctcacctgacgtttgagtcaccacagtcaagctccagcgagactttaggtattcctcttatccgtgagtgtccctcagagagcgagaaagacgtgtcaagacgtcccctcgtgcccgtgctttag

SEQ ID NO: 88439 - DNA, 318 bp, Artificial Sequence
  derived and/or modified sequence
atgcccccccggaagaagcggcggcagcccagccagaaggcccccctccttttccaccagcagcctttggaggggccaaagcacagttgtgccagtacacagctccctattacacatacccgccaggtgccctctaagcctatcgatcactcaactatcacgtcttgggtgagccccgatttcgataccgcagcggggagtctgttccctgcgtatcagaagcatcagaaccgagctcgtcactcttctagaaagccaacgacaagtaaatttccacacctcacctttgaatcgccccagagcagcagtagcgagtag

SEQ ID NO: 88440 - DNA, 195 bp, Artificial Sequence
  derived and/or modified sequence
atgcctcctaggaaaaagagaaggcaaccctctcagaaagcgcctttactcttccatcagcagccgcttgagggccctaagcatagttgcgccagtactcaacttccgatcacacacaccaggcaggtcccatccaagccaatcgaccatagcacaatcactagctgggtatcgcccgacttcgatacagcttag

SEQ ID NO: 88441 - DNA, 717 bp, Artificial Sequence
  derived and/or modified sequence
atgccacctcggaaaaagaggcggcagcccagccagaaagccccattgttatttcaccaacagcctctggagggcccaaagcactcctgtgcaagtacacagttgcctattacccatactcgccaggtcccttccaagcccattgatcacagtacaatcaccagttgggtgtcccccgattttgatacggccgctgggtcactcttcccagcctaccagaaacatcagaaccgggctcggcattcttcccggaagcctacaacatctaagtttccgcatctgacattcgaatcaccacagtcaagcagtagtgagactctgggcattcctttgatccgggaatgcccaagtgagtcagagaaggatgtcagcaggaggcccctggtgccagtgctgtcgccgcagtcatgcggaaacatgtcagtccaggcgctgcagtccctcccttatgtgttcatcccccctgacattcagacgcccgagtcttcatcagttaaagaggagttaatccctcaggatcaaaaagagaactcgctcctcagttgcaccctgcacacagggacacctaattccccggaaccaggccctgtcctggtgaaggatacaccagaggataagtacgggatcaaggtgacgtggcggaggcggcagcacctgttggcctacctcagagagcgtgggaaattgtcgcgctctcaattcctagtaaaaagctag

SEQ ID NO: 88442 - DNA, 399 bp, Artificial Sequence
  derived and/or modified sequence
atgccacctcggaagaagcgccgtcaaccatcacagaaagccccactcctgttccaccaacaacccttagagggacccaagcactcgtgcgcatccactcagctgccaattacacatacgcgtcaagttccctccaagccgatcgatcactccactattacttcttgggtctctcccgactttgacacggctgctggctcactgtttccagcctatcagaaacaccagaaccgggcaagacacagctctagaaagccaaccacttctaaattccctcatctcacgttcgaatctcctcaaagttcctcgtcagagaccctggggatccctctcatccgggaatgccctagcgagtctgagaaagacgtgtcacgccgtccattagttccggtgctttag

SEQ ID NO: 88443 - DNA, 318 bp, Artificial Sequence
  derived and/or modified sequence
atgcccccaaggaaaaagaggcggcagccttcacagaaggctcccctgttatttcaccaacaaccactggagggccctaaacattcatgcgcatcgactcagctgccaattactcacaccaggcaggtaccttccaagcctatcgatcactccacgattacttcctgggtgtctccggatttcgacaccgctgccggtagcctgttccccgcttatcagaagcaccagaacagggctagacacagttcccggaagcctacaaccagcaagttcccacacctgaccttcgagagcccccagtcttcctcatctgaatag

SEQ ID NO: 88444 - DNA, 517 bp, Artificial Sequence
  derived and/or modified sequence
attccgggctcgaaggctgtgcggtctgccaggagctgcggccccgtccggcccgggctgcactttaggaggccgaggcgggtggatcacttgaggtcacgagttcgagaccagcctggcaacatagcgaaaccgcttctctactaaaaattagccgggcgtggtggtgcgtgcctgtagtcccagctactctggaggctgaggtggaaggatcacctgaggccgagaggtggaggctatggcatgggttggaattggagcctatcccccaacccgaaggctaacagcatcatgtggttactaactgttcctcattcaccggttgatgcctcccagaaaaaaacgccgccagccttcccagaaagccccgctgctgttccaccaacaaccactggagggccccaaacacagctgtgcatctacacagcttcccatcactcacactcgacaggtgcccagcaagcccattgaccacagcaccatcacttcctgggtatcacctgattttgatacagca

SEQ ID NO: 88445 - DNA, 1870 bp, Artificial Sequence
  derived and/or modified sequence
gtctcggcattccgggctcgaaggctgtgcggtctgccaggagctgcggccccgtccggcccgggctggcatgggttggaattggagcctatcccccaacccgaaggctaacagcatcatgtggttactaactgttcctcattcaccggttgatgcctcccagaaaaaaacgccgccagccttcccagaaagccccgctgctgttccaccaacaaccactggagggccccaaacacagctgtgcatctacacagcttcccatcactcacactcgacaggtgcccagcaagcccattgaccacagcaccatcacttcctgggtatcacctgattttgatacagcagcaggaagcttgttcccagcctaccagaaacaccaaaaccgggcgagacactcaagtcgaaaacctaccacctccaagtttccacatctaacttttgagagtccgcaatcttccagttcagagacattggggatccccttaatccgagagtgccccagtgaatcagaaaaggatgtttccagaagacccttagttccagtgctcagtccccaaagctgtgggaacatgtcagtgcaggcacttcagagcttaccttatgtgttcattccacctgatatccagaccccagagtcatcgtctgtgaaggaagaactcattccccaagatcagaaggaaaacagccttctaagctgcactcttcacactggcactcctaatagcccagagcctggacctgttctggttaaagacacccccgaggacaagtatggaataaaggtcacatggaggagacgacagcacctgcttgcttacctcagggagagagggaagctgagcagaagccaattccttgtgaaaagctgactgccatcagtaatctcaatagaaaagagatatgttttctggagtcataaaggaattcaattcctagggtttttgtttttgtttttgagatgtaatattgctctgttgcccaggctggagtgcagtggtatgatctcaccttactgcaaccaccacttcctgggttcaagcgattctcctgcctcagcctccccagtagctgggattacaggcaccagccaccatgcctggctaatttttttgtatttttagtagagatgtggtttctccatgttggccaggctggtctcaaaatcctgacctcaagtcatctgctggccttgacctcacaaagtgctggcccagccgagatttgttttctaagatactttgtgtcatgaacagttcagtttagtgtcatgaactattcacttcatatttttcttgtattaactgtttaaatttttaaaatatcttgtagtaactctttaaaatgtatgtaagtaaatggctgcagaaagtttttttagagaatcctgcttccatcagtaatacagcaatattaccccatccactaatggtctttgtttccttaaccactactcattaatccttaatcacctcattcaaactaattcattctgcatttttgagtaccaactcttgtcaggctcagtggcagcttctacgacctgatggatggaaaaaaatcaaactctgtgactctatggttgactgccacctctgcaaccttgactcatctgctgaaaaggcaagaagaagaaagggcagcaagccctgttttagggactacataagatgaggggagataagggggacatagatgagttctttaggattgcgtgtgttttgagtttttgtttctaactgaagaaatctgtcaatattaaatagggtgggaaaatggtttcttagaataactgttcaactgtgtgtaaataaggaaagttttcaatgagtattacttattgtaattaatgcagaaggacttccccagtcaa

SEQ ID NO: 88446 - DNA, 583 bp, Artificial Sequence
  derived and/or modified sequence
aatcggcgccggccttgtctcggcattccgggctcgaaggctgtgcggtctgccaggagctgcggccccgtccggcccgggctgcttttgtttcttctctacaggcatgggttggaattggagcctatcccccaacccgaaggctaacagcatcatgtggttactaactgttcctcattcaccggttgatgcctcccagaaaaaaacgccgccagccttcccagaaagccccgctgctgttccaccaacaaccactggagggccccaaacacagctgtgcatctacacagcttcccatcactcacactcgacaggtgcccagcaagcccattgaccacagcaccatcacttcctgggtatcacctgattttgatacagcagcaggaagcttgttcccagcctaccagaaacaccaaaaccgggcgagacactcaagtcgaaaacctaccacctccaagtttccacatctaacttttgagagtccgcaatcttccagttcagagacattggggatccccttaatccgagagtgccccagtgaatcagaaaaggatgtttccagaagacccttagttccagtgct

SEQ ID NO: 88447 - DNA, 580 bp, Artificial Sequence
  derived and/or modified sequence
attccgggctcgaaggctgtgcggtctgccaggagctgcggccccgtccggcccgggctggtataggaggctgtgctccccaaagccttgaagtttatggtagaattggctggcagaggatcaggaagaactggggaatcatctgaattatttgctcccagcttttgtttcttctctacaggcatgggttggaattggagcctatcccccaacccgaaggctaacagcatcatgtggttactaactgttcctcattcaccggttgatgcctcccagaaaaaaacgccgccagccttcccagaaagccccgctgctgttccaccaacaaccactggagggccccaaacacagctgtgcatctacacagcttcccatcactcacactcgacaggtgcccagcaagcccattgaccacagcaccatcacttcctgggtatcacctgattttgatacagcagcaggaagcttgttcccagcctaccagaaacaccaaaaccgggcgagacactcaagtcgaaaacctaccacctccaagtttccacatctaacttttgagagtccgcaatcttccagttcagag

SEQ ID NO: 88448 - DNA, 195 bp, Artificial Sequence
  derived and/or modified sequence
atgccccccagaaagaagagaagacagcccagccagaaggcccccctgctgttccaccagcagcccctggagggccccaagcacagctgcgccagcacccagctgcccatcacccacaccagacaggtgcccagcaagcccatcgaccacagcaccatcaccagctgggtgagccccgacttcgacaccgcctag

SEQ ID NO: 88449 - DNA, 717 bp, Artificial Sequence
  derived and/or modified sequence
atgccccccagaaagaagagaagacagcccagccagaaggcccccctgctgttccaccagcagcccctggagggccccaagcacagctgcgccagcacccagctgcccatcacccacaccagacaggtgcccagcaagcccatcgaccacagcaccatcaccagctgggtgagccccgacttcgacaccgccgccggcagcctgttccccgcctaccagaagcaccagaacagagccagacacagcagcagaaagcccaccaccagcaagttcccccacctgaccttcgagagcccccagagcagcagcagcgagaccctgggcatccccctgatcagagagtgccccagcgagagcgagaaggacgtgagcagaagacccctggtgcccgtgctgagcccccagagctgcggcaacatgagcgtgcaggccctgcagagcctgccctacgtgttcatcccccccgacatccagacccccgagagcagcagcgtgaaggaggagctgatcccccaggaccagaaggagaacagcctgctgagctgcaccctgcacaccggcacccccaacagccccgagcccggccccgtgctggtgaaggacacccccgaggacaagtacggcatcaaggtgacctggagaagaagacagcacctgctggcctacctgagagagagaggcaagctgagcagaagccagttcctggtgaagagctag

SEQ ID NO: 88450 - DNA, 399 bp, Artificial Sequence
  derived and/or modified sequence
atgccccccagaaagaagagaagacagcccagccagaaggcccccctgctgttccaccagcagcccctggagggccccaagcacagctgcgccagcacccagctgcccatcacccacaccagacaggtgcccagcaagcccatcgaccacagcaccatcaccagctgggtgagccccgacttcgacaccgccgccggcagcctgttccccgcctaccagaagcaccagaacagagccagacacagcagcagaaagcccaccaccagcaagttcccccacctgaccttcgagagcccccagagcagcagcagcgagaccctgggcatccccctgatcagagagtgccccagcgagagcgagaaggacgtgagcagaagacccctggtgcccgtgctgtag

SEQ ID NO: 88451 - DNA, 318 bp, Artificial Sequence
  derived and/or modified sequence
atgccccccagaaagaagagaagacagcccagccagaaggcccccctgctgttccaccagcagcccctggagggccccaagcacagctgcgccagcacccagctgcccatcacccacaccagacaggtgcccagcaagcccatcgaccacagcaccatcaccagctgggtgagccccgacttcgacaccgccgccggcagcctgttccccgcctaccagaagcaccagaacagagccagacacagcagcagaaagcccaccaccagcaagttcccccacctgaccttcgagagcccccagagcagcagcagcgagtag

SEQ ID NO: 88452 - protein, 224 aa, Artificial Sequence
  derived and/or modified sequence
MPPRKKRRQPSQKAPLLFHQQPLEGPKHSCASTQLPITHTRQVSPDFDTAAGSLFPAYQKHQNRARHSSRKPTTSKFPHLTFESPQSSSSETLGIPLIRECPSESEKDVSRRPLVPVLSPQSCGNMSVQALQSLPYVFIPPDIQTPESSSVKEELIPQDQKENSLLSCTLHTGTPNSPEPGPVLVKDTPEDKYGIKVTWRRRQHLLAYLRERGKLSRSQFLVKS

SEQ ID NO: 88453 - DNA, 675 bp, Artificial Sequence
  derived and/or modified sequence
atgcctcccaggaaaaaaaggcgacagcctagccagaaggctcctttactttttcaccagcaacccctcgaaggccccaaacatagctgcgctagtacccaattaccaatcacacacactagacaggtctcccctgactttgacactgctgccggaagcctgttccccgcataccaaaaacatcagaatagggcacgacacagctcaaggaaaccgacaacctccaagtttcctcatcttaccttcgaaagcccacagtcttcctcctccgaaactctgggtattcccctcataagagaatgtcctagtgagtctgagaaagacgtgtcgcggaggccactagtccccgtcctttctccacagagttgcgggaatatgtccgtgcaggccctccaatcgcttccttacgtgtttatcccaccggacatccagacaccagagtccagcagtgttaaggaggagctaataccacaggatcaaaaagaaaactcactgctcagctgtaccctccacactggaacccccaattctccagagccaggccccgtccttgtcaaggacacacccgaggataaatacggaatcaaggttacctggcgacggagacagcacctgctggcctatctacgagaacgaggaaagctgtcccgaagtcagttcctcgtgaagtcatag

SEQ ID NO: 88454 - DNA, 675 bp, Artificial Sequence
  derived and/or modified sequence
atgccacccaggaagaagaggcggcagcccagccagaaggcccccctgctcttccaccagcagcccctggagggccccaagcacagctgtgccagcacccagctgcccatcacccacacccggcaggtgtccccagactttgacacagctgctggcagcctcttccctgcctaccagaagcaccagaacagagcccggcacagcagcaggaagcccaccaccagcaagttcccccacctgacctttgagagcccccagagcagcagcagcgagaccctgggcatccccctcatccgggagtgccccagcgagagcgagaaggatgtgtccagaagacccctggtgcctgtgctgagcccccagagctgtggcaacatgtctgtgcaggccctgcagagcctgccctacgtgttcatccccccagacatccagaccccagagagcagctctgtgaaggaggagctgatcccccaggaccagaaggagaacagcctgctgagctgcaccctgcacacaggcacccccaacagccctgagcccggccctgtgctggtgaaggacaccccagaggacaagtatggcatcaaggtgacctggaggcggcggcagcacctgctggcctacctgcgggagcggggcaagctgagccgcagccagttcctggtgaagagctag

SEQ ID NO: 88455 - DNA, 1655 bp, Artificial Sequence
  derived and/or modified sequence
aatcggcgccggccttgtctcggcattccgggctcgaaggctgtgcggtctgccaggagctgcggccccgtccggcccgggctggcatgggttggaattggagcctatcccccaacccgaaggctaacagcatcatgtggttactaactgttcctcattcaccggttgatgcctcccagaaaaaaacgccgccagccttcccagaaagccccgctgctgttccaccaacaaccactggagggccccaaacacagctgtgcatctacacagcttcccatcactcacactcgacaggtatcacctgattttgatacagcagcaggaagcttgttcccagcctaccagaaacaccaaaaccgggcgagacactcaagtcgaaaacctaccacctccaagtttccacatctaacttttgagagtccgcaatcttccagttcagagacattggggatccccttaatccgagagtgccccagtgaatcagaaaaggatgtttccagaagacccttagttccagtgctcagtccccaaagctgtgggaacatgtcagtgcaggcacttcagagcttaccttatgtgttcattccacctgatatccagaccccagagtcatcgtctgtgaaggaagaactcattccccaagatcagaaggaaaacagccttctaagctgcactcttcacactggcactcctaatagcccagagcctggacctgttctggttaaagacacccccgaggacaagtatggaataaaggtcacatggaggagacgacagcacctgcttgcttacctcagggagagagggaagctgagcagaagccaattccttgtgaaaagctgactgccatcagtaatctcaatagaaaagagatatgttttctggagtcataaaggaattcaattcctagggtttttgtttttgtttttgagatgtaatattgctctgttgcccaggctggagtgcagtggtatgatctcaccttactgcaaccaccacttcctgggttcaagcgattctcctgcctcagcctccccagtagctgggattacaggcaccagccaccatgcctggctaatttttttgtatttttagtagagatgtggtttctccatgttggccaggctggtctcaaaatcctgacctcaagtcatctgctggccttgacctcacaaagtgctggcccagccgagatttgttttctaagatactttgtgtcatgaacagttcagtttagtgtcatgaactattcacttcatatttttcttgtattaactgtttaaatttttaaaatatcttgtagtaactctttaaaatgtatgtaagtaaatggctgcagaaagtttttttagagaatcctgcttccatcagtaatacagcaatattaccccatccactaatggtctttgtttccttaaccactactcattaatccttaatcacctcattcaaactaattcattctgcatttttgagtaccaactcttgtcaggctcagtggcagcttctacgacctgatggatggaaaaaaatcaaactctgtgactctatggttgactgccacctctgcaaccttgactcatctgctgaaaaggcaagaagaagaaagggcagcaagccctgttttagggactacataagatgaggggagataa

SEQ ID NO: 88456 - DNA, 675 bp, Artificial Sequence
  derived and/or modified sequence
atgcccccccggaagaagcggcggcagcccagccagaaggcccccctgctgttccatcagcagcctttagaagggcctaagcacagctgcgcttctacgcagctgccgattacacacaccagacaggtaagccccgattttgacaccgcagctggctcactgtttccagcataccagaaacatcagaatcgggctagacacagctcacggaagccaaccacttcgaaatttccacacctgacattcgagtccccgcagagctcatcgagtgaaacactgggaatccctctgattagagagtgtcccagtgaatccgaaaaagacgttagccgccgcccgttggttcccgttctgagtccgcagagttgcgggaatatgtctgtacaggccctgcagtctctgccatacgtgtttattccacccgacatccagactccggagagttcctctgtgaaagaggaattaataccccaggaccagaaagaaaacagtctgctgtcctgcaccctccatacgggcaccccaaatagtcctgagcccggacctgtactcgtgaaggatacccctgaggataaatacggtataaaagtcacttggcgcaggaggcagcacctcctggcatacctgagagagagaggaaagttgagcaggtctcagttcctggtgaaaagttag

SEQ ID NO: 88457 - DNA, 675 bp, Artificial Sequence
  derived and/or modified sequence
atgccccctagaaagaagcgtagacaaccctcccaaaaagcacccctcttgtttcaccaacaacccttggaggggccaaagcactcttgtgcaagtacacagcttccaattacgcacactcgccaggtatcgccagacttcgataccgccgctggctcgctctttcccgcttaccagaagcatcaaaacagagccaggcacagttcccggaagccaacaacttcaaaattcccccacctgacattcgagtcccctcagtcaagtagctctgaaaccctgggcatccccctgatcagagagtgcccaagcgagtccgaaaaagatgttagccgcagacccttggttccagtgctgtctcctcagtcctgcggaaacatgtccgtgcaggcgctgcaatctctgccgtacgtgttcattcccccagatatacagacaccagagagctcatcagtcaaggaggaactgatacctcaggaccagaaggaaaactccctcctgtcctgtacgctgcataccggcacccccaattcacccgaacctggcccagttctggtcaaggatactcctgaagacaaatacggtatcaaggttacctggcggaggagacagcacctgctggcatacctccgcgagagaggaaaactgtccaggtcccagtttctggtcaagtcttag

SEQ ID NO: 88458 - DNA, 675 bp, Artificial Sequence
  derived and/or modified sequence
atgccccccagaaagaagagaagacagcccagccagaaggcccccctgctgttccaccagcagcccctggagggccccaagcacagctgcgccagcacccagctgcccatcacccacaccagacaggtgagccccgacttcgacaccgccgccggcagcctgttccccgcctaccagaagcaccagaacagagccagacacagcagcagaaagcccaccaccagcaagttcccccacctgaccttcgagagcccccagagcagcagcagcgagaccctgggcatccccctgatcagagagtgccccagcgagagcgagaaggacgtgagcagaagacccctggtgcccgtgctgagcccccagagctgcggcaacatgagcgtgcaggccctgcagagcctgccctacgtgttcatcccccccgacatccagacccccgagagcagcagcgtgaaggaggagctgatcccccaggaccagaaggagaacagcctgctgagctgcaccctgcacaccggcacccccaacagccccgagcccggccccgtgctggtgaaggacacccccgaggacaagtacggcatcaaggtgacctggagaagaagacagcacctgctggcctacctgagagagagaggcaagctgagcagaagccagttcctggtgaagagctag

SEQ ID NO: 88459 - DNA, 1479 bp, Artificial Sequence
  derived and/or modified sequence
atggagctgaagcccttcttcatgaaggaggtgggcagccacttcgacgacttcgtgaccaacctgatcgagaagagcgccagcctggacaacggcggctgcgccctgaccaccttcagcgtgctggagggcgagaagaacaaccacagagccaaggacctgagagccccccccgagcagggcaagatcttcatcgccagaagaagcctgctggacgagctgctggaggtggaccacatcagaaccatctaccacatgttcatcgccctgctgatcctgttcatcctgagcaccctggtggtggactacatcgacgagggcagactggtgctggagttcagcctgctgagctacgccttcggcaagttccccaccgtggtgtggacctggtggatcatgttcctgagcaccttcagcgtgccctacttcctgttccagcactgggccaccggctacagcaagagcagccaccccctgatcagaagcctgttccacggcttcctgttcatgatcttccagatcggcgtgctgggcttcggccccacctacgtggtgctggcctacaccctgccccccgccagcagattcatcatcatcttcgagcagatcagattcgtgatgaaggcccacagcttcgtgagagagaacgtgcccagagtgctgaacagcgccaaggagaagagcagcaccgtgcccatccccaccgtgaaccagtacctgtacttcctgttcgcccccaccctgatctacagagacagctaccccagaaaccccaccgtgagatggggctacgtggccatgaagttcgcccaggtgttcggctgcttcttctacgtgtactacatcttcgagagactgtgcgcccccctgttcagaaacatcaagcaggagcccttcagcgccagagtgctggtgctgtgcgtgttcaacagcatcctgcccggcgtgctgatcctgttcctgaccttcttcgccttcctgcactgctggctgaacgccttcgccgagatgctgagattcggcgacagaatgttctacaaggactggtggaacagcaccagctacagcaactactacagaacctggaacgtggtggtgcacgactggctgtactactacgcctacaaggacttcctgtggttcttcagcaagagattcaagagcgccgccatgctggccgtgttcgccgtgagcgccgtggtgcacgagtacgccctggccgtgtgcctgagcttcttctaccccgtgctgttcgtgctgttcatgttcttcggcatggccttcaacttcatcgtgaacgacagcagaaagaagcccatctggaacgtgctgatgtggaccagcctgttcctgggcaacggcgtgctgctgtgcttctacagccaggagtggtacgccagacagcactgccccctgaagaaccccaccttcctggactacgtgagacccagaagctggacctgcagatacgtgttctag

SEQ ID NO: 88460 - DNA, 1479 bp, Artificial Sequence
  derived and/or modified sequence
atggaactgaagccatttttcatgaaggaggtgggttcacatttcgacgacttcgtcacaaatctgatcgaaaagtctgcatcacttgacaacggtggctgcgcgttaactacattctcagtccttgagggagagaagaataatcacagagcgaaagatttacgagcgcccccagagcaaggtaagatattcatcgctcggcgaagcctcctggacgaactgttagaagtggaccatattaggactatttatcatatgttcatcgccctcctcatcctctttattctatccacgctcgtagtcgactacatcgatgagggcagactggttctggaattcagcttgctgagctatgctttcgggaagttcccaaccgttgtttggacctggtggattatgtttctgagcacattttcagtgccctactttctgttccagcattgggccactggttattctaaatctagccacccactgatcagaagtctgtttcacggtttcttgtttatgatttttcagatcggggtcctgggctttggacccacttacgttgtccttgcttatacactgcccccagcctccaggttcattatcatattcgaacaaatccggttcgtgatgaaagcccacagcttcgtccgggaaaacgttcctcgagtcttaaattccgctaaagaaaaatcctctactgtgcctattcctaccgtcaaccagtacctgtacttcctcttcgcgccaactctcatttacagggacagctacccaaggaaccccactgttcgatgggggtacgtggcgatgaagtttgcccaggtgtttggctgtttcttttacgtctactacatttttgaaaggttgtgtgctccgctattcagaaatattaagcaggagcctttctcagcccgcgtgttggtgctgtgcgtcttcaactcgatcctgcccggcgtgttaatcctgttcctgacttttttcgccttcttacactgttggctgaatgccttcgctgagatgttgaggtttggtgaccggatgttttataaagattggtggaacagtacatcctactcaaattattacagaacctggaatgtggtggtccacgactggttatactattacgcctacaaagattttttgtggttcttcagcaagcgcttcaagtcggcagcaatgctggcagtttttgccgtaagcgcagtcgtccacgaatacgccctggctgtatgcctcagcttcttctatccggtcctgttcgtgctctttatgttctttggcatggcattcaattttattgtgaatgacagtcggaagaagcctatttggaatgttttgatgtggacgagcctgttcctaggcaatggtgtcctgctttgcttttactcccaggagtggtatgcccgtcagcattgtcctctcaagaatccgacttttcttgactacgtgagaccccgtagttggacttgtaggtatgttttctag

SEQ ID NO: 88461 - DNA, 1479 bp, Artificial Sequence
  derived and/or modified sequence
atggagctgaagcccttcttcatgaaggaggtgggcagccactttgatgactttgtgaccaacctgattgagaagagcgccagcctggacaatggaggctgtgccctgaccaccttctctgtgctggagggggagaagaacaaccaccgggccaaggacctgcgggcccctcctgagcagggcaagatcttcatcgcccggcgcagcctgctggatgagctgctggaggtggaccacatccgcaccatctaccacatgttcatcgccctgctgatcctcttcatcctgagcaccctggtggtggactacattgatgagggccgcctggtgctggagttcagcctgctgtcctatgccttcggcaagttccccaccgtggtgtggacctggtggatcatgttcctgagcaccttctctgtgccctacttcctgttccagcactgggccaccggctacagcaagagcagccaccccctcatccgcagcctcttccacggcttcctgttcatgatcttccagatcggcgtgctgggcttcggccccacctacgtggtgctggcctacaccctgcccccagccagccgcttcatcatcatctttgagcagatccgctttgtgatgaaggcccacagctttgtgagagaaaatgtgccccgggtgctgaacagcgccaaggagaagagcagcacagtgcccatccccaccgtgaaccagtacctgtacttcctgtttgcccccaccctcatctacagagacagctaccccaggaaccccaccgtgcgctggggctacgtggccatgaagtttgcccaggtgtttggctgcttcttctacgtgtactacatctttgagcggctgtgtgcccccctcttcaggaacatcaagcaggagcccttcagcgcccgggtgctggtgctgtgtgtgttcaacagcatcctgcccggggtgctgatcctcttcctgaccttctttgccttcctgcactgctggctgaatgcctttgctgagatgctgcgctttggagacaggatgttctacaaggactggtggaacagcaccagctacagcaactactaccgcacctggaatgtggtggtgcatgactggctgtactactatgcctacaaggacttcctgtggttcttcagcaagcgcttcaagtctgctgccatgctggccgtgtttgctgtgtctgctgtggtgcatgaatatgccctggccgtgtgcctgtccttcttctaccctgtgctgtttgtgctcttcatgttcttcggcatggccttcaacttcatcgtgaatgacagcaggaagaagcccatctggaatgtgctgatgtggaccagcctcttcctgggcaatggagtgctgctgtgcttctacagccaggagtggtacgcccggcagcactgccccctgaagaaccccaccttcctggactatgtgcggcccaggtcctggacctgccgctacgtgttctag

SEQ ID NO: 88462 - DNA, 1479 bp, Artificial Sequence
  derived and/or modified sequence
atggagctgaagcccttcttcatgaaggaggtgggcagccacttcgacgattttgtcaccaacctcatcgagaagtcagcttccctggataatggcggatgtgcgctcacaaccttcagcgtcctagagggggagaagaataaccacagggctaaagacctccgagcccctccagagcaggggaagattttcatcgctaggcgctcgctgcttgacgagctgctggaagtggaccatatacgcactatctaccacatgttcattgccttgcttattctgttcatcttgtctaccttggtggtggactatatagacgaaggaaggttagttctggaatttagcttgctctcttatgccttcggaaagttccccactgtggtttggacgtggtggatcatgtttctgagtaccttcagtgtcccctattttttgttccagcactgggccacaggctattccaagagctcccaccccctaattcgatccctcttccatggatttctctttatgatattccaaataggcgtactgggctttggacccacttacgttgtactggcctatacattgcccccagcctctcggttcatcatcatttttgaacagataaggtttgtgatgaaggctcactctttcgtgcgggagaacgtgccccgcgtcctaaactcggcaaaagagaaatctagcacagtcccaatcccgacagtcaaccagtacctgtattttttgttcgcccctacacttatatatcgggattcataccctcgtaaccccacagttcgatgggggtatgtggccatgaagttcgctcaggtcttcggctgcttcttctacgtgtactacattttcgaaaggctgtgcgcccctctgttcagaaatatcaaacaggaaccattcagtgcacgagtcctcgtgttgtgcgtgttcaattccatactgccaggggtcctcatcctcttccttacattttttgccttcctacactgctggctgaatgcttttgccgaaatgctccggttcggggatagaatgttctataaggactggtggaattcaactagctattcgaactactatcgtacttggaacgtggtggtccacgactggctgtactattacgcctacaaagacttcctctggtttttttccaagcgctttaagagtgctgcgatgctcgcagtgttcgctgtgagtgccgtcgtgcacgaatatgccctggcggtgtgtttaagttttttctacccagtgctgttcgtgctgttcatgttttttggaatggcgtttaactttatcgtcaacgactcacggaagaagcccatttggaatgttctaatgtggacctcactgtttcttgggaacggcgtcctactgtgcttctatagccaggaatggtatgcaagacagcattgccccctcaaaaacccgacattcctggactatgtgaggccccgctcctggacctgtcgctatgtgttttag

SEQ ID NO: 88463 - DNA, 1479 bp, Artificial Sequence
  derived and/or modified sequence
atggagctgaaaccgttctttatgaaagaagtgggttcccatttcgacgatttcgtgactaacttgattgagaagtccgcatcactggataatgggggttgtgcacttactactttcagtgtgctggagggggaaaaaaacaaccaccgcgctaaagatcttagggcaccaccagagcagggcaagattttcattgctcggaggtcattgctagatgaactgctggaggtggaccatatcaggaccatttaccatatgttcattgcactgttaattcttttcatcctgagtaccttagtggttgactatatcgacgagggacgcctggttctggagttctccctcctctcttatgcattcggcaagtttccgactgtcgtgtggacatggtggataatgttcctgtcgacattttccgttccttattttttgttccagcattgggctactggctactcaaaatcatcacacccgctcatccgctccctttttcatggtttcctttttatgatattccagatcggagtccttgggttcggacccacatatgttgtgctggcttacaccctgcctcctgctagtcgatttattatcatttttgaacagatccgatttgtgatgaaagcccactcttttgtgcgggagaatgtcccacgcgtcctgaattcagctaaggaaaaatccagcacagtgcctattcccacagtgaaccagtatctttatttcctctttgctccaactttaatataccgcgacagctaccccaggaaccctaccgtacggtggggttacgtcgcaatgaaatttgctcaggtgttcgggtgcttcttctacgtctattatatcttcgaacgcctctgtgcgcctttatttcgcaacattaaacaggaacccttcagcgccagggtgctcgttctatgcgtcttcaattctatactcccaggtgtcctaattctgttccttacgttcttcgccttcctccattgctggctgaatgctttcgcggagatgctgcgtttcggcgacaggatgttctacaaggactggtggaactcaacctcatactcaaattattatcgtacctggaatgtggtagtccacgactggctctattactacgcatacaaagacttcctctggttcttcagcaagaggtttaaaagcgcagcaatgctggccgtgttcgccgtgagtgccgtcgttcacgagtacgctctggcagtgtgtctctcctttttctacccagtgctgttcgtcttgttcatgttcttcgggatggcctttaactttatcgtgaacgattcaaggaagaaacccatctggaatgtactgatgtggacctcgctgttccttggcaacggcgttctcctgtgcttttatagtcaggagtggtacgcgagacagcactgccctctgaaaaatcctacatttttggactacgtgcgcccacgttcatggacttgtcgctatgtattttag

SEQ ID NO: 88464 - DNA, 2104 bp, Artificial Sequence
  derived and/or modified sequence
gctttagcttagcaggcgacgttgcgggccctgggcgccaggagagcttcccggagtcgaccttcctgctggctgctctgtgaccgcttcccggctctgccctcttggccgaagtgcccgctgccgggcgcgggcctcagacaatacaatggtgggtgaagagaagatgtctctaagaaaccggctgtcaaagtccagggaaaatcctgaggaagatgaagaccagagaaaccctgcaaaggagtccctagagacacctagtaatggaattgaagccattttttatgaaggaagttggcagtcactttgatgattttgtgaccaatctcattgaaaagtcagcatcattagataatggtgggtgcgctctcacaaccttttctgttcttgaaggagagaaaaacaaccatagagcgaaggatttgagagcacctccagaacaaggaaagatttttattgcaaggcgctctctcttagatgaactgcttgaagtggaccacatcagaacaatatatcacatgtttattgccctcctcattctctttatcctcagcacacttgtagtagattacattgatgaaggaaggctggtgcttgagttcagcctcctgtcttatgcttttggcaaatttcctaccgttgtttggacctggtggatcatgttcctgtctacattttcagttccctattttctgtttcaacattgggccactggctatagcaagagttctcatccgctgatccgttctctcttccatggctttcttttcatgatcttccagattggagttctaggttttggaccaacatatgttgtgttagcatatacactgccaccagcttcccggttcatcattatattcgagcagattcgttttgtaatgaaggcccactcatttgtcagagagaacgtgcctcgggtactaaattcagctaaggagaaatcaagcactgttccaatacctacagtcaaccagtatttgtacttcttatttgctcctacccttatctaccgtgacagctatcccaggaatcccactgtaagatggggttatgtcgctatgaagtttgcacaggtctttggttgctttttctatgtgtactacatctttgaaaggctttgtgcccccttgtttcggaatatcaaacaggagcccttcagcgctcgtgttctggtcctatgtgtatttaactccatcttgccaggtgtgctgattctcttccttactttttttgcctttttgcactgctggctcaatgcctttgctgagatgttacgctttggtgacaggatgttctataaggattggtggaactccacgtcatactccaactattatagaacctggaatgtggtggtccatgactggctatattactatgcttacaaggactttctctggtttttctccaagagattcaaatctgctgccatgttagctgtctttgctgtatctgctgtagtacacgaatatgccttggctgtttgcttgagctttttctatcccgtgctcttcgtgctcttcatgttctttggaatggctttcaacttcattgtcaatgatagtcggaaaaagccgatttggaatgttctgatgtggacttctcttttcttgggcaatggagtcttactctgcttttattctcaagaatggtatgcacgtcagcactgtcctctgaaaaatcccacatttttggattatgtccggccacgttcctggacttgtcgttacgtgttttagaagcttggactttgtttcctccttgtcactgaagattgggtagctccctgatttggagccagctgtttccagttgttactgaagttatctgtgttatttggaccactccaggctttacagatgactcactccattcctaggtcacttgaagccaaactgttggaagttcactggagtcttgtacacttaagcagagcagaactttttttgtggggctgggtggggggagaagaccgactaacagctgaagtaatgacagattgttgctgggtcatatcagctttatcccttggtaattatatctgttttgtttcttgactctgtccaatcagagaataaacatcatagtttcttggccactg

SEQ ID NO: 88465 - DNA, 861 bp, Artificial Sequence
  derived and/or modified sequence
atgaaggcccacagcttcgtgagagagaacgtgcccagagtgctgaacagcgccaaggagaagagcagcaccgtgcccatccccaccgtgaaccagtacctgtacttcctgttcgcccccaccctgatctacagagacagctaccccagaaaccccaccgtgagatggggctacgtggccatgaagttcgcccaggtgttcggctgcttcttctacgtgtactacatcttcgagagactgtgcgcccccctgttcagaaacatcaagcaggagcccttcagcgccagagtgctggtgctgtgcgtgttcaacagcatcctgcccggcgtgctgatcctgttcctgaccttcttcgccttcctgcactgctggctgaacgccttcgccgagatgctgagattcggcgacagaatgttctacaaggactggtggaacagcaccagctacagcaactactacagaacctggaacgtggtggtgcacgactggctgtactactacgcctacaaggacttcctgtggttcttcagcaagagattcaagagcgccgccatgctggccgtgttcgccgtgagcgccgtggtgcacgagtacgccctggccgtgtgcctgagcttcttctaccccgtgctgttcgtgctgttcatgttcttcggcatggccttcaacttcatcgtgaacgacagcagaaagaagcccatctggaacgtgctgatgtggaccagcctgttcctgggcaacggcgtgctgctgtgcttctacagccaggagtggtacgccagacagcactgccccctgaagaaccccaccttcctggactacgtgagacccagaagctggacctgcagatacgtgttctag

SEQ ID NO: 88466 - DNA, 861 bp, Artificial Sequence
  derived and/or modified sequence
atgaaggcccatagttttgtgcgcgagaatgtgcctcgcgtgcttaactctgcaaaagaaaaaagctcaaccgtccccatcccaaccgtaaaccaatacctctactttctgttcgcacctactctgatatatcgggattcttacccaagaaaccccacagtacggtgggggtacgtcgctatgaagtttgcccaggtgtttggctgctttttttacgtctactacatcttcgagcgtctctgtgcccccctgttccgaaatatcaagcaggaaccttttagcgctcgtgtcttggtcctatgtgtgttcaatagtatcttgcccggcgtgctcattctgtttctcacttttttcgccttcttgcattgttggctgaacgcatttgccgagatgttgagatttggtgaccgcatgttttacaaggactggtggaattctactagctacagtaactactatcgcacttggaacgtggttgtccatgattggctgtattattatgcctataaggattttctttggttttttagtaagcgttttaagtccgccgccatgttagccgtgtttgcagtctctgccgtcgtgcatgagtatgctctggcagtgtgtctctccttcttctaccccgtgctgtttgttctcttcatgtttttcggaatggcttttaactttatagtgaatgattcgcgtaagaaaccgatttggaacgttttgatgtggacgtccctgtttctgggcaacggcgtgctcctctgtttctactctcaggagtggtacgctcgccagcactgccctctgaaaaatcccacatttctggattacgtcaggcctcggtcctggacctgtaggtatgtgttttag

SEQ ID NO: 88467 - DNA, 861 bp, Artificial Sequence
  derived and/or modified sequence
atgaaggcccacagctttgtgagagaaaatgtgccccgggtgctgaacagcgccaaggagaagagcagcacagtgcccatccccaccgtgaaccagtacctgtacttcctgtttgcccccaccctcatctacagagacagctaccccaggaaccccaccgtgcgctggggctacgtggccatgaagtttgcccaggtgtttggctgcttcttctacgtgtactacatctttgagcggctgtgtgcccccctcttcaggaacatcaagcaggagcccttcagcgcccgggtgctggtgctgtgtgtgttcaacagcatcctgcccggggtgctgatcctcttcctgaccttctttgccttcctgcactgctggctgaatgcctttgctgagatgctgcgctttggagacaggatgttctacaaggactggtggaacagcaccagctacagcaactactaccgcacctggaatgtggtggtgcatgactggctgtactactatgcctacaaggacttcctgtggttcttcagcaagcgcttcaagtctgctgccatgctggccgtgtttgctgtgtctgctgtggtgcatgaatatgccctggccgtgtgcctgtccttcttctaccctgtgctgtttgtgctcttcatgttcttcggcatggccttcaacttcatcgtgaatgacagcaggaagaagcccatctggaatgtgctgatgtggaccagcctcttcctgggcaatggagtgctgctgtgcttctacagccaggagtggtacgcccggcagcactgccccctgaagaaccccaccttcctggactatgtgcggcccaggtcctggacctgccgctacgtgttctag

SEQ ID NO: 88468 - DNA, 861 bp, Artificial Sequence
  derived and/or modified sequence
atgaaggcccacagcttcgtgcgggagaacgtgccccgggtgctgaatagcgctaaagaaaaatcctctaccgttcctatcccgaccgtgaaccagtatctgtatttcctctttgctcccactctgatatatagggacagctacccccggaatcccactgtccgctgggggtacgttgctatgaaattcgcacaggttttcgggtgttttttctatgtgtactacattttcgagcggttgtgtgcacccttgtttcgcaatatcaagcaagaaccttttagcgccagggtgctggtattatgcgtatttaactctattctaccgggcgtgctgatccttttccttacattcttcgcctttctccattgctggctgaacgcgtttgccgaaatgcttcgcttcggcgatcgaatgttctacaaagattggtggaattcaactagctacagcaactattacagaacttggaacgtcgtggtacacgactggttatattattatgcttataaagacttcctctggtttttcagcaagaggttcaagtctgcagctatgctggcggttttcgccgtgagcgcggttgtgcatgagtacgctctcgccgtgtgtctgtctttcttctaccctgtgttgttcgtactcttcatgttcttcggtatggccttcaatttcattgtaaacgactcgaggaaaaaacccatttggaacgtgctgatgtggacatctctgtttctggggaatggggtcctcctgtgtttctattcccaggaatggtacgccaggcagcactgcccgctaaaaaacccgacctttcttgactacgtccgccccaggtcttggacgtgtcgttatgtcttttag

SEQ ID NO: 88469 - DNA, 861 bp, Artificial Sequence
  derived and/or modified sequence
atgaaggctcattcctttgtgcgggagaatgtcccacgagtcttgaactccgccaaagaaaaatcctcgaccgtgcccataccgacggttaatcaatatctttattttctctttgcaccgacgctgatctatagagactcttatcccaggaatcctacagtaagatggggatatgtcgctatgaaattcgctcaagtcttcggttgtttcttctatgtgtactacatctttgaacgcctgtgcgcacccctgtttagaaacataaagcaggaacccttcagtgccagggtgctggtgctgtgtgtctttaacagcattctaccaggagtgctcatcctgtttctgaccttttttgcttttttgcattgctggttaaatgctttcgccgaaatgcttcggtttggtgatcgaatgttttataaagactggtggaactcaacatcatattccaactattaccgtacctggaatgtggtggtccacgactggttgtattattatgcttataaagacttcttatggttcttctccaagaggtttaagtctgctgccatgctcgctgtgttcgcagtgagcgctgttgtccacgagtacgccctggccgtatgccttagctttttctaccccgtacttttcgtgctgtttatgttcttcggcatggccttcaactttattgtgaacgacagtcgcaagaaacctatatggaatgttcttatgtggacttcactgtttttgggcaatggcgtcctgttgtgcttctacagccaggagtggtacgcccgacaacactgcccactcaagaatccaacattccttgactatgtacgaccacgctcttggacctgtaggtacgtgttttag

SEQ ID NO: 88470 - protein, 71 aa, Artificial Sequence
  derived and/or modified sequence
MEKILILLLVALSVAYAAPGPRGIIINLTLYGIYYKCPCERGLTCEGDKTIVGSITNTNFGICHDAGRSKQ

SEQ ID NO: 88471 - DNA, 216 bp, Artificial Sequence
  derived and/or modified sequence
atggaaaagatcctgatcctgttactcgttgctttgtcagtggcttacgcggcccctggccctcgtggcataattattaatttgacactatacggaatctattacaagtgcccctgcgagcgtggtttaacatgtgagggcgacaaaaccattgtggggagcataactaataccaatttcggtatatgccacgatgcagggcgctcaaaacagtag

SEQ ID NO: 88472 - DNA, 216 bp, Artificial Sequence
  derived and/or modified sequence
atggagaagatcctgatcctgctgctggtggccctgtctgtggcctatgctgcccctggcccccggggcatcatcatcaacctgaccctgtatggcatctactacaagtgcccctgtgagcggggcctgacctgtgagggggacaagaccatcgtgggcagcatcaccaacaccaactttggcatctgccatgatgctggccgcagcaagcagtag

SEQ ID NO: 88473 - DNA, 216 bp, Artificial Sequence
  derived and/or modified sequence
atggagaagatcctgatcctgctgctggtggccctgagcgtggcctacgccgctcccggtccacgaggcatcatcatcaacctgaccctgtacggaatttactataagtgtccgtgtgagcgcggcctgacttgcgagggagacaaaactattgtgggcagtatcaccaacacaaatttcggtatatgccacgacgcagggagatcaaaacagtag

SEQ ID NO: 88474 - DNA, 216 bp, Artificial Sequence
  derived and/or modified sequence
atggaaaaaatcctgatcctcctgcttgtggcactctccgtggcctatgccgctcccggtcctcggggaattatcatcaatcttacactgtatggcatctactacaagtgcccctgcgagcgcggactgacgtgtgagggcgataaaaccatcgttgggagcattacaaatacaaactttggaatttgccacgacgcaggccgttctaagcagtag

SEQ ID NO: 88475 - DNA, 416 bp, Artificial Sequence
  derived and/or modified sequence
ctgtctcccgccacccacaccagctgtcccactcaccatggagaagatcctgatcctcctgcttgtcgccctctctgtggcctatgcagctcctggcccccgggggatcattatcaacctgacgctctatgggatttactacaagtgtccctgtgagcgtggcctgacctgtgagggagacaagaccatcgtgggctccatcaccaacaccaactttggcatctgccatgacgctggacgctccaagcagtgagactgcccacccactcccacacctagcccagaatgctgtaggccactaggcgcaggggcatctctcccctgctccagcgcatctcccgggctggccacctccttgaccagcatatctgttttctgattgcgctcttcacaattaaaggcctcctgcaaacctt

SEQ ID NO: 88476 - DNA, 216 bp, Artificial Sequence
  derived and/or modified sequence
atggagaagatcctgatcctgctgctggtggccctgagcgtggcctacgccgcccccggccccagaggcatcatcatcaacctgaccctgtacggcatctactacaagtgcccctgcgagagaggcctgacctgcgagggcgacaagaccatcgtgggcagcatcaccaacaccaacttcggcatctgccacgacgccggcagaagcaagcagtag

SEQ ID NO: 88477 - protein, 400 aa, Artificial Sequence
  derived and/or modified sequence
METQELRGALALLLLCFFTSASQDLQVIDLLTVGESRQMVAVAEKIRTALLTAGDIYLLSTFRLPPKQGGVLFGLYSRQDNTRWLEASVVGKINKVTNALHSILGEGNVPDPKHHYGVSGFHEQRSHCSPNPCFRGVDCMEVYEYPGYRCGPCPPGLQGNGTHCSDINECAHADPCFPGSSCINTMPGFHCEACPRGYKGTQVSGVGIDYARASKQVCNDIDECNDGNNGGCDPNSICTNTVGSFKCGPCRLGFLGNQSQGCLPARTCHSPAHSPCHIHAHCLFERNGAVSCQCNVGWAGNGNVCGTDTDIDGYPDQALPCMDNNKHCKQDNCLLTPNSGQEDADNDGVGDQCDDDADGDGIKNVEASPMDWTIALKSPTHYRQTGMRTGWEMLATAALK

SEQ ID NO: 88478 - protein, 836 aa, Artificial Sequence
  derived and/or modified sequence
METQELRGALALLLLCFFTSASQDLQVIDLLTVGESRQMVAVAEKIRTALLTAGDIYLLSTFRLPPKQGGVLFGLYSRQDNTRWLEASVVGKINKVTNALHSILGEQTKALVTQLTLFNQILVELRDDIRDQVKEMSLIRNTIMECQVCGFHEQRSHCSPNPCFRGVDCMEVYEYPGYRCGPCPPGLQGNGTHCSDINECAHADPCFPGSSCINTMPGFHCEACPRGYKGTQVSGVGIDYARASKQVCNDIDECNDGNNGGCDPNSICTNTVGSFKCGPCRLGFLGNQSQGCLPARTCHSPAHSPCHIHAHCLFERNGAVSCQCNVGWAGNGNVCGTDTDIDGYPDQALPCMDNNKHCKQDNCLLTPNSGQEDADNDGVGDQCDDDADGDGIKNVEDNCRLFPNKDQQNSDTDSFGDACDNCPNVPNNDQKDTDGNGEGDACDNDVDGDGIPNGLDNCPKVPNPLQTDRDEDGVGDACDSCPEMSNPTQTDADSDLVGDVCDTNEDSDGDGHQDTKDNCPQLPNSSQLDSDNDGLGDECDGDDDNDGIPDYVPPGPDNCRLVPNPNQKDSDGNGVGDVCEDDFDNDAVVDPLDVCPESAEVTLTDFRAYQTVVLDPEGDAQIDPNWVVLNQGMEIVQTMNSDPGLAVGYTAFNGVDFEGTFHVNTVTDDDYAGFLFSYQDSGRFYVVMWKQTEQTYWQATPFRAVAQPGLQLKAVTSVSGPGEHLRNALWHTGHTPDQVRLLWTDPRNVGWRDKTSYRWQLLHRPQVGYIRVKLYEGPQLVADSGVIIDTSMRGGRLGVFCFSQENIIWSNLQYRCNDTVPEDFEPFRRQLLQGRV

SEQ ID NO: 88479 - DNA, 1062 bp, Artificial Sequence
  derived and/or modified sequence
atgagcaaccccacccagaccgacgccgacagcgacctggtgggcgacgtttgcgatacaaatgaagactctgatggagacgggcaccaggacaccaaggacaactgccctcaactgccaaattcaagccagcttgattccgacaatgatggtctgggagacgaatgcgacggagacgacgacaacgacggcatacctgattatgtcccacctgggccagataactgccgactagtacctaacccaaaccaaaaggactcagacggcaatggcgtgggcgacgtgtgcgaagatgacttcgacaatgatgcagttgtcgaccctctcgacgtgtgcccggagagcgcagaggtcaccctgacagactttcgggcctatcagaccgtggtcctcgaccccgagggcgacgcgcagatcgaccccaactgggtagtacttaaccaaggaatggaaatcgtccagaccatgaattcggaccctggactggccgtaggctataccgccttcaacggcgtggattttgagggcaccttccatgtcaacaccgtgaccgacgacgactacgccggctttctgttcagctaccaagattctgggcggttctatgtggtgatgtggaaacaaacagaacagacctactggcaggccacccctttccgcgctgtggcccagcctggcctgcagcttaaggcggtgacgtccgtgagcggaccaggtgagcatctcagaaacgcactgtggcacactgggcatacgccagaccaagtaagactgctgtggacagaccccaggaacgtcggctggcgggataaaacgagctaccgctggcagctgctgcacagaccacaggttggctatattagagtcaaactatatgagggcccccagttggttgctgactctggagtgatcatcgataccagtatgcggggcgggaggctgggtgtcttttgttttagccaggaaaatattatctggagtaatctacagtatcgctgcaacgacacagtgccagaggattttgaacctttcagacgccagctcctgcagggcagggtctag

SEQ ID NO: 88480 - DNA, 1203 bp, Artificial Sequence
  derived and/or modified sequence
atggagacacaggagctccgcggagcactggctctcctgttactgtgcttcttcacttctgcatcccaggatttgcaagtaatcgacctcctaacggtcggggaatcccggcagatggtggccgtggctgaaaaaataaggactgcactgctgaccgcgggtgacatttacctcctgtcaacctttcggctgcctccaaagcagggaggcgtgctgtttggtctgtacagccgccaggacaacacaaggtggctcgaagcaagtgtcgtcggcaagattaacaaagttacaaatgcgcttcactcaatcctcggtgaaggcaacgtcccagatcccaagcatcattacggggtcagtggcttccacgaacaacgtagccactgttcccccaacccctgtttcagaggggtggattgcatggaggtatatgaataccccggatacaggtgtggtccatgtccccctggcctccagggcaacgggactcattgtagcgacatcaacgaatgcgcccatgcggacccttgcttcccgggttctagctgcatcaacaccatgcctgggttccattgcgaggcttgcccaagagggtataaaggtacacaggtgtctggcgtgggaatcgactacgctcgcgctagcaaacaggtgtgtaatgatatcgacgagtgtaatgacggcaacaacggaggttgtgatcccaacagtatctgtaccaatacagtgggctctttcaaatgtgggccttgtagactgggtttcctcggcaaccagtcgcagggatgcctgcccgcaaggacgtgtcactcaccagcgcacagtccttgccacatccacgctcactgcctgttcgaaaggaatggcgctgtctcctgccagtgcaacgttggttgggcgggaaacggcaacgtgtgcgggacggacaccgacattgatggttatccagatcaagccctgccatgtatggataacaacaaacactgtaaacaggacaattgtctcttaacacctaacagcggtcaggaagacgccgataatgatggagtgggcgatcaatgcgatgacgacgccgacggcgacggtataaagaacgtggaggcttccccgatggactggacgattgccctcaagtctcccacacactaccggcagactggaatgaggaccggatgggaaatgctggcgacggcagccttgaaatag

SEQ ID NO: 88481 - DNA, 2511 bp, Artificial Sequence
  derived and/or modified sequence
atggaaactcaggagctgcgaggagcactcgccctgctcctcctctgcttttttacgagcgctagtcaggatttacaggtgattgatctccttacagttggtgagtcaagacagatggtggcagtcgcagaaaaaattaggaccgccctcctcaccgcgggagacatctacctcctttccacattcaggcttcctcctaagcagggcggagtcctatttggattgtattcgaggcaagataacacccgatggttggaggcttcagtggtaggaaagatcaacaaggttactaatgcacttcacagcattttgggtgagcagactaaagctcttgtgacacagcttactctgtttaaccagattctcgtggagttgcgagatgatatcagggatcaggtcaaagaaatgagtctcattaggaacactattatggagtgccaggtttgcggttttcacgaacaacgctcccactgttcgccaaatccctgcttcagaggcgtggactgcatggaagtttatgagtatcccggttacaggtgtggcccttgcccccctggtctgcaaggcaatggtacacactgtagtgatatcaatgagtgtgcccacgccgacccatgcttcccgggttctagctgtatcaataccatgcccggttttcactgcgaggcatgcccacgcggatacaaaggcacacaggtgtccggggttggcatagactatgctagggccagtaagcaggtatgtaacgatatagacgaatgcaatgacgggaataacggaggttgtgatcctaatagcatttgtacaaacaccgttggctccttcaagtgcggcccttgtcggttgggcttcctcggaaatcagtcccagggttgtctccctgcccgtacttgtcatagcccggctcacagcccctgccacatccacgcccactgtttgtttgaacgaaatggcgcagtgtcttgccagtgtaacgtggggtgggctgggaatggaaacgtgtgtgggacggacacagacattgacggataccccgaccaggctctcccgtgtatggataacaacaaacactgtaaacaagacaattgtttactcacaccaaacagcggccaagaagatgcagacaatgacggggtgggggaccagtgtgacgacgatgcagatggcgatggcatcaagaatgtggaggacaattgccgcttgtttcctaacaaagaccaacagaactctgacactgattcattcggcgatgcctgtgacaattgcccaaacgtcccgaacaatgaccagaaggacaccgatggaaatggagaaggcgacgcctgtgataatgacgtggatggggatggaattcctaatggactcgataactgcccgaaggtccccaaccctctgcagaccgacagagacgaggatggagtcggcgatgcatgcgacagctgtccagaaatgtcaaacccgactcagactgatgcggacagcgaccttgtgggggatgtttgtgacacgaatgaggactctgacggagatggccaccaagacaccaaagacaactgccctcagctgcctaattcatcacagctggatagtgacaatgacggcctcggcgacgaatgcgatggcgacgacgacaatgacggcatcccagattatgtcccacccggtcccgataactgtaggctagtgcccaacccaaatcagaaagacagtgacgggaacggggtaggcgacgtatgcgaagatgactttgataacgatgctgtggtggacccgcttgacgtatgccctgagtcagctgaagtcactctaaccgacttcagggcgtaccaaacggtcgtgttggaccctgaaggagacgctcagatagacccgaactgggtggtgctgaaccagggcatggagatcgtgcagacaatgaactccgatccgggtttggctgtgggatataccgctttcaatggagtagacttcgaaggcacttttcatgtgaacaccgtgactgatgatgattatgctggcttcctgtttagttaccaagactcaggccgtttttatgtggttatgtggaaacagacagagcagacctattggcaggccacaccattccgggcagtggcccagccaggcctgcagttgaaggcggtgacaagtgtatccggcccaggggagcacctgaggaacgccctctggcacaccggacatacccctgaccaggtcaggctcctgtggacggaccctcgaaacgtggggtggcgggataagacatcctatcgttggcagctgctgcacaggccacaggttggatatatcagggtaaaactatatgagggcccacagcttgtggcagacagcggcgtgatcattgacactagcatgcgaggcggaagattaggggttttctgtttcagccaggaaaacattatttggagtaacctgcagtacaggtgcaatgataccgtccctgaggacttcgaaccttttcgcagacagttgcttcaggggcgtgtatag

SEQ ID NO: 88482 - DNA, 1062 bp, Artificial Sequence
  derived and/or modified sequence
atgagcaaccctacgcagacagatgccgattccgacctggttggagatgtgtgtgacacaaatgaggattctgacggcgatggccatcaggataccaaggataattgcccccaacttcccaatagcagccagcttgattcagacaatgatggcctgggcgatgaatgcgatggcgatgacgataacgacggaatccccgactacgtaccaccgggtcctgacaattgccgcctggttcccaacccaaatcagaaagactctgacggaaacggggtcggcgacgtgtgtgaggacgatttcgacaatgatgccgtggtcgatccactcgatgtgtgtcccgagagtgctgaggtgactcttactgacttccgcgcttaccaaacagtggtgttggaccccgagggtgatgcgcagattgatcccaactgggtagtacttaatcaaggtatggagatcgtgcagaccatgaacagcgatcccggattggccgtgggttatactgcttttaatggggtggatttcgaaggaaccttccacgtaaatacagtcacagacgacgattacgccggtttcctttttagctatcaagacagtgggaggttctacgtagtgatgtggaaacaaacggaacagacttactggcaagccacccctttcagggccgtcgcacaacccggtttgcaactgaaggctgtgacctccgtgtcgggaccaggggagcacctgcgcaatgctctttggcataccggccacactcccgaccaagtgaggctgctttggacagatccaaggaacgtcggctggagggataaaactagttataggtggcaactcctccaccgacctcaagttgggtatatccgggtgaaactctatgaaggtcctcaactggtcgcggactctggagtgatcatcgacacgtcgatgagaggcggtcgcctcggtgttttttgcttctcccaggagaacataatatggagcaatctgcagtatcggtgcaacgacacagtaccagaggactttgagccatttcgcagacagctcttgcagggcagagtgtag

SEQ ID NO: 88483 - DNA, 1833 bp, Artificial Sequence
  derived and/or modified sequence
gggtagtgagccggctgagaggcatggagacgcaggaacttcggggggccctggctcttctcctcctttgctttttcacatctgccagtcaggatctgcaggtaattgacctgctgactgtgggcgagtctcggcagatggtagctgtggcagagaagatccggacagccttgctcactgctggggacatctacctcttatccaccttccgcctgccccccaagcagggtggtgtcctctttggcctctattctcgccaagacaacactcgatggctggaggcctctgttgtaggcaagatcaacaaagtgaccaatgcactgcactccattctaggtgaaggaaatgtccctgatccgaaacaccattatggagtgtcaggcttccatgagcagcgttcccactgcagccccaatccctgcttccgaggtgtggactgcatggaagtgtacgagtacccaggctaccgctgtgggccctgcccccctggcctgcagggcaacggcacccactgcagtgacatcaatgagtgtgctcacgctgacccctgtttcccgggctccagctgcatcaacaccatgcccggcttccactgtgaggcctgtcctcgagggtacaagggcacacaggtgtctggtgtgggcattgactatgcccgggccagcaaacaggtctgcaatgacatcgatgaatgcaacgatggcaacaatggtggctgtgacccaaactccatctgcaccaacactgtgggctctttcaagtgtggtccctgccgcctgggtttcctgggcaaccagagccagggctgcctcccagcccggacctgccacagcccagcccacagcccctgccacatccatgctcactgtctctttgaacgcaatggtgcagtgtcctgccagtgtaacgtgggctgggctgggaatgggaacgtgtgtgggactgacacagacatcgatggctacccagaccaagcactgccctgcatggacaacaacaaacactgcaaacaggacaactgccttttgacacccaactctgggcaggaagatgctgataatgatggtgtgggggaccagtgtgatgatgatgctgatggggatgggatcaagaatgttgaggcatccccaatggattggacaattgccctaaagtccccaacccactacagacagacagggatgaggacggggtgggagatgcttgcgacagctgccctgaaatgagcaatcctacccagacagatgcagacagcgacctggtgggggatgtctgtgatactaatgaagacagaccttcacctcacctggctgactgccaggggtctgattgtatggagagcaggctccagagactcccaggcagaagcgaagggaaggacaaggagtacctttaaatcctttatttggtacctgttcttctgattagcgatggggatgggcatcaggacaccaaggacaactgcccacagctgccaaatagctcccagctggactctgataacgatggacttggagatgagtgtgatggggatgatgacaatgatggcatcccagattatgtgcctcctggtcccgataactgccgcctggtacccaatcccaatcagaaggactcagatggcaatggcgttggtgatgtgtgtgaggatgactttgacaatgatgctgtggtcgaccccctggatgtgtgtcctgaaagtgcagaggtaacgcttacggattttcgggcctatcagaccgtcgtcctggatcctgagggtgatgctcagattgacccaaactgggttgtgctcaaccagggcatggaaatcgttcagaccatgaacagtga

SEQ ID NO: 88484 - DNA, 1203 bp, Artificial Sequence
  derived and/or modified sequence
atggagactcaagaacttcggggtgctctggccctgctcctgctgtgctttttcacaagcgcctcccaagacctccaggtgatagatttactgacagtcggcgagagtcgccagatggtggctgtggccgaaaagattcgaacagctcttctgacagcaggcgatatttaccttctgtctactttcaggctgccaccaaagcaagggggcgtgctcttcggactatacagtcgacaggataatactcgatggttggaggcaagcgtggtcgggaagatcaacaaggttactaatgctctccattctatcctgggggaaggcaacgtgcctgaccctaagcatcattacggggttagcgggtttcatgagcaacggtctcattgtagcccgaatccatgcttccggggggttgactgcatggaagtgtacgagtatcccgggtatcgctgcggaccatgcccaccaggtcttcagggaaacggtacacactgtagcgacatcaatgaatgcgcccacgcagacccatgtttccccggttcttcttgtattaacacgatgcccggcttccattgcgaagcttgtccacggggctataaaggcactcaggtgagcggagtgggaatcgactatgcacgggcctcaaaacaggtatgcaatgatatagacgagtgcaatgacggtaataacggcggctgtgacccaaattctatatgtacaaacaccgttggaagctttaagtgcgggccttgtaggctgggatttctagggaatcagtcacagggatgtctacccgcccggacctgccactcgccagctcatagcccatgccacattcacgcacattgcttatttgaaaggaacggtgcggtctcgtgccagtgcaacgtgggatgggccggaaatggcaatgtctgcggaacagacaccgatatcgatggataccctgatcaggcgctcccctgtatggataataacaaacattgtaagcaggataattgccttcttactcctaattctggacaagaggatgcagataacgacggggtgggagatcagtgcgacgacgatgctgacggcgacgggatcaagaatgtcgaggcttccccaatggattggaccattgctttaaagagcccaacacattacagacagaccggtatgcggaccggctgggaaatgcttgctacagccgctctgaaatag

SEQ ID NO: 88485 - DNA, 2511 bp, Artificial Sequence
  derived and/or modified sequence
atggaaactcaagaactccgcggtgctttggctttactgttgctgtgcttcttcacatctgccagtcaggaccttcaagtgatagacttacttactgttggtgaatcaaggcagatggtggcagtcgctgaaaaaattaggacagcactgctaactgccggggatatctacctgctttccacctttagattgccccccaaacagggcggagtgctgttcggcttatatagtcgtcaggataatacacgttggttggaagcctcagtcgtcgggaaaattaataaagtgacaaacgccctgcactcaatcttgggcgagcagactaaggcgttggtgacccagcttacactctttaaccagatcctggtcgaactgagagatgatatccgtgaccaggtcaaggagatgtctctgatcaggaataccatcatggagtgccaggtgtgcggtttccatgaacagaggagccattgctctccgaacccgtgcttccgcggagtcgactgcatggaagtatatgagtacccagggtacagatgtggcccttgcccccccggcctgcaggggaacggaactcactgttcagatatcaatgagtgtgctcacgcggatccctgctttccgggcagcagctgcataaatacaatgccgggattccactgcgaagcatgtcccagggggtacaagggaacacaagtgagcggggttggcattgactacgcccgggcgagtaaacaggtgtgcaatgatatcgatgagtgtaacgacgggaacaatggcggctgtgatccaaactccatttgcacgaataccgttggctctttcaagtgcggaccctgcaggttgggctttctgggcaaccagagccagggatgtcttccggcgcgcacctgtcattcgccagcacattctccttgtcacatccacgcgcactgcttgtttgaaaggaatggcgcagtctcttgccagtgcaacgttggctgggccggcaatggcaacgtatgcggcacagatactgatatagacggatacccagaccaggcactcccttgcatggacaataacaaacattgtaagcaggacaattgccttttaacccccaactccggacaggaagatgctgataatgacggcgtcggagatcagtgtgacgacgatgctgacggtgatggcatcaaaaatgttgaggacaactgtcgacttttcccgaataaggatcaacagaactcagacaccgactcctttggagacgcctgtgataactgtcctaacgttccaaacaatgatcaaaaggacactgacggtaacggcgaaggcgacgcctgcgataatgacgtcgacggcgacgggatcccaaacggcctcgacaattgtcctaaggttcctaatccattgcagaccgatagggatgaagacggcgtgggggacgcctgtgacagttgtccggaaatgtctaaccctacccaaacagatgccgacagcgatttggtcggtgatgtatgcgacacaaatgaggactctgacggtgatgggcaccaggataccaaggacaattgcccacagttaccgaactcgagccaactagattcagataacgatggccttggcgacgaatgcgatggggatgatgataacgacggaatcccggactacgttccacccggtcctgacaactgtaggctggtccctaacccaaaccagaaggacagtgatggcaatggcgtaggggacgtgtgcgaagatgacttcgacaacgatgcagtggttgaccctctggacgtctgtcctgagagcgcggaggtgactctcaccgactttcgcgcctatcagaccgtggtgcttgaccctgagggggacgctcagatcgatcccaattgggttgtcctgaaccaaggcatggagattgtgcagacaatgaacagcgacccgggacttgccgtcgggtacactgcattcaatggcgtcgactttgagggcaccttccacgtgaacaccgtgacagacgatgattatgccggcttcctgttcagctaccaggacagcggcagattttatgtggtaatgtggaagcagacagagcagacttactggcaggccactccctttcgcgcagttgcacagcctggtttgcagctgaaagccgttacgtccgtgagtggccccggagagcatttaaggaacgcattgtggcataccggccacacacccgatcaggtgagattgttgtggacagacccgagaaacgtgggctggcgcgataaaacctcatacagatggcagctgctccatagaccccaggtagggtacatcagagtgaaattatacgaaggtcctcaacttgtcgcagacagcggagtgattatcgacacaagcatgagaggaggacgactcggggtgttctgcttttcccaggaaaacattatatggtctaacctgcagtataggtgtaacgacacggttccagaggacttcgaaccattccggcgacagctcctgcaaggacgcgtttag

SEQ ID NO: 88486 - DNA, 1062 bp, Artificial Sequence
  derived and/or modified sequence
atgagtaacccaacacagaccgacgccgattccgacttggtgggtgatgtgtgcgatacaaacgaagattccgatggtgatggccatcaagacacaaaggacaattgtccccagttgcccaattcttcacagttagattctgacaacgatggcctgggcgacgagtgcgatggggatgatgacaatgacggaattcctgactatgtcccacctggacctgataactgccgactggtgccaaaccccaatcagaaagattctgacgggaatggcgttggcgatgtctgcgaggatgacttcgataatgatgctgttgtggatcccttggacgtctgtccagaaagcgccgaagtgacgctgacagatttccgtgcctaccagaccgtcgtcctcgaccccgaaggcgatgcacagattgaccctaactgggttgtattaaaccaggggatggaaatagtgcagacaatgaatagtgaccccggcctggctgtcggctatacggcattcaacggagtcgattttgaaggcacatttcatgtaaacacagtcacagatgacgactacgccgggtttcttttctcgtaccaggattccggccgcttctatgtggtgatgtggaaacagacggagcaaacgtactggcaggctacacccttccgcgcagtggcccaaccgggtttacagcttaaagccgtcacatccgtttcgggtccaggtgagcatctgagaaacgccctctggcatacaggccacacccccgaccaggtgcgcttactttggaccgatccacgtaatgtagggtggagagataagaccagctacagatggcagctgctgcatagacctcaggtgggctatattcgggttaaactgtatgaggggccacaactggttgccgacagcggagtgattatcgatacgagtatgcgcggaggtcggctgggggtattctgtttcagtcaggagaatattatctggtctaatttacagtacaggtgcaacgatacagttcctgaggattttgagccattccggagacaactcttgcagggaagggtatag

SEQ ID NO: 88487 - DNA, 2727 bp, Artificial Sequence
  derived and/or modified sequence
cagctgcctgcctgccaggggtagtgagccggctgagaggcatggagacgcaggaacttcggggggccctggctcttctcctcctttgctttttcacatctgccagtcaggatctgcaggtaattgacctgctgactgtgggcgagtctcggcagatggtagctgtggcagagaagatccggacagccttgctcactgctggggacatctacctcttatccaccttccgcctgccccccaagcagggtggtgtcctctttggcctctattctcgccaagacaacactcgatggctggaggcctctgttgtaggcaagatcaacaaagtgaccaatgcactgcactccattctaggggagcagaccaaggcgctggtcacccaactcaccctcttcaaccagatcctggtggagctgcgggatgatatacgagaccaggtgaaggaaatgtccctgatccgaaacaccattatggagtgtcaggtgtgcggcttccatgagcagcgttcccactgcagccccaatccctgcttccgaggtgtggactgcatggaagtgtacgagtacccaggctaccgctgtgggccctgcccccctggcctgcagggcaacggcacccactgcagtgacatcaatgagtgtgctcacgctgacccctgtttcccgggctccagctgcatcaacaccatgcccggcttccactgtgaggcctgtcctcgagggtacaagggcacacaggtgtctggtgtgggcattgactatgcccgggccagcaaacaggtctgcaatgacatcgatgaatgcaacgatggcaacaatggtggctgtgacccaaactccatctgcaccaacactgtgggctctttcaagtgtggtccctgccgcctgggtttcctgggcaaccagagccagggctgcctcccagcccggacctgccacagcccagcccacagcccctgccacatccatgctcactgtctctttgaacgcaatggtgcagtgtcctgccagtgtaacgtgggctgggctgggaatgggaacgtgtgtgggactgacacagacatcgatggctacccagaccaagcactgccctgcatggacaacaacaaacactgcaaacaggacaactgccttttgacacccaactctgggcaggaagatgctgataatgatggtgtgggggaccagtgtgatgatgatgctgatggggatgggatcaagaatgttgaggacaactgccggctgttccccaacaaagaccagcagaactcagatacagattcatttggtgatgcctgtgacaattgccccaacgttcccaacaatgaccagaaggacacagatggcaatggggaaggagatgcctgtgacaacgacgtggatggggatggcatccccaatggattggacaattgccctaaagtccccaacccactacagacagacagggatgaggacggggtgggagatgcttgcgacagctgccctgaaatgagcaatcctacccagacagatgcagacagcgacctggtgggggatgtctgtgatactaatgaagacagcgatggggatgggcatcaggacaccaaggacaactgcccacagctgccaaatagctcccagctggactctgataacgatggacttggagatgagtgtgatggggatgatgacaatgatggcatcccagattatgtgcctcctggtcccgataactgccgcctggtacccaatcccaatcagaaggactcagatggcaatggcgttggtgatgtgtgtgaggatgactttgacaatgatgctgtggtcgaccccctggatgtgtgtcctgaaagtgcagaggtaacgcttacggattttcgggcctatcagaccgtcgtcctggatcctgagggtgatgctcagattgacccaaactgggttgtgctcaaccagggcatggaaatcgttcagaccatgaacagtgaccctggcttggcagttggatacacggccttcaatggtgtggactttgaaggcaccttccatgtgaacacagtgactgatgatgactacgcaggctttctcttcagttatcaagacagtggccgcttctacgtagtcatgtggaagcagaccgagcagacctactggcaggctacacccttccgggcggttgcccagcccgggctgcagctcaaggcagtgacatcagtgtctggcccaggtgagcacctccgaaatgccctgtggcatactggccacacccctgatcaggtacgactgctgtggacagacccacgaaatgtgggctggcgggacaagacctcctatcgctggcagcttctgcaccggcctcaagttggctacattcgggtgaagctctatgagggaccccagcttgtggcggattctggggtgatcattgacacatccatgcgaggggggcgtcttggtgtattctgcttctcccaagaaaacataatttggtccaatctccagtatcgatgcaatgacacagtgcctgaggactttgagccattccggaggcagctgctccagggaagggtgtgaggaggaggccaccagattcagaattcagaattttagaccctttggccttggggtccatcctggagaccctgaggtctaagctacagcccctcagccaaccacagacccttctctggctcccaaaaggagttcagtcccagaggggtggtcaccccacccttcaggggatgagaag

SEQ ID NO: 88488 - DNA, 1203 bp, Artificial Sequence
  derived and/or modified sequence
atggagacacaagaattgagaggcgctctggcactcctgcttttgtgttttttcaccagcgcgagtcaggacctgcaggttatcgatctgcttaccgtgggggagtctcgacaaatggtggctgtggctgagaaaattaggacagccctgctgaccgctggagacatctaccttctaagtaccttcagacttccgccaaagcaagggggagtgttgttcggcctttattccagacaggataacacacgatggctggaagcatccgttgtgggaaaaattaacaaagtgacgaatgcactccattccatcctcggagagggaaatgttcctgaccctaagcaccactacggtgtatccggattccacgagcagcgatcccattgcagccctaatccttgcttcagaggcgtggattgtatggaggtgtatgagtacccgggatacaggtgcggaccatgtcctcccgggctccaagggaacggcactcattgctcagacattaacgaatgtgcacacgcagatccttgctttcctggttcttcttgcatcaacaccatgccaggtttccattgtgaagcctgcccacggggttataagggcacacaggtgagcggagtaggcattgactatgcccgagcaagtaaacaagtatgtaacgacatagacgaatgtaacgacggcaataacggtggatgcgatcctaattcaatctgcacaaacacagtgggcagctttaaatgtggtccatgcaggctcggcttcctcggaaatcaatcacagggatgtctgccagcaagaacatgccactctcctgcgcatagcccctgccacatccatgcgcactgcctattcgagcggaacggcgctgtatcctgccaatgcaacgtgggatgggctggtaatggaaacgtgtgcggcactgacacggatatcgacggttatcccgatcaagccctaccttgcatggataataataaacattgtaagcaagataattgcctgctgacacccaattctggccaggaagacgccgacaatgacggggtaggagatcaatgcgacgatgacgctgacggagatggtatcaagaacgtggaggcatctccaatggactggaccatagcactgaagtcacccacccactatagacaaaccggaatgcgaacaggctgggaaatgttggccaccgcggctctgaaatag

SEQ ID NO: 88489 - DNA, 2511 bp, Artificial Sequence
  derived and/or modified sequence
atggaaactcaagaactccgcggtgctttggctttactgttgctgtgcttcttcacatctgccagtcaggaccttcaagtgatagacttacttactgttggtgaatcaaggcagatggtggcagtcgctgaaaaaattaggacagcactgctaactgccggggatatctacctgctttccacctttagattgccccccaaacagggcggagtgctgttcggcttatatagtcgtcaggataatacacgttggttggaagcctcagtcgtcgggaaaattaataaagtgacaaacgccctgcatagtatcctgggagaacaaacgaaagcattagttactcagttgacactgttcaaccagattctcgtcgagttacgggatgacatcagggatcaagttaaggagatgagtcttatccgaaatacaattatggagtgtcaagtctgtggctttcatgagcagcgaagtcattgcagccccaacccttgtttcaggggagtggattgcatggaagtatatgaatatcctggctatagatgcggtccctgtccacccggtctacaaggtaatgggacacattgctctgatataaacgagtgtgctcacgcagatccatgcttcccaggctccagctgcataaacacaatgcctggttttcactgtgaagcctgtcctcgaggatacaaaggtactcaggtgtcaggagtgggaattgactatgcccgcgcaagtaagcaagtatgcaatgatattgacgaatgcaatgacggtaataatggcggttgtgaccccaactctatctgtacaaacactgtcgggtcgtttaagtgcggaccatgcaggctcggctttttaggcaatcaaagccagggctgccttccggctagaacttgccatagccccgcccactcgccctgtcatattcatgcacactgtttgttcgagagaaatggcgctgtgtcatgtcagtgtaatgttggctgggcaggcaatgggaatgtgtgcggtacagacaccgacatcgatggctatccagatcaggccctgccttgtatggacaataacaagcactgcaagcaggataattgtctcctcacacccaactcaggccaagaggatgcagataacgacggagtaggtgaccagtgcgacgacgacgccgatggcgacggaattaagaatgtggaagataactgccggttatttccaaataaagaccagcagaattccgatactgatagcttcggcgacgcctgtgacaactgtcccaatgtacccaacaatgaccagaaggacacagacggtaacggagaaggggacgcttgtgacaatgacgtggacggtgacgggatccccaatggcttagacaactgcccaaaggtacccaaccccctacaaacggaccgagatgaagacggggtaggcgatgcatgcgattcctgcccagaaatgtccaacccaacacagactgatgccgactccgatttggtgggcgacgtgtgtgacacaaacgaagattccgacggtgatgggcaccaggataccaaagataattgtccccaacttcccaatagctcgcagttggatagcgacaatgacggtttgggcgacgaatgcgatggcgatgacgacaacgatggaattccagactatgtacctccaggaccagacaactgccgccttgtcccaaatccaaatcagaaggatagcgacggtaacggcgtgggagatgtttgtgaagacgactttgacaacgacgctgtagtagaccctttggatgtatgccccgaatctgccgaagtgacgttgacggactttagagcataccagactgtggttttggatcccgaaggagatgcccagatcgatccaaattgggtggttcttaatcaaggaatggaaatagtacagaccatgaatagtgatcccggcctggcggtgggctatacagctttcaatggcgttgacttcgagggtaccttccacgtgaacacagtgaccgatgacgactacgcaggatttctctttagctatcaggactcaggacgattttatgtcgtgatgtggaaacagacagagcagacctactggcaggcaacaccgttccgtgcggttgctcaacccgggctgcaactgaaagctgtcacttctgtctcaggaccgggtgaacatcttcgaaacgcattatggcataccggacacactccagaccaggtgagacttctgtggactgatccccgaaatgtgggctggagggataagacttcctaccgatggcagcttcttcatcgaccacaagtgggatatatccgggtcaagctttacgaagggcctcagttggtagccgattctggtgtaattattgatacctcaatgaggggaggcaggttaggagtcttttgttttagtcaggagaacataatctggagcaacttgcaatatagatgcaacgacacagtgcccgaggatttcgaaccgtttagaagacaattgctacaaggacgcgtctag

SEQ ID NO: 88490 - DNA, 1062 bp, Artificial Sequence
  derived and/or modified sequence
atgtctaacccgacccagaccgacgccgattccgacttagttggcgacgtatgcgatacaaacgaagattccgacggcgatggccaccaagacacaaaggataattgcccccagttaccaaactctagtcagctggattccgacaacgacgggctaggcgacgaatgtgatggagatgatgacaatgatgggattccagactacgtccctcctggacccgataactgtagacttgtgccgaatccaaaccaaaaggatagcgacgggaatggagtaggagacgtgtgcgaagatgacttcgataacgacgccgttgttgaccccttagatgtgtgtcctgaatcagcagaagttaccttaaccgacttcagagcctatcagactgtggtgttggacccggagggtgatgcccagatcgatcctaattgggtggtactaaaccaggggatggaaatagtgcaaaccatgaatagtgatcctggattggccgtgggctataccgcctttaatggagtggacttcgaaggaactttccatgtcaatactgtaacagacgacgactacgctggttttctattttcataccaggattctgggagattctacgtcgtaatgtggaaacagaccgaacaaacctattggcaggcaaccccctttcgcgccgtagcacagcctggcttgcaacttaaagcagtgacatccgtctccggtccgggcgagcatttgcgaaacgcactttggcacaccggacacactccagaccaggtccgcttgctatggactgaccccaggaacgtgggctggagagacaagacttcttatcgttggcaactgctgcacagaccacaagttgggtacatccgggtcaaattgtacgaaggccctcaactagttgccgatagcggagtgattatcgatacgagtatgcgcggaggtcggctgggggtattctgtttcagtcaggagaatattatctggtctaatttacagtacaggtgcaacgatacagttcctgaggattttgagccattccggagacaactcttgcagggaagggtatag

SEQ ID NO: 88491 - DNA, 1203 bp, Artificial Sequence
  derived and/or modified sequence
atggagacccaggagctgagaggcgccctggccctgctgctgctgtgcttcttcaccagcgccagccaggacctgcaggtgatcgacctgctgaccgtgggcgagagcagacagatggtggccgtggccgagaagatcagaaccgccctgctgaccgccggcgacatctacctgctgagcaccttcagactgccccccaagcagggcggcgtgctgttcggcctgtacagcagacaggacaacaccagatggctggaggccagcgtggtgggcaagatcaacaaggtgaccaacgccctgcacagcatcctgggcgagggcaacgtgcccgaccccaagcaccactacggcgtgagcggcttccacgagcagagaagccactgcagccccaacccctgcttcagaggcgtggactgcatggaggtgtacgagtaccccggctacagatgcggcccctgcccccccggcctgcagggcaacggcacccactgcagcgacatcaacgagtgcgcccacgccgacccctgcttccccggcagcagctgcatcaacaccatgcccggcttccactgcgaggcctgccccagaggctacaagggcacccaggtgagcggcgtgggcatcgactacgccagagccagcaagcaggtgtgcaacgacatcgacgagtgcaacgacggcaacaacggcggctgcgaccccaacagcatctgcaccaacaccgtgggcagcttcaagtgcggcccctgcagactgggcttcctgggcaaccagagccagggctgcctgcccgccagaacctgccacagccccgcccacagcccctgccacatccacgcccactgcctgttcgagagaaacggcgccgtgagctgccagtgcaacgtgggctgggccggcaacggcaacgtgtgcggcaccgacaccgacatcgacggctaccccgaccaggccctgccctgcatggacaacaacaagcactgcaagcaggacaactgcctgctgacccccaacagcggccaggaggacgccgacaacgacggcgtgggcgaccagtgcgacgacgacgccgacggcgacggcatcaagaacgtggaggccagccccatggactggaccatcgccctgaagagccccacccactacagacagaccggcatgagaaccggctgggagatgctggccaccgccgccctgaagtag

SEQ ID NO: 88492 - DNA, 2511 bp, Artificial Sequence
  derived and/or modified sequence
atggagacccaggagctgagaggcgccctggccctgctgctgctgtgcttcttcaccagcgccagccaggacctgcaggtgatcgacctgctgaccgtgggcgagagcagacagatggtggccgtggccgagaagatcagaaccgccctgctgaccgccggcgacatctacctgctgagcaccttcagactgccccccaagcagggcggcgtgctgttcggcctgtacagcagacaggacaacaccagatggctggaggccagcgtggtgggcaagatcaacaaggtgaccaacgccctgcacagcatcctgggcgagcagaccaaggccctggtgacccagctgaccctgttcaaccagatcctggtggagctgagagacgacatcagagaccaggtgaaggagatgagcctgatcagaaacaccatcatggagtgccaggtgtgcggcttccacgagcagagaagccactgcagccccaacccctgcttcagaggcgtggactgcatggaggtgtacgagtaccccggctacagatgcggcccctgcccccccggcctgcagggcaacggcacccactgcagcgacatcaacgagtgcgcccacgccgacccctgcttccccggcagcagctgcatcaacaccatgcccggcttccactgcgaggcctgccccagaggctacaagggcacccaggtgagcggcgtgggcatcgactacgccagagccagcaagcaggtgtgcaacgacatcgacgagtgcaacgacggcaacaacggcggctgcgaccccaacagcatctgcaccaacaccgtgggcagcttcaagtgcggcccctgcagactgggcttcctgggcaaccagagccagggctgcctgcccgccagaacctgccacagccccgcccacagcccctgccacatccacgcccactgcctgttcgagagaaacggcgccgtgagctgccagtgcaacgtgggctgggccggcaacggcaacgtgtgcggcaccgacaccgacatcgacggctaccccgaccaggccctgccctgcatggacaacaacaagcactgcaagcaggacaactgcctgctgacccccaacagcggccaggaggacgccgacaacgacggcgtgggcgaccagtgcgacgacgacgccgacggcgacggcatcaagaacgtggaggacaactgcagactgttccccaacaaggaccagcagaacagcgacaccgacagcttcggcgacgcctgcgacaactgccccaacgtgcccaacaacgaccagaaggacaccgacggcaacggcgagggcgacgcctgcgacaacgacgtggacggcgacggcatccccaacggcctggacaactgccccaaggtgcccaaccccctgcagaccgacagagacgaggacggcgtgggcgacgcctgcgacagctgccccgagatgagcaaccccacccagaccgacgccgacagcgacctggtgggcgacgtgtgcgacaccaacgaggacagcgacggcgacggccaccaggacaccaaggacaactgcccccagctgcccaacagcagccagctggacagcgacaacgacggcctgggcgacgagtgcgacggcgacgacgacaacgacggcatccccgactacgtgccccccggccccgacaactgcagactggtgcccaaccccaaccagaaggacagcgacggcaacggcgtgggcgacgtgtgcgaggacgacttcgacaacgacgccgtggtggaccccctggacgtgtgccccgagagcgccgaggtgaccctgaccgacttcagagcctaccagaccgtggtgctggaccccgagggcgacgcccagatcgaccccaactgggtggtgctgaaccagggcatggagatcgtgcagaccatgaacagcgaccccggcctggccgtgggctacaccgccttcaacggcgtggacttcgagggcaccttccacgtgaacaccgtgaccgacgacgactacgccggcttcctgttcagctaccaggacagcggcagattctacgtggtgatgtggaagcagaccgagcagacctactggcaggccacccccttcagagccgtggcccagcccggcctgcagctgaaggccgtgaccagcgtgagcggccccggcgagcacctgagaaacgccctgtggcacaccggccacacccccgaccaggtgagactgctgtggaccgaccccagaaacgtgggctggagagacaagaccagctacagatggcagctgctgcacagaccccaggtgggctacatcagagtgaagctgtacgagggcccccagctggtggccgacagcggcgtgatcatcgacaccagcatgagaggcggcagactgggcgtgttctgcttcagccaggagaacatcatctggagcaacctgcagtacagatgcaacgacaccgtgcccgaggacttcgagcccttcagaagacagctgctgcagggcagagtgtag

SEQ ID NO: 88493 - DNA, 1062 bp, Artificial Sequence
  derived and/or modified sequence
atgagcaaccccacccagaccgacgccgacagcgacctggtgggcgacgtgtgcgacaccaacgaggacagcgacggcgacggccaccaggacaccaaggacaactgcccccagctgcccaacagcagccagctggacagcgacaacgacggcctgggcgacgagtgcgacggcgacgacgacaacgacggcatccccgactacgtgccccccggccccgacaactgcagactggtgcccaaccccaaccagaaggacagcgacggcaacggcgtgggcgacgtgtgcgaggacgacttcgacaacgacgccgtggtggaccccctggacgtgtgccccgagagcgccgaggtgaccctgaccgacttcagagcctaccagaccgtggtgctggaccccgagggcgacgcccagatcgaccccaactgggtggtgctgaaccagggcatggagatcgtgcagaccatgaacagcgaccccggcctggccgtgggctacaccgccttcaacggcgtggacttcgagggcaccttccacgtgaacaccgtgaccgacgacgactacgccggcttcctgttcagctaccaggacagcggcagattctacgtggtgatgtggaagcagaccgagcagacctactggcaggccacccccttcagagccgtggcccagcccggcctgcagctgaaggccgtgaccagcgtgagcggccccggcgagcacctgagaaacgccctgtggcacaccggccacacccccgaccaggtgagactgctgtggaccgaccccagaaacgtgggctggagagacaagaccagctacagatggcagctgctgcacagaccccaggtgggctacatcagagtgaagctgtacgagggcccccagctggtggccgacagcggcgtgatcatcgacaccagcatgagaggcggcagactgggcgtgttctgcttcagccaggagaacatcatctggagcaacctgcagtacagatgcaacgacaccgtgcccgaggacttcgagcccttcagaagacagctgctgcagggcagagtgtag

SEQ ID NO: 88494 - DNA, 1203 bp, Artificial Sequence
  derived and/or modified sequence
atggaaactcaagaactgcgcggcgcgctcgccttactgttattatgttttttcacctctgcctctcaggatctccaagtgatagacctgctgacagtgggtgagagcagacagatggtagctgttgccgaaaagattcggaccgccctgctgacagccggagatatttatttgctgtcaacatttcgcctgccacccaaacagggaggggtgctctttgggctttactcaaggcaagacaacactcgatggttggaggcttccgtggtggggaaaattaataaggtaacaaacgccttgcattccatcctcggcgagggcaatgtgcctgaccctaagcatcactacggggtatctggatttcacgagcagcggagtcactgcagtccgaacccttgcttcagaggcgtagactgtatggaggtgtatgaataccccggttacagatgtggcccttgccctcccggactccagggcaatggcacccactgttctgacataaatgagtgtgcgcacgccgacccttgtttccccggctcaagttgtatcaataccatgcctggatttcactgcgaggcttgccccagagggtacaaaggaacacaggtctctggcgtggggattgactacgccagggcgtccaagcaagtttgtaacgacattgatgagtgtaatgacggcaacaatggaggatgcgacccaaactcaatttgcaccaacacggtgggtagttttaagtgcggcccttgcagactgggctttttagggaaccaaagccaaggatgcctacctgccaggacctgtcactctccagcccattccccctgccacatccacgcccactgtttgttcgagcgcaacggggcggttagttgccagtgcaacgtgggctgggccggcaacgggaacgtgtgtggcacagatacagacatagacggatatcctgaccaggccctaccgtgtatggacaacaacaagcattgcaagcaggacaactgtcttttgaccccaaactcaggacaggaggatgcggacaacgatggtgtcggtgaccagtgtgacgacgacgccgacggtgacggcatcaagaacgtggaagccagccctatggattggactatcgcactcaaaagccctacccattatcggcagaccggaatgagaacggggtgggaaatgctggccaccgctgccttgaagtag

SEQ ID NO: 88495 - DNA, 2511 bp, Artificial Sequence
  derived and/or modified sequence
atggagactcaggaactgaggggggcactggcactcctgctgctgtgctttttcacatccgcttcccaggacctccaggttatcgacctactcacagttggcgagagccggcaaatggtggcagtggcagagaaaatcaggacggcacttctcaccgccggtgacatctatctgctctcaacatttcgattaccacctaagcaagggggggtgttgtttggcttgtattcccgccaggataacacacgttggctagaagccagcgtggtggggaagattaacaaagtaaccaatgcgctccattccattctgggagaacagacgaaagctctggttactcagctgaccctgttcaaccagatccttgtggagctgcgggacgacatcagagaccaggttaaggagatgagcctcatcagaaacaccataatggaatgtcaagtttgcggctttcatgagcagcggtctcattgcagtcccaatccgtgcttccgcggagtggattgcatggaagtctatgaatatcccggctatagatgcggaccatgccctcccggactgcagggaaatggtacacattgcagcgacatcaatgaatgcgctcacgctgacccatgttttccaggctcttcatgcattaataccatgccaggtttccactgcgaagcatgccctagaggttacaagggcacgcaggttagtggggtgggcattgactacgcacgggctagtaagcaggtttgtaatgacatcgacgaatgtaacgacggcaacaacggcggatgtgaccctaactccatctgcacaaatactgtcggatccttcaaatgtggaccatgtcggctgggctttctgggaaaccagagtcagggatgtctacccgctcgcacctgccatagccccgcccacagtccctgccacattcatgcacactgcctgttcgagcggaatggggctgtgagctgccagtgtaacgttggctgggccggcaatggaaatgtttgcggtactgacaccgacattgatggatatcctgaccaagccctcccctgcatggataataataaacactgcaaacaagataactgtctgctgacccctaacagtggccaggaagatgccgacaacgatggcgtgggggatcaatgcgacgatgatgccgacggggatggtattaaaaatgtggaagataattgtcggctatttcccaacaaggaccagcagaacagcgacacagattcatttggtgatgcttgcgacaactgccccaacgtgcccaacaacgatcagaaggatacagacggcaacggtgagggcgacgcctgcgacaatgacgtagatggcgacgggattcctaacgggctcgacaattgcccaaaggtgccaaacccactacagaccgatcgcgacgaggatggcgtcggggatgcctgcgactcatgcccggaaatgagcaaccccacccagacagacgccgactctgacctggtcggcgacgtttgtgataccaacgaggacagtgatggtgatggccaccaagatacaaaggataactgcccccagcttccgaactcttctcaactggactccgacaacgacgggctgggggatgagtgcgatggggacgacgacaacgacgggattcccgattacgtgcctcccggaccagataattgtaggttagtcccaaacccaaaccagaaagatagcgacggcaacggtgtcggcgacgtgtgtgaagatgatttcgacaacgatgcagtggtggatcccctcgatgtctgtccggagtccgccgaggtaaccttgactgattttagggcctatcaaaccgtcgtcctcgatccagaaggcgacgcacaaattgaccctaactgggtggtgctgaatcaaggaatggagattgttcaaaccatgaattccgatccgggcctggctgtaggctacacagctttcaacggcgtcgactttgagggtaccttccacgtcaatacagtgacagatgacgattacgcagggttccttttctcttaccaagactccggccgtttttacgtcgtcatgtggaaacagactgaacaaacttattggcaggccaccccatttcgcgctgtagcccagccgggactgcaacttaaagccgtgactagtgtgtcaggacccggcgagcacctcagaaacgctctctggcacactggccacacaccagaccaggtcagactgttgtggactgacccccggaacgttggttggcgcgacaaaacctcctaccgctggcagctcctgcacaggccacaagtaggctacatacgagttaagctctacgaaggtccacagctggtagctgactctggcgtgattatcgatacatctatgagaggaggtcgtctgggtgtgttctgtttttcgcaggagaacattatctggtccaatctgcagtacagatgcaacgacacagtacccgaagatttcgagccattccgacggcagttgcttcagggccgcgtttag

SEQ ID NO: 88496 - DNA, 1062 bp, Artificial Sequence
  derived and/or modified sequence
atgagcaaccctacccaaaccgacgctgactctgacctggtgggcgatgtctgcgataccaatgaagacagcgacggggatggccaccaagacacaaaagataactgcccacagctgcctaatagttcccagctggattccgataacgatggactgggtgacgagtgtgatggcgacgacgataacgatgggattcctgactacgtgcccccagggcccgacaattgtcgattggtgcccaatcccaaccagaaggattctgacggaaatggggtgggagacgtctgtgaggacgacttcgataatgacgctgtagtggaccccctggatgtttgccccgagtcagcagaggtgacgctcacagacttcagggcttaccaaactgtggttctggacccagagggggatgctcagattgatcccaactgggtggtgctgaatcaggggatggaaatagtgcagacaatgaatagcgatcccgggctggctgtcgggtacacagctttcaatggggtggacttcgagggaacattccatgtcaacaccgtgaccgatgacgattacgccggattcctgttctcctaccaggactccgggcgattttatgtggtgatgtggaagcagactgaacagacctactggcaggccacacctttcagggccgtggcacaacctggactacagctcaaggctgtgactagcgtgtccggtccaggagagcacctgcggaacgcactctggcacactggccatacccccgaccaggtcagacttttgtggactgacccccggaacgtgggctggagggacaagacatcctacagatggcagctgttgcataggccccaggtcgggtacatccgggtaaagttgtacgaaggcccacaattggtggcggattcaggggtgataattgacaccagtatgcgtgggggtcgcctgggcgtcttttgcttctcccaggagaatatcatttggtcaaatctgcagtatcgctgtaatgatacagtccctgaggatttcgagcccttccggagacagttgctacagggccgcgtgtag

SEQ ID NO: 88497 - DNA, 1203 bp, Artificial Sequence
  derived and/or modified sequence
atggagacccaggagctgcggggggccctggccctgctgctgctgtgcttcttcaccagcgccagccaggacctgcaggtgattgacctgctgactgtgggggagagccggcagatggtggccgtggccgagaagatcagaacagccctgctgacagctggggacatctacctgctgagcaccttccggctgccccccaagcagggcggcgtgctgtttggcctgtacagccggcaggacaacacccgctggctggaggcctctgtggtgggcaagatcaacaaggtgaccaatgccctgcacagcatcctgggggagggcaatgtgcctgaccccaagcaccactacggcgtgtctggcttccacgagcagaggagccactgcagccccaacccctgcttccggggcgtggactgcatggaggtgtatgagtacccaggctaccgctgtggcccctgccccccaggcctgcagggcaatggcacccactgcagcgacatcaatgaatgtgcccatgctgacccctgcttccctggcagcagctgcatcaacaccatgcctggcttccactgtgaggcctgcccccggggctacaagggcacccaggtgtctggagtgggcatcgactatgcccgggccagcaagcaggtgtgcaatgacattgatgaatgtaatgatggcaacaatggaggctgtgaccccaacagcatctgcaccaacacagtgggcagcttcaagtgtggcccctgccgcctgggcttcctgggcaaccagagccagggctgcctgcctgcccggacctgccacagccctgcccacagcccctgccacatccacgcccactgcctgtttgaaagaaatggagctgtgtcctgccagtgcaatgtgggctgggccggaaatggaaatgtgtgtggcacagacacagacattgatggctacccagaccaggccctgccctgcatggacaacaacaagcactgcaagcaggacaactgcctgctgacccccaacagcggccaggaggatgctgacaatgatggagtgggggaccagtgtgatgatgatgctgatggagatggcatcaagaatgtggaggccagccccatggactggaccatcgccctgaagagccccacccactaccggcagacaggcatgaggacaggctgggagatgctggccacagctgccctgaagtag

SEQ ID NO: 88498 - DNA, 2511 bp, Artificial Sequence
  derived and/or modified sequence
atggagacccaggagctgcggggggccctggccctgctgctgctgtgcttcttcaccagcgccagccaggacctgcaggtgattgacctgctgactgtgggggagagccggcagatggtggccgtggccgagaagatcagaacagccctgctgacagctggggacatctacctgctgagcaccttccggctgccccccaagcagggcggcgtgctgtttggcctgtacagccggcaggacaacacccgctggctggaggcctctgtggtgggcaagatcaacaaggtgaccaatgccctgcacagcatcctgggggagcagaccaaggccctggtgacccagctgaccctcttcaaccagatcctggtggagctgagagatgacatccgggaccaggtgaaggagatgagcctcatccggaacaccatcatggagtgccaggtgtgtggcttccacgagcagaggagccactgcagccccaacccctgcttccggggcgtggactgcatggaggtgtatgagtacccaggctaccgctgtggcccctgccccccaggcctgcagggcaatggcacccactgcagcgacatcaatgaatgtgcccatgctgacccctgcttccctggcagcagctgcatcaacaccatgcctggcttccactgtgaggcctgcccccggggctacaagggcacccaggtgtctggagtgggcatcgactatgcccgggccagcaagcaggtgtgcaatgacattgatgaatgtaatgatggcaacaatggaggctgtgaccccaacagcatctgcaccaacacagtgggcagcttcaagtgtggcccctgccgcctgggcttcctgggcaaccagagccagggctgcctgcctgcccggacctgccacagccctgcccacagcccctgccacatccacgcccactgcctgtttgaaagaaatggagctgtgtcctgccagtgcaatgtgggctgggccggaaatggaaatgtgtgtggcacagacacagacattgatggctacccagaccaggccctgccctgcatggacaacaacaagcactgcaagcaggacaactgcctgctgacccccaacagcggccaggaggatgctgacaatgatggagtgggggaccagtgtgatgatgatgctgatggagatggcatcaagaatgtggaggacaactgccgcctcttccccaacaaggaccagcagaacagcgacacagacagctttggagatgcctgtgacaactgccccaacgtgcccaacaatgaccagaaggacacagatggaaatggagaaggagatgcctgtgacaatgatgtggatggagatggcatccccaacggcctggacaactgccccaaggtgcccaaccccctgcagacagacagagatgaagatggagtgggagatgcctgtgacagctgcccagagatgagcaaccccacccagacagatgctgacagcgacctggtgggagatgtgtgtgacaccaatgaagattctgatggagatggccaccaggacaccaaggacaactgcccccagctgcccaacagcagccagctggacagcgacaatgatggcctgggagatgaatgtgatggagatgatgacaatgatggcatcccagactatgtgcccccaggccctgacaactgccgcctggtgcccaaccccaaccagaaggacagtgatggaaatggagtgggagatgtgtgtgaagatgactttgacaatgatgctgtggtggaccccctggatgtgtgcccagagagcgctgaggtgaccctgacagacttccgggcctaccagacagtggtgctggaccctgaaggagatgcccagattgaccccaactgggtggtgctgaaccagggcatggagatcgtgcagaccatgaacagcgaccccggcctggccgtgggctacacagccttcaatggagtggactttgagggcaccttccacgtgaacacagtgacagatgatgattatgccggcttcctgttctcctaccaggacagcggccgcttctacgtggtgatgtggaagcagacagagcagacctactggcaggccacccccttccgggctgtggcccagcccggcctgcagctgaaggctgtgacctctgtgtctggccctggagagcacctgagaaatgccctgtggcacacaggccacaccccagaccaggtgcggctgctgtggacagaccccagaaatgtgggctggagggacaagaccagctaccgctggcagctgctgcaccggccccaggtgggctacatccgggtgaagctgtatgagggcccccagctggtggccgacagcggggtcatcatcgacacctccatgaggggcggccgcctgggcgtcttctgcttcagccaggagaacatcatctggagcaacctgcagtaccgctgcaatgacacagtgcctgaggactttgagcccttccggcggcagctgctgcagggccgggtgtag

SEQ ID NO: 88499 - DNA, 1062 bp, Artificial Sequence
  derived and/or modified sequence
atgagcaaccccacccagacagatgctgacagcgacctggtgggagatgtgtgtgacaccaatgaagattctgatggagatggccaccaggacaccaaggacaactgcccccagctgcccaacagcagccagctggacagcgacaatgatggcctgggagatgaatgtgatggagatgatgacaatgatggcatcccagactatgtgcccccaggccctgacaactgccgcctggtgcccaaccccaaccagaaggacagtgatggaaatggagtgggagatgtgtgtgaagatgactttgacaatgatgctgtggtggaccccctggatgtgtgcccagagagcgctgaggtgaccctgacagacttccgggcctaccagacagtggtgctggaccctgaaggagatgcccagattgaccccaactgggtggtgctgaaccagggcatggagatcgtgcagaccatgaacagcgaccccggcctggccgtgggctacacagccttcaacggggtggactttgagggcaccttccacgtgaacacagtgacagatgatgattatgccggcttcctgttctcctaccaggacagcggccgcttctacgtggtgatgtggaagcagacagagcagacctactggcaggccacccccttccgggctgtggcccagcccggcctgcagctgaaggctgtgacctctgtgtctggccctggagagcacctgagaaatgccctgtggcacacaggccacaccccagaccaggtgcggctgctgtggacagaccccagaaatgtgggctggagggacaagaccagctaccgctggcagctgctgcaccggccccaggtgggctacatccgggtgaagctgtatgagggcccccagctggtggccgacagcggggtcatcatcgacacctccatgagaggaggccgcctgggcgtcttctgcttcagccaggagaacatcatctggagcaacctgcagtaccgctgcaatgacacagtgcctgaagattttgagcccttccggcggcagctgctgcagggccgggtgtag

SEQ ID NO: 88500 - DNA, 1203 bp, Artificial Sequence
  derived and/or modified sequence
atggagacccaggagctgcggggcgccctggccctgctgctgctgtgcttcttcacctccgcgagccaagacttgcaggtgatcgaccttctgaccgtcggcgagagccgccagatggttgctgtcgcagagaaaatccggaccgctctgttaacagctggagacatctaccttttgagcacctttcgtctgccacctaaacagggcggagtactgttcgggctttactctaggcaggacaacacccgctggctggaggcttcggtggtgggcaaaattaataaagtgaccaacgccctccattctattctcggcgaggggaacgtgcccgatccaaagcaccactacggcgtgagtggttttcacgagcagcgaagccactgcagcccaaatccatgctttcggggggttgactgcatggaagtctacgagtacccaggatataggtgtgggccttgcccccccggtctgcagggaaacggaacacactgctccgatatcaatgagtgcgctcacgcggatccatgtttccctggctcatcctgtataaacacgatgccaggattccattgtgaggcctgcccccggggatacaaggggacccaagtatccggagtgggcattgactatgcgcgggcctccaaacaggtgtgcaacgacatagacgagtgcaacgatgggaataatggaggctgcgatccgaactcaatctgtacgaataccgtcggatctttcaagtgtgggccgtgccgcctcgggtttcttggaaatcagtcacagggatgcttacccgctcgaacctgccacagccctgcccacagcccatgtcatatccacgcacactgccttttcgaaaggaacggtgcggtgtcttgtcagtgtaacgtggggtgggccggtaatggcaacgtgtgcggaacagacacagatattgacgggtatcccgaccaagccctcccttgcatggacaataacaagcactgcaagcaagacaactgtttgctaaccccaaacagcgggcaagaggatgcagacaacgatggagtgggggatcagtgtgatgacgacgctgatggagatggaatcaaaaacgtggaagcctcaccaatggactggactatcgctctcaaaagtccaacccattaccggcaaacaggcatgcgcaccggatgggagatgctggcaactgccgcgttaaagtag

SEQ ID NO: 88501 - DNA, 2511 bp, Artificial Sequence
  derived and/or modified sequence
atggagacccaggagctgcggggcgccctggccctgctgctgctgtgtttctttacatctgcttctcaggaccttcaagtaattgatctgctgaccgtcggggagtcccgccagatggttgcagtggccgagaagattagaactgcccttctgaccgctggcgacatctacctcctctcaacttttaggctcccgcctaagcagggcggggtgctattcggtctttattcccgacaagataacacccgatggctggaagccagtgtagttggcaagatcaataaagtgactaacgcgctgcattctatattaggcgagcaaacaaaggctctggttacccagctgacactgttcaaccagatcctggttgaactgagggacgatatcagggatcaagtgaaagagatgagccttatccggaacacaattatggaatgccaagtctgtggctttcacgagcagagatcccattgttcaccaaacccatgttttcgcggggtcgactgcatggaggtatatgaatatccaggttaccgctgtggaccctgccctcctggtctccagggcaacgggacccactgcagtgacataaacgagtgtgctcacgctgatccttgttttccaggatctagctgcatcaataccatgcccggctttcattgcgaggcttgcccgaggggctataagggcacccaggtgtcgggagtcggcatcgactatgctagggcttcgaagcaggtttgtaatgacatcgacgagtgcaacgacgggaataacggcggctgcgatccaaattcgatttgtactaatacagtcggttctttcaagtgcgggccctgccgacttgggtttctgggaaatcaatcccaggggtgcctccctgctcgcacttgtcattctcctgctcattcaccctgtcatattcatgcgcattgcctcttcgagaggaacggcgccgtgtcttgccagtgtaatgtgggttgggctggcaacggcaatgtttgtggcacagacactgatattgacgggtatcccgaccaggctctgccatgcatggataacaacaaacattgtaaacaagacaactgcctgctgacccccaactccggtcaggaagatgctgacaacgacggggtgggggatcagtgcgatgacgatgccgatggagatggaataaaaaacgtcgaggacaactgtagacttttccccaacaaagatcagcaaaacagtgatacagactccttcggcgacgcctgcgacaactgtcctaatgtgccaaataacgatcagaaagatactgatgggaatggtgagggcgatgcgtgcgataacgacgtggatggggatggcattcctaatgggttagacaactgccccaaggtgcccaatccactgcagaccgatcgggatgaagacggggtgggagacgcttgtgactcctgcccagaaatgtctaatccaacccagaccgatgcggactcagacttggtgggagacgtctgcgacacgaacgaggacagcgacggggatggacaccaagatacgaaagacaattgcccccaattaccaaacagtagccagttagacagtgataacgatggcttaggcgacgagtgcgacggcgatgatgataacgacggcattcctgattatgttccccccgggcccgacaactgccggctagttccaaaccctaaccagaaggactctgatgggaacggagtcggcgatgtgtgtgaagatgatttcgacaacgatgccgtggtggacccattggatgtgtgtccagagtccgcagaggtgacactgaccgatttccgggcataccagaccgtggtgctcgatccggaaggcgatgcacaaattgatccgaattgggtggttctgaaccagggtatggaaatcgttcagaccatgaatagcgatcccggcctggcggtcggctacaccgccttcaacggcgttgatttcgagggcacattccatgtgaacaccgtgaccgatgatgactatgccggctttctgttctcataccaggacagtggccgtttctacgtagtgatgtggaaacaaactgagcagacttattggcaggccaccccattcagagcagtggcccagcctggcttgcagctgaaggccgttacgtccgtaagcggaccgggcgagcacctccgcaacgcactgtggcatacaggacacaccccggatcaggtgcgacttctgtggactgacccaaggaatgtgggctggagggacaaaaccagctacaggtggcagctgttacacaggccgcaggtgggctacatccgcgtcaagctctatgagggtccccagttagtagcggactctggagtgattattgatacctccatgagaggcgggcgcttgggtgtcttctgtttctctcaggagaatattatctggtcaaatctgcagtaccggtgtaatgatacagttcccgaggacttcgagcctttccggcggcagctcttgcagggtcgcgtctag

SEQ ID NO: 88502 - RNA, 1203 nt, Artificial Sequence
  derived and/or modified sequence
auggagacucaagaacuucggggugcucuggcccugcuccugcugugcuuuuucacaagcgccucccaagaccuccaggugauagauuuacugacagucggcgagagucgccagaugguggcuguggccgaaaagauucgaacagcucuucugacagcaggcgauauuuaccuucugucuacuuucaggcugccaccaaagcaagggggcgugcucuucggacuauacagucgacaggauaauacucgaugguuggaggcaagcguggucgggaagaucaacaagguuacuaaugcucuccauucuauccugggggaaggcaacgugccugacccuaagcaucauuacgggguuagcggguuucaugagcaacggucucauuguagcccgaauccaugcuuccgggggguugacugcauggaaguguacgaguaucccggguaucgcugcggaccaugcccaccaggucuucagggaaacgguacacacuguagcgacaucaaugaaugcgcccacgcagacccauguuuccccgguucuucuuguauuaacacgaugcccggcuuccauugcgaagcuuguccacggggcuauaaaggcacucaggugagcggagugggaaucgacuaugcacgggccucaaaacagguaugcaaugauauagacgagugcaaugacgguaauaacggcggcugugacccaaauucuauauguacaaacaccguuggaagcuuuaagugcgggccuuguaggcugggauuucuagggaaucagucacagggaugucuacccgcccggaccugccacucgccagcucauagcccaugccacauucacgcacauugcuuauuugaaaggaacggugcggucucgugccagugcaacgugggaugggccggaaauggcaaugucugcggaacagacaccgauaucgauggauacccugaucaggcgcuccccuguauggauaauaacaaacauuguaagcaggauaauugccuucuuacuccuaauucuggacaagaggaugcagauaacgacggggugggagaucagugcgacgacgaugcugacggcgacgggaucaagaaugucgaggcuuccccaauggauuggaccauugcuuuaaagagcccaacacauuacagacagaccgguaugcggaccggcugggaaaugcuugcuacagccgcucugaaauag

SEQ ID NO: 88503 - RNA, 2511 nt, Artificial Sequence
  derived and/or modified sequence
auggaaacucaagaacuccgcggugcuuuggcuuuacuguugcugugcuucuucacaucugccagucaggaccuucaagugauagacuuacuuacuguuggugaaucaaggcagaugguggcagucgcugaaaaaauuaggacagcacugcuaacugccggggauaucuaccugcuuuccaccuuuagauugccccccaaacagggcggagugcuguucggcuuauauagucgucaggauaauacacguugguuggaagccucagucgucgggaaaauuaauaaagugacaaacgcccugcacucaaucuugggcgagcagacuaaggcguuggugacccagcuuacacucuuuaaccagauccuggucgaacugagagaugauauccgugaccaggucaaggagaugucucugaucaggaauaccaucauggagugccaggugugcgguuuccaugaacagaggagccauugcucuccgaacccgugcuuccgcggagucgacugcauggaaguauaugaguacccaggguacagauguggcccuugcccccccggccugcaggggaacggaacucacuguucagauaucaaugagugugcucacgcggaucccugcuuuccgggcagcagcugcauaaauacaaugccgggauuccacugcgaagcaugucccaggggguacaagggaacacaagugagcgggguuggcauugacuacgcccgggcgaguaaacaggugugcaaugauaucgaugaguguaacgacgggaacaauggcggcugugauccaaacuccauuugcacgaauaccguuggcucuuucaagugcggacccugcagguugggcuuucugggcaaccagagccagggaugucuuccggcgcgcaccugucauucgccagcacauucuccuugucacauccacgcgcacugcuuguuugaaaggaauggcgcagucucuugccagugcaacguuggcugggccggcaauggcaacguaugcggcacagauacugauauagacggauacccagaccaggcacucccuugcauggacaauaacaaacauuguaagcaggacaauugccuuuuaacccccaacuccggacaggaagaugcugauaaugacggcgucggagaucagugugacgacgaugcugacggugauggcaucaaaaauguugaggacaacugucgacuuuucccgaauaaggaucaacagaacucagacaccgacuccuuuggagacgccugugauaacuguccuaacguuccaaacaaugaucaaaaggacacugacgguaacggcgaaggcgacgccugcgauaaugacgucgacggcgacgggaucccaaacggccucgacaauuguccuaagguuccuaauccauugcagaccgauagggaugaagacggcgugggggacgccugugacaguuguccggaaaugucuaacccuacccaaacagaugccgacagcgauuuggucggugauguaugcgacacaaaugaggacucugacggugaugggcaccaggauaccaaggacaauugcccacaguuaccgaacucgagccaacuagauucagauaacgauggccuuggcgacgaaugcgauggggaugaugauaacgacggaaucccggacuacguuccacccgguccugacaacuguaggcuggucccuaacccaaaccagaaggacagugauggcaauggcguaggggacgugugcgaagaugacuucgacaacgaugcagugguugacccucuggacgucuguccugagagcgcggaggugacucucaccgacuuucgcgccuaucagaccguggugcuugacccugagggggacgcucagaucgaucccaauuggguuguccugaaccaaggcauggagauugugcagacaaugaacagcgacccgggacuugccgucggguacacugcauucaauggcgucgacuuugagggcaccuuccacgugaacaccgugacagacgaugauuaugccggcuuccuguucagcuaccaggacagcggcagauuuuaugugguaauguggaagcagacagagcagacuuacuggcaggccacucccuuucgcgcaguugcacagccugguuugcagcugaaagccguuacguccgugaguggccccggagagcauuuaaggaacgcauuguggcauaccggccacacacccgaucaggugagauuguuguggacagacccgagaaacgugggcuggcgcgauaaaaccucauacagauggcagcugcuccauagaccccagguaggguacaucagagugaaauuauacgaagguccucaacuugucgcagacagcggagugauuaucgacacaagcaugagaggaggacgacucgggguguucugcuuuucccaggaaaacauuauauggucuaaccugcaguauagguguaacgacacgguuccagaggacuucgaaccauuccggcgacagcuccugcaaggacgcguuuag

SEQ ID NO: 88504 - RNA, 1062 nt, Artificial Sequence
  derived and/or modified sequence
augaguaacccaacacagaccgacgccgauuccgacuuggugggugaugugugcgauacaaacgaagauuccgauggugauggccaucaagacacaaaggacaauuguccccaguugcccaauucuucacaguuagauucugacaacgauggccugggcgacgagugcgauggggaugaugacaaugacggaauuccugacuaugucccaccuggaccugauaacugccgacuggugccaaaccccaaucagaaagauucugacgggaauggcguuggcgaugucugcgaggaugacuucgauaaugaugcuguuguggaucccuuggacgucuguccagaaagcgccgaagugacgcugacagauuuccgugccuaccagaccgucguccucgaccccgaaggcgaugcacagauugacccuaacuggguuguauuaaaccaggggauggaaauagugcagacaaugaauagugaccccggccuggcugucggcuauacggcauucaacggagucgauuuugaaggcacauuucauguaaacacagucacagaugacgacuacgccggguuucuuuucucguaccaggauuccggccgcuucuauguggugauguggaaacagacggagcaaacguacuggcaggcuacacccuuccgcgcaguggcccaaccggguuuacagcuuaaagccgucacauccguuucggguccaggugagcaucugagaaacgcccucuggcauacaggccacacccccgaccaggugcgcuuacuuuggaccgauccacguaauguaggguggagagauaagaccagcuacagauggcagcugcugcauagaccucaggugggcuauauucggguuaaacuguaugaggggccacaacugguugccgacagcggagugauuaucgauacgaguaugcgcggaggucggcuggggguauucuguuucagucaggagaauauuaucuggucuaauuuacaguacaggugcaacgauacaguuccugaggauuuugagccauuccggagacaacucuugcagggaaggguauag

SEQ ID NO: 88505 - RNA, 1203 nt, Artificial Sequence
  derived and/or modified sequence
auggagacacaagaauugagaggcgcucuggcacuccugcuuuuguguuuuuucaccagcgcgagucaggaccugcagguuaucgaucugcuuaccgugggggagucucgacaaaugguggcuguggcugagaaaauuaggacagcccugcugaccgcuggagacaucuaccuucuaaguaccuucagacuuccgccaaagcaagggggaguguuguucggccuuuauuccagacaggauaacacacgauggcuggaagcauccguugugggaaaaauuaacaaagugacgaaugcacuccauuccauccucggagagggaaauguuccugacccuaagcaccacuacgguguauccggauuccacgagcagcgaucccauugcagcccuaauccuugcuucagaggcguggauuguauggagguguaugaguacccgggauacaggugcggaccauguccucccgggcuccaagggaacggcacucauugcucagacauuaacgaaugugcacacgcagauccuugcuuuccugguucuucuugcaucaacaccaugccagguuuccauugugaagccugcccacgggguuauaagggcacacaggugagcggaguaggcauugacuaugcccgagcaaguaaacaaguauguaacgacauagacgaauguaacgacggcaauaacgguggaugcgauccuaauucaaucugcacaaacacagugggcagcuuuaaaugugguccaugcaggcucggcuuccucggaaaucaaucacagggaugucugccagcaagaacaugccacucuccugcgcauagccccugccacauccaugcgcacugccuauucgagcggaacggcgcuguauccugccaaugcaacgugggaugggcugguaauggaaacgugugcggcacugacacggauaucgacgguuaucccgaucaagcccuaccuugcauggauaauaauaaacauuguaagcaagauaauugccugcugacacccaauucuggccaggaagacgccgacaaugacgggguaggagaucaaugcgacgaugacgcugacggagaugguaucaagaacguggaggcaucuccaauggacuggaccauagcacugaagucacccacccacuauagacaaaccggaaugcgaacaggcugggaaauguuggccaccgcggcucugaaauag

SEQ ID NO: 88506 - RNA, 2511 nt, Artificial Sequence
  derived and/or modified sequence
auggaaacucaagaacuccgcggugcuuuggcuuuacuguugcugugcuucuucacaucugccagucaggaccuucaagugauagacuuacuuacuguuggugaaucaaggcagaugguggcagucgcugaaaaaauuaggacagcacugcuaacugccggggauaucuaccugcuuuccaccuuuagauugccccccaaacagggcggagugcuguucggcuuauauagucgucaggauaauacacguugguuggaagccucagucgucgggaaaauuaauaaagugacaaacgcccugcauaguauccugggagaacaaacgaaagcauuaguuacucaguugacacuguucaaccagauucucgucgaguuacgggaugacaucagggaucaaguuaaggagaugagucuuauccgaaauacaauuauggagugucaagucuguggcuuucaugagcagcgaagucauugcagccccaacccuuguuucaggggaguggauugcauggaaguauaugaauauccuggcuauagaugcggucccuguccacccggucuacaagguaaugggacacauugcucugauauaaacgagugugcucacgcagauccaugcuucccaggcuccagcugcauaaacacaaugccugguuuucacugugaagccuguccucgaggauacaaagguacucaggugucaggagugggaauugacuaugcccgcgcaaguaagcaaguaugcaaugauauugacgaaugcaaugacgguaauaauggcgguugugaccccaacucuaucuguacaaacacugucgggucguuuaagugcggaccaugcaggcucggcuuuuuaggcaaucaaagccagggcugccuuccggcuagaacuugccauagccccgcccacucgcccugucauauucaugcacacuguuuguucgagagaaauggcgcugugucaugucaguguaauguuggcugggcaggcaaugggaaugugugcgguacagacaccgacaucgauggcuauccagaucaggcccugccuuguauggacaauaacaagcacugcaagcaggauaauugucuccucacacccaacucaggccaagaggaugcagauaacgacggaguaggugaccagugcgacgacgacgccgauggcgacggaauuaagaauguggaagauaacugccgguuauuuccaaauaaagaccagcagaauuccgauacugauagcuucggcgacgccugugacaacugucccaauguacccaacaaugaccagaaggacacagacgguaacggagaaggggacgcuugugacaaugacguggacggugacgggauccccaauggcuuagacaacugcccaaagguacccaacccccuacaaacggaccgagaugaagacgggguaggcgaugcaugcgauuccugcccagaaauguccaacccaacacagacugaugccgacuccgauuuggugggcgacgugugugacacaaacgaagauuccgacggugaugggcaccaggauaccaaagauaauuguccccaacuucccaauagcucgcaguuggauagcgacaaugacgguuugggcgacgaaugcgauggcgaugacgacaacgauggaauuccagacuauguaccuccaggaccagacaacugccgccuugucccaaauccaaaucagaaggauagcgacgguaacggcgugggagauguuugugaagacgacuuugacaacgacgcuguaguagacccuuuggauguaugccccgaaucugccgaagugacguugacggacuuuagagcauaccagacugugguuuuggaucccgaaggagaugcccagaucgauccaaauugggugguucuuaaucaaggaauggaaauaguacagaccaugaauagugaucccggccuggcggugggcuauacagcuuucaauggcguugacuucgaggguaccuuccacgugaacacagugaccgaugacgacuacgcaggauuucucuuuagcuaucaggacucaggacgauuuuaugucgugauguggaaacagacagagcagaccuacuggcaggcaacaccguuccgugcgguugcucaacccgggcugcaacugaaagcugucacuucugucucaggaccgggugaacaucuucgaaacgcauuauggcauaccggacacacuccagaccaggugagacuucuguggacugauccccgaaaugugggcuggagggauaagacuuccuaccgauggcagcuucuucaucgaccacaagugggauauauccgggucaagcuuuacgaagggccucaguugguagccgauucugguguaauuauugauaccucaaugaggggaggcagguuaggagucuuuuguuuuagucaggagaacauaaucuggagcaacuugcaauauagaugcaacgacacagugcccgaggauuucgaaccguuuagaagacaauugcuacaaggacgcgucuag

SEQ ID NO: 88507 - RNA, 1062 nt, Artificial Sequence
  derived and/or modified sequence
augucuaacccgacccagaccgacgccgauuccgacuuaguuggcgacguaugcgauacaaacgaagauuccgacggcgauggccaccaagacacaaaggauaauugcccccaguuaccaaacucuagucagcuggauuccgacaacgacgggcuaggcgacgaaugugauggagaugaugacaaugaugggauuccagacuacgucccuccuggacccgauaacuguagacuugugccgaauccaaaccaaaaggauagcgacgggaauggaguaggagacgugugcgaagaugacuucgauaacgacgccguuguugaccccuuagauguguguccugaaucagcagaaguuaccuuaaccgacuucagagccuaucagacugugguguuggacccggagggugaugcccagaucgauccuaauugggugguacuaaaccaggggauggaaauagugcaaaccaugaauagugauccuggauuggccgugggcuauaccgccuuuaauggaguggacuucgaaggaacuuuccaugucaauacuguaacagacgacgacuacgcugguuuucuauuuucauaccaggauucugggagauucuacgucguaauguggaaacagaccgaacaaaccuauuggcaggcaacccccuuucgcgccguagcacagccuggcuugcaacuuaaagcagugacauccgucuccgguccgggcgagcauuugcgaaacgcacuuuggcacaccggacacacuccagaccagguccgcuugcuauggacugaccccaggaacgugggcuggagagacaagacuucuuaucguuggcaacugcugcacagaccacaaguuggguacauccgggucaaauuguacgaaggcccucaacuaguugccgauagcggagugauuaucgauacgaguaugcgcggaggucggcuggggguauucuguuucagucaggagaauauuaucuggucuaauuuacaguacaggugcaacgauacaguuccugaggauuuugagccauuccggagacaacucuugcagggaaggguauag

SEQ ID NO: 88508 - protein, 157 aa, Artificial Sequence
  derived and/or modified sequence
HHLLASDEEIQDVSGTWYLKAMTVDREFPEMNLESVTPMTLTTLEGGNLEAKVTMLISGRCQEVKAVLEKTDEPGKYTADGGKHVAYIIRSHVKDHYIFYCEGELHGKPVRGVKLVGRDPNNLEALEDFEKAAGARGLSTESILIPRQSETCSPGSD

SEQ ID NO: 88509 - protein, 176 aa, Artificial Sequence
  derived and/or modified sequence
MKPLLLAVSLGLIAALQAHHLLASDEEIQDVSGTWYLKAMTVDREFPEMNLESVTPMTLTTLEGGNLEAKVTMLISGRCQEVKAVLEKTDEPGKYTADGGKHVAYIIRSHVKDHYIFYCEGELHGKPVRGVKLVGRDPKNNLEALEDFEKAAGARGLSTESILIPRQSETCSPGSD

SEQ ID NO: 88510 - DNA, 531 bp, Artificial Sequence
  derived and/or modified sequence
atgaagcccctgctgttggccgtgtctctcgggttaatagctgctctccaagcacaccatcttcttgctagtgacgaagaaatccaggatgtaagcggtacctggtacttgaaagcaatgacagtggacagagaattcccggaaatgaatctcgagagtgtcacccccatgacactgaccaccctcgagggaggcaacttggaagctaaagtcaccatgttgattagcgggagatgtcaggaggtaaaagccgtgctagaaaaaacagatgagccgggaaagtacaccgctgacggaggtaagcatgtggcttacatcatccggagccacgtgaaggatcattatatcttttactgcgaaggtgagctgcatggaaagcccgtaagaggtgttaagttggtgggacgagatcctaaaaacaatttagaggccctcgaagactttgaaaaagccgcgggcgccaggggacttagtacagagtcgatactcattccccgacagtccgagacctgtagccccgggtccgattag

SEQ ID NO: 88511 - DNA, 531 bp, Artificial Sequence
  derived and/or modified sequence
atgaaaccactcttgctagccgttagtcttggcttaatcgcggctctgcaggcccatcatctgctggcctccgacgaggagattcaggacgtgtctggcacatggtacttaaaggcgatgactgtggaccgcgagttcccagaaatgaatcttgagagcgtgactcccatgacattaacaactctggagggcggaaatctggaagcaaaagtgacaatgctgatatccggccgctgccaagaggtcaaagccgttctggaaaagacagacgagccggggaaatacaccgcggacggtgggaaacatgtagcttatattatcaggtcacacgtgaaggaccactatatcttttattgcgaaggggaactgcatggaaagcctgtgcgaggagttaagcttgtcggcagagaccccaagaacaatctggaagccctcgaggatttcgagaaagcagctggtgctcgtggtttaagtaccgagtcgatcctgattcctaggcaaagtgaaacgtgttctccaggatccgattag

SEQ ID NO: 88512 - DNA, 531 bp, Artificial Sequence
  derived and/or modified sequence
atgaagcccctgctgctggccgtgtccctgggcctgattgctgccctgcaggcccaccacctgctggccagtgatgaggagatccaggatgtgtctggcacctggtacctgaaggccatgacagtggaccgggagttccctgagatgaacctggagagcgtgacccccatgaccctgaccaccctggagggcggcaacctggaggccaaggtgaccatgctgatcagcggccgctgccaggaggtgaaggctgtgctggagaagacagatgagcccgggaagtacacagcagatggcggcaagcacgtggcctacatcatccgcagccacgtgaaggaccactacatcttctactgtgagggggagctgcacggcaagcctgtgcggggcgtgaagctggtgggccgggaccccaagaacaacctggaggccctggaggactttgagaaggccgccggggcccggggcctgagcacagagagcatcctgatcccccggcagagcgagacctgcagccctggcagtgactag

SEQ ID NO: 88513 - DNA, 776 bp, Artificial Sequence
  derived and/or modified sequence
acagcctctcccagccccagcaagcgacctgtcaggcggccgtggactcagactccggagatgaagcccctgctcctggccgtcagccttggcctcattgctgccctgcaggcccaccacctcctggcctcagacgaggagattcaggatgtgtcagggacgtggtatctgaaggccatgacggtggacagggagttccctgagatgaatctggaatcggtgacacccatgaccctcacgaccctggaagggggcaacctggaagccaaggtcaccatgctgataagtggccggtgccaggaggtgaaggccgtcctggagaaaactgacgagccgggaaaatacacggccgacgggggcaagcacgtggcatacatcatcaggtcgcacgtgaaggaccactacatcttttactgtgagggcgagctgcacgggaagccggtccgaggggtgaagctcgtgggcagagaccccaagaacaacctggaagccttggaggactttgagaaagccgcaggagcccgcggactcagcacggagagcatcctcatccccaggcagagcgaaacctgctctccagggagcgattagggggacaccttggctcctcagcagcccaaggacggcaccatccagcacctccgtcattcacagggacatggaaaaagctccccacccctgcagaacgcggctggctgcaccccttcctaccaccccccgccttccccctgccctgcgccccctctcctggttctccataaagagcttcagcagtt

SEQ ID NO: 88514 - DNA, 531 bp, Artificial Sequence
  derived and/or modified sequence
atgaagcccctgctgctggccgtgagcctgggcctgatcgccgccctgcaagctcaccatctgttggcttcagatgaggaaatccaggacgtctctgggacctggtatctgaaggccatgacagttgatcgggagtttcctgaaatgaatctcgaatctgtcacacctatgacacttactacactcgaggggggtaacctggaagccaaggtgacgatgctcataagcgggagatgtcaagaagtcaaagctgtgctggaaaagactgatgaaccagggaaatacaccgccgacgggggaaaacacgtagcttatatcatcaggtctcacgtgaaggatcactacattttttactgtgaaggggaactgcacgggaagcccgtgcgtggggtgaaactggtcgggcgtgaccctaagaataatctcgaggctttggaggatttcgagaaagcagccggcgcccggggcttgagcaccgagtcaattctcatcccccgccaatccgagacatgctctcccggtagcgattag

SEQ ID NO: 88515 - DNA, 531 bp, Artificial Sequence
  derived and/or modified sequence
atgaagcccctgctgctggccgtgagcctgggcctgatcgccgccttgcaggcacatcacctgctggccagtgacgaagagatccaagacgtatccgggacttggtacctcaaggctatgacagtggaccgcgagtttcctgagatgaatcttgagtccgttaccccaatgactctcacaacattggaaggtgggaatttggaggccaaggttacaatgctcatcagtggcaggtgtcaagaagtcaaagcagtcctggaaaaaaccgatgaacccggaaagtacaccgccgacggcggcaagcacgttgcttatataatacggagccatgtgaaggatcactacatattctattgcgagggagagctgcatgggaagccagttcggggcgtgaaattagtggggcgcgatcccaaaaataacctggaggcgctggaggacttcgagaaggcagccggagcccgggggctgtccaccgagtctattttgatccctcgacagtctgagacctgctctcccggtagcgactag

SEQ ID NO: 88516 - DNA, 531 bp, Artificial Sequence
  derived and/or modified sequence
atgaaacccttgttgctagccgtcagccttgggttgatcgcagcgctgcaagcccaccatctactcgcctcggacgaagagatccaagatgtgagcggcacctggtatctaaaggccatgacagttgatcgagagttcccagaaatgaatttggagtctgtcacccccatgaccctgacaactctcgagggcggaaatcttgaggccaaagttactatgcttattagcggtcgttgtcaggaagtaaaagcggtcttagaaaagaccgacgaaccaggtaagtacaccgcggatggaggaaaacacgtggcctatattatcagaagtcacgtcaaggaccactacattttttactgtgagggagagcttcatggaaagccagttaggggagtaaaattggtgggacgagaccccaaaaataatctggaggccctggaggattttgagaaagccgctggtgctcgcggtttgtctacagagtcaatccttattcccagacaaagcgaaacgtgttccccgggatccgattag

SEQ ID NO: 88517 - DNA, 531 bp, Artificial Sequence
  derived and/or modified sequence
atgaagcctctattgttggccgtctcgttgggactcatcgccgcactccaggcgcatcaccttctggcctccgacgaagaaatccaggacgtgtccggcacttggtatctgaaagctatgaccgtggatagggagtttcctgaaatgaatctggagtccgtgacccctatgacattaacaacactggaaggaggcaaccttgaggcaaaagttaccatgctgatcagcggaaggtgtcaggaggttaaggcggtgctggaaaagacagatgagcctgggaagtacaccgccgatggcggaaagcatgttgcatatataattagaagccacgtcaaagatcactatattttctactgcgaaggggaactccacggtaagcctgtgcggggagtgaaactggtcggacgagatcccaagaataacctggaggccctggaagattttgaaaaggccgctggggctcgaggattatccacggaatctatcctgatacccaggcaaagtgagacctgtagcccaggatccgattag

SEQ ID NO: 88518 - DNA, 531 bp, Artificial Sequence
  derived and/or modified sequence
atgaagcccctgctgctggccgtgagcctgggcctgatcgccgccctgcaggcccaccacctgctggccagcgacgaggagatccaggacgtgagcggcacctggtacctgaaggccatgaccgtggacagagagttccccgagatgaacctggagagcgtgacccccatgaccctgaccaccctggagggcggcaacctggaggccaaggtgaccatgctgatcagcggcagatgccaggaggtgaaggccgtgctggagaagaccgacgagcccggcaagtacaccgccgacggcggcaagcacgtggcctacatcatcagaagccacgtgaaggaccactacatcttctactgcgagggcgagctgcacggcaagcccgtgagaggcgtgaagctggtgggcagagaccccaagaacaacctggaggccctggaggacttcgagaaggccgccggcgccagaggcctgagcaccgagagcatcctgatccccagacagagcgagacctgcagccccggcagcgactag

SEQ ID NO: 88519 - protein, 19 aa, Artificial Sequence
  derived and/or modified sequence
LLASDEEIQDVSGTWYLKA

SEQ ID NO: 88520 - protein, 965 aa, Artificial Sequence
  derived and/or modified sequence
MYNMRRLSLSPTFSMGFHLLVTVSLLFSHVDHVIAETEMEGEGNETGECTGSYYCKKGVILPIWEPQDPSFGDKIARATVYFVAMVYMFLGVSIIADRFMSSIEVITSQEKEITIKKPNGETTKTTVRIWNETVSNLTLMALGSSAPEILLSVIEVCGHNFTAGDLGPSTIVGSAAFNMFIIIALCVYVVPDGETRKIKHLRVFFVTAAWSIFAYTWLYIILSVISPGVVEVWEGLLTFFFFPICVVFAWVADRRLLFYKYVYKRYRAGKQRGMIIEHEGDRPSSKTEIEMDGKVVNSHVENFLDGALVLEVDERDQDDEEARREMARILKELKQKHPDKEIEQLIELANYQVLSQQQKSRAFYRIQATRLMTGAGNILKRHAADQARKAVSMHEVNTEVTENDPVSKIFFEQGTYQCLENCGTVALTIIRRGGDLTNTVFVDFRTEDGTANAGSDYEFTEGTVVFKPGDTQKEIRVGIIDDDIFEEDENFLVHLSNVKVSSEASEDGILEANHVSTLACLGSPSTATVTIFDDDHAGIFTFEEPVTHVSESIGIMEVKVLRTSGARGNVIVPYKTIEGTARGGGEDFEDTCGELEFQNDEIVKIITIRIFDREEYEKECSFSLVLEEPKWIRRGMKGGFTITGKYLFGQPVFRKVHAREHPILSTVITIADEYDDKQPLTSKEEEERRIAEMGRPILGEHTKLEVIIEESYEFKSTVDKLIKKTNLALVVGTNSWREQFIEAITVSAGEDDDDDECGEEKLPSCFDYVMHFLTVFWKVLFAFVPPTEYWNGWACFIVSILMIGLLTAFIGDLASHFGCTIGLKDSVTAVVFVALGTSVPDTFASKVAATQDQYADASIGNVTGSNAVNVFLGIGVAWSIAAIYHAANGEQFKVSPGTLAFSVTLFTIFAFINVGVLLYRRRPEIGGELGGPRTAKLLTSCLFVLLWLLYIFFSSLEAYCHIKGF

SEQ ID NO: 88521 - DNA, 2898 bp, Artificial Sequence
  derived and/or modified sequence
atgtacaacatgagaagactgagcctgagccccaccttcagcatgggcttccacctgctggtgaccgtgagcctgctgttcagccacgtggaccacgtgatcgccgagaccgagatggagggcgagggcaacgagaccggcgagtgcaccggcagctactactgcaagaagggcgtgatcctgcccatctgggagccccaggaccccagcttcggcgacaagatcgccagagccaccgtgtacttcgtggccatggtgtacatgttcctgggcgtgagcatcatcgccgacagattcatgagcagcatcgaggtgatcaccagccaggagaaggagatcaccatcaagaagcccaacggcgagaccaccaagaccaccgtgagaatctggaacgagaccgtgagcaacctgaccctgatggccctgggcagcagcgcccccgagatcctgctgagcgtgatcgaggtgtgcggccacaacttcaccgccggcgacctgggccccagcaccatcgtgggcagcgccgccttcaacatgttcatcatcatcgccctgtgcgtgtacgtggtgcccgacggcgagaccagaaagatcaagcacctgagagtgttcttcgtgaccgccgcctggagcatcttcgcctacacctggctgtacatcatcctgagcgtgatcagccccggcgtggtggaggtgtgggagggcctgctgaccttcttcttcttccccatctgcgtggtgttcgcctgggtggccgacagaagactgctgttctacaagtacgtgtacaagagatacagagccggcaagcagagaggcatgatcatcgagcacgagggcgacagacccagcagcaagaccgagatcgagatggacggcaaggtggtgaacagccacgtggagaacttcctggacggcgccctggtgctggaggtggacgagagagaccaggacgacgaggaggccagaagagagatggccagaatcctgaaggagctgaagcagaagcaccccgacaaggagatcgagcagctgatcgagctggccaactaccaggtgctgagccagcagcagaagagcagagccttctacagaatccaggccaccagactgatgaccggcgccggcaacatcctgaagagacacgccgccgaccaggccagaaaggccgtgagcatgcacgaggtgaacaccgaggtgaccgagaacgaccccgtgagcaagatcttcttcgagcagggcacctaccagtgcctggagaactgcggcaccgtggccctgaccatcatcagaagaggcggcgacctgaccaacaccgtgttcgtggacttcagaaccgaggacggcaccgccaacgccggcagcgactacgagttcaccgagggcaccgtggtgttcaagcccggcgacacccagaaggagatcagagtgggcatcatcgacgacgacatcttcgaggaggacgagaacttcctggtgcacctgagcaacgtgaaggtgagcagcgaggccagcgaggacggcatcctggaggccaaccacgtgagcaccctggcctgcctgggcagccccagcaccgccaccgtgaccatcttcgacgacgaccacgccggcatcttcaccttcgaggagcccgtgacccacgtgagcgagagcatcggcatcatggaggtgaaggtgctgagaaccagcggcgccagaggcaacgtgatcgtgccctacaagaccatcgagggcaccgccagaggcggcggcgaggacttcgaggacacctgcggcgagctggagttccagaacgacgagatcgtgaagatcatcaccatcagaatcttcgacagagaggagtacgagaaggagtgcagcttcagcctggtgctggaggagcccaagtggatcagaagaggcatgaagggcggcttcaccatcaccggcaagtacctgttcggccagcccgtgttcagaaaggtgcacgccagagagcaccccatcctgagcaccgtgatcaccatcgccgacgagtacgacgacaagcagcccctgaccagcaaggaggaggaggagagaagaatcgccgagatgggcagacccatcctgggcgagcacaccaagctggaggtgatcatcgaggagagctacgagttcaagagcaccgtggacaagctgatcaagaagaccaacctggccctggtggtgggcaccaacagctggagagagcagttcatcgaggccatcaccgtgagcgccggcgaggacgacgacgacgacgagtgcggcgaggagaagctgcccagctgcttcgactacgtgatgcacttcctgaccgtgttctggaaggtgctgttcgccttcgtgccccccaccgagtactggaacggctgggcctgcttcatcgtgagcatcctgatgatcggcctgctgaccgccttcatcggcgacctggccagccacttcggctgcaccatcggcctgaaggacagcgtgaccgccgtggtgttcgtggccctgggcaccagcgtgcccgacaccttcgccagcaaggtggccgccacccaggaccagtacgccgacgccagcatcggcaacgtgaccggcagcaacgccgtgaacgtgttcctgggcatcggcgtggcctggagcatcgccgccatctaccacgccgccaacggcgagcagttcaaggtgagccccggcaccctggccttcagcgtgaccctgttcaccatcttcgccttcatcaacgtgggcgtgctgctgtacagaagaagacccgagatcggcggcgagctgggcggccccagaaccgccaagctgctgaccagctgcctgttcgtgctgctgtggctgctgtacatcttcttcagcagcctggaggcctactgccacatcaagggcttctag

SEQ ID NO: 88522 - DNA, 2898 bp, Artificial Sequence
  derived and/or modified sequence
atgtataatatgaggcgcttgagcttgtcaccaaccttctccatgggctttcacctactggttaccgtgagcctgctgttcagtcatgttgaccatgtaatcgcggagactgaaatggagggggagggcaatgaaaccggggagtgcactgggagttactactgcaaaaagggtgtgatcctgcccatctgggagccccaggaccccagctttggagataaaattgctagagcgactgtgtatttcgtcgcgatggtttacatgtttctgggcgtgtccatcatcgcggatcgttttatgagcagtatagaggttataacttcccaggaaaaagaaatcacaatcaagaagcctaacggagagaccaccaagaccacagttcgtatctggaacgagacggttagcaacctgactctgatggcacttggttcttcagcgcctgagatcctactgagcgtgattgaggtgtgcggtcacaacttcactgccggtgatcttgggccctcaacgattgttggctctgccgctttcaacatgttcataatcatagcactgtgcgtctacgtcgtaccagatggtgaaaccaggaagatcaaacacctcagagttttcttcgtaacggccgcctggagcattttcgcttatacttggctctatataatcctgagcgtcattagccctggtgtggtggaagtctgggaggggcttctgacatttttttttttcccgatctgcgtggtcttcgcttgggtcgctgatcgacgcctgctgttctacaagtatgtctataaaagataccgcgccggcaaacagcggggcatgatcatcgaacacgagggcgatagaccctcgagcaagactgagatagagatggatggcaaagtggttaacagccacgtcgagaactttctcgatggcgcactagtcttagaagtcgatgaaagggaccaggacgacgaggaagcccgccgcgaaatggctcggattctgaaggaattaaagcagaaacatcccgacaaggaaatagagcagctaatcgagctggctaactaccaggtgctgagccaacagcagaagtcgagggctttctatagaatccaggccactagactgatgacaggcgctggtaacatcctgaagcggcacgccgcggaccaagctaggaaagcagtttcgatgcatgaggtaaatactgaagtcacagagaacgacccagtgtcaaagatattcttcgaacaagggacataccagtgtctggagaactgcgggaccgtggcactgaccatcataagacgggggggcgacctgactaacaccgtctttgtagatttcagaacagaagacggtaccgctaatgccggtagcgactatgaatttactgagggaacagtggtattcaaacctggggacacgcaaaaagaaatacgcgtgggtattatcgatgatgatatttttgaagaggatgaaaacttcttggttcacctatctaatgtcaaagtgagcagtgaagcgtccgaagatggtatcctcgaggccaaccatgtgtcaacactcgcttgcctgggaagtcccagtacggctactgtgacaatctttgacgatgaccatgccggtatttttacatttgaggaacctgtaacccacgtgtcggagagtatcgggatcatggaagttaaggtgctgcggacatctggagccaggggtaatgtgatcgtaccatataaaactatcgagggcacagcccgaggcgggggggaagacttcgaagatacatgcggcgaacttgaattccagaacgacgaaatcgtcaaaattatcaccatcaggattttcgaccgggaggagtacgagaaggagtgttcattctccttggtgctggaggagcctaaatggatcaggcgcggtatgaagggggggttcacaatcacgggcaaatacctatttggacagcccgtgtttcggaaggttcacgcacgcgaacatcctatcttatccaccgtgataactatcgcggatgagtatgacgacaaacagccccttacatcgaaggaggaggaggagcggcgcattgcagagatgggccgaccaatcctgggagagcataccaagctcgaagtgataatagaggagagctatgagtttaagtcgacagttgataagctgatcaaaaagaccaacttggccctcgttgtaggcacaaatagctggagggagcaattcattgaggcaattactgtcagcgcgggcgaagacgacgatgacgacgaatgcggcgaggagaagctgccttcatgttttgattatgtcatgcacttcctgactgtgttctggaaggtcctatttgccttcgttccacctacagaatactggaacggctgggcatgcttcatcgtaagtatacttatgatcggactgctgaccgccttcattggcgacctggcttctcatttcgggtgcactattggccttaaggatagtgtcaccgcagttgtgttcgtagccctgggcacttcagtgcccgacacgttcgcatcaaaggtcgctgccactcaggatcagtatgctgatgcgagcattggcaacgtcacggggtctaacgccgtcaacgtgtttcttggtataggcgtcgcatggtccattgccgcaatataccacgccgctaatggcgagcagtttaaagtttcgccaggcactcttgccttttccgtgactctgttcaccatttttgcgtttattaacgtgggcgtcctgctgtacaggcgacgacctgagatcggcggcgagctgggaggcccacgcacagctaaactcctcacgtcatgtctcttcgtgctgctctggctgttgtatatatttttcagtagcttggaggcatactgtcacatcaaaggcttttag

SEQ ID NO: 88523 - DNA, 2898 bp, Artificial Sequence
  derived and/or modified sequence
atgtacaacatgaggcggctgagcctgagccccaccttctccatgggcttccacctgctggtgacagtgtccctgctcttcagccacgtggaccacgtgattgctgagacagagatggagggggagggcaatgagaccggggagtgcaccggcagctactactgcaagaagggcgtcatcctgcccatctgggagccccaggaccccagctttggagacaagatcgcccgggccaccgtgtactttgtggccatggtgtacatgttcctgggcgtgtccatcatcgctgaccgcttcatgagcagcattgaagtcatcaccagccaggagaaggagatcaccatcaagaagcccaatggagagaccaccaagaccaccgtgcgcatctggaatgaaacagtgagcaacctgaccctgatggccctgggcagcagcgcccctgagatcctgctgagcgtcatcgaggtgtgtggccacaacttcaccgctggggacctgggccccagcaccatcgtgggcagcgctgccttcaacatgttcatcatcatcgccctgtgtgtgtatgtggtgcctgatggagagaccaggaagatcaagcacctgcgggtcttctttgtgacagctgcctggagcatctttgcctacacctggctgtacatcatcctgagcgtcatcagccctggggtggtggaggtgtgggagggcctgctgaccttcttcttcttccccatctgtgtggtgtttgcctgggtggccgaccggcggctgctcttctacaagtatgtgtacaagcgctaccgggccggcaagcagaggggcatgatcatcgagcacgagggggaccggcccagcagcaagacagaaattgagatggatggcaaggtggtgaacagccacgtggagaacttcctggatggagccctggtgctggaggtggatgagcgggaccaggatgatgaggaggcccggcgggagatggcccgcatcctgaaggagctgaagcagaagcacccagacaaggagattgagcagctgattgagctggccaactaccaggtgctgagccagcagcagaagagccgggccttctaccgcatccaggccacccggctgatgactggagctggcaacatcctgaagagacatgctgctgaccaggccaggaaggctgtgtccatgcatgaggtgaacacagaggtgacagaaaatgaccctgtgtccaagatcttctttgagcagggcacctaccagtgcctggagaactgtggcaccgtggccctgaccatcatcagaagaggaggagacctgaccaacacagtgtttgtggacttcagaacagaagatggaacagccaatgccggcagtgactatgagttcacagagggcaccgtggtgttcaagccaggggacacccagaaggagatccgggtgggcatcattgatgatgacatctttgaagaagatgagaacttcctggtgcacctgagcaatgtgaaggtgagcagcgaggcctctgaagatggcatcctggaggccaaccacgtgtccaccctggcctgcctgggcagccccagcacagccaccgtgaccatctttgatgatgaccatgctggcatcttcacctttgaggagcctgtgacccacgtgtctgagagcatcggcatcatggaggtgaaggtgctgcggaccagcggggcccggggaaatgtgattgtgccctacaagaccatcgagggcacagcccggggcggcggggaggactttgaggacacctgtggggagctggagttccagaatgatgagatcgtgaagatcatcaccatccgcatctttgaccgggaggagtatgagaaggaatgttccttcagcctggtgctggaggagcccaagtggatcagaagaggcatgaagggcggcttcaccatcaccgggaagtacctgtttggccagcctgtgttcaggaaggtgcacgcccgggagcaccccatcctgagcaccgtcatcaccatcgcagatgaatatgatgacaagcagcccctgaccagcaaggaggaggaggagaggagaattgctgagatgggccggcccatcctgggggagcacaccaagctggaggtgatcatcgaggagagctatgagttcaagagcacagtggacaagctgatcaagaagaccaacctggccctggtggtgggcaccaacagctggagggagcagttcatcgaggccatcaccgtgtctgctggggaggatgatgatgatgatgaatgtggggaggagaagctgcccagctgctttgattatgtgatgcacttcctgaccgtcttctggaaggtgctgtttgcctttgtgcccccaacagagtactggaatggctgggcctgcttcatcgtgtccatcctgatgattggcctgctgacagccttcatcggggacctggccagccacttcggctgcaccatcggcctgaaggacagcgtgacagctgtggtgtttgtggccctgggcacctctgtgcctgacacctttgccagcaaggtggccgccacccaggaccagtatgcagatgccagcattggaaatgtgacaggcagcaatgctgtgaatgtgttcctgggcatcggcgtggcctggagcattgctgccatctaccacgccgccaacggggagcagttcaaggtgtccccaggcaccctggccttctctgtgaccctcttcaccatctttgccttcatcaacgtgggcgtgctgctgtacagaagaagacctgagattggaggagagctgggcggccccaggacagccaagctgctgaccagctgcctgtttgtgctgctgtggctgctgtacatcttcttcagcagcctggaggcctactgccacatcaagggcttctag

SEQ ID NO: 88524 - DNA, 2898 bp, Artificial Sequence
  derived and/or modified sequence
atgtacaacatgcggcggctgagcctgagccccaccttcagcatgggtttccacctccttgtcacggtcagcctcttatttagccacgtggaccacgttatcgccgagacagagatggagggtgaaggcaacgagactggcgaatgtaccggatcctactactgcaaaaaaggcgtaattctgcccatttgggaacctcaggacccatcattcggagacaagatcgcgcgcgcgacggtgtacttcgtggccatggtctacatgttcctgggagtctctatcatcgccgatcgatttatgagcagcatagaggtaataacctctcaggagaaggaaataaccatcaaaaagcctaatggagagaccacaaagaccactgtgagaatctggaacgagaccgtgagcaacctgactctgatggccctgggatcttccgccccagaaattctgctttcagtgatcgaggtctgtggtcacaattttaccgccggcgacctgggtccgtctactatagtcggtagcgctgcatttaatatgttcatcattatcgctctgtgtgtgtacgtagtgcccgatggcgagactaggaagatcaaacaccttagggtcttttttgtgaccgccgcctggtctatcttcgcctacacatggttgtacattattctgtctgtcatcagtccaggagtcgtggaagtttgggaggggctcctaactttcttcttcttcccaatctgtgtagttttcgcttgggtcgccgatcgcaggttgcttttctacaaatacgtgtataaaaggtaccgagctggaaagcaaaggggcatgatcattgagcatgaaggagaccggccttcctccaagacagagatcgagatggacggaaaagtggtcaactcccatgtcgagaattttctggacggcgccctggtgcttgaagtagacgagcgcgaccaggatgacgaagaagccaggcgcgaaatggcccgaattctgaaggagctgaagcaaaaacatccggacaaagagattgagcaacttatcgaattggctaattatcaggttctcagccagcagcagaaatcgagggccttttacaggattcaggccacgcgcctgatgactggggctggcaacattctgaagcgccatgccgctgaccaggcacggaaggctgtgagcatgcatgaggtgaacaccgaggtgacagagaacgaccccgtcagcaaaattttctttgagcagggtacataccagtgtctggaaaactgcggcaccgttgccctcacaatcataaggcgagggggtgaccttactaacactgtctttgttgacttccgcactgaggatgggactgccaacgcaggctctgattacgaatttaccgagggcaccgtggtgttcaaaccaggagatactcagaaggagattcgtgtcgggatcatcgacgacgacatcttcgaggaggatgagaactttctggtgcatctgtccaacgtgaaggtgagctctgaagccagtgaggatggaatcttagaagctaatcacgtctcgaccctcgcttgtctggggagcccctctacagctaccgtgactatctttgacgatgaccatgccgggatcttcacctttgaagaacccgttacacacgtgtccgaaagtattggcattatggaggtgaaagtgttacggaccagcggggcacgtggcaatgtgattgttccatacaagaccatcgagggtactgccagagggggcggtgaggactttgaggatacttgtggggagctggaattccagaacgacgagatagtgaagattatcactatcaggatttttgacagggaggagtacgagaaggagtgttctttctccctggtgcttgaagaacccaagtggattcgtcggggaatgaaggggggcttcacaatcaccgggaagtatctctttggacagccagtgttccggaaggtacacgcacgcgaacatccaattctctccacagtgattactattgcagacgagtatgatgacaaacagccactgacaagcaaagaagaggaagagcgaaggattgcggagatgggaaggcctatattaggggagcataccaagctggaagtcatcatagaagagtcatacgagttcaaaagtaccgtggataagctcataaagaagacaaatttggccctcgtggtgggcacaaacagttggcgcgaacagttcatcgaggctattaccgtgtccgccggtgaagatgatgatgacgacgaatgcggggaggagaagctaccttcgtgttttgattatgtgatgcatttcttaactgtcttttggaaggttcttttcgcgttcgttccgcctacggaatactggaacggttgggcttgttttattgtgagcatattaatgatcggtctgctcactgcctttataggagacttggccagccacttcggctgtactatcgggttgaaagattcagtgactgccgtcgttttcgtggctcttggtactagtgtacccgatacttttgcaagcaaagtagccgcgacacaggaccagtacgccgacgcgtccatcggtaatgttacaggatctaacgcagtgaacgtgttcctggggatcggggtggcctggagcatcgcagccatttatcacgctgctaacggggagcagtttaaggtgtcccctggcactttggcgttttcagtgactctttttactattttcgcatttataaatgtgggggtgttgctctacagaaggcgcccagaaattggcggcgagctgggaggaccccgaaccgccaaactgctgacctcatgcctgttcgttttactatggctgttgtatatatttttttcgtccctagaagcttattgccatatcaagggcttctag

SEQ ID NO: 88525 - DNA, 2898 bp, Artificial Sequence
  derived and/or modified sequence
atgtacaacatgaggagacttagtctgtctccaacgttctctatgggattccacttactggtgacagtaagcttgctgttttcccacgtggaccatgtgatcgccgaaaccgagatggagggggaagggaatgagacaggggaatgtactggctcctactactgcaagaaaggagtgatccttccaatttgggagccccaagacccctcatttggcgacaaaatcgcacgagccacagtttacttcgtcgcgatggtgtacatgttcctgggagtttcaatcattgccgaccgctttatgagttcgattgaggttataacctcccaagagaaagagattacaattaagaagccaaacggcgagacaaccaagactacagttcggatttggaatgaaaccgttagcaatctaactctaatggcactggggtcgtctgcccctgagatcctcctatccgtgatagaagtgtgtggacataattttactgccggagatctaggcccttccacgatcgtcggttccgcggctttcaatatgttcatcattatcgccctttgcgtgtatgtggtgccagatggcgagaccaggaaaataaaacatctgcgtgtattctttgttactgccgcatggagcatctttgcctatacatggctttacatcattctttcagtaattagcccgggtgtggtcgaggtctgggagggcctcctaaccttcttctttttccccatctgcgtggtgtttgcctgggtggcagaccgcagactgctgttctacaagtatgtgtataagcgttatagggctgggaaacaaagaggcatgataattgaacacgagggcgatcgcccatcgtcaaaaaccgagatcgagatggatggtaaggtggtcaatagccatgtcgagaatttcctcgacggcgctctggttcttgaggtagacgagcgggatcaagacgacgaagaagctcgaagagaaatggccaggattctgaaggaactaaaacagaagcaccctgacaaagaaattgagcagctgatcgagcttgcaaactaccaggtacttagtcagcaacaaaagtccagagcattctacaggatccaggcaacccggctgatgaccggcgcaggcaatatcctgaaacgtcacgcggctgaccaggctcgtaaagctgtatccatgcatgaagtgaacacagaggtgaccgagaatgaccccgtttctaagatttttttcgaacaggggacgtaccaatgcctggagaactgtggtaccgtggcattgacgatcatacgtagggggggtgacttgacaaataccgtgttcgtggattttcgcaccgaggacggcactgctaatgccggaagcgactacgaatttacagagggcaccgtggtgtttaaacccggagatacccagaaagagattcgcgtaggcattatagatgatgacatctttgaagaggacgaaaactttctcgtccacctgtctaatgtcaaggtttcttctgaggcctctgaagatggcatcctcgaggcaaatcacgtatctactctggcctgcttgggtagtccgtccaccgccacggtcacaatcttcgacgacgaccacgccggtatcttcacttttgaagaacccgtgacccatgtgagtgagagtattgggatcatggaggtgaaagtattgagaacttccggagctcgtggtaatgtgatcgtgccctacaaaaccatcgaagggacagctcgagggggaggagaggattttgaggacacctgcggcgagctcgaatttcagaatgacgaaatcgttaaaattataacgatcaggattttcgaccgcgaagagtacgaaaaggaatgtagcttttcactggtgttagaagagcctaaatggataaggagagggatgaagggaggctttacaatcactggaaagtacttatttgggcagcccgtcttccggaaagtacatgcgagggagcaccctattctgtccaccgttattaccatcgccgacgaatacgacgataagcagccactgacgagcaaggaggaggaggagcgccgaatcgcagaaatgggcagaccgatcctcggagaacataccaagctggaagtaatcatcgaggaaagctatgagttcaagagcacggtcgacaaactgatcaaaaaaaccaatctggccctcgtggtcggcacaaattcctggcgggagcagttcattgaggccatcacagtgtctgccggtgaggatgatgacgacgacgagtgcggcgaggagaaactcccctcgtgctttgactacgtgatgcactttcttaccgtgttttggaaagttctttttgcatttgtgcctcctaccgagtattggaacggctgggcttgctttattgttagcattctcatgattggtctccttactgcattcattggcgatcttgcctcgcacttcggctgcacaataggactgaaggactcagttaccgccgttgtgtttgtggctctgggaactagtgttcctgatacttttgcctcgaaggtcgccgcaacacaggatcaatacgctgacgcctctataggcaacgttacagggagcaacgccgtgaacgtcttcctgggcattggggtggcttggtcaattgccgctatctatcacgcggctaatggagagcagtttaaggttagtccaggcaccttagccttttctgtgacgttgtttacaatttttgcctttatcaacgtgggggtcctgctttaccgccgtcggccagaaattggaggggagttaggagggcctcgcactgccaaactactgacttcttgtttatttgtgcttctgtggctcctctacatttttttctcctccctagaagcttattgccatattaaagggttttag

SEQ ID NO: 88526 - DNA, 2898 bp, Artificial Sequence
  derived and/or modified sequence
atgtacaacatgcggcgattaagtctttcacccaccttttcaatgggatttcatctgttagttactgtgagtctcttattttcccatgtggaccatgtaattgctgagacagaaatggaaggagaaggaaatgaaactggtgaatgtactggatcatattactgtaagaaaggggtgattttgcccatttgggaaccccaagacccttcttttggggacaaaattgctagagctactgtgtattttgtggccatggtctacatgtttcttggagtctctatcatagctgatcggttcatgtcctctatagaagtcatcacatctcaagaaaaagaaataaccataaagaaacccaatggagagaccaccaagacaactgtgaggatctggaatgaaacagtttctaacctgaccttgatggccctgggatcttctgctcctgagattctcctttcagtaattgaagtgtgtggccataacttcactgcaggagacctcggtcctagcaccatcgtgggaagtgctgcattcaatatgttcatcattattgcactctgtgtttatgtggtgcctgacggagagacaaggaagattaagcatttgcgtgtcttctttgtgacagcagcctggagcatctttgcctacacctggctttacattattttgtctgtcatatctcctggtgttgtggaggtctgggaaggtttgcttactttcttcttctttcccatctgtgttgtgttcgcttgggtagcggataggagacttctgttttacaagtatgtctacaagaggtatcgagctggcaagcagagggggatgattattgaacatgaaggagacaggccatcttctaagactgaaattgaaatggacgggaaagtggtcaattctcatgttgaaaatttcttagatggtgctctggttctggaggtggatgagagggaccaagatgatgaagaagctaggcgagaaatggctaggattctgaaggaacttaagcagaagcatccagataaagaaatagagcaattaatagaattagctaactaccaagtcctaagtcagcagcaaaaaagtagagcattttatcgcattcaagctactcgcctcatgactggagctggcaacattttaaagaggcatgcagctgaccaagcaaggaaggctgtcagcatgcacgaggtcaacactgaagtgactgaaaatgaccctgttagtaagatcttctttgaacaagggacatatcagtgtctggagaactgtggtactgtggcccttaccattatccgcagaggtggtgatttgactaacactgtgtttgttgacttcagaacagaggatggcacagcaaatgctgggtctgattatgaatttactgaaggaactgtggtgtttaagcctggtgatacccagaaggaaatcagagtgggtatcatagatgatgatatctttgaggaggatgaaaatttccttgtgcatctcagcaatgtcaaagtatcttctgaagcttcagaagatggcatactggaagccaatcatgtttctacacttgcttgcctcggatctccctccactgccactgtaactatttttgatgatgaccacgcaggcatttttacttttgaggaacctgtgactcatgtgagtgagagcattggcatcatggaggtgaaagtattgagaacatctggagctcgaggaaatgttatcgttccatataaaaccatcgaagggactgccagaggtggaggggaggattttgaggacacttgtggagagctcgaattccagaatgatgaaattgtgaagatcattaccattagaatatttgaccgtgaggaatatgagaaagagtgcagtttctcccttgtgcttgaggaaccaaaatggataagaagaggaatgaaaggtggcttcacaataacaggaaaatacctgtttggccaacctgtcttcaggaaggttcatgctagagaacatccgattctctctactgtaatcaccattgcagacgaatatgatgacaagcagccactgaccagcaaagaggaagaggagaggcgcattgcagaaatggggcgccccatcctgggagagcacaccaagttggaagtgatcattgaagaatcctatgaattcaagagtactgtggacaaactcattaagaagacaaacctggcccttgtggttgggactaacagctggagagaacagttcattgaagctatcactgtcagtgctggggaagatgatgacgacgatgaatgtggggaagagaagctgccctcctgtttcgattacgtgatgcactttctgactgtgttctggaaggtcctgtttgccttcgtcccccctactgaatactggaatggctgggcgtgtttcattgtctccatcctcatgattggcctactgacagctttcattggagacctggcttcccactttggctgcaccattggcctgaaagattctgtgactgcagtcgtgttcgtcgcacttggaacatcagtgccagacacatttgccagcaaagtggcagccacccaggaccagtatgcagacgcctccataggtaacgtcacgggcagcaacgcggtgaatgtcttcctgggaatcggtgtggcctggtccatcgctgccatctaccacgcagccaatggggaacagttcaaagtgtcccctggcacactagctttctctgtcactctcttcaccatttttgctttcatcaatgtgggggtgctgctgtatcggcggaggccagaaatcggaggtgagctgggtgggccccggactgccaagctcctcacatcctgcctctttgtgctcctatggctcttgtacattttcttctcctccctggaggcctactgccacataaaaggcttctaa

SEQ ID NO: 88527 - protein, 461 aa, Artificial Sequence
  derived and/or modified sequence
MTPNSMTENGLTAWDKPKHCPDREHDWKLVGMSEACLHRKSHSERRSTLKNEQSSPHLIQTTWTSSIFHLDHDDVNDQSVSSAQTFQTEEKKCKGYIPSYLDKDELCVVCGDKATGYHYRCITCEGCKGFFRRTIQKNLHPSYSCKYEGKCVIDKVTRNQCQECRFKKCIYVGMATDLVLDDSKRLAKRKLIEENREKRRREELQKSIGHKPEPTDEEWELIKTVTEAHVATNAQGSHWKQKRKFLPEDIGQAPIVNAPEGGKVDLEAFSHFTKIITPAITRVVDFAKKLPMFCELPCEDQIILLKGCCMEIMSLRAAVRYDPESETLTLNGEMAVTRGQLKNGGLGVVSDAIFDLGMSLSSFNLDDTEVALLQAVLLMSSDRPGLACVERIEKYQDSFLLAFEHYINYRKHHVTHFWPKLLMKVTDLRMIGACHASRFLHMKVECPTELFPPLFLEVFED

SEQ ID NO: 88528 - protein, 121 aa, Artificial Sequence
  derived and/or modified sequence
MTPNSMTENGLTAWDKPKHCPDREHDWKLVGMSEACLHRKSHSERRSTLKNEQSSPHLIQTTWTSSIFHLDHDDVNDQSVSSAQTFQTEEKKCKGYIPSYLDKDELCVVCGDKATGYHYRC

SEQ ID NO: 88529 - DNA, 7416 bp, Artificial Sequence
  derived and/or modified sequence
cggcggggattaactttgcatgaataatgtgagtgcgcttggaaaagagacctcctgctccgcgggctcggggcaagagcccgcaggctaccttccccgggcaggggcgctcaacccaaccggctccagggcactggtaatttggctagaggaccgcgcggaggcagcgggatctgcgatttccttctggttggctgtcctgcgtgggtgccaagttccacacatgatttaatgaataagaaggagatgtcagtgaaaaaagggatccagaatgattactaacctatgactcccaacagtatgacagaaaatggccttacagcctgggacaaaccgaagcactgtccagaccgagaacacgactggaagctagtaggaatgtctgaagcctgcctacataggaagagccattcagagaggcgcagcacgttgaaaaatgaacagtcgtcgccacatctcatccagaccacttggactagctcaatattccatctggaccatgatgatgtgaacgaccagagtgtctcaagtgcccagaccttccaaacggaggagaagaaatgtaaagggtacatccccagttacttagacaaggacgagctctgtgtagtgtgtggtgacaaagccaccgggtatcactaccgctgtatcacgtgtgaaggctgcaagggtttctttagaagaaccattcagaaaaatctccatccatcctattcctgtaaatatgaaggaaaatgtgtcatagacaaagtcacgcgaaatcagtgccaggaatgtcgctttaagaaatgcatctatgttggcatggcaacagatttggtgctggatgacagcaagaggctggccaagaggaagctgatagaggagaaccgggagaaaagacggcgggaagagctgcagaagtccatcgggcacaagccagagcccacagacgaggaatgggagctcatcaaaactgtcaccgaagcccatgtggcgaccaacgcccaaggcagccactggaagcaaaaacggaaattcctgccagaagacattggacaagcaccaatagtcaatgccccagaaggtggaaaggttgacttggaagccttcagccattttacaaaaatcatcacaccagcaattaccagagtggtggattttgccaaaaagttgcctatgttttgtgagctgccatgtgaagaccagatcatcctcctcaaaggctgctgcatggagatcatgtcccttcgcgctgctgtgcgctatgacccagaaagtgagactttaaccttgaatggggaaatggcagtgacacggggccagctgaaaaatgggggtcttggggtggtgtcagacgccatctttgacctgggcatgtctctgtcttctttcaacctggatgacactgaagtagccctccttcaggccgtcctgctgatgtcttcagatcgcccggggcttgcctgtgttgagagaatagaaaagtaccaagatagtttcctgctggcctttgaacactatatcaattaccgaaaacaccacgtgacacacttttggccaaaactcctgatgaaggtgacagatctgcggatgataggagcctgccatgccagccgcttcctgcacatgaaggtggaatgccccacagaactcttcccccctttgttcttggaagtgttcgaggattagactgactggattcattctcataattcctacagcactactgggtgtcatttcattccattgcctagctcttttttgtttgtttctttgtgttgggagggattatttgggagggaaaagggaagtagtccttggcatagacatggatgaaattgccccttgaatgcgggtacttgaaactattgcatttcgttctccggtcctgtgatgtgaatgctctgaaggttttatggttgtggaggtggggtgggggacaatcattaactcaccagcaccaagcatcaccagctcccacccgtccctggtccaagacttgagtcagcaaaatggcgccacaggacactaaagaagccttaaaaccaagataatacgaccacctccacccaatcctgatgttcgcagggctgaagttaacagagcacagaccacctttagttagatgtggctttcagccttttagggaaagactcgaacaaattttcatctattcaagagcatgctgtttgcagcactctttatggtctcctaggagcataacttggaatgtacaggaatatttgtgtcctaaaaaaatcagctgcccttccaatatcatttttataacgttatggtttaattcaagttatacaaaggtgtgactcaaggatgtgcaggtattgactgatggaggccaacaaggaaaatattttttttcagtgagcccagagaaattagaaatcttcaccaatgtcagtgactgcatggtttccaaaaattcacatagtattacctcacagtaggaaggcttctttcccatttaggctcagagaacacttttacagaaatcaaacctatttacagggtggcaccccttttctgtggcatctgatctgtcatctcccaagctcctgaagttctttatccaggttgtatctttgctgagctgacaacagatttctctatggatcaaatattctaatcaaggaaagatacggtgaaacttcagtcttcttctggagaaatgctgaggcgagattagtgcagctacattctgagttgaaggaaatgcagtgttctgagggcccctttgtgtcctgatggctggaggacgcttcctcctggttagatcctcaagctccttgcctcattgacaaatgtctcctagtcccctttttccctctgactctgaggaactaaatagcttgactatctctaaacagagactggccctgccactgaccctcctgtccctctcatagcataccctgacagatactcaatagaaaacacctgcagaccatgtgcacacttaactttcctgcccaacctgcctccccaacggcccatgctagaatagcttgtgcccagaaaacaaacagtgacacttcatctcttcagcgtcagaaaatgggcatagaatgtacccatgcaattgaatgtatctcattctccactggcatagtagatataaactattcctttgcctaccttttactgccttatcctggaaatattggggaaaataagccatatcagtgagatttacctaaaaacaaaggaaggaaagtcactatggaaaccaagtagatgctttttgtaagtttggtggagcataactggcccagaagtctgggtgcctgagttctagttcgtgctctgtcaactggtagatttgtaattctaggtcttggttttcttacctggtgaataagtcatgatctctaaaacccttcctgcccttaatattgtctgaatttcaaggggaaaaaaaaaatctggttcctttaattatttttttttaacacttaaattcctaactttattagacaagaagtatggcccacttaacagttaaggaacgtaaatttgttattggctcgaaataataatttgacacaatactagtcaaccatttagaggccttggaaaaagaagaggaacagcactgaaaattccaagtatgattggaaattatctgggagcggggaattaaatattcaatgcatgaaagcaattgtactggcttctgggaaaaaggaaacaagaacattgctatggaacttgttacccagagaaaggaagtgaaaagatttacaattataagcacgaaattcattggcagattacctgctttatctacagacagattgttttggggtttggttttgtctaggcagcctctggccaggctccttaattgcttgctctgctaatatttcagcttcctctcttgactccttgaggaaccaaccgctctttggaagacaaacacttagccacctctgtgctccagggtaaccctgagaagctctgctgtctggggcaagctttctttccaaagggaatgagaggaaggcaagcaggcagggtcctgcagcgtcaggccttctggggaaagtttcctcattttgtttgacagggtcctcagtacatcagacacccagatttgaatataagttcagagcctgatctcaagctaaatcagaatgctttggggactaaccatgatcgagaattggccaaatagtatggcatataaacagccatccagccagccgcaagtaaaggaacgtttgatccttggcaccttaaatgattgattgccttcaataggcaaactgctggtctggaaatctcgttgaaggctgaatacttcatgcggagtaggacaagccttagcccaccttcaggttgaaaggaaaggccataggactcaaaagataatgactctgaaactaaactccttccttctgaagctgacagaggtacttagtgcatctcaagactccatctcataaaactcatttgtgagggatttgctctagatttttctaaacattttttcatctattgtccagacttgcaaatccagtgtggacctgatggagatacccttcacacctgcgctcccaccccctcggcagggagacgtctcagtagaggagaacacacccattatgctgggatttgtatttataaatcacttcccttttagggatgagcggtgtggggcgtgtgtgcgtgtgagtgtatgcgcgtgcgtgtgtgaccctcaagtgtactttgctcaatttagacgtgcagtatttccagaaacaatgaaaaaagtaagatgttttcttctttatgattctgctcaaaacaccacgtgccgcctcagagctttttctagagcctcggtcctcaatgacgcgcttgacctgttgatgcctcagcccagcgaagcccctcacctgtgccccgggcgacagctcttcagtgtgcagtgcaggcctggggtggactgccaggccttcgctctgtgccagcaacgccgttcttgttgctcctccatgaacaggggtacaagccctggcccctcctcgacactaagccccccacagactcagcctccaaggaaccgctgagcacccttgaagcatgtcattgtcagtgatacctttttattctatggaactctaacctattcgtgtcatattgaccttttgctgcatgagtcataaattatgaaatcagtcttacagtttttgaaatgtagccagcatttgtaaggctaaacctttttcatgaactgaatttaagtgaataaccaagccacagttcctcctcaaatggagagtgatgatcgacatttgaatctctttgccctttccaacggctatggcatcaggttctaaaataagctcgtaatttttcctgttattttaataatatggaaatattagcatagtgtttcttttgatagtgatagactataatccatatttaaattttatagagaagaaattttattgtactgtgatgtagatatttattatccaggtaaggatttgcccggtgtgtattttttacaattgagacattttactttaatctttaaaaaaaatgcattaaaaacacactcaaaaaaaaaaaaaaaaaaaaaaaaaaaaaaccagactgggggaaaaaaggtttggccttatcacagaatttttactgtgctgtataaatgtttgcaaatgcgaaaagtgtgcatttatagtgtgtttccacattaattaatgccgccttcaagagcaatattgtgcaggtaaaacgctgtttgtggctttctgttgcacagttaaagctgacccaccctatgcacaagacaatcaaatataaatctgtcctcctcaggatgcagataatactcatgtaaattatggagcacaatgtaagacaaaaggagacactttacatatgtattgttgatacagaaattatcagggcatgaatgagctgatgtgacattatgccacttctttcttttggttctcccttattaacttggcatttttaatttgaccatagagccaaattagttctccatgctttcttcgtagaaaatccttttttttcccataatgttttcatgccctgagaatcagaaaaatactacagaatagaaaaagatttacagtcattggaagatttgtgttttgcaaacagtgttaagtgatattgctagatggtgatatttttttcagcctaaaactctgttgaaatctgtgatcaaaatgttttaaactatccaaaaaaaatttgtatatttgggaaaaatggatttttacatagcttttgtatgcagatataaaactgtaattatgaatatagtgggcgtagataaactcataagcttaaattctaaaaaagaaaaagcttataacagatatattttcctgtctctttctttaaatattattattttctacataggcaaagagttgcctgctcttctcacttcagctgctgccaaaagacggaaccacggatgtaaggacatttatttcataaataaacatctactagaataagcaaatttacttgagaagaaactatggagggagagaagaaactaagtaaaatgctgatggggggttacctctttggaaggggccacaaagatgaagggaggagagaggtgaagttttgcagctcaaggacaacattcatcttctcatctcaaattattcaggaatattactaatggaattatgttaacatcagctgccaacatatatctcaatctctgttgccctgaacacatgttaattgagattctttctatgacaagtaacaaaaagctaactcaaactggcttaagcagaaagctaattattgactttaatatctgggatctagggtattgcataccaaagcttcaggcatggctggatctgggtgcacttactcagtattctcaggaagctcctttttttgtcattcatgtagacttaacattcacatggcctttcaccttacggtggcctccaatagctccaggatgagctttacagctccaaatatagtgaaaggagaatttcttttctccaacaattctaatgaaaattctggcctaattctcactggcccaagttcagtcatgtgcccattcctgagccaatcactgtggtgaggaaaacagatgcataaccaaccttatcctcaggaatcctggaactgggtgaggggaaagagggacagtcagcttcatctaaactatggactgagagttgaggcaagatgattcctgaaagaaaattctaagtcttgctgctataagtggaagagaatggtgggcaagcaaaagcaaccagtgcccacaccaaaggtaaatctaaaacaacatcccatttcagtacagcaagcggttctccttcacacagaggaagctcatctccaagtttttatttggccaggacatgaaccaaataaacaccttccaaagaaaaaaaaaaaaaaaaa

SEQ ID NO: 88530 - DNA, 1386 bp, Artificial Sequence
  derived and/or modified sequence
atgacccccaacagcatgaccgagaacggcctgaccgcctgggacaagcccaagcactgccccgacagagagcacgactggaagctggtgggcatgagcgaggcctgcctgcacagaaagagccacagcgagagaagaagcaccctgaagaacgagcagagcagcccccacctgatccagaccacctggaccagcagcatcttccacctggaccacgacgacgtgaacgaccagagcgtgagcagcgcccagaccttccagaccgaggagaagaagtgcaagggctacatccccagctacctggacaaggacgagctgtgcgtggtgtgcggcgacaaggccaccggctaccactacagatgcatcacctgcgagggctgcaagggcttcttcagaagaaccatccagaagaacctgcaccccagctacagctgcaagtacgagggcaagtgcgtgatcgacaaggtgaccagaaaccagtgccaggagtgcagattcaagaagtgcatctacgtgggcatggccaccgacctggtgctggacgacagcaagagactggccaagagaaagctgatcgaggagaacagagagaagagaagaagagaggagctgcagaagagcatcggccacaagcccgagcccaccgacgaggagtgggagctgatcaagaccgtgaccgaggcccacgtggccaccaacgcccagggcagccactggaagcagaagagaaagttcctgcccgaggacatcggccaggcccccatcgtgaacgcccccgagggcggcaaggtggacctggaggccttcagccacttcaccaagatcatcacccccgccatcaccagagtggtggacttcgccaagaagctgcccatgttctgcgagctgccctgcgaggaccagatcatcctgctgaagggctgctgcatggagatcatgagcctgagagccgccgtgagatacgaccccgagagcgagaccctgaccctgaacggcgagatggccgtgaccagaggccagctgaagaacggcggcctgggcgtggtgagcgacgccatcttcgacctgggcatgagcctgagcagcttcaacctggacgacaccgaggtggccctgctgcaggccgtgctgctgatgagcagcgacagacccggcctggcctgcgtggagagaatcgagaagtaccaggacagcttcctgctggccttcgagcactacatcaactacagaaagcaccacgtgacccacttctggcccaagctgctgatgaaggtgaccgacctgagaatgatcggcgcctgccacgccagcagattcctgcacatgaaggtggagtgccccaccgagctgttcccccccctgttcctggaggtgttcgaggactag

SEQ ID NO: 88531 - DNA, 366 bp, Artificial Sequence
  derived and/or modified sequence
atgacccccaacagcatgaccgagaacggcctgaccgcctgggacaagcccaagcactgccccgacagagagcacgactggaagctggtgggcatgagcgaggcctgcctgcacagaaagagccacagcgagagaagaagcaccctgaagaacgagcagagcagcccccacctgatccagaccacctggaccagcagcatcttccacctggaccacgacgacgtgaacgaccagagcgtgagcagcgcccagaccttccagaccgaggagaagaagtgcaagggctacatccccagctacctggacaaggacgagctgtgcgtggtgtgcggcgacaaggccaccggctaccactacagatgctag

SEQ ID NO: 88532 - DNA, 1386 bp, Artificial Sequence
  derived and/or modified sequence
atgacgccgaactcaatgactgagaatgggttaaccgcctgggataagccgaaacattgtccggatcgagaacacgactggaagctggtgggcatgagtgaggcctgtctgcacagaaaatcgcatagcgaacgtaggtctacactgaaaaatgagcaatcctctcctcatctgattcagactacatggacctcctcaatctttcacttggatcacgatgacgttaatgatcaaagcgtcagtagcgcccagacttttcagaccgaggagaagaagtgcaaggggtacatcccttcatacctcgacaaggacgaactatgcgtggtgtgcggtgacaaagccacaggttatcactacaggtgcataacctgtgagggatgcaagggattcttccggcgaaccatccagaaaaatctgcatccctcatatagttgcaaatatgagggcaagtgtgtgatcgataaggtgactaggaaccaatgccaggagtgccggtttaagaaatgtatctacgtagggatggcaaccgatttggttttggatgactctaaacgattagctaagcgaaaattaattgaggagaatcgcgaaaagcgccggcgggaagagctgcaaaaatctatcgggcacaagccagagcccacagacgaagaatgggagttgattaagacagtcaccgaagcacacgtggccacaaacgcccagggatctcactggaagcaaaaaaggaagttcctgcccgaggatatagggcaggccccaattgtgaacgctcctgagggaggtaaggtcgacctcgaagccttctctcactttactaagatcattaccccagccatcacaagggtcgtcgattttgcaaaaaagctccccatgttttgcgaactgccatgcgaagaccagattatcttactgaagggatgctgtatggaaatcatgtcactgagagccgccgtgcgctacgaccctgagtccgagaccttaacgctaaatggagagatggctgtgacgagggggcaactgaaaaacggcggtctcggggtggtatccgatgccatctttgatcttgggatgagcctgtcatctttcaatttggatgatacggaagtcgcgttactccaagccgttctgcttatgagtagtgatagacccgggctcgcttgcgttgaacggattgagaagtatcaggattcattcctactggcctttgagcactatatcaactacagaaagcatcacgtgactcatttctggccgaagttgctgatgaaggttaccgacctccgcatgatcggagcttgccacgcgagcaggttcttgcacatgaaggtggagtgccctaccgaactgttcccacccttatttctcgaagtattcgaagattag

SEQ ID NO: 88533 - DNA, 1386 bp, Artificial Sequence
  derived and/or modified sequence
atgactccaaactctatgactgaaaatggcctgactgcctgggataaacctaagcattgccctgatcgggagcacgactggaagttggttggaatgtctgaagcttgcctacacaggaagagccacagtgaaaggcgcagtactctgaagaacgagcagagcagcccccacctcatccagactacttggaccagcagtatcttccacttggatcatgatgacgtgaatgaccagagtgtttccagcgcccagaccttccagacagaagagaagaaatgcaaaggctatattccgagctatctggataaagacgaactctgtgttgtgtgcggcgacaaagcaaccgggtaccattacaggtgtatcacatgtgagggctgcaagggcttttttcggcggacaatccaaaagaacctgcatccctcgtatagctgcaaatatgaaggaaagtgtgttattgataaggtgacccgtaaccaatgccaggaatgccgcttcaaaaaatgtatttatgttggaatggccacggacttagtgctggacgatagtaagcgtttagcaaaacggaaactcatcgaagaaaatagggagaagcgacgtagggaagaactgcaaaagtcgattggccataagcctgagccaacagatgaggagtgggagttaataaagacggttactgaggcccacgtcgccacgaacgcgcagggctcacactggaagcagaaaagaaagttcttaccagaggacatagggcaggcacctatagtgaatgctcccgagggtggaaaggtagatctcgaagcgttttcacattttacgaaaattatcactcccgctatcacgcgggtggtcgacttcgccaagaaacttcctatgttttgtgaactcccttgcgaggaccagatcatcctgctcaagggctgctgcatggaaataatgtcactgagggctgccgtgcgttacgacccggagtccgagacactgaccctcaacggagagatggcagtcacgagaggacagttgaaaaacggcggcctgggcgtagtttcagacgcaatctttgacttggggatgtccttgagctccttcaacctcgatgatactgaagtggccctccttcaggctgtcctcctgatgtctagcgacaggcccggacttgcttgcgtggaaaggatcgaaaagtaccaggacagctttttattagctttcgagcactacattaattatcgaaaacaccatgtcactcacttttggcccaagctgcttatgaaggtgactgacctcaggatgatcggggcctgtcacgccagccggttcctgcatatgaaggttgagtgccccaccgagttgtttcctccactgtttctggaagtcttcgaagactag

SEQ ID NO: 88534 - DNA, 1386 bp, Artificial Sequence
  derived and/or modified sequence
atgaccccaaacagtatgaccgaaaacggcctgacagcttgggacaagcccaaacactgccctgaccgggagcatgactggaaactggtaggaatgtccgaagcctgtcttcacaggaagtcacacagcgaaagacgtagtaccctgaaaaatgaacagtcatcaccacatctaatccagaccacatggacaagctctatattccatttggatcacgacgatgtgaacgaccagagtgttagctcagctcagacctttcagactgaagaaaaaaagtgcaaggggtacattccaagctatctggataaagatgagctgtgtgtggtgtgcggcgataaggctaccgggtatcattaccgttgcataacctgcgagggatgcaagggtttctttcggagaaccatccagaagaacctgcacccatcttatagctgtaaatacgaaggcaagtgcgtgatcgacaaggtgactaggaatcaatgccaggaatgtcgctttaagaaatgcatatacgtgggcatggccacggacctcgtgcttgacgacagcaagaggctcgccaaacggaagcttatcgaggagaaccgggaaaagcggcgacgcgaagagttacaaaagtccatcggtcataaaccagaacccactgatgaggagtgggagctgattaaaacagttacagaggcccacgtcgctacgaatgctcagggctcccattggaagcaaaagagaaagttcctccctgaagatatcggacaggctccaattgtcaacgcaccagagggtggcaaagtggatctggaggcattctcccacttcaccaagatcattactcctgcgataaccagggttgtggattttgctaagaagctgcctatgttctgtgagctcccatgtgaggaccaaataattctgctgaaggggtgttgcatggaaattatgtctctgagggctgccgtccgctatgaccccgagtcagaaacgttaacccttaatggcgaaatggccgtgacgaggggtcagttaaaaaatggaggcctgggcgtagtcagcgacgccatatttgatctgggtatgagcctgtcctcgttcaatctggacgacacagaggtggcactcctgcaggctgttttactaatgtcatctgacaggcccggacttgcatgcgtggagagaatcgaaaagtaccaagatagcttcctgctggcatttgagcactatatcaattatcgcaaacaccacgtaacacacttctggccaaaactgctgatgaaagtcaccgatttgaggatgatcggcgcttgtcatgcctccaggtttctccacatgaaggtggaatgtccaaccgagttgttcccgccactttttcttgaagttttcgaagattag

SEQ ID NO: 88535 - DNA, 366 bp, Artificial Sequence
  derived and/or modified sequence
atgacgcccaatagcatgactgaaaatggcttgacagcttgggacaagcccaagcattgtcctgacagggagcacgattggaagcttgtcggcatgagtgaggcttgcctgcacaggaaaagccacagtgagcgcaggtcaaccttgaagaatgagcagtcatcccctcacttgattcaaaccacctggaccagcagtatcttccacttggaccatgatgatgtcaatgatcagtcagtgagctcagcacagacattccaaaccgaggagaagaagtgcaaaggctatatcccctcctaccttgacaaagacgagctttgtgtggtgtgtggcgataaggccaccggataccattacaggtgttag

SEQ ID NO: 88536 - DNA, 1386 bp, Artificial Sequence
  derived and/or modified sequence
atgacccccaacagcatgacagaaaatggcctgacagcctgggacaagcccaagcactgcccagaccgggagcatgactggaagctggtgggcatgtctgaggcctgcctgcacaggaagagccacagcgagaggaggagcaccctgaagaatgagcagagcagcccccacctgatccagaccacctggaccagcagcatcttccacctggaccatgatgatgtgaatgaccagagcgtgagcagcgcccagaccttccagacagaggagaagaagtgcaagggctacatccccagctacctggacaaggatgagctgtgtgtggtgtgtggggacaaggccaccggctaccactaccgctgcatcacctgtgagggctgcaagggcttcttccggaggaccatccagaagaacctgcaccccagctacagctgcaagtatgagggcaaatgtgtgattgacaaggtgaccaggaaccagtgccaggagtgccgcttcaagaagtgcatctacgtgggcatggccacagacctggtgctggatgacagcaagaggctggccaagaggaagctgattgaggagaaccgggagaagagaagaagagaggagctgcagaagagcatcggccacaagccagagcccacagatgaggagtgggagctgatcaagacagtgacagaggcccacgtggccaccaatgcccagggcagccactggaagcagaagaggaagttcctgcctgaggacatcggccaggcccccatcgtgaatgcccctgagggcggcaaggtggacctggaggccttcagccacttcaccaagatcatcaccccagccatcaccagggtggtggactttgccaagaagctgcccatgttctgtgagctgccctgtgaggaccagatcatcctgctgaagggctgctgcatggagatcatgagcctgcgggctgctgtgcgctatgaccctgagagcgagaccctgaccctgaatggagagatggctgtgacccggggccagctgaagaatggaggcctgggcgtggtgtctgatgccatctttgacctgggcatgagcctgagcagcttcaacctggatgacacagaggtggccctgctgcaggccgtgctgctgatgagcagtgaccggcccggcctggcctgtgtggagcgcatcgagaagtaccaggacagcttcctgctggcctttgagcactacatcaactacaggaagcaccacgtgacccacttctggcccaagctgctgatgaaggtgacagacctgaggatgattggagcctgccacgccagccgcttcctgcacatgaaggtggagtgccccacagagctgttccccccactcttcctggaggtgtttgaggactag

SEQ ID NO: 88537 - DNA, 366 bp, Artificial Sequence
  derived and/or modified sequence
atgacccccaacagcatgacagaaaatggcctgacagcctgggacaagcccaagcactgcccagaccgggagcatgactggaagctggtgggcatgtctgaggcctgcctgcacaggaagagccacagcgagaggaggagcaccctgaagaatgagcagagcagcccccacctgatccagaccacctggaccagcagcatcttccacctggaccatgatgatgtgaatgaccagagcgtgagcagcgcccagaccttccagacagaggagaagaagtgcaagggctacatccccagctacctggacaaggatgagctgtgtgtggtgtgtggggacaaggccaccggctaccactaccgctgctag

SEQ ID NO: 88538 - DNA, 1386 bp, Artificial Sequence
  derived and/or modified sequence
atgacccccaacagcatgaccgagaacggcctgaccgcctgggacaagcctaagcactgcccagacagggagcatgactggaaactcgtcgggatgtccgaagcatgtctacaccggaaaagccactccgagcgtcgaagtaccttgaaaaacgagcaatcctcacctcatctcattcagactacgtggacttcatccatttttcacttggaccacgacgacgtgaacgaccagtccgtcagttctgcgcagacatttcaaacagaggagaaaaagtgtaagggctatattcctagctacctggataaagacgagctctgtgtggtatgcggtgacaaggccaccgggtatcattaccggtgcattacctgcgagggatgcaaagggttttttcgccgcaccatacagaagaaccttcacccctcttactcctgtaagtacgaggggaagtgcgttatagataaggtcactaggaaccagtgtcaagagtgccggttcaagaaatgcatttacgtcggcatggctacagacttagtcctggacgattcgaaaaggctggccaagaggaagcttatcgaagaaaatcgcgaaaagcgccgccgggaagaactgcagaagtctattgggcacaagcccgagcccaccgatgaggagtgggaattaattaaaacagttactgaggcccacgtcgcgaccaacgcgcagggctcccattggaaacagaagcgcaagttcctcccggaggacatcggacaagcgccaatcgtgaacgcgccagaaggtggtaaagtggatttagaggcattttctcacttcacaaagataatcacccctgccatcacaagggtggtcgactttgcaaagaagcttccaatgttctgcgaactgccctgcgaagatcaaatcatccttttaaagggctgttgtatggaaattatgtcattgagggctgccgttcggtatgacccagaaagtgagacgctgaccctaaacggagagatggcagtgaccaggggccagctgaaaaacgggggccttggggtggtgagtgacgcaatctttgatcttggtatgtccttgagctcattcaacctggatgacacagaggttgcactactgcaggccgtcctgctcatgtcgtctgaccggcctgggctggcttgtgtagaacggattgagaagtatcaggactccttcctcttggcatttgagcattacattaattatcgtaagcatcacgtgacccatttttggcctaagttgctcatgaaagtgaccgacctgcggatgataggtgcgtgccacgcatcccgatttctgcatatgaaggtggaatgccccacagagctgtttcctccactatttttggaggtgtttgaggattag

SEQ ID NO: 88539 - DNA, 1386 bp, Artificial Sequence
  derived and/or modified sequence
atgacccccaacagcatgaccgagaacggcctgaccgcctgggacaagcccaagcactgtcccgaccgcgagcacgattggaaacttgtgggcatgagtgaggcttgtctgcacagaaagagccacagtgaaagacggagcaccctgaagaatgaacagtcgtccccccacctgatacagaccacctggaccagctctattttccacctggatcacgacgatgtgaatgaccagtccgtgtcaagtgcacagacgttccaaactgaggaaaaaaagtgtaaaggctacataccttcttatctcgacaaagatgagttgtgcgtggtgtgcggtgataaggccacagggtatcactatcgctgcatcacttgcgaaggctgcaagggtttttttcgtagaacaatacagaaaaacctgcatccttcttatagctgcaaatacgaggggaagtgtgtgatcgataaagtcactagaaaccagtgccaggaatgccggttcaagaagtgcatttacgtgggcatggctacagatctggtgctggacgattctaagcgactagccaaaagaaaattgattgaggaaaaccgcgaaaagcgaaggcgcgaggaactgcagaagagcatagggcataaaccggaaccgactgatgaagagtgggaacttataaagacagtgacagaagctcacgtagccaccaacgcacagggcagccattggaaacagaaaaggaaattcttgccagaagacattggacaggcacccattgtcaatgcccctgagggcgggaaagtcgacctggaggctttcagtcacttcaccaagattattactcctgcaatcacgcgcgtggttgatttcgcaaaaaaactcccaatgttctgtgaactgccctgcgaggaccagatcattctgctcaaggggtgttgtatggagatcatgagtctgcgtgcagccgtgcggtacgacccagaaagcgaaaccctcaccttgaatggcgagatggcggtgactcgaggccagcttaaaaacggagggctgggtgtggtctctgacgcgatatttgatctggggatgtcactatcttccttcaacctggacgatactgaggtggccctacttcaggcagtcctcctcatgtcttccgatcggccagggttggcctgtgtcgaacgcatcgagaagtaccaggacagcttccttctcgcctttgagcattatattaattatcgcaagcatcacgttactcatttctggcctaagctgcttatgaaagttactgatctccgcatgataggcgcatgtcacgcctcgcgctttcttcacatgaaagtggagtgcccaaccgaactctttccccctctgttcctggaagtcttcgaggattag

SEQ ID NO: 88540 - DNA, 1386 bp, Artificial Sequence
  derived and/or modified sequence
atgacccccaacagcatgaccgagaacggcctgaccgcctgggacaagccaaagcactgtcctgatcgagaacacgattggaaattggtgggcatgtcggaagcatgtttgcatcgtaaaagccactctgagcggcggagtacactcaagaacgaacagtccagcccacacctgattcagacaacctggacctcttctatttttcatctggaccacgacgacgtgaacgatcaatccgtgtctagcgcacagaccttccagaccgaagaaaaaaagtgtaagggctatatcccttcctaccttgacaaagatgaattgtgtgtggtctgtggagataaggccactggataccattatagatgtatcacttgcgaaggctgtaaaggcttcttccgacgtacgattcagaaaaatcttcacccctcttactcttgtaagtatgagggaaagtgcgtaatagacaaagtcacgcgtaatcagtgtcaggagtgtcgcttcaaaaagtgtatctacgtgggcatggcgaccgacctggttctagatgattctaaaagattggctaagcggaagctgatcgaggagaaccgggagaaacggcggcgggaagagctccagaagtctatcggacacaagcccgaacccactgatgaagagtgggaacttattaagacggtcacagaagctcacgttgctacaaacgcccagggttctcattggaaacagaaacgaaagttcctgccagaagacattggccaggccccaattgtgaatgcccccgagggaggcaaagtcgacctcgaagcttttagccatttcaccaaaataatcacccccgccatcactagggtagtggactttgcgaaaaagctccccatgttctgcgagttgccctgcgaggatcagatcattctgctcaaggggtgctgcatggaaatcatgtccctcagggcagccgtcaggtacgaccccgagtcggagaccttaacgttaaatggcgagatggcagtgacccgcggccagctaaagaatggagggcttggagtggtgtccgacgccattttcgacttgggaatgtcactcagcagtttcaacctcgacgatactgaggttgcccttctgcaggcagtgctcctaatgtcctcggaccggcccggcctggcctgtgtggagcgcatcgaaaagtaccaagactcttttttattagccttcgaacattatatcaactacagaaagcaccatgtgacccatttctggccaaagctcctgatgaaagtgaccgatctgcgaatgatcggagcctgccatgcctcccgcttcctacacatgaaagttgagtgccccactgagctctttccccctctctttctggaagtattcgaagattag

SEQ ID NO: 88541 - DNA, 87 bp, Artificial Sequence
  derived and/or modified sequence
atgacccccaacagcatgaccgagatggccctgcagcccggcaccaaccgcagcacagtgcagactgagaacacgactggaagctag

SEQ ID NO: 88542 - DNA, 366 bp, Artificial Sequence
  derived and/or modified sequence
atgacccccaacagcatgaccgagaacggcctgaccgcctgggacaaaccaaaacactgtcccgatcgtgagcatgattggaagctggtcggaatgagcgaggcctgtctgcaccgaaagtcccactcagagcgacgcagtacactgaaaaacgagcagagtagcccacatctgatccagaccacctggacctccagtatattccacctcgaccacgatgacgtgaatgaccagagcgtgagcagcgcccagaccttccagaccgaagagaaaaaatgtaaagggtatattccgtcttacctcgacaaagacgaactttgcgtcgtgtgtggcgacaaggccaccggctaccactatagatgctag

SEQ ID NO: 88543 - DNA, 1386 bp, Artificial Sequence
  derived and/or modified sequence
atgactcctaattccatgacagaaaatggactcaccgcatgggacaaaccaaaacattgcccagaccgggagcacgactggaaactggtcggcatgtccgaagcgtgtctgcatcgcaagagtcacagcgaaaggcggtctaccctgaaaaacgagcagtcctctccgcatctgatccaaacaacctggacgagctccatttttcacctggatcacgatgacgtcaacgaccaaagtgttagcagcgcgcagaccttccagacagaggagaaaaagtgcaaagggtatataccatcctacctggataaggatgagctgtgcgtggtgtgtggcgataaagccacaggttaccattacagatgtatcacctgtgagggatgtaagggcttctttcgcaggacaatacagaagaatctgcacccttcatattcatgtaaatacgaagggaaatgtgtaattgataaagtgacccggaaccaatgccaggagtgtaggtttaaaaagtgcatctacgtaggcatggctacggatctagtgctggacgattctaaaaggttggcaaagcgcaaattgatcgaggaaaatcgggagaaaaggaggcgcgaggagctgcaaaagtctatcggccacaagcccgagcccaccgatgaagaatgggagctgataaagaccgtaaccgaggcccacgtggcaactaacgctcagggttcacattggaagcagaagaggaaattcctgccggaagacattgggcaggcacccattgtgaacgccccagagggcggaaaagtcgatctagaggcatttagccactttaccaaaataattactcccgcaattacaagagttgtggacttcgctaagaagttacctatgttttgcgaattgccttgtgaggatcagatcattctcttaaaaggatgctgtatggaaattatgagccttagggccgctgtgcgatacgatcctgagagcgagacccttacactgaacggcgagatggccgtaacaagaggccagctcaagaatggagggctcggcgtagtctcagatgccatcttcgatctgggtatgtcactgagttcttttaacctggatgacactgaagtcgccttgctgcaggctgtacttctaatgtcctcagacagacctggactggcgtgcgttgaaaggatcgagaagtaccaggattctttcctcctggccttcgagcactatattaactataggaaacaccacgtgacacacttctggcccaaactgctcatgaaagtcaccgacctccggatgataggggcttgccatgcatcccgcttcctgcacatgaaagttgaatgcccgacagaacttttccctcctctcttcctcgaggtcttcgaggattag

SEQ ID NO: 88544 - DNA, 1386 bp, Artificial Sequence
  derived and/or modified sequence
atgactcccaacagcatgaccgaaaacggtctcacggcgtgggataagccgaagcattgcccagatcgggaacatgactggaaacttgtagggatgtccgaagcctgtctccacaggaaatcccattccgagagacggtccactctgaagaatgaacagagcagtccacacttgatccaaactacttggacatcctcaatcttccatcttgaccacgatgacgtcaacgatcagtccgtaagcagcgctcagacgttccaaaccgaggagaagaagtgcaagggctacatcccttcttacctggacaaagacgaactgtgtgtcgtctgcggggacaaagccacaggctatcactataggtgcatcacctgcgagggctgcaagggttttttcagaagaacgatacagaagaaccttcacccttcgtactcgtgcaagtatgagggcaaatgcgtgattgacaaagtcactcgtaatcagtgccaggagtgccgcttcaagaagtgtatttatgttggcatggctactgacctggtgctcgacgactcaaaacggttggcaaagcgcaaactgatagaggaaaaccgagaaaagcggagaagagaggagttacagaagtccattggccataaaccagaacctacggatgaggagtgggagctcatcaaaaccgttacggaagctcacgtggcaaccaacgctcaaggatctcattggaagcagaagagaaaatttctgccagaagacataggacaggctccaattgttaacgcgccagagggaggtaaggtagatctggaggccttctctcatttcaccaaaatcataactcctgcgattacacgggtagtcgatttcgctaagaagctgcccatgttctgtgaacttccctgtgaagaccagatcatactgttaaaaggatgttgcatggagataatgtctctgcgggctgccgtcagatatgaccctgagtccgagaccctcacacttaacggagaaatggccgttacacggggacagctgaaaaatggcggtttaggtgtggtgtctgacgccatcttcgacctggggatgtccttgtctagcttcaaccttgatgatactgaggtcgccctgctgcaggcagtgctgctgatgtcttcagatcgaccgggactggcttgcgtggagcgaatcgaaaagtaccaggattcgtttctgctggcgttcgagcattatattaattaccgaaagcaccacgtgacacacttctggccaaaactgctcatgaaagttacagatctgcgaatgatcggcgcttgtcatgcgagcaggttcctgcacatgaaggtcgagtgtcctacggaactgttcccgccactctttttagaagtgttcgaagactag

SEQ ID NO: 88545 - DNA, 1386 bp, Artificial Sequence
  derived and/or modified sequence
atgacaccgaactctatgactgagaatggactaactgcctgggataaaccgaagcactgtcctgaccgagaacacgattggaagcttgtggggatgtcagaagcatgcttgcaccgcaagtcacactccgaaagacggtctactctgaaaaatgagcaaagtagcccgcacttgattcagacgacctggacctcatctattttccacctggaccatgatgatgtcaatgatcagtctgtatcatcagcccaaacttttcagactgaggagaagaagtgcaagggttacattccttcctatcttgacaaagatgagttgtgtgttgtgtgtggggataaagctaccggataccactatcgctgtattacgtgtgaagggtgcaagggattcttccggaggacaattcagaaaaatttacacccatcatattcatgcaaatacgaggggaagtgcgtcatcgataaggtgacacgcaaccagtgccaggagtgccgatttaagaaatgtatctatgttggcatggccacagatctggttctggacgatagcaagcggctcgccaagaggaaactcatcgaagagaatcgggaaaagcgacggagagaggaacttcagaaaagcatcgggcacaaacccgagcccaccgatgaggagtgggaactgatcaagacagtgaccgaagctcacgtggcgaccaatgctcaggggtcccattggaagcagaagaggaaatttctgccagaagatattggtcaggccccaatcgtgaatgctcccgagggtgggaaggtcgacttggaagctttctcccactttactaaaattattacccccgcaataactcgcgtagtcgactttgcgaagaaacttcctatgttttgcgaactcccatgtgaagaccagatcatcctccttaagggatgttgtatggagatcatgtccctccgagcggctgtgaggtacgatcccgaaagcgaaacactgaccctgaatggggagatggctgtcacacgaggacagttgaagaacggcggtctaggagtggtctccgacgcgatttttgacctgggcatgagcttgagctcattcaatttggatgacactgaggtcgctctgctgcaggccgtgctgctcatgtctagcgaccgccctgggctggcatgtgtggaacgaattgaaaagtaccaagactcctttcttttggcattcgaacattatattaactaccgaaaacaccacgtaacacacttctggcccaaacttctaatgaaggttactgatttaagaatgatcggagcttgccatgcctctcgctttctgcatatgaaagtggaatgccctacagagctgtttccacctctgttcttggaggtcttcgaagactag

SEQ ID NO: 88546 - DNA, 366 bp, Artificial Sequence
  derived and/or modified sequence
atgaccccaaattctatgactgagaacggactaacagcctgggacaaacccaagcactgtcccgatcgggaacatgactggaagctggtcggtatgtccgaagcttgcctgcacagaaaatcgcactctgaacgaagatctaccctgaagaacgagcagagctctcctcacctgattcagaccacatggacttcctccatatttcacctggatcatgatgatgtgaatgaccagtccgtgtcctctgcacagacatttcagactgaggagaagaaatgcaaaggctatataccatcgtacctggataaggacgaactctgcgtcgtttgcggagacaaagcgacaggctaccactacaggtgctag

SEQ ID NO: 88547 - DNA, 6341 bp, Artificial Sequence
  derived and/or modified sequence
cggcggggattaactttgcatgaataatgtgagtgcgcttggaaaagagacctcctgctccgcgggctcggggcaagagcccgcaggctaccttccccgggcaggggcgctcaacccaaccggctccagggcactggtaatttggctagaggaccgcgcggaggcagcgggatctgcgatttccttctggttggctgtcctgcgtgggtgccaagttccacacatgatttaatgaataagaaggagatgtcagtgaaaaaagggatccagaatgattactaacctatgactcccaacagtatgacagaaaatggccttacagcctgggacaaaccgaagcactgtccagaccgagaacacgactggaagctagtaggaatgtctgaagcctgcctacataggaagagccattcagagaggcgcagcacgttgaaaaatgaacagtcgtcgccacatctcatccagaccacttggactagctcaatattccatctggaccatgatgatgtgaacgaccagagtgtctcaagtgcccagaccttccaaacggaggagaagaaatgtaaagggtacatccccagttacttagacaaggacgagctctgtgtagtgtgtggtgacaaagccaccgggtatcactaccgctgtatcacgtgtgaaggctgcaagggtttctttagaagaaccattcagaaaaatctccatccatcctattcctgtaaatatgaaggaaaatgtgtcatagacaaagtcacgcgaaatcagtgccaggaatgtcgctttaagaaatgcatctatgttggcatggcaacagatttggtgctggatgacagcaagaggctggccaagaggaagctgatagaggagaaccgggagaaaagacggcgggaagagctgcagaagtccatcgggcacaagccagagcccacagacgaggaatgggagctcatcaaaactgtcaccgaagcccatgtggcgaccaacgcccaaggcagccactggaagcaaaaacggaaattcctgccagaagacattggacaagcaccaatagtcaatgccccagaaggtggaaaggttgacttggaagccttcagccattttacaaaaatcatcacaccagcaattaccagagtggtggattttgccaaaaagttgcctatgttttgtgagctgccatgtgaagaccagatcatcctcctcaaaggctgctgcatggagatcatgtcccttcgcgctgctgtgcgctatgacccagaaagtgagactttaaccttgaatggggaaatggcagtgacacggggccagctgaaaaatgggggtcttggggtggtgtcagacgccatctttgacctgggcatgtctctgtcttctttcaacctggatgacactgaagtagccctccttcaggccgtcctgctgatgtcttcagatcgcccggggcttgcctgtgttgagagaatagaaaagtaccaagatagtttcctgctggcctttgaacactatatcaattaccgaaaacaccacgtgacacacttttggccaaaactcctgatgaaggtgacagatctgcggatgataggagcctgccatgccagccgcttcctgcacatgaaggtggaatgccccacagaactcttcccccctttgttcttggaagtgttcgaggattagactgactggattcattctcataattcctacagcactactgggtgtcatttcattccattgcctagctcttttttgtttgtttctttgtgttgggagggattatttgggagggaaaagggaagtagtccttggcatagacatggatgaaattgccccttgaatgcgggtacttgaaactattgcatttcgttctccggtcctgtgatgtgaatgctctgaaggttttatggttgtggaggtggggtgggggacaatcattaactcaccagcaccaagcatcaccagctcccacccgtccctggtccaagacttgagtcagcaaaatggcgccacaggacactaaagaagccttaaaaccaagataatacgaccacctccacccaatcctgatgttcgcagggctgaagttaacagagcacagaccacctttagttagatgtggctttcagccttttagggaaagactcgaacaaattttcatctattcaagagcatgctgtttgcagcactctttatggtctcctaggagcataacttggaatgtacaggaatatttgtgtcctaaaaaaatcagctgcccttccaatatcatttttataacgttatggtttaattcaagttatacaaaggtgtgactcaaggatgtgcaggtattgactgatggaggccaacaaggaaaatattttttttcagtgagcccagagaaattagaaatcttcaccaatgtcagtgactgcatggtttccaaaaattcacatagtattacctcacagtaggaaggcttctttcccatttaggctcagagaacacttttacagaaatcaaacctatttacagggtggcaccccttttctgtggcatctgatctgtcatctcccaagctcctgaagttctttatccaggttgtatctttgctgagctgacaacagatttctctatggatcaaatattctaatcaaggaaagatacggtgaaacttcagtcttcttctggagaaatgctgaggcgagattagtgcagctacattctgagttgaaggaaatgcagtgttctgagggcccctttgtgtcctgatggctggaggacgcttcctcctggttagatcctcaagctccttgcctcattgacaaatgtctcctagtcccctttttccctctgactctgaggaactaaatagcttgactatctctaaacagagactggccctgccactgaccctcctgtccctctcatagcataccctgacagatactcaatagaaaacacctgcagaccatgtgcacacttaactttcctgcccaacctgcctccccaacggcccatgctagaatagcttgtgcccagaaaacaaacagtgacacttcatctcttcagcgtcagaaaatgggcatagaatgtacccatgcaattgaatgtatctcattctccactggcatagtagatataaactattcctttgcctaccttttactgccttatcctggaaatattggggaaaataagccatatcagtgagatttacctaaaaacaaaggaaggaaagtcactatggaaaccaagtagatgctttttgtaagtttggtggagcataactggcccagaagtctgggtgcctgagttctagttcgtgctctgtcaactggtagatttgtaattctaggtcttggttttcttacctggtgaataagtcatgatctctaaaacccttcctgcccttaatattgtctgaatttcaaggggaaaaaaaaaatctggttcctttaattatttttttttaacacttaaattcctaactttattagacaagaagtatggcccacttaacagttaaggaacgtaaatttgttattggctcgaaataataatttgacacaatactagtcaaccatttagaggccttggaaaaagaagaggaacagcactgaaaattccaagtatgattggaaattatctgggagcggggaattaaatattcaatgcatgaaagcaattgtactggcttctgggaaaaaggaaacaagaacattgctatggaacttgttacccagagaaaggaagtgaaaagatttacaattataagcacgaaattcattggcagattacctgctttatctacagacagattgttttggggtttggttttgtctaggcagcctctggccaggctccttaattgcttgctctgctaatatttcagcttcctctcttgactccttgaggaaccaaccgctctttggaagacaaacacttagccacctctgtgctccagggtaaccctgagaagctctgctgtctggggcaagctttctttccaaagggaatgagaggaaggcaagcaggcagggtcctgcagcgtcaggccttctggggaaagtttcctcattttgtttgacagggtcctcagtacatcagacacccagatttgaatataagttcagagcctgatctcaagctaaatcagaatgctttggggactaaccatgatcgagaattggccaaatagtatggcatataaacagccatccagccagccgcaagtaaaggaacgtttgatccttggcaccttaaatgattgattgccttcaataggcaaactgctggtctggaaatctcgttgaaggctgaatacttcatgcggagtaggacaagccttagcccaccttcaggttgaaaggaaaggccataggactcaaaagataatgactctgaaactaaactccttccttctgaagctgacagaggtacttagtgcatctcaagactccatctcataaaactcatttgtgagggatttgctctagatttttctaaacattttttcatctattgtccagacttgcaaatccagtgtggacctgatggagatacccttcacacctgcgctcccaccccctcggcagggagacgtctcagtagaggagaacacacccattatgctgggatttgtatttataaatcacttcccttttagggatgagcggtgtggggcgtgtgtgcgtgtgagtgtatgcgcgtgcgtgtgtgaccctcaagtgtactttgctcaatttagacgtgcagtatttccagaaacaatgaaaaaagtaagatgttttcttctttatgattctgctcaaaacaccacgtgccgcctcagagctttttctagagcctcggtcctcaatgacgcgcttgacctgttgatgcctcagcccagcgaagcccctcacctgtgccccgggcgacagctcttcagtgtgcagtgcaggcctggggtggactgccaggccttcgctctgtgccagcaacgccgttcttgttgctcctccatgaacaggggtacaagccctggcccctcctcgacactaagccccccacagactcagcctccaaggaaccgctgagcacccttgaagcatgtcattgtcagtgatacctttttattctatggaactctaacctattcgtgtcatattgaccttttgctgcatgagtcataaattatgaaatcagtcttacagtttttgaaatgtagccagcatttgtaaggctaaacctttttcatgaactgaatttaagtgaataaccaagccacagttcctcctcaaatggagagtgatgatcgacatttgaatctctttgccctttccaacggctatggcatcaggttctaaaataagctcgtaatttttcctgttattttaataatatggaaatattagcatagtgtttcttttgatagtgatagactataatccatatttaaattttatagagaagaaattttattgtactgtgatgtagatatttattatccaggtaaggatttgcccggtgtgtattttttacaattgagacattttactttaatctttaaaaaaaatgcattaaaaacacactcaaaaaaaaaaaaaaaaaaaaaaaaaaaaaaccagactgggggaaaaaaggtttggccttatcacagaatttttactgtgctgtataaatgtttgcaaatgcgaaaagtgtgcatttatagtgtgtttccacattaattaatgccgccttcaagagcaatattgtgcaggtaaaacgctgtttgtggctttctgttgcacagttaaagctgacccaccctatgcacaagacaatcaaatataaatctgtcctcctcaggatgcagataatactcatgtaaattatggagcacaatgtaagacaaaaggagacactttacatatgtattgttgatacagaaattatcagggcatgaatgagctgatgtgacattatgccacttctttcttttggttctcccttattaacttggcatttttaatttgaccatagagccaaattagttctccatgctttcttcgtagaaaatccttttttttcccataatgttttcatgccctgagaatcagaaaaatactacagaatagaaaaagatttacagtcattggaagatttgtgttttgcaaacagtgttaagtgatattgctagatggtgatatttttttcagcctaaaactctgttgaaatctgtgatcaaaatgttttaaactatccaaaaaaaatttgtatatttgggaaaaatggatttttacatagcttttgtatgcagatataaaactgtaattatgaatatagtgggcgtagataaactcataagcttaaattctaaaaaagaaaaagcttataacaga

SEQ ID NO: 88548 - DNA, 7459 bp, Artificial Sequence
  derived and/or modified sequence
agacctcctgctccgcgggctcggggcaagagcccgcaggctaccttccccgggcaggggcgctcaacccaaccggctccagggcactgatctgcgatttccttctggttggctgtcctgcgtgggtgccaagttccacacatgatttaatgaataagaagctcgccagagaggcaaactccagcattttatatttcatctgcccccagtgacttcactgtaggaagaggaaatgcagaaaaacaaacgtcttgaagactgaaagcctgttattcaaagaggttagcagtagactgttggaagtaaggagatgtcagtgaaaaaagggatccagaatgattactaacctatgactcccaacagtatgacagaaaatggccttacagcctgggacaaaccgaagcactgtccagaccgagaacacgactggaagctagtaggaatgtctgaagcctgcctacataggaagagccattcagagaggcgcagcacgttgaaaaatgaacagtcgtcgccacatctcatccagaccacttggactagctcaatattccatctggaccatgatgatgtgaacgaccagagtgtctcaagtgcccagaccttccaaacggaggagaagaaatgtaaagggtacatccccagttacttagacaaggacgagctctgtgtagtgtgtggtgacaaagccaccgggtatcactaccgctgtatcacgtgtgaaggctgcaagggtttctttagaagaaccattcagaaaaatctccatccatcctattcctgtaaatatgaaggaaaatgtgtcatagacaaagtcacgcgaaatcagtgccaggaatgtcgctttaagaaatgcatctatgttggcatggcaacagatttggtgctggatgacagcaagaggctggccaagaggaagctgatagaggagaaccgggagaaaagacggcgggaagagctgcagaagtccatcgggcacaagccagagcccacagacgaggaatgggagctcatcaaaactgtcaccgaagcccatgtggcgaccaacgcccaaggcagccactggaagcaaaaacggaaattcctgccagaagacattggacaagcaccaatagtcaatgccccagaaggtggaaaggttgacttggaagccttcagccattttacaaaaatcatcacaccagcaattaccagagtggtggattttgccaaaaagttgcctatgttttgtgagctgccatgtgaagaccagatcatcctcctcaaaggctgctgcatggagatcatgtcccttcgcgctgctgtgcgctatgacccagaaagtgagactttaaccttgaatggggaaatggcagtgacacggggccagctgaaaaatgggggtcttggggtggtgtcagacgccatctttgacctgggcatgtctctgtcttctttcaacctggatgacactgaagtagccctccttcaggccgtcctgctgatgtcttcagatcgcccggggcttgcctgtgttgagagaatagaaaagtaccaagatagtttcctgctggcctttgaacactatatcaattaccgaaaacaccacgtgacacacttttggccaaaactcctgatgaaggtgacagatctgcggatgataggagcctgccatgccagccgcttcctgcacatgaaggtggaatgccccacagaactcttcccccctttgttcttggaagtgttcgaggattagactgactggattcattctcataattcctacagcactactgggtgtcatttcattccattgcctagctcttttttgtttgtttctttgtgttgggagggattatttgggagggaaaagggaagtagtccttggcatagacatggatgaaattgccccttgaatgcgggtacttgaaactattgcatttcgttctccggtcctgtgatgtgaatgctctgaaggttttatggttgtggaggtggggtgggggacaatcattaactcaccagcaccaagcatcaccagctcccacccgtccctggtccaagacttgagtcagcaaaatggcgccacaggacactaaagaagccttaaaaccaagataatacgaccacctccacccaatcctgatgttcgcagggctgaagttaacagagcacagaccacctttagttagatgtggctttcagccttttagggaaagactcgaacaaattttcatctattcaagagcatgctgtttgcagcactctttatggtctcctaggagcataacttggaatgtacaggaatatttgtgtcctaaaaaaatcagctgcccttccaatatcatttttataacgttatggtttaattcaagttatacaaaggtgtgactcaaggatgtgcaggtattgactgatggaggccaacaaggaaaatattttttttcagtgagcccagagaaattagaaatcttcaccaatgtcagtgactgcatggtttccaaaaattcacatagtattacctcacagtaggaaggcttctttcccatttaggctcagagaacacttttacagaaatcaaacctatttacagggtggcaccccttttctgtggcatctgatctgtcatctcccaagctcctgaagttctttatccaggttgtatctttgctgagctgacaacagatttctctatggatcaaatattctaatcaaggaaagatacggtgaaacttcagtcttcttctggagaaatgctgaggcgagattagtgcagctacattctgagttgaaggaaatgcagtgttctgagggcccctttgtgtcctgatggctggaggacgcttcctcctggttagatcctcaagctccttgcctcattgacaaatgtctcctagtcccctttttccctctgactctgaggaactaaatagcttgactatctctaaacagagactggccctgccactgaccctcctgtccctctcatagcataccctgacagatactcaatagaaaacacctgcagaccatgtgcacacttaactttcctgcccaacctgcctccccaacggcccatgctagaatagcttgtgcccagaaaacaaacagtgacacttcatctcttcagcgtcagaaaatgggcatagaatgtacccatgcaattgaatgtatctcattctccactggcatagtagatataaactattcctttgcctaccttttactgccttatcctggaaatattggggaaaataagccatatcagtgagatttacctaaaaacaaaggaaggaaagtcactatggaaaccaagtagatgctttttgtaagtttggtggagcataactggcccagaagtctgggtgcctgagttctagttcgtgctctgtcaactggtagatttgtaattctaggtcttggttttcttacctggtgaataagtcatgatctctaaaacccttcctgcccttaatattgtctgaatttcaaggggaaaaaaaaaatctggttcctttaattatttttttttaacacttaaattcctaactttattagacaagaagtatggcccacttaacagttaaggaacgtaaatttgttattggctcgaaataataatttgacacaatactagtcaaccatttagaggccttggaaaaagaagaggaacagcactgaaaattccaagtatgattggaaattatctgggagcggggaattaaatattcaatgcatgaaagcaattgtactggcttctgggaaaaaggaaacaagaacattgctatggaacttgttacccagagaaaggaagtgaaaagatttacaattataagcacgaaattcattggcagattacctgctttatctacagacagattgttttggggtttggttttgtctaggcagcctctggccaggctccttaattgcttgctctgctaatatttcagcttcctctcttgactccttgaggaaccaaccgctctttggaagacaaacacttagccacctctgtgctccagggtaaccctgagaagctctgctgtctggggcaagctttctttccaaagggaatgagaggaaggcaagcaggcagggtcctgcagcgtcaggccttctggggaaagtttcctcattttgtttgacagggtcctcagtacatcagacacccagatttgaatataagttcagagcctgatctcaagctaaatcagaatgctttggggactaaccatgatcgagaattggccaaatagtatggcatataaacagccatccagccagccgcaagtaaaggaacgtttgatccttggcaccttaaatgattgattgccttcaataggcaaactgctggtctggaaatctcgttgaaggctgaatacttcatgcggagtaggacaagccttagcccaccttcaggttgaaaggaaaggccataggactcaaaagataatgactctgaaactaaactccttccttctgaagctgacagaggtacttagtgcatctcaagactccatctcataaaactcatttgtgagggatttgctctagatttttctaaacattttttcatctattgtccagacttgcaaatccagtgtggacctgatggagatacccttcacacctgcgctcccaccccctcggcagggagacgtctcagtagaggagaacacacccattatgctgggatttgtatttataaatcacttcccttttagggatgagcggtgtggggcgtgtgtgcgtgtgagtgtatgcgcgtgcgtgtgtgaccctcaagtgtactttgctcaatttagacgtgcagtatttccagaaacaatgaaaaaagtaagatgttttcttctttatgattctgctcaaaacaccacgtgccgcctcagagctttttctagagcctcggtcctcaatgacgcgcttgacctgttgatgcctcagcccagcgaagcccctcacctgtgccccgggcgacagctcttcagtgtgcagtgcaggcctggggtggactgccaggccttcgctctgtgccagcaacgccgttcttgttgctcctccatgaacaggggtacaagccctggcccctcctcgacactaagccccccacagactcagcctccaaggaaccgctgagcacccttgaagcatgtcattgtcagtgatacctttttattctatggaactctaacctattcgtgtcatattgaccttttgctgcatgagtcataaattatgaaatcagtcttacagtttttgaaatgtagccagcatttgtaaggctaaacctttttcatgaactgaatttaagtgaataaccaagccacagttcctcctcaaatggagagtgatgatcgacatttgaatctctttgccctttccaacggctatggcatcaggttctaaaataagctcgtaatttttcctgttattttaataatatggaaatattagcatagtgtttcttttgatagtgatagactataatccatatttaaattttatagagaagaaattttattgtactgtgatgtagatatttattatccaggtaaggatttgcccggtgtgtattttttacaattgagacattttactttaatctttaaaaaaaatgcattaaaaacacactcaaaaaaaaaaaaaaaaaaaaaaaaaaaaaaccagactgggggaaaaaaggtttggccttatcacagaatttttactgtgctgtataaatgtttgcaaatgcgaaaagtgtgcatttatagtgtgtttccacattaattaatgccgccttcaagagcaatattgtgcaggtaaaacgctgtttgtggctttctgttgcacagttaaagctgacccaccctatgcacaagacaatcaaatataaatctgtcctcctcaggatgcagataatactcatgtaaattatggagcacaatgtaagacaaaaggagacactttacatatgtattgttgatacagaaattatcagggcatgaatgagctgatgtgacattatgccacttctttcttttggttctcccttattaacttggcatttttaatttgaccatagagccaaattagttctccatgctttcttcgtagaaaatccttttttttcccataatgttttcatgccctgagaatcagaaaaatactacagaatagaaaaagatttacagtcattggaagatttgtgttttgcaaacagtgttaagtgatattgctagatggtgatatttttttcagcctaaaactctgttgaaatctgtgatcaaaatgttttaaactatccaaaaaaaatttgtatatttgggaaaaatggatttttacatagcttttgtatgcagatataaaactgtaattatgaatatagtgggcgtagataaactcataagcttaaattctaaaaaagaaaaagcttataacagatatattttcctgtctctttctttaaatattattattttctacataggcaaagagttgcctgctcttctcacttcagctgctgccaaaagacggaaccacggatgtaaggacatttatttcataaataaacatctactagaataagcaaatttacttgagaagaaactatggagggagagaagaaactaagtaaaatgctgatggggggttacctctttggaaggggccacaaagatgaagggaggagagaggtgaagttttgcagctcaaggacaacattcatcttctcatctcaaattattcaggaatattactaatggaattatgttaacatcagctgccaacatatatctcaatctctgttgccctgaacacatgttaattgagattctttctatgacaagtaacaaaaagctaactcaaactggcttaagcagaaagctaattattgactttaatatctgggatctagggtattgcataccaaagcttcaggcatggctggatctgggtgcacttactcagtattctcaggaagctcctttttttgtcattcatgtagacttaacattcacatggcctttcaccttacggtggcctccaatagctccaggatgagctttacagctccaaatatagtgaaaggagaatttcttttctccaacaattctaatgaaaattctggcctaattctcactggcccaagttcagtcatgtgcccattcctgagccaatcactgtggtgaggaaaacagatgcataaccaaccttatcctcaggaatcctggaactgggtgaggggaaagagggacagtcagcttcatctaaactatggactgagagttgaggcaagatgattcctgaaagaaaattctaagtcttgctgctataagtggaagagaatggtgggcaagcaaaagcaaccagtgcccacaccaaaggtaaatctaaaacaacatcccatttcagtacagcaagcggttctccttcacacagaggaagctcatctccaagtttttatttggccaggacatgaaccaaataaacaccttcc

SEQ ID NO: 88549 - DNA, 2571 bp, Artificial Sequence
  derived and/or modified sequence
aactttgcatgaataatgtgagtgcgcttggaaaagagacctcctgctccgcgggctcggggcaagagcccgcaggctaccttccccgggcaggggcgctcaacccaaccggctccagggcactggtaatttggctagaggaccgcgcggaggcagcgggatctgcgatttccttctggttggctgtcctgcgtgggtgccaagttccacacatgatttaatgaataagaagggggcttggaggctcatagcaaaggtccttgaagagagcaagaaaaagtcttcccaggaaaagtggacacctgagtgagtgttacaacgagaaggggggcatcccaggcaaggcagctaccaagcacaggtgtgaagtgacttcactgtaggaagaggaaatgcagaaaaacaaacgtcttgaagactgaaagcctgttattcaaagaggttagcagtagactgttggaagtaaggagatgtcagtgaaaaaagggatccagaatgattactaacctatgactcccaacagtatgacagaaaatggccttacagcctgggacaaaccgaagcactgtccagaccgagaacacgactggaagctagtaggaatgtctgaagcctgcctacataggaagagccattcagagaggcgcagcacgttgaaaaatgaacagtcgtcgccacatctcatccagaccacttggactagctcaatattccatctggaccatgatgatgtgaacgaccagagtgtctcaagtgcccagaccttccaaacggaggagaagaaatgtaaagggtacatccccagttacttagacaaggacgagctctgtgtagtgtgtggtgacaaagccaccgggtatcactaccgctgtatcacgtgtgaaggctgcaagggtttctttagaagaaccattcagaaaaatctccatccatcctattcctgtaaatatgaaggaaaatgtgtcatagacaaagtcacgcgaaatcagtgccaggaatgtcgctttaagaaatgcatctatgttggcatggcaacagatttggtgctggatgacagcaagaggctggccaagaggaagctgatagaggagaaccgggagaaaagacggcgggaagagctgcagaagtccatcgggcacaagccagagcccacagacgaggaatgggagctcatcaaaactgtcaccgaagcccatgtggcgaccaacgcccaaggcagccactggaagcaaaaacggaaattcctgccagaagacattggacaagcaccaatagtcaatgccccagaaggtggaaaggttgacttggaagccttcagccattttacaaaaatcatcacaccagcaattaccagagtggtggattttgccaaaaagttgcctatgttttgtgagctgccatgtgaagaccagatcatcctcctcaaaggctgctgcatggagatcatgtcccttcgcgctgctgtgcgctatgacccagaaagtgagactttaaccttgaatggggaaatggcagtgacacggggccagctgaaaaatgggggtcttggggtggtgtcagacgccatctttgacctgggcatgtctctgtcttctttcaacctggatgacactgaagtagccctccttcaggccgtcctgctgatgtcttcagatcgcccggggcttgcctgtgttgagagaatagaaaagtaccaagatagtttcctgctggcctttgaacactatatcaattaccgaaaacaccacgtgacacacttttggccaaaactcctgatgaaggtgacagatctgcggatgataggagcctgccatgccagccgcttcctgcacatgaaggtggaatgccccacagaactcttcccccctttgttcttggaagtgttcgaggattagactgactggattcattctcataattcctacagcactactgggtgtcatttcattccattgcctagctcttttttgtttgtttctttgtgttgggagggattatttgggagggaaaagggaagtagtccttggcatagacatggatgaaattgccccttgaatgcgggtacttgaaactattgcatttcgttctccggtcctgtgatgtgaatgctctgaaggttttatggttgtggaggtggggtgggggacaatcattaactcaccagcaccaagcatcaccagctcccacccgtccctggtccaagacttgagtcagcaaaatggcgccacaggacactaaagaagccttaaaaccaagataatacgaccacctccacccaatcctgatgttcgcagggctgaagttaacagagcacagaccacctttagttagatgtggctttcagccttttagggaaagactcgaacaaattttcatctattcaagagcatgctgtttgcagcactctttatggtctcctaggagcataacttggaatgtacaggaatatttgtgtcctaaaaaaatcagctgcccttccaatatcatttttataacgttatggtttaattcaagttatacaaaggtgtgactcaaggatgtgcaggtattgactgatggaggccaacaagg

SEQ ID NO: 88550 - DNA, 539 bp, Artificial Sequence
  derived and/or modified sequence
gtaatttggctagaggaccgcgcggaggcagcgggatctgcgatttccttctggttggctgtcctgcgtgggtgccaagttccacacatgatttaatgaataagaaggagatgtcagtgaaaaaagggatccagaatgattactaacctatgactcccaacagtatgacagaaatggccttacagcctgggacaaaccgaagcactgtccagaccgagaacacgactggaagctagtaggaatgtctgaagcctgcctacataggaagagccattcagagaggcgcagcacgttgaaaaatgaacagtcgtcgccacatctcatccagaccacttggactagctcaatattccatctggaccatgatgatgtgaacgaccagagtgtctcaagtgcccagaccttccaaacggaggagaagaaatgtaaaggtaaccagatttttattagcccattatcatgtgtttcaacaagaaaaaaaatatccctgttgtagctgtgtacttcatctacatttctcttccaatgtatggtgtccc

SEQ ID NO: 88551 - DNA, 703 bp, Artificial Sequence
  derived and/or modified sequence
tgacattttgcaggactcgcgcgacgcccagtcgccggcgctccccgggaccccgccgccgggaggagggggcggaggagggtggagactgcggggcttggccaaggaaggcgcacatcctcgggcgggcggccgtgacgcggcggggattaactttgcatgaataatgtcctagaaaggaaagcacagcacatcgtgcagaaggccgcatgggaaaagggccagatctgcgatttccttctggttggctgtcctgcgtgggtgccaagttccacacatgatttaatgaataagaaggagatgtcagtgaaaaaagggatccagaatgattactaacctatgactcccaacagtatgacagaaaatggccttacagcctgggacaaaccgaagcactgtccagaccgagaacacgactggaagctagtaggaatgtctgaagcctgcctacataggaagagccattcagagaggcgcagcacgttgaaaaatgaacagtcgtcgccacatctcatccagaccacttggactagctcaatattccatctggaccatgatgatgtgaacgaccagagtgtctcaagtgcccagaccttccaaacggaggagaagaaatgtaaagggtacatccccagttacttagacaaggacgagctctgtgtagtgtgtggtgacaaagccaccgggtatcactaccgctgta

SEQ ID NO: 88552 - protein, 491 aa, Artificial Sequence
  derived and/or modified sequence
SGSSHSFPGSLEVTALMTTWSSLQGSHVSKRALAYALVVTNCQERIQHWKKVDNDYNALRERLSTLPDKLSYNIMVPFGPFAFMPGKLVHTNEVTVLLGDNWFAKCSAKQAVGLVEHRKEHVRKTIDDLKKVMKNFESRVEFTEDLQKMSDAAGDIVDIREEIKCDFEFKAKHRIAHKPHSKPKTSDIFEADIANDVKSKDLLADKELWARLEELERQEELLGELDSKPDTVIANGEDTTSSEEEKEDRNTNVNAMHQVTDSHTPCHKDVASSEPFSGQVNSQLNCSVNGSSSYHSDDDDDDDDDDDDDNIDDDDGDNDHEALGVGDNSIPTIYFSHTVEPKRVRINTGKNTTLKFSEKKEEAKRKRKNSTGSGHSAQELPTIRTPADIYRAFVDVVNGEYVPRKSILKSRSRENSVCSDTSESSAAEFDDRRGVLRSISCEEATCSDTSESILEEEPQENQKKLLPLSVTPEVLRLVGYSRNLAPLNVIL

SEQ ID NO: 88553 - DNA, 1476 bp, Artificial Sequence
  derived and/or modified sequence
agcggcagcagccacagcttccccggcagcctggaggtgaccgccctgatgaccacctggagcagcctgcagggcagccacgtgagcaagagagccctggcctacgccctggtggtgaccaactgccaggagagaatccagcactggaagaaggtggacaacgactacaacgccctgagagagagactgagcaccctgcccgacaagctgagctacaacatcatggtgcccttcggccccttcgccttcatgcccggcaagctggtgcacaccaacgaggtgaccgtgctgctgggcgacaactggttcgccaagtgcagcgccaagcaggccgtgggcctggtggagcacagaaaggagcacgtgagaaagaccatcgacgacctgaagaaggtgatgaagaacttcgagagcagagtggagttcaccgaggacctgcagaagatgagcgacgccgccggcgacatcgtggacatcagagaggagatcaagtgcgacttcgagttcaaggccaagcacagaatcgcccacaagccccacagcaagcccaagaccagcgacatcttcgaggccgacatcgccaacgacgtgaagagcaaggacctgctggccgacaaggagctgtgggccagactggaggagctggagagacaggaggagctgctgggcgagctggacagcaagcccgacaccgtgatcgccaacggcgaggacaccaccagcagcgaggaggagaaggaggacagaaacaccaacgtgaacgccatgcaccaggtgaccgacagccacaccccctgccacaaggacgtggccagcagcgagcccttcagcggccaggtgaacagccagctgaactgcagcgtgaacggcagcagcagctaccacagcgacgacgacgacgacgacgacgacgacgacgacgacgacaacatcgacgacgacgacggcgacaacgaccacgaggccctgggcgtgggcgacaacagcatccccaccatctacttcagccacaccgtggagcccaagagagtgagaatcaacaccggcaagaacaccaccctgaagttcagcgagaagaaggaggaggccaagagaaagagaaagaacagcaccggcagcggccacagcgcccaggagctgcccaccatcagaacccccgccgacatctacagagccttcgtggacgtggtgaacggcgagtacgtgcccagaaagagcatcctgaagagcagaagcagagagaacagcgtgtgcagcgacaccagcgagagcagcgccgccgagttcgacgacagaagaggcgtgctgagaagcatcagctgcgaggaggccacctgcagcgacaccagcgagagcatcctggaggaggagccccaggagaaccagaagaagctgctgcccctgagcgtgacccccgaggtgctgagactggtgggctacagcagaaacctggcccccctgaacgtgatcctgtag

SEQ ID NO: 88554 - DNA, 1576 bp, Artificial Sequence
  derived and/or modified sequence
agtgggtcttctcactcttttccaggctccttggaggtcactgccctgatgacaacatggtcttcccttcaaggaagccacgtttctaagagggctctggcatatgcattggtggtcactaactgccaagagagaatccagcattggaagaaggtagataatgactataatgcccttcgagaaagactcagcaccttgcctgataaattgtcttataatataatggtaccatttggcccttttgccttcatgccaggaaaacttgtccatactaatgaagtcactgttttactgggggacaactggtttgcaaagtgctcagcaaagcaggctgtaggtttagttgagcaccggaaagaacatgtaagaaaaacaatagatgacttaaaaaaagtgatgaaaaattttgaatccagagttgaattcacagaagatttgcagaaaatgagcgatgctgcaggtgatattgttgacatacgagaagaaattaaatgtgacttcgaatttaaagcaaaacaccgaattgctcataaaccgcattccaaaccaaaaacttcagatatttttgaagcagatattgcaaatgatgtgaaatccaaggatttgctagctgataaagaactgtgggctcgacttgaagaactagagagacaggaagaattgctgggtgaacttgatagtaagcctgatactgtgattgcaaatggagaagatacgacatcttctgaagaggaaaaggaagatcgtaacacaaatgtgaatgcgatgcatcaagtaacagactctcatactccttgtcataaggatgttgcaagttcagaaccattcagtggtcaagtgaatagtcagttgaactgttcagtgaatggttccagttcttaccacagtgatgatgatgatgatgatgatgatgacgacgacgacgacaacattgacgacgatgatggtgataacgaccatgaggctttaggggttggagataattctataccaacaatatatttttcacatactgttgagcctaagagggtccgaataaatactggaaagaataccactttaaaattcagtgaaaagaaagaagaagccaaacgtaaacgaaagaacagcactggcagtggccactctgcccaggagctgccgaccatcaggacgcctgcagacatttacagagcctttgttgatgttgtgaatggagaatatgtccctcgcaaatccatcctgaagtctcgaagtagagagaatagtgtgtgtagcgacactagtgaaagcagtgctgctgaatttgatgataggcggggagttttgaggagtatcagctgcgaagaagccacttgcagtgacaccagtgagagcattttggaagaggaaccacaagaaaatcaaaagaaacttttgcccttatcagtaacacctgaggttttgcggctagttggctattcaagaaacctcgcccctctgaatgtcatactgtaatctttaaggaagaaagctacatgaattaattgtactctatgggaaaatttctttggaaagatattttgtaaaacttttttttccaagtaaaaactttatg

SEQ ID NO: 88555 - DNA, 1476 bp, Artificial Sequence
  derived and/or modified sequence
agtggaagctcacactctttccccggcagcctggaggtgactgcccttatgaccacctggagctcacttcaaggctctcatgttagcaagcgggccctggcctacgctttagtggttacaaactgccaggagcggatccagcattggaaaaaggtggataatgattacaacgctctgagagaacgtctgagtacattgcccgacaagctctcttataatataatggtgccattcggaccttttgcctttatgcctgggaagctggttcacacaaacgaggtgacagtgctcttgggggacaactggttcgccaagtgcagtgccaagcaagcagttgggctcgttgagcaccgcaaagaacatgttcgaaagaccatcgacgatttaaagaaagtgatgaaaaattttgaaagccgtgtggagttcaccgaggatctgcagaaaatgagcgatgccgcgggcgatattgtggatattagagaggaaattaagtgcgacttcgagtttaaggctaagcaccgtatcgcacacaagccccattcaaagccaaaaaccagcgatatatttgaagccgatatcgccaatgacgtcaagtctaaagaccttctggctgacaaagaattatgggcgcgactggaggaattagagaggcaggaggaactgctcggggaactggattctaaacccgatacagtgatcgcgaacggagaggatactaccagtagcgaggaagaaaaggaagacaggaacactaacgttaatgcaatgcatcaggtaaccgactctcacaccccgtgccataaagatgtggcgtcctcagaacccttcagcggacaagtgaactcccagctaaattgtagcgtcaatggctcaagtagttaccactcggatgatgacgatgacgacgacgacgatgacgatgatgacaatattgatgacgacgatggtgataatgaccacgaagctctcggggtcggggataacagcataccaacaatctacttcagtcatacagtggaacctaaacgagtccgcatcaatactggaaagaacacaacgctcaagttctccgagaagaaggaggaggccaaacggaagcgcaaaaacagtaccggatctgggcactctgctcaggaactccccacaattcgcacccccgccgatatctatcgcgcctttgtcgacgtcgtaaatggagaatatgttccacgcaagagtatactgaaatcgagaagtagagagaacagcgtctgttccgacaccagcgagtccagcgcagccgagttcgatgatagaagaggcgtgctgcgctctattagctgtgaggaggccacctgcagcgacacatcggaatccattcttgaggaagagccacaggagaaccagaagaagctgttgcccctcagcgtcacgcctgaggtgctgcgccttgtagggtatagtagaaatttagccccactgaatgtcatactgtag

SEQ ID NO: 88556 - DNA, 1476 bp, Artificial Sequence
  derived and/or modified sequence
tctggcagcagccacagcttccctggcagcctggaggtgacagccctgatgaccacctggagcagcctgcagggcagccacgtgtccaagagggccctggcctatgccctggtggtgaccaactgccaggagcgcatccagcactggaagaaggtggacaatgactacaatgccctgcgggagcggctgagcaccctgcctgacaagctgagctacaacatcatggtgcccttcggcccctttgccttcatgcctgggaagctggtgcacaccaatgaggtgacagtgctgctgggggacaactggtttgccaagtgcagcgccaagcaggccgtgggcctggtggagcacaggaaggagcacgtgaggaagaccattgatgacctgaagaaggtgatgaagaactttgagagccgggtggagttcacagaggacctgcagaagatgtctgatgctgctggggacatcgtggacatccgggaggagatcaagtgtgactttgagttcaaggccaagcacagaattgcccacaagccccacagcaagcccaagaccagtgacatctttgaagctgacatcgccaatgatgtgaagagcaaggacctgctggccgacaaggagctgtgggcccggctggaggagctggagcggcaggaggagctgctgggggagctggacagcaagccagacacagtgattgccaatggagaggacaccaccagcagcgaggaggagaaggaggacaggaacaccaacgtgaatgccatgcaccaggtgacagacagccacaccccctgccacaaggatgtggccagcagcgagcccttcagcggccaggtgaacagccagctgaactgcagcgtgaatggcagcagcagctaccacagtgatgatgatgatgatgatgatgatgatgatgatgatgacaacattgatgatgatgatggagacaatgaccacgaggccctgggcgtgggggacaacagcatccccaccatctacttcagccacacagtggagcccaagagggtgcgcatcaacacaggcaagaacaccaccctgaagttcagcgagaagaaggaggaggccaagaggaagaggaagaacagcactggaagtggccacagcgcccaggagctgcccaccatccgcaccccagctgacatctaccgggcctttgtggatgtggtgaatggagaatatgtgcccaggaagagcatcctgaagagccgcagccgggagaacagcgtgtgcagcgacaccagcgagagcagcgctgctgagtttgatgaccggcggggcgtgctgcggagcatcagctgtgaggaggccacctgcagcgacaccagcgagagcatcctggaggaggagccccaggagaaccagaagaagctgctgcccctgtctgtgaccccagaggtgctgcggctggtgggctacagcaggaacctggcccccctgaatgtcatcctgtag

SEQ ID NO: 88557 - DNA, 1476 bp, Artificial Sequence
  derived and/or modified sequence
agcggcagcagccacagcttccccggcagcctggaggtgaccgccctcatgactacttggtcctcactgcagggatctcatgtctctaaacgtgctcttgcctatgcgctggtcgttacaaactgccaggaacggattcagcattggaaaaaggtggataacgattacaacgcgctgagggaaagactcagtaccttacctgacaagctcagttacaatatcatggtgccattcggcccgttcgccttcatgccagggaaactcgtgcataccaatgaagtgaccgtgctccttggtgataactggtttgcgaaatgctctgcaaaacaggctgtgggcttggtcgagcatcggaaggagcacgtgagaaaaacgatcgatgatctcaagaaagtgatgaagaacttcgaatctcgcgtcgaattcactgaggacctacaaaagatgtccgatgccgctggcgatattgtggatataagggaggaaatcaagtgtgacttcgagtttaaggcaaagcaccgcattgcacataagccccactcaaagcctaaaacaagcgatatttttgaagccgacattgcaaatgatgtgaagtccaaggacctgctggctgacaaggagctgtgggcccgcctggaagaactggaacggcaggaggaactcctgggtgagctggattccaagccagacaccgtcatcgcaaacggcgaggacactacgtcgagcgaagaggaaaaggaagacagaaacacaaatgttaatgccatgcatcaagtaaccgactcacataccccatgtcataaggacgtcgcatcatctgaacctttttccggccaggttaactcacagttgaattgtagcgtgaatgggtcctcctcttatcattctgatgatgatgatgatgacgacgatgatgacgatgatgacaacatcgatgacgacgacggggacaacgaccatgaggctcttggtgtaggagacaacagcatccctactatctacttctctcacaccgtagagcccaagcgggtccggattaatacaggcaaaaataccactctcaaattttctgaaaaaaaggaggaagcaaagagaaaacgcaagaacagtactggaagtggacactccgctcaggagctacccaccatcaggacacctgcagatatttatagggcctttgtcgatgttgtcaacggggaatatgtgcctcggaaatccatcctcaagtcccgctcaagggagaacagcgtctgctccgacacatcagagtccagcgccgcagagttcgatgatcgaaggggagtgcttcgcagtatttcctgtgaggaagcaacatgttccgacacttctgagagtatactggaagaagagccccaagaaaatcaaaagaaacttctgcctttaagtgttactcctgaagttctacgcctggtggggtactccagaaatctggcacccttgaatgtgattctttag

SEQ ID NO: 88558 - DNA, 1476 bp, Artificial Sequence
  derived and/or modified sequence
agtggcagttcccactcatttcctggctccctcgaagttacagccctgatgaccacatggtctagtctgcagggctcccatgtaagcaagagggccctagcctatgcactggtcgtcactaactgccaggagcgcatccagcactggaaaaaggtggacaacgattataacgctctaagggagcgcttatccacactgcccgataagctgagctacaatattatggttccctttggaccttttgctttcatgcccggaaagctcgttcacactaacgaggttacagtactgctaggcgacaactggttcgccaaatgttccgctaaacaggctgtgggcctggtggaacatcgcaaggagcacgtgcgcaagaccatcgacgacctgaaaaaagtgatgaagaactttgaatcccgggtcgagttcacagaggacttgcaaaaaatgtccgacgcagcgggtgatattgtggacatccgtgaggagatcaaatgcgactttgagtttaaagccaaacataggattgcgcataagccacacagtaagcccaagacttcagacatttttgaggccgatatcgctaatgatgtgaaaagtaaggatcttcttgccgacaaagagctctgggctcgtctagaggagctcgagaggcaagaggagttgttgggagagctggattctaaaccagatacagttatcgccaacggcgaggacactacatctagcgaggaggaaaaagaggatcgaaacacaaacgttaatgccatgcatcaggtaaccgattcccacactccctgccacaaggatgtcgcttctagtgagccattcagcggccaagtgaactcccagctgaattgctcagtgaatggatcctcctcttatcatagtgatgacgatgacgatgatgacgacgacgatgacgacgataacatcgacgatgacgacggcgacaacgaccacgaggcactcggagtgggtgacaactctatcccgactatctacttctcccacacagtcgagcccaagcgagtgcgaatcaatactggcaagaacaccacactgaaattttccgagaaaaaagaagaggccaagagaaagaggaagaacagcacagggagcgggcactcagcacaggagctgcccaccattaggacccccgcagatatctatcgcgcattcgtggatgtggtcaacggagagtacgttcccaggaagtcaattctcaagtctcggtcaagggagaatagcgtgtgttctgatacatccgaatcttccgctgccgaattcgacgaccgcagaggcgtgctgaggtcaataagctgcgaagaggcgacatgcagtgataccagtgagtcgatcctggaggaggagcctcaggaaaatcagaaaaaactattgcctttatcggtgacacctgaggtcctgcgcctggttggatattctagaaacctggcccctttgaatgtcattctatag

SEQ ID NO: 88559 - DNA, 504 bp, Artificial Sequence
  derived and/or modified sequence
atgaacagggctttttctcggaaaaaggataaaacctggatgcacacacccgaggccctctcgaagcatttcataccctacaatgccaagtttctcggttctaccgaggtggagcaaccgaaaggaacagaggttgtgagggatgctgtgaggaagcttaagtttgctcgacacattaaaaaatccgagggccaaaagattcctaaggtggaactgcagattagcatctacggtgtgaagatactcgagcccaaaactaaagaagtgcaacataactgccaactgcaccgaattagcttctgcgcagatgataagaccgacaaaagaatattcacattcatttgcaaagattccgaatccaataaacacctgtgttatgtgttcgatagcgaaaagtgcgtctctatacctgacgtggtaggttggtttgtgcttttttataaacccgggattgtgctgcttctggccttagctaaataccttaagatgaacaactttttgtag

SEQ ID NO: 88560 - DNA, 504 bp, Artificial Sequence
  derived and/or modified sequence
atgaatcgagccttctcccggaagaaggataaaacctggatgcacactccagaagcattatctaagcacttcatcccctacaacgctaaattcctggggagcactgaagtcgagcagcccaagggtacggaagttgtgcgagatgctgttcggaaactgaaattcgcaaggcatatcaagaaaagtgaaggacagaagatcccaaaggtcgagcttcagatcagcatctacggagtcaaaattctggaaccaaaaactaaggaggtgcagcacaactgccagctccaccgtatttccttctgcgcggatgacaagactgacaagcgcatctttaccttcatttgtaaagactctgaaagtaataagcatctgtgctatgtgttcgattcagaaaaatgtgtgagcatcccggatgtggttggatggtttgtccttttctataagcctggcatagtactgctgctagctctcgcaaaatatctgaaaatgaataacttcctgtag

SEQ ID NO: 88561 - DNA, 1242 bp, Artificial Sequence
  derived and/or modified sequence
cgcaaggcgcggcgggggtgatgagcccttgggttctcgctccgactgctaaattcgcttggccgggtccaccttctcgtggcctcactcgccacacggatcagaatccggagcaggcagttctctctattctgaggctcctgcggctgccgcgctgacttccctgtgtgcgggagggaactctgggcaggctggttttcttggaatgtgtttacgatgttgaatgggacttgaacaggaagctggacgctgcagctggaactagcgtgccaagttatttatgattccatctgatatacataggagagaaactgatagaagaattctgatggcaactgtatgatagaagctatataaagtcaagtgtccattttctttcaactatatttgagcatacccaggatttaagtcgtggaactgaacatttatttggctgatcctcatcatgaaccgtgcttttagcaggaagaaagacaaaacatggatgcatacacctgaagctttatcaaaacatttcattccctataatgcaaagtttcttggcagtacagaagtggaacagccaaaaggaacagaagttgtgagagatgctgtaaggaaactaaagtttgcaagacatatcaagaaatctgaaggccagaaaattcctaaagtggagttgcaaatatcaatttatggagtaaaaattctagaacccaaaacaaaggaagttcaacacaattgccagcttcatagaatatctttttgtgcagatgataaaactgacaagaggatattcactttcatatgcaaagattctgagtcaaataaacatttgtgctatgtatttgacagcgaaaagtgtgtaagtatcccagatgttgtagggtggtttgttctgttttataagccaggaattgtcttgcttctggcattggcaaagtatttgaaaatgaataattttctgtaaattattctgtaaaaagtctgtaaatacttagctgtactaatagatttattttgtcatgagaatatgcttcaggatttcatctgtaactaaattctcatggtcatgagcataaacttacatgtaaatttcttttattagaatgccatgcctgcttatgttatgcatgtattttataataatttaatctattttacaattttaaactcaaatatgatttagtattatgcacataatacaaacagtagtggtgagcaaacgtgtgtttcccccacatgtgcagaatatgatggatt

SEQ ID NO: 88562 - DNA, 1595 bp, Artificial Sequence
  derived and/or modified sequence
gcggattaggaagaggagggaggggggagagagcgcgaagagggaggggaccgaagctggagggtcccgagtccagcgccgtgttggcgtagagaaactttccctctcggcctcggagacggcgccccggccgtgccggagtggagatcgccaggctcggaggaaccggcagctctccacgcccctgcccgaagcctgacccgactgcctctctcagtgagttatttatgattccatctgatatacataggagagaaactgatagaagaattctgatggcaactgtatgatagaagctatataaagtcaagtgtccattttctttcaactatatttgagcatacccaggatttaagtcgtggaactgaacatttatttggctgatcctcatcatgaaccgtgcttttagcaggaagaaagacaaaacatggatgcatacacctgaagctttatcaaaacatttcattccctataatgcaaagtttcttggcagtacagaagtggaacagccaaaaggaacagaagttgtgagagatgctgtaaggaaactaaagtttgcaagacatatcaagaaatctgaaggccagaaaattcctaaagtggagttgcaaatatcaatttatggagtaaaaattctagaacccaaaacaaaggaagttcaacacaattgccagcttcatagaatatctttttgtgcagatgataaaactgacaagaggatattcactttcatatgcaaagattctgagtcaaataaacatttgtgctatgtatttgacagcgaaaagtgtgtaagtatcccagatgttgtagggtggtttgttctgttttataagccaggaattgtcttgcttctggcattggcaaagtatttgaaaatgaataattttctgtaaattattctgtaaaaagtctgtaaatacttagctgtactaatagatttattttgtcatgagaatatgcttcaggatttcatctgtaactaaattctcatggtcatgagcataaacttacatgtaaatttcttttattagaatgccatgcctgcttatgttatgcatgtattttataataatttaatctattttacaattttaaactcaaatatgatttagtattatgcacataatacaaacagtagtggtgagcaaacgtgtgtttcccccacatgtgcagaatatgatggattttatgaaaataaatattcttaactccaggaaatatgatctatatggttccttaaaagattttccaatacactgaaaatttagttccttatgttcattgtataaaaatcttaggccaggcgcggtggctcacgcctgtaatcccagcacttcgggaggccgaggcgggcagatcatgaggtgaagagatcgagaccatcctgaccaaaatggtgaaactctgtctctactaaaaatacaaaaattagctgggtgtggtggtgtgtgccagtggtcccagctactagggaggctgaggcaggaaatcacttgaacctgggaggcagaggttgcagtgagccaagatcgcgccactgaattccagcctggcggcagagtgagactccatctcaagagaaaaaaaaaaaa

SEQ ID NO: 88563 - DNA, 504 bp, Artificial Sequence
  derived and/or modified sequence
atgaacagagccttcagcaggaagaaggacaagacctggatgcacaccccagaggccctgagcaagcacttcatcccctacaatgccaagttcctgggcagcacagaggtggagcagcccaagggcacagaggtggtgagagatgctgtgaggaagctgaagtttgcccggcacatcaagaagtctgagggccagaagatccccaaggtggagctgcagatcagcatctatggagtgaagatcctggagcccaagaccaaggaggtgcagcacaactgccagctgcaccgcatctccttctgtgctgatgacaagacagacaagaggatcttcaccttcatctgcaaggacagcgagagcaacaagcacctgtgctacgtgtttgacagcgagaagtgtgtgtccatcccagatgtggtgggctggtttgtgctcttctacaagccaggcatcgtgctgctgctggccctggccaagtacctgaagatgaacaacttcctgtag

SEQ ID NO: 88564 - DNA, 504 bp, Artificial Sequence
  derived and/or modified sequence
atgaaccgggccttcagccggaagaaggacaagacctggatgcacactccggaagctctaagtaaacattttatcccttataacgcaaagttcctgggaagcactgaagtcgagcagcccaaggggacagaggttgtgagagatgctgtgagaaaactgaagttcgctcgtcatattaaaaagagcgagggccagaaaattccgaaggtggagctgcagatttccatttacggtgtcaagatcctagaacccaagacaaaggaagtgcagcacaattgccagctgcataggatctccttttgtgcagacgataaaaccgataaacgaattttcacctttatttgtaaggacagtgaatctaacaagcatctttgctacgtgttcgatagcgaaaagtgcgtgtcgattcccgatgtggtgggctggtttgtattgttctataaaccagggatagtacttcttctggccctggcaaagtacctcaagatgaacaactttctgtag

SEQ ID NO: 88565 - DNA, 504 bp, Artificial Sequence
  derived and/or modified sequence
atgaaccgggccttcagccggaagaaggacaagacctggatgcacaccccagaggcactgtcaaaacattttatcccttataatgccaaatttctaggaagtacggaggtggagcaacctaaaggtactgaggtggtgagggacgcagtgcgtaagctgaagtttgccaggcacatcaagaagagcgagggtcagaaaattccaaaggtggaactgcagatttctatttatggcgtgaagatcttggaacccaagactaaagaagtacagcacaattgccagttgcacagaatctctttctgtgccgatgataagacagataagagaatcttcacgtttatttgcaaggattcagagagcaataagcacttgtgttacgtatttgactctgaaaagtgtgtgtctattccagacgtggttgggtggttcgtgctcttttataagcccggcatagtgctccttttagcccttgcaaagtacttgaagatgaacaattttctgtag

SEQ ID NO: 88566 - DNA, 504 bp, Artificial Sequence
  derived and/or modified sequence
atgaatcgagcatttagtaggaagaaggataagacgtggatgcatacacctgaagccttgtcaaagcattttataccgtacaatgcgaagtttctcgggtccacagaggtggaacaacctaagggcacagaagtagtccgtgatgctgtgcgaaaactgaagtttgccaggcatattaaaaagtcagaaggccagaaaatcccaaaagttgaactgcagatcagcatttacggagtcaagatactggaacctaagaccaaagaggtgcagcacaattgtcagctgcacaggatctccttttgcgccgatgataaaactgacaagcgtatttttacattcatctgcaaagacagcgaaagtaacaagcacctctgttatgtgttcgacagcgaaaagtgtgtatcgataccggatgtggtgggctggttcgtgctgttctataagcctgggatcgtgctcttattagcccttgctaagtacttgaaaatgaacaactttttgtag

SEQ ID NO: 88567 - DNA, 504 bp, Artificial Sequence
  derived and/or modified sequence
atgaatcgtgccttttcacgcaagaaagataagacctggatgcatacccctgaagccttgtccaaacatttcatcccatacaatgccaagtttctgggttccacagaggtggagcagccgaaaggtaccgaggttgttagggacgcagtacgcaaactgaagttcgcaagacacatcaaaaaatcggaaggccagaaaataccaaaagtcgaactgcaaatcagcatctacggcgtgaaaatcctggaaccgaaaacgaaggaagtacagcacaactgccagctgcatcgaatttctttctgtgccgacgacaagacagacaagaggatcttcactttcatttgtaaagactcagaaagtaataaacatctgtgttacgtattcgatagcgaaaaatgtgttagtattcccgatgtagttggatggtttgtacttttttataagccaggaattgtgctgcttctcgccctagccaaatatcttaagatgaataactttttgtag

SEQ ID NO: 88568 - DNA, 504 bp, Artificial Sequence
  derived and/or modified sequence
atgaacagagccttcagcagaaagaaggacaagacctggatgcacacccccgaggccctgagcaagcacttcatcccctacaacgccaagttcctgggcagcaccgaggtggagcagcccaagggcaccgaggtggtgagagacgccgtgagaaagctgaagttcgccagacacatcaagaagagcgagggccagaagatccccaaggtggagctgcagatcagcatctacggcgtgaagatcctggagcccaagaccaaggaggtgcagcacaactgccagctgcacagaatcagcttctgcgccgacgacaagaccgacaagagaatcttcaccttcatctgcaaggacagcgagagcaacaagcacctgtgctacgtgttcgacagcgagaagtgcgtgagcatccccgacgtggtgggctggttcgtgctgttctacaagcccggcatcgtgctgctgctggccctggccaagtacctgaagatgaacaacttcctgtag

SEQ ID NO: 88569 - protein, 568 aa, Artificial Sequence
  derived and/or modified sequence
MRRRKERQPWDRFHFLHFAPHGRELLETTCRLANTLKRHGVHRGDRVAIYMPVSPLAVAAMLACARIGAVHTVIFAGFSAESLAGRINDAKCKVVITFNQGLRGGRVVELKKIVDEAVKHCPTVQHVLVAHRTDNKVHMGDLDVPLEQEMAKEDPVCAPESMGSEDMLFMLYTSGSTGMPKGIVHTQAGYLLYAALTHKLVFDHQPGDIFGCVADIGWITGHSYVVYGPLCNGATSVLFESTPVYPNAGRYWETVERLKINQFYGAPTAVRLLLKYGDAWVKKYDRSSLRTLGSVGEPINCEAWEWLHRVVGDSRCTLVDTWWQTETGGICIAPRPSEEGAEILPAMAMRPFFGIVPVLMDEKGSVVEGSNVSGALCISQAWPGMARTIYGDHQRFVDAYFKAYPGYYFTGDGAYRTEGGYYQITGRMDDVINISGHRLGTAEIEDAIADHPAVPESAVIGYPHDIKGEAAFAFIVVKDSAGDSDVVVQELKSMVATKIAKYAVPDEILVVKRLPKTRSGKVMRRLLRKIITSEAQELGDTTTLEDPSIIAEILSVYQKCKDKQAAAK

SEQ ID NO: 88570 - DNA, 1821 bp, Artificial Sequence
  derived and/or modified sequence
atgctaaagaccttcttgtttctggagaaatacttcccttgtattaagtatagttccgcttgtttccctgggacaggcttggacgtctacgatatcaagtttgccgtcctcctccatccacagaccgccctccacttcggccctccccccagcctgatggcttttagctcgctgtgttgtagggaactgttggagaccacatgccgtctagccaatacactcaagcgccacggcgtccacaggggcgaccgcgtggcaatttacatgcccgtgtcgcctcttgctgtggctgcaatgctggcgtgcgcccgcataggagctgtccacactgtaatctttgctggtttttctgccgagtcgctcgccggccggatcaacgacgctaaatgcaaggtagtgatcacttttaatcagggcttgaggggcggacgcgtggtggaacttaagaagattgtcgatgaggccgtgaagcactgtcccaccgtgcagcatgtcttagtggctcaccgaacggacaacaaagttcacatgggtgatctggacgtcccattagagcaggagatggctaaggaagatcctgtatgcgcacccgagtctatgggctccgaagacatgctatttatgctgtacacctctggatctaccggcatgcccaaggggatcgtccatactcaggccggctacctgctgtacgcagccctcactcacaagctagtttttgaccatcaaccgggcgatatctttgggtgcgtcgccgatatcggatggatcaccggccactcctacgtcgtgtatggtcctctgtgtaatggggctacttccgtgctgtttgagtctactcccgtgtaccctaatgctggacgctactgggaaacggtggagcggttaaagattaatcagttttacggagcccctacggctgttcgattgctgttaaaatacggtgatgcatgggtaaaaaagtacgatcggtcctcgctgcgcacactgggatcagtcggcgagccaattaactgcgaagcctgggagtggttacatcgcgttgtgggcgacagccggtgcactctcgtggacacttggtggcaaaccgagacaggcggcatctgtatcgctccaaggcctagcgaggagggcgcagagatactgcccgccatggccatgcggccttttttcggcatcgtgcccgtgctgatggatgagaaaggatctgtggtggaaggatccaacgtgtccggagccctgtgcatcagccaagcatggccaggaatggctcggacaatttacggagaccatcagagatttgtggatgcttattttaaggcgtatcccgggtactactttaccggcgatggcgcgtatcgtacggagggagggtattaccagattaccggccgcatggacgacgtcattaacatttccggccaccggctgggtaccgcagaaatcgaagacgctattgccgatcatcccgctgtgcccgagtcggccgtgatcggctatcctcacgacatcaaaggcgaagccgcttttgcttttatcgtcgtgaaggactctgccggcgatagtgatgtagtcgtgcaggaactgaaaagtatggtggcaactaaaattgctaaatacgcagtgccggacgagatcctggtggtgaagcgtctacctaaaacccggtctggtaaggtgatgcggagactgctgaggaagatcatcacatccgaagcgcaggaactcggcgacactacaaccttagaggatccgtctatcatagccgaaatcctctccgtctaccagaagtgcaaagataagcaggctgctgctaagtag

SEQ ID NO: 88571 - DNA, 1707 bp, Artificial Sequence
  derived and/or modified sequence
atgcgtcgtaggaaggagcggcagccttgggaccggtttcatttcctgcactttgctccacacggccgcgagctgctggaaactacctgtagactcgccaacaccctgaagcgccacggcgtgcacaggggcgacagagtagcgatctacatgcctgtgagcccattagctgtggcagctatgttagcttgcgctcggatcggggcagtccacacagtgatctttgccgggttctccgcagagtctctcgcgggccgcattaacgatgccaagtgcaaggtggtgattactttcaatcaaggtttacggggaggaagagttgtggagctcaagaagatcgttgacgaggcagtaaaacattgtcccacagtgcagcatgtccttgtggcacacagaaccgataacaaggtccacatgggcgacctcgatgtccctcttgagcaggagatggccaaggaagacccagtgtgtgctcccgagtcaatgggctctgaagatatgctgtttatgctatataccagcggatccactgggatgccgaagggtattgtgcacacgcaggccggctatctcctgtacgctgccctcacacataaactggtgtttgatcatcagcccggagatatcttcggatgcgtggcagatatcgggtggatcacgggccactcatacgtggtttacggcccattgtgcaatggcgcaacctccgtgttgttcgagtcaacaccggtgtatcctaatgcagggaggtactgggagaccgttgaacggctaaaaatcaaccaattctatggcgccccaacagccgtgagactgcttttaaagtatggcgatgcttgggttaagaaatacgaccgctcctctctgagaacgctgggaagtgtgggagaacctattaactgcgaggcttgggaatggcttcatcgagtggtcggggactctagatgtacattggtggatacttggtggcagacagaaaccggagggatttgtatcgcacccagaccaagcgaggagggcgctgagatcctccctgccatggctatgaggcccttcttcggaatcgtgcctgtactcatggatgaaaaaggctccgtcgtggaggggtccaatgtttccggtgcactctgcatctcccaggcatggcctggaatggccaggaccatctatggggatcatcaacgctttgtcgatgcctatttcaaagcctacccaggttattacttcaccggagacggagcctataggaccgagggtggctactaccaaattaccggcagaatggacgatgttattaacattagtggacatcgcctcgggacggcggagattgaagacgcaattgctgatcatcccgccgtacccgaatcggccgtgattgggtatcctcacgatattaagggcgaagcagcatttgcttttattgtggtgaaggacagcgcgggagactctgatgtggtggttcaggaactgaagagcatggttgccactaaaattgctaagtatgccgtgcctgatgagattctggtcgtcaaaaggttgccgaagactcgctctggaaaagtgatgagacggttgctgcgcaaaatcatcacctctgaagcccaggagcttggggacaccactactctggaagacccatctattatcgcagagatcctgagcgtgtatcagaagtgcaaggacaaacaggcggctgccaaatag

SEQ ID NO: 88572 - DNA, 1821 bp, Artificial Sequence
  derived and/or modified sequence
atgctgaagaccttcctgttcctggagaagtacttcccctgcatcaagtacagcagcgcctgcttccctggcaccggcctggatgtgtatgacatcaagtttgctgtgctgctgcacccccagacagccctgcacttcggccccccacccagcctgatggccttcagcagcctgtgctgccgggagctgctggagaccacctgccgcctggccaacaccctgaagagacatggagtgcacagaggagacagagtggccatctacatgcctgtgagccccctggccgtggccgccatgctggcctgtgccagaattggagctgtgcacacagtcatctttgctggcttctctgctgagagcctggccggccgcatcaatgatgccaagtgcaaggtggtgatcaccttcaaccagggcctgcggggcggccgggtggtggagctgaagaagatcgtggatgaagctgtgaagcactgccccaccgtgcagcacgtgctggtggcccacaggacagacaacaaggtgcacatgggagacctggatgtgcccctggagcaggagatggccaaggaggaccctgtgtgtgcccctgagagcatgggcagcgaggacatgctgttcatgctgtacaccagcggcagcacaggcatgcccaagggcatcgtgcacacccaggccggctacctgctgtatgctgccctgacccacaagctggtgtttgaccaccagcccggggacatcttcggctgtgtggccgacatcggctggatcaccggccacagctatgtggtgtatggccccctgtgcaatggagccacctctgtgctgtttgagagcacccctgtgtacccaaatgccggccgctactgggagaccgtggagcggctgaagatcaaccagttctacggggcccccacagctgtgcggctgctgctgaagtatggagatgcctgggtgaagaagtatgacaggagcagcctgcggaccctgggctctgtgggggagcccatcaactgtgaggcctgggagtggctgcaccgggtggtgggggacagccgctgcaccctggtggacacctggtggcagacagaaacaggaggcatctgcatcgccccccggcccagcgaggagggcgctgagatcctgcctgccatggccatgaggcccttctttggaattgtgcctgtgctgatggatgagaagggctctgtggtggagggcagcaatgtgtctggggccctgtgcatcagccaggcctggccaggcatggcccggaccatctacggggaccaccagagatttgtggatgcctacttcaaggcctacccaggctactacttcaccggagatggagcctacagaacagaaggaggctactaccagatcactggaaggatggatgatgtgatcaacatcagcggccaccggctgggcacagctgagattgaagatgccatcgctgaccaccctgctgtgcctgagagcgctgtgattggctacccccatgacatcaagggggaggccgcctttgccttcatcgtggtgaaggacagcgctggggacagtgatgtggtggtgcaggagctgaagtccatggtggccaccaagatcgccaagtatgctgtgcctgatgagatcctggtggtgaagaggctgcccaagaccaggtctgggaaggtgatgaggcggctgctgaggaagatcatcaccagcgaggcccaggagctgggggacaccaccaccctggaggaccccagcatcatcgccgagatcctgtctgtgtaccagaagtgcaaggacaagcaggccgccgccaagtag

SEQ ID NO: 88573 - DNA, 1707 bp, Artificial Sequence
  derived and/or modified sequence
atgagaagaaggaaggagcggcagccctgggaccgcttccacttcctgcactttgcccctcatggccgggagctgctggagaccacctgccgcctggccaacaccctgaagagacatggagtgcacagaggagacagagtggccatctacatgcctgtgagccccctggccgtggccgccatgctggcctgtgccagaattggagctgtgcacacagtcatctttgctggcttctctgctgagagcctggccggccgcatcaatgatgccaagtgcaaggtggtgatcaccttcaaccagggcctgcggggcggccgggtggtggagctgaagaagatcgtggatgaagctgtgaagcactgccccaccgtgcagcacgtgctggtggcccacaggacagacaacaaggtgcacatgggagacctggatgtgcccctggagcaggagatggccaaggaggaccctgtgtgtgcccctgagagcatgggcagcgaggacatgctgttcatgctgtacaccagcggcagcacaggcatgcccaagggcatcgtgcacacccaggccggctacctgctgtatgctgccctgacccacaagctggtgtttgaccaccagcccggggacatcttcggctgtgtggccgacatcggctggatcaccggccacagctatgtggtgtatggccccctgtgcaatggagccacctctgtgctgtttgagagcacccctgtgtacccaaatgccggccgctactgggagaccgtggagcggctgaagatcaaccagttctacggggcccccacagctgtgcggctgctgctgaagtatggagatgcctgggtgaagaagtatgacaggagcagcctgcggaccctgggctctgtgggggagcccatcaactgtgaggcctgggagtggctgcaccgggtggtgggggacagccgctgcaccctggtggacacctggtggcagacagaaacaggaggcatctgcatcgccccccggcccagcgaggagggcgctgagatcctgcctgccatggccatgaggcccttctttggaattgtgcctgtgctgatggatgagaagggctctgtggtggagggcagcaatgtgtctggggccctgtgcatcagccaggcctggccaggcatggcccggaccatctacggggaccaccagagatttgtggatgcctacttcaaggcctacccaggctactacttcaccggagatggagcctacagaacagaaggaggctactaccagatcactggaaggatggatgatgtgatcaacatcagcggccaccggctgggcacagctgagattgaagatgccatcgctgaccaccctgctgtgcctgagagcgctgtgattggctacccccatgacatcaagggggaggccgcctttgccttcatcgtggtgaaggacagcgctggggacagtgatgtggtggtgcaggagctgaagtccatggtggccaccaagatcgccaagtatgctgtgcctgatgagatcctggtggtgaagaggctgcccaagaccaggtctgggaaggtgatgaggcggctgctgaggaagatcatcaccagcgaggcccaggagctgggggacaccaccaccctggaggaccccagcatcatcgccgagatcctgtctgtgtaccagaagtgcaaggacaagcaggccgccgccaagtag

SEQ ID NO: 88574 - DNA, 1821 bp, Artificial Sequence
  derived and/or modified sequence
atgctgaagaccttcctgttcctggagaagtacttcccctgcatcaagtacagctccgcttgcttcccaggcactggcttggacgtgtatgacatcaagtttgcagtcctattgcaccctcaaactgcactgcactttggacctcccccctcactcatggcctttagcagtctgtgctgccgggagctgcttgaaaccacctgccgcctagcaaatacattgaagagacacggggttcatcggggggatcgagttgccatctacatgcctgtgagtcccctcgccgttgcggcaatgttagcttgcgcccgcattggtgctgtgcatactgtgatcttcgccggattttcagcagagtcattagccggtcgcatcaatgatgcaaaatgcaaggtcgtcatcactttcaaccagggactgcgcggcggtagggtggtcgaattaaagaagatagttgacgaggcggtgaagcattgtccaacagttcagcatgttctagtggcacaccggacagacaataaagtccatatgggagatctggatgtccctttggagcaggagatggcaaaagaagatcccgtctgtgctcccgagtcaatgggcagcgaggatatgctcttcatgctttataccagcggctccactgggatgcctaagggaattgtgcatacgcaggcaggatatcttttatatgcagctctcacacataagctggtatttgaccaccagcctggagacatttttggatgtgtcgctgacattggctggattaccggtcattcatacgttgtgtacggccccttgtgtaatggtgcgacctccgtgctgtttgagagcaccccagtgtaccctaacgcagggcggtattgggagaccgtagaacggttgaagattaatcagttttacggagctcccactgcggttcggttgctactgaagtacggcgatgcttgggtcaagaagtatgacaggtcaagcttacggacgctgggttcagtcggagaaccaatcaattgcgaggcttgggaatggctccatagagtcgttggagactctcgctgtactctggtcgacacttggtggcagacagagaccgggggcatctgcattgcccccaggccatctgaagagggagctgaaatcttgcccgctatggccatgaggcccttcttcggtatcgtccctgtcctgatggacgagaaaggaagtgtggtagagggatcaaacgtcagtggggccctgtgcatcagccaggcctggcccgggatggcacggactatttacggcgaccatcagaggttcgtagacgcatatttcaaggcatatccgggctactactttaccggcgatggcgcctataggactgaggggggctattatcagatcacagggcgcatggacgatgtgatcaatatctccggtcaccgattgggcaccgccgagattgaggatgctattgctgatcatcccgctgtcccggaaagtgctgtcataggctacccgcatgatatcaaaggggaagccgcgtttgcattcatcgttgttaaggattcagctggggacagcgatgttgtggtccaggaactcaaatccatggtggcaacaaagattgccaagtacgccgttcctgacgaaatcctcgttgttaagcgactgcccaagacaagaagtggcaaggttatgcgccgactcctcaggaagatcatcacctctgaagcccaggaactaggggatactacaaccctggaggatccttcaatcattgcagagattctgtcagtttaccagaaatgcaaagataagcaagccgcagccaagtag

SEQ ID NO: 88575 - DNA, 1707 bp, Artificial Sequence
  derived and/or modified sequence
atgcggcggcggaaggagcggcagccctgggaccggttccacttccttcactttgctcctcacggcagagaattactggaaactacctgcaggctggctaacaccctcaagaggcacggagtgcatagaggagacagagtcgccatctatatgcccgtttcccctcttgctgttgcagccatgctggcttgcgcacgcattggagctgtacacaccgtgatttttgcagggttcagcgccgagagtctcgcaggcaggattaacgacgcgaagtgtaaggtcgtgatcacattcaatcaaggcttgaggggaggtcgagtggttgaactgaaaaagattgtggatgaggccgtcaaacattgccccaccgtgcagcacgtgctggtggctcatcgcacagacaacaaagtccatatgggtgatctggacgtgccactggaacaggagatggccaaagaagatccggtgtgtgctcctgaatctatggggtctgaggatatgcttttcatgctgtatactagcggatcaactggtatgccaaaaggcattgtgcatacccaagcgggatacctgctttatgcagcgctgacacacaaacttgtgtttgaccatcagcccggagacatcttcgggtgtgttgccgacatcggctggattacgggccactcgtacgtggtgtatggtcccctgtgcaacggcgctaccagcgtcctgttcgagagtactcccgtctatcctaacgccggacggtactgggagactgttgagcgcctgaaaattaatcagttctatggggctcctacagccgtgcgcctgctgctcaaatacggagatgcttgggtcaaaaaatatgaccggtcaagcctgcgcaccttgggctccgtaggagagcccattaactgcgaggcttgggagtggctgcacagagtggtgggagactcacgatgcactctggtcgacacttggtggcagactgaaaccggaggaatttgcatcgcacctaggccctcagaggaaggggccgagatcctgccagccatggcgatgcgaccatttttcggtattgtcccagttttgatggatgaaaaggggtcagtcgttgagggatcgaacgtatctggggcgctttgcattagccaagcctggcccggtatggcacgcaccatatatggagaccatcagcggttcgtcgacgcctacttcaaagcatatcctggatactactttactggggacggagcttataggacagagggcggctactaccagatcaccggaaggatggatgatgtgatcaacattagcgggcaccgcttgggtaccgccgagatagaggacgccatagctgatcatccagcagtgccagaaagcgctgtcatcggatacccccacgatattaaaggcgaagccgctttcgccttcatcgtggtaaaggatagcgctggagactctgacgtcgtggtccaggaattgaaatcaatggtcgctaccaaaatcgccaagtatgctgtaccagacgaaatcttagtcgtgaagcggctcccgaaaacccgctccgggaaggtgatgaggcgactgttacgcaaaatcataacatcagaggcccaggagctgggcgataccactacactagaggatcctagtattattgctgaaatcctgtctgtgtaccaaaaatgcaaagacaagcaagctgcagctaaatag

SEQ ID NO: 88576 - DNA, 1821 bp, Artificial Sequence
  derived and/or modified sequence
atgctgaaaacctttctcttcctcgagaaatatttcccctgcatcaagtattcttcggcctgtttccccggaactggtctggacgtgtacgacatcaagtttgctgtcctcttgcatcctcaaaccgccttgcattttggaccaccaccgtccctaatggccttttcctctctttgctgtcgcgaactgttagaaacgacctgcaggctggccaacactttaaaaaggcatggggtccatcggggagaccgcgttgccatctacatgccagtgtctccacttgccgtggcggcaatgctcgcatgcgcccgtatcggcgctgtccacaccgtaattttcgccggattctcagccgaatccctggctggcaggatcaacgatgctaagtgtaaagtggtgatcacgttcaatcaagggctgcggggtggcagagtcgttgagctgaagaagatcgtggacgaggctgtaaaacactgccccactgtgcagcacgtactggtagcccataggaccgataataaggtgcacatgggggatctggatgtcccgctggaacaagaaatggccaaggaagaccctgtgtgcgctcccgagtcgatgggctctgaggacatgctattcatgttgtacacctcaggttctacaggtatgccgaaaggcattgtgcatacgcaggccggttacttgttgtatgcagccctgactcataagctggtattcgaccatcagccgggtgacatttttggctgtgtagctgacatcggctggataacggggcattcatacgtggtttatgggccactttgcaatggagctacatccgttctgttcgaatcgacacctgtctatccaaacgccggacggtactgggaaaccgtagagcggctgaaaattaaccagttctacggagctccaaccgccgtgcggctgcttctaaaatacggcgacgcctgggtcaaaaagtacgacagaagctctttacggactttgggatcagtcggagaaccaatcaattgtgaggcttgggagtggctgcaccgagtggtgggcgacagtaggtgcacattggtggatacgtggtggcagactgaaactgggggaatatgcatcgccccacggcctagtgaagaaggcgcagaaatcctgcccgctatggcaatgcgccctttctttggcattgtgcccgtgttaatggacgaaaagggttctgtggtggagggctccaatgtgtctggcgctttatgtatcagccaggcctggcctggcatggccaggacaatctacggagaccaccaaagatttgttgatgcctactttaaagcatatcctggttattacttcacaggtgatggcgcttacaggactgagggcggatattatcaaatcacagggagaatggacgacgtgattaacatctcgggccatcgcctggggaccgcagaaattgaagacgccattgccgatcatccagctgtcccagagtcagcggtgattggatacccacacgacatcaagggggaggccgcttttgcattcatcgtggtaaaagattcggcaggggactccgacgtggtggtccaggaactcaaatccatggtggcaactaagatcgccaaatatgcggtcccggatgaaatcctcgtggtgaaacggttgcctaaaacgcgttcaggaaaggtcatgcggcgactccttaggaaaatcatcacctctgaggctcaagaattaggagacacaactaccctggaagatccatctataatagccgaaattttgagtgtttatcagaaatgcaaggataagcaggcagccgcaaagtag

SEQ ID NO: 88577 - DNA, 1707 bp, Artificial Sequence
  derived and/or modified sequence
atgaggagacgaaaagagcggcagccctgggataggttccattttttgcactttgccccacacggacgcgagctcctggagaccacttgccggctggcaaacacgctaaaacgccacggggtacatcgaggcgaccgcgtggccatttatatgcctgtttctcctctcgcggttgctgccatgctggcctgcgcaaggatcggagccgtccacaccgtaatctttgccggattttccgcagaatccttagctggcaggattaacgacgccaaatgtaaagtagtgattacgttcaatcagggcctgaggggaggaagggtagtggagcttaaaaagatagtagatgaggctgtgaagcactgccctacagttcagcacgtactagttgctcacagaacagacaataaagtccatatgggcgatctggacgttccactggaacaagagatggctaaggaggatccagtgtgcgcgccagaatcaatgggatcagaggacatgttgtttatgctctacacgtctggttcaactggaatgcctaagggcatcgtccatacacaggccggttacttactctatgcggctctcacacacaagctcgttttcgaccatcaacccggagatatcttcgggtgcgtggccgatattggttggatcaccggacacagctacgttgtgtacggccctctgtgcaacggtgccaccagtgtactgtttgagagcactccggtgtatcccaatgcgggacgttattgggagaccgtggaaagactgaagatcaatcagttctacggggctccaaccgccgttagactcctcttgaagtatggcgacgcttgggtcaagaaatacgaccggagctccctcagaactcttggatctgttggggagcccattaattgcgaggcctgggagtggttgcatagggtcgtgggagacagccgttgcactctcgtagatacttggtggcagactgagaccgggggaatttgcattgcccctcgcccatcagaggagggggctgaaatcctgcccgctatggctatgaggccattttttggcatcgtaccggtgttgatggacgagaaggggtccgtggtcgaagggtctaacgtcagcggcgctttgtgcatctcacaggcctggcccggaatggcacgaaccatctacggagaccatcagcggtttgtagacgcctactttaaggcttaccccggatactattttaccggagacggcgcttaccgcacagagggcggatattatcaaatcacagggagaatggacgatgtgatcaatatatcaggccatagacttggcaccgccgagattgaagatgctattgctgaccacccagcggtgcctgagagtgctgtcattggttatccccacgatatcaaaggcgaggccgcttttgcattcattgtggtgaaggattccgcgggtgatagtgatgtggtagtgcaggaactgaaaagtatggtggcgactaaaatcgctaaatacgctgtacccgatgagatccttgtggtgaaaaggctgcctaagacacgttccgggaaggtaatgcgacgcctattgcgcaagattatcacaagtgaggcacaggaactcggggataccacaactctagaagatccttctatcattgccgagatactttcagtctatcaaaaatgtaaggacaaacaagccgctgccaaatag

SEQ ID NO: 88578 - DNA, 1821 bp, Artificial Sequence
  derived and/or modified sequence
atgctgaagaccttcctgttcctggagaagtacttcccctgcatcaagtacagcagcgcctgcttccccggcaccggcctggacgtgtacgacatcaagttcgccgtgctgctgcacccccagaccgccctgcacttcggccccccccccagcctgatggccttcagcagcctgtgctgcagagagctgctggagaccacctgcagactggccaacaccctgaagagacacggcgtgcacagaggcgacagagtggccatctacatgcccgtgagccccctggccgtggccgccatgctggcctgcgccagaatcggcgccgtgcacaccgtgatcttcgccggcttcagcgccgagagcctggccggcagaatcaacgacgccaagtgcaaggtggtgatcaccttcaaccagggcctgagaggcggcagagtggtggagctgaagaagatcgtggacgaggccgtgaagcactgccccaccgtgcagcacgtgctggtggcccacagaaccgacaacaaggtgcacatgggcgacctggacgtgcccctggagcaggagatggccaaggaggaccccgtgtgcgcccccgagagcatgggcagcgaggacatgctgttcatgctgtacaccagcggcagcaccggcatgcccaagggcatcgtgcacacccaggccggctacctgctgtacgccgccctgacccacaagctggtgttcgaccaccagcccggcgacatcttcggctgcgtggccgacatcggctggatcaccggccacagctacgtggtgtacggccccctgtgcaacggcgccaccagcgtgctgttcgagagcacccccgtgtaccccaacgccggcagatactgggagaccgtggagagactgaagatcaaccagttctacggcgcccccaccgccgtgagactgctgctgaagtacggcgacgcctgggtgaagaagtacgacagaagcagcctgagaaccctgggcagcgtgggcgagcccatcaactgcgaggcctgggagtggctgcacagagtggtgggcgacagcagatgcaccctggtggacacctggtggcagaccgagaccggcggcatctgcatcgcccccagacccagcgaggagggcgccgagatcctgcccgccatggccatgagacccttcttcggcatcgtgcccgtgctgatggacgagaagggcagcgtggtggagggcagcaacgtgagcggcgccctgtgcatcagccaggcctggcccggcatggccagaaccatctacggcgaccaccagagattcgtggacgcctacttcaaggcctaccccggctactacttcaccggcgacggcgcctacagaaccgagggcggctactaccagatcaccggcagaatggacgacgtgatcaacatcagcggccacagactgggcaccgccgagatcgaggacgccatcgccgaccaccccgccgtgcccgagagcgccgtgatcggctacccccacgacatcaagggcgaggccgccttcgccttcatcgtggtgaaggacagcgccggcgacagcgacgtggtggtgcaggagctgaagagcatggtggccaccaagatcgccaagtacgccgtgcccgacgagatcctggtggtgaagagactgcccaagaccagaagcggcaaggtgatgagaagactgctgagaaagatcatcaccagcgaggcccaggagctgggcgacaccaccaccctggaggaccccagcatcatcgccgagatcctgagcgtgtaccagaagtgcaaggacaagcaggccgccgccaagtag

SEQ ID NO: 88579 - DNA, 1707 bp, Artificial Sequence
  derived and/or modified sequence
atgagaagaagaaaggagagacagccctgggacagattccacttcctgcacttcgccccccacggcagagagctgctggagaccacctgcagactggccaacaccctgaagagacacggcgtgcacagaggcgacagagtggccatctacatgcccgtgagccccctggccgtggccgccatgctggcctgcgccagaatcggcgccgtgcacaccgtgatcttcgccggcttcagcgccgagagcctggccggcagaatcaacgacgccaagtgcaaggtggtgatcaccttcaaccagggcctgagaggcggcagagtggtggagctgaagaagatcgtggacgaggccgtgaagcactgccccaccgtgcagcacgtgctggtggcccacagaaccgacaacaaggtgcacatgggcgacctggacgtgcccctggagcaggagatggccaaggaggaccccgtgtgcgcccccgagagcatgggcagcgaggacatgctgttcatgctgtacaccagcggcagcaccggcatgcccaagggcatcgtgcacacccaggccggctacctgctgtacgccgccctgacccacaagctggtgttcgaccaccagcccggcgacatcttcggctgcgtggccgacatcggctggatcaccggccacagctacgtggtgtacggccccctgtgcaacggcgccaccagcgtgctgttcgagagcacccccgtgtaccccaacgccggcagatactgggagaccgtggagagactgaagatcaaccagttctacggcgcccccaccgccgtgagactgctgctgaagtacggcgacgcctgggtgaagaagtacgacagaagcagcctgagaaccctgggcagcgtgggcgagcccatcaactgcgaggcctgggagtggctgcacagagtggtgggcgacagcagatgcaccctggtggacacctggtggcagaccgagaccggcggcatctgcatcgcccccagacccagcgaggagggcgccgagatcctgcccgccatggccatgagacccttcttcggcatcgtgcccgtgctgatggacgagaagggcagcgtggtggagggcagcaacgtgagcggcgccctgtgcatcagccaggcctggcccggcatggccagaaccatctacggcgaccaccagagattcgtggacgcctacttcaaggcctaccccggctactacttcaccggcgacggcgcctacagaaccgagggcggctactaccagatcaccggcagaatggacgacgtgatcaacatcagcggccacagactgggcaccgccgagatcgaggacgccatcgccgaccaccccgccgtgcccgagagcgccgtgatcggctacccccacgacatcaagggcgaggccgccttcgccttcatcgtggtgaaggacagcgccggcgacagcgacgtggtggtgcaggagctgaagagcatggtggccaccaagatcgccaagtacgccgtgcccgacgagatcctggtggtgaagagactgcccaagaccagaagcggcaaggtgatgagaagactgctgagaaagatcatcaccagcgaggcccaggagctgggcgacaccaccaccctggaggaccccagcatcatcgccgagatcctgagcgtgtaccagaagtgcaaggacaagcaggccgccgccaagtag

SEQ ID NO: 88580 - DNA, 4877 bp, Artificial Sequence
  derived and/or modified sequence
agctatgcaaacacgctgcgagcggccttgagagcccgaggagggtctgctttctgggcccctgcagagggcaggggtcgcgggctggtggtctgccccgcccagagagaaagggccttggcttcccctcattcttcgttctgtgttagctctttttattgcaaataattaattaaagtcagtacagcaagagtgggaaagtggttaatgcaattgccaggtccagattcagagggatgaggcgccgaaaggaaagacaaccttgggatcgcttccacttcctccacttcgcaccgcatggccggcaagttggcggctctcgcctgctcccagttttcccggagttgagtatggttgactctgactggaccaggttgggtcacgtgtcggccctgagccaatcagcttgcccagagagatgatgcgccctgagtggtgggtgaacctggtgataggccccagagtggccagagaggaagggcatgcgcacaccatagacataggcaacgtggtggacgacatgggggctgggcgggggtgctgctcacccaccttgtgcccagtgctttcccttccccttgtccatggtcccctagcttggggagaaagcagggtgcttgctctacccgccagtgctgtctcggggctgcagggagttgtggctgccctgcttgcggtcttcactcccaactcactgtggctttgcagagctggagtccgccctatctgggcttgggggtctgctccctgagagcattatttggtgcccctcgactgtgttgattcagaaatctgggacctgttgtttctcgactaaatgtcttatgagatcagtctttcttttggaggcaaacattttcggaagttttggaaccatgatgatctatgcctcagacacttgtggtccctgagaagctgctgctggaaaaaggggtccccatccggatcccaggagagggttcttggatcatgccgggaaggaatccaaggcgagtggcagagcgcagtgaaaagagatagtttattgaaagcttctcagttacatagtagggcatcctcagcaagaggaggaatgcctctgttttgtttctttcttatataggggtcttatctatgtaaaagctaagctatgtctccctgcgggtaggctgacgaagtgacatttattactttgttgattgaaagaaagctatccttggcattttagtgcataagtacatcaaagcatgcctataatcatcttaaaagcatatattatgcaatattggggcatctggacattctgttgttgcaagagtttgtctttgcaggtattaagctacttcgtcagctgtaaacatcttatgactgtgggtcatgactggcaaggaatgtgccttgctagttttaagatggaattgattctaaaatggtgtcaccatggctcccctacgctcctgttcccctaaaaaaaccctgccgtaagcggacttaaggatagccttgtcaccctagcaatgtggcagtgaatctctgccaatagcaatctacaaatgttaaaaacttttctttttctggaaaagtactttccatgcattaagtattcaagtgcctgttttcctggcactgggctggatgtatatgacataaaatttgcagtattgctccacccccaaactgctctgcattttggccctcctccatctctgatggctttctcttccctgtgctgcagggaactactggagaccacgtgccgcctggccaacacgctgaagaggcatggagtccaccgtggggaccgtgttgccatctacatgcccgtgtccccattggctgtggcagcaatgctggcctgtgccaggatcggagctgtccacacagtcatctttgctggcttcagtgcagagtccttggctgggaggatcaatgatgccaagtgcaaggtggttatcaccttcaaccaaggactccggggtgggcgcgtggtggagctgaagaaaatagtggatgaggctgtgaagcactgccccaccgtgcagcatgtcctggtggctcacaggacagacaacaaggtccacatgggggatctggacgtcccgctggagcaggaaatggccaaggaggaccctgtttgcgccccagagagcatgggcagtgaggacatgctcttcatgctgtacacctcagggagcaccggaatgcccaagggcatcgtccatacccaggcaggctacctgctctatgccgccctgactcacaagcttgtgtttgaccaccagccaggtgacatctttggctgtgtggccgacatcggttggattacaggacacagctacgtggtgtatgggcctctctgcaatggtgccaccagcgtcctttttgagagcaccccagtttatcccaatgctggtcggtactgggagacagtagagaggttgaagatcaatcagttctatggcgccccaacggctgtccggctgttgctgaaatacggtgatgcctgggtgaagaagtatgatcgctcctccctgcggaccctggggtcagtgggagagcccatcaactgtgaggcctgggagtggcttcacagggtggtgggggacagcaggtgcacgctggtggacacctggtggcagacagaaacaggtggcatctgcatcgcaccacggccctcggaagaaggggcggaaatcctccctgccatggcgatgaggcccttctttggcatcgtccccgtcctcatggatgagaagggcagcgtcgtggagggcagcaacgtctccggggccctgtgcatctcccaggcctggccgggcatggccaggaccatctatggcgaccaccagcgatttgtggacgcctacttcaaggcctacccaggctattacttcactggagacggggcttaccgaactgagggcggctattaccagatcacagggcggatggatgatgtcatcaacatcagtggccaccggctggggaccgcagagattgaggacgccatcgccgaccaccctgcagtaccagaaagtgctgtcattggctacccccacgacatcaaaggagaagctgcctttgccttcattgtggtgaaagatagtgcgggtgactcagatgtggtggtgcaggagctcaagtccatggtggccaccaagatcgccaaatatgctgtgcctgatgagatcctggtggtgaaacgtcttccaaaaaccaggtctgggaaggtcatgcggcggctcctgaggaagatcatcactagtgaggcccaggagctgggagacactaccaccttggaggaccccagcatcatcgcagagatcctgagtgtctaccagaagtgcaaggacaagcaggctgctgctaagtgagctggcaccttgtggggctcttgggatgggcgggcacccaagccctggcttgtccttcccagaaggtacccctgaggttggcgtcttcctacgtcccagaagcagcccccaccccacacatgacccacaccgccctcacgtgaagctgggctgagagccctttctcccatccattggaggtcccaggagtgtcacccatggagaggctatgcgacatggctagggctggttctgccatctgagtttggtttcctggaatgaaaaggcattgccatctccattcctctgccctcttgagccagcacaggaaggtgaggccctgggatagcgcgcctgctcagataacacagagctagttagctagtagcaaccgtgttttctccagatctgtctagatacaaaggtcagaaatcttatttttatacttttatattgtggaagaacagcatgcaacactcacatgtagtgtgtggatttacttgaacatgttctttttaacatgtagttatgaaaatctccttttttgcctctactggtgaggaaacatgaggatcagaggccacatttttaattattgttagtgtatttggaagtctgaattggagatgtttgtacctctgtctaaacagttcccttgagaacttccaagcctccggcatcttttcctggtgagtgtttctcctgtgcttggttgtgtataatggagctaactcctaagcggtggggtgaatgtggccgccttagttctgaagctactccagttatgttctgtttcttcaagctgtgatccagaaagatttttgtgcccccagatgcctcttgataggagaggcaacatactccaaatagttgggttcttcagggaagctattagaaactcaggtgacttgttagagcactaacttggtcagagccaaatcctggcaaacgctgcctgaccttcactctgtggttggggcggtgagaaccactgaggtccaatgatgagacttggaggtctggatccagtctctctttgttttaatgtgacttaggtgctgtcaacattagcaagataatggaaatcacgacgccagtgggtgcttacctccctgctaggcatgcaggggctggcggttggcaggggaaggaggcccagtgagccgggtcccttaggggagggagagtttgtcctctttgccccacagtctacccttcagggccttgtggcagtgccagtgttcggggggtgtctgggccactgagtacccactcggtcgtggttgtgctggcctcttgggtgagtgaacctgtgaagcccaggaggtggtgttggctgcagggtacacaaatactgagtggtggtcttttgttacaggcttagcaacaaagctgtgccctgggcatggggggctgtagtgtagctacagttgtgcgtttgtgaaatggcttagctttccatgttgctgagaggaacctggacatggtcccgggcatctgaatgatctgtaggggagggagttcaaataaagctttattttgttc

SEQ ID NO: 88581 - DNA, 2228 bp, Artificial Sequence
  derived and/or modified sequence
cctttccttgactaccctttgaacagaggagagctatgcaaacacgctgcgagcggccttgagagcccgaggagggtctgctttctgggcccctgcagagggcaggggtcgcgggctggtggtctgccccgcccagagagaaagggccttggcttcccctcattcttcgttctgtgttagctctttttattgcaaataattaattaaagtcagtacagcaagagtgggaaagtggttaatgcaattgccaggtccagattcagagggatgaggcgccgaaaggaaagacaaccttgggatcgcttccacttcctccacttcgcaccgcatggccgggaactactggagaccacgtgccgcctggccaacacgctgaagaggcatggagtccaccgtggggaccgtgttgccatctacatgcccgtgtccccattggctgtggcagcaatgctggcctgtgccaggatcggagctgtccacacagtcatctttgctggcttcagtgcagagtccttggctgggaggatcaatgatgccaagtgcaaggtggttatcaccttcaaccaaggactccggggtgggcgcgtggtggagctgaagaaaatagtggatgaggctgtgaagcactgccccaccgtgcagcatgtcctggtggctcacaggacagacaacaaggtccacatgggggatctggacgtcccgctggagcaggaaatggccaaggaggaccctgtttgcgccccagagagcatgggcagtgaggacatgctcttcatgctgtacacctcagggagcaccggaatgcccaagggcatcgtccatacccaggcaggctacctgctctatgccgccctgactcacaagcttgtgtttgaccaccagccaggtgacatctttggctgtgtggccgacatcggttggattacaggacacagctacgtggtgtatgggcctctctgcaatggtgccaccagcgtcctttttgagagcaccccagtttatcccaatgctggtcggtactgggagacagtagagaggttgaagatcaatcagttctatggcgccccaacggctgtccggctgttgctgaaatacggtgatgcctgggtgaagaagtatgatcgctcctccctgcggaccctggggtcagtgggagagcccatcaactgtgaggcctgggagtggcttcacagggtggtgggggacagcaggtgcacgctggtggacacctggtggcagacagaaacaggtggcatctgcatcgcaccacggccctcggaagaaggggcggaaatcctccctgccatggcgatgaggcccttctttggcatcgtccccgtcctcatggatgagaagggcagcgtcgtggagggcagcaacgtctccggggccctgtgcatctcccaggcctggccgggcatggccaggaccatctatggcgaccaccagcgatttgtggacgcctacttcaaggcctacccaggctattacttcactggagacggggcttaccgaactgagggcggctattaccagatcacagggcggatggatgatgtcatcaacatcagtggccaccggctggggaccgcagagattgaggacgccatcgccgaccaccctgcagtaccagaaagtgctgtcattggctacccccacgacatcaaaggagaagctgcctttgccttcattgtggtgaaagatagtgcgggtgactcagatgtggtggtgcaggagctcaagtccatggtggccaccaagatcgccaaatatgctgtgcctgatgagatcctggtggtgaaacgtcttccaaaaaccaggtctgggaaggtcatgcggcggctcctgaggaagatcatcactagtgaggcccaggagctgggagacactaccaccttggaggaccccagcatcatcgcagagatcctgagtgtctaccagaagtgcaaggacaagcaggctgctgctaagtgagctggcaccttgtggggctcttgggatgggcgggcacccaagccctggcttgtccttcccagaaggtacccctgaggttggcgtcttcctacgtcccagaagcagcccccaccccacacatgacccacaccgccctcacgtgaagctgggctgagagccctttctcccatccattggaggtcccaggagtgtcacccatggagaggctatgcgacatggctagggctggttctgccatctgagtttggtttcct

SEQ ID NO: 88582 - protein, 575 aa, Artificial Sequence
  derived and/or modified sequence
MAARTLGRGVGRLLGSLRGLSGQPARPPCGVSAPRRAASGPSGSAPAVAAAAAQPGSYPALSAQAAREPAAFWGPLARDTLVWDTPYHTVWDCDFSTGKIGWFLGGQLNVSVNCLDQHVRKSPESVALIWERDEPGTEVRITYRELLETTCRLANTLKRHGVHRGDRVAIYMPVSPLAVAAMLACARIGAVHTVIFAGFSAESLAGRINDAKCKVVITFNQGLRGGRVVELKKIVDEAVKHCPTVQHVLVAHRTDNKVHMGDLDVPLEQEMAKEDPVCAPESMGSEDMLFMLYTSGSTGMPKGIVHTQAGYLLYAALTHKLVFDHQPGDIFGCVADIGWITGHSYVVYGPLCNGATSVLFESTPVYPNAGRYWETVERLKINQFYGAPTAVRLLLKYGDAWVKKYDRSSLRTLGSVGEPINCEAWEWLHRVVGDSRCTLVDTWWQTETGGICIAPRPSEEGAEILPAMAMRPFFGIVPVLMDEKGSVVEGSNVSGALCISQAWPGMARTIYGDHQRFVDAYFKAYPGYYFTGDGAYRTEGGYYQITGRMDDVINILQIVGFFREAIRNSGDLLEH

SEQ ID NO: 88583 - DNA, 1728 bp, Artificial Sequence
  derived and/or modified sequence
atggccgcgagaaccctgggcaggggcgtggggcggctcctggggtctttacgcggtctgagcgggcagcccgcccgccctccttgcggggtttctgcaccccggagagcggcctcagggccaagcgggtctgccccagccgtcgctgcggcagctgcccaaccagggtcatatccggccctgagtgcccaggctgcgcgcgagcctgccgccttctgggggcccctggcgcgggacacactggtctgggacaccccctaccacactgtgtgggattgtgattttagtaccggaaagataggctggttcctggggggccagctcaatgtgtcagtgaactgcctggatcagcatgtgagaaagagtcccgagagtgtggccctgatctgggagcgggatgagcctggtacagaggtgaggattacctaccgggaattacttgagaccacctgccggctcgcaaacaccctgaaacgccacggagtgcatcggggtgacagggtggcaatatatatgcccgtgtcccctctggcagtagctgccatgctggcctgtgcacgtattggggccgtccacacggtgatcttcgctggatttagtgccgagtctttggccgggagaataaacgatgcaaaatgcaaagtagtcatcaccttcaaccagggcctgcgcgggggcagagtggtagagctgaagaaaatagtggatgaagctgttaaacattgtccaaccgtccaacacgtccttgtggcacaccggaccgataacaaggtgcatatgggagacctggacgtgcccctggagcaggaaatggcaaaggaggaccctgtttgtgcgcctgagagtatgggctcagaggacatgttatttatgctgtataccagcgggtccacagggatgcccaagggcattgtgcacacacaggccgggtatctcttatacgcagcgctgactcataagctggtgttcgaccatcagcctggggacatttttggatgtgttgcagacattggatggattacgggtcactcatatgttgtgtacggaccactgtgcaacggggcaaccagcgtgctctttgagtcaactccagtttatcccaatgccggaagatattgggagactgttgaaaggctgaaaatcaatcagttttacggcgcacctaccgccgtacggctgctgctgaagtatggtgacgcctgggtcaagaaatacgaccgcagtagtcttaggacattgggatcagttggcgagccaattaactgtgaagcatgggagtggctccacagagtcgtaggggatagtcgctgcaccctcgtggacacctggtggcaaaccgaaactggcgggatctgcatcgcgcctcgaccctctgaggagggtgctgaaattttgccagctatggctatgcggcccttttttggcatcgttccagtgctgatggatgaaaaagggtcagtggtggaaggaagcaacgttagcggcgctctatgtattagtcaagcatggcccggcatggcccgaaccatctatggcgaccatcaacgctttgttgatgcttacttcaaagcctacccggggtattactttacaggtgatggcgcctaccggacagagggtgggtattatcagattacagggcgcatggacgatgtcataaatattctgcaaatagttggattctttagggaggccattcgtaacagcggagatctgctggagcactag

SEQ ID NO: 88584 - DNA, 1728 bp, Artificial Sequence
  derived and/or modified sequence
atggccgcccggaccctgggccggggcgtgggccgcctgctgggcagcctgcggggcctgagcggccagcctgcccggcccccctgtggggtgtctgcccccaggagagctgccagcggccccagcggcagcgccccagctgtggccgctgctgctgcccagcccggcagctacccagccctgagcgcccaggccgcccgggagcctgctgccttctggggccccctggcccgggacaccctggtgtgggacaccccctaccacacagtgtgggactgtgacttcagcacaggcaagattggctggttcctgggcggccagctgaatgtgtctgtgaactgcctggaccagcacgtgaggaagagccctgagagcgtggccctgatctgggagagagatgagcctggaacagaggtgcgcatcacctaccgggagctgctggagaccacctgccgcctggccaacaccctgaagagacatggagtgcacagaggagacagagtggccatctacatgcctgtgagccccctggccgtggccgccatgctggcctgtgcccgcatcggggctgtgcacacagtcatctttgctggcttctctgctgagagcctggccggccgcatcaatgatgccaagtgcaaggtggtgatcaccttcaaccagggcctgcggggcggccgggtggtggagctgaagaagatcgtggatgaggccgtgaagcactgccccaccgtgcagcacgtgctggtggcccacaggacagacaacaaggtgcacatgggagacctggatgtgcccctggagcaggagatggccaaggaggaccctgtgtgtgcccctgagagcatgggcagcgaggacatgctgttcatgctgtacaccagcggcagcacaggcatgcccaagggcatcgtgcacacccaggccggctacctgctgtatgctgccctgacccacaagctggtgtttgaccaccagcccggggacatcttcggctgtgtggccgacatcggctggatcaccggccacagctatgtggtgtatggccccctgtgcaatggagccacctctgtgctgtttgagagcacccctgtgtacccaaatgccggccgctactgggagaccgtggagcggctgaagatcaaccagttctatggagcccccacagctgtgcggctgctgctgaagtatggagatgcctgggtgaagaagtatgacaggagcagcctgcggaccctgggctctgtgggggagcccatcaactgtgaggcctgggagtggctgcaccgggtggtgggggacagccgctgcaccctggtggacacctggtggcagacagagaccggcggcatctgcatcgccccccggcccagcgaggagggcgctgagatcctgcctgccatggccatgaggcccttcttcggcatcgtgcctgtgctgatggatgagaagggctctgtggtggagggcagcaatgtgtctggggccctgtgcatcagccaggcctggccaggcatggcccggaccatctatggagaccaccagagatttgtggatgcctacttcaaggcctacccaggctactacttcaccggagatggagcctacagaacagagggcggctactaccagatcaccggccgcatggatgatgtgatcaacatcctgcagatcgtgggcttcttccgggaggccatcagaaattctggggacctgctggagcactag

SEQ ID NO: 88585 - DNA, 1728 bp, Artificial Sequence
  derived and/or modified sequence
atggccgcccggaccctgggccggggcgtgggccggctgctgggctccctgcgaggtcttagtggtcagccagctcgcccgccttgtggcgtcagcgcacctagacgggccgcaagcggccccagcggctccgctccagcagttgccgctgccgcagcacaacccggaagctaccccgctctgagcgcccaggctgcccgggagccagcagccttttggggcccactggccagagatactttagtgtgggacacaccttatcacacagtttgggactgcgatttctcaacaggtaagattgggtggttcttgggcgggcaactaaacgtcagcgtcaactgtttggatcagcacgtccgaaaatccccagagtctgtagcactgatatgggaaagggatgagcccggtaccgaagtcagaattacatacagagagctcctggagaccacctgccggctggcgaatacattaaaaagacatggggttcataggggcgatagggtggctatctacatgccagtctcccctctggcagtggctgccatgctggcttgcgctaggatcggcgccgttcataccgtgatatttgccggcttttctgcggagagcttggccggtcgcatcaacgacgccaaatgtaaggtggtcatcaccttcaaccagggcctgagggggggcagggtggtcgagctgaaaaagatcgtcgatgaagcagtgaaacactgccctacagtccaacatgtccttgtggctcaccggaccgacaacaaggtgcatatgggtgacctagatgtacctcttgaacaggagatggcaaaagaggacccagtgtgcgcacccgagtctatgggaagtgaggatatgctgtttatgctatatacaagcgggtcaacagggatgcctaaggggattgtccacacacaggccggataccttctctatgctgccttaacccataagttggtgttcgatcaccagccaggcgatattttcggctgcgtagcggacataggctggatcacaggccattcttacgtggtatatgggcctctatgcaacggtgctaccagcgtcttgtttgaaagcacccccgtctatcccaatgctggaagatattgggaaacggttgagcgccttaagattaatcaattctatggggctcctacagcagtcaggcttctccttaaatacggcgatgcttgggtgaaaaaatatgatcgcagctcgctgcgtaccctggggagtgtgggtgaacctatcaactgcgaggcctgggagtggctgcacagggtggtgggcgacagtagatgtaccctggtagatacgtggtggcagaccgaaacgggaggcatctgtatcgcaccaaggccttccgaggagggcgcagagattctgcctgccatggccatgaggccgttctttggcattgtgcccgttcttatggatgagaagggctcagttgtcgaaggaagtaacgtctccggagccctgtgtatctcacaggcctggccgggaatggctcgtacaatttacggtgatcaccagcgttttgtcgatgcctactttaaggcttaccctggttactattttaccggagatggggcctaccgtaccgaaggcgggtactaccagattaccggcaggatggacgacgtgataaatatacttcagatcgtgggcttctttcgggaagcaatccggaatagtggagacctcctcgagcattag

SEQ ID NO: 88586 - DNA, 1728 bp, Artificial Sequence
  derived and/or modified sequence
atggcggctaggactctcgggcgtggagtggggcgactgctgggcagcctgaggggcctgagcggacagccggcaagacccccatgcggggtctctgcccctcgtcgggctgcgtcaggcccatcagggtcggccccagccgttgcggcagcagcagcccaacctggctcttatcctgctcttagcgcgcaggcagccagagaacccgctgctttctggggccctcttgcgagggatactctagtctgggacactccttatcataccgtctgggactgtgacttcagcaccggtaagattgggtggtttcttggtggacagctgaatgtcagcgtgaattgtctggatcaacacgtgcggaagtcccccgagtccgtggctcttatctgggagagagacgaacccggtacagaggtgcgtatcacttaccgagaactgcttgagacaacctgcagactggcaaacaccctgaaaagacacggagtgcaccgaggagacagagttgccatctatatgccagtgagtcctcttgctgtagccgcaatgctggcttgcgcccgaatcggcgctgttcatactgtcatttttgcgggattctcggctgagtcactcgcgggaagaattaatgacgcaaaatgcaaggttgtgatcacctttaaccagggactgagggggggtagggtcgttgagctcaaaaaaatcgtcgacgaggccgtcaagcattgcccgaccgtgcagcacgttctggtggcacaccgtaccgacaacaaagtgcatatgggggacctggatgttcctctcgagcaggaaatggccaaggaagacccagtctgtgcacctgagtccatggggagcgaggatatgttgttcatgttatacacctccggctccaccggtatgcccaagggcattgttcacactcaggccggatacctcctgtacgccgcacttacccacaagttggtgttcgaccaccaaccaggcgatatcttcggctgtgtagccgatatcggctggattaccgggcacagctatgtggtgtatgggcctttgtgcaacggagccacaagcgtgttatttgagtcaacccccgtctatccgaatgctggcaggtattgggagacagtcgagcggctgaaaattaatcaattctatggcgctcctaccgcggtgagactgctgctcaaatacggtgacgcgtgggtcaagaagtacgaccgtagtagcttgcgaaccctcggatccgtgggagaacctattaattgtgaagcctgggaatggttgcatagggtcgtaggcgacagtcggtgtacactcgtggatacctggtggcaaacagaaaccggtggaatttgcatcgctcctcggccatcagaggagggggctgagatcctccctgctatggctatgcggccatttttcggaatcgtaccggtgctcatggacgagaaggggagtgtggtcgaggggagcaacgtctcaggggcactttgtatttctcaagcgtggccaggcatggctcggactatttatggagatcaccaacggtttgttgacgcatattttaaggcctatcccggatactacttcactggcgacggcgcataccgcacagaaggagggtactaccagataacagggagaatggacgatgtgattaacatcctccagattgtgggatttttccgagaggccattagaaattcaggcgatctcctagagcattag

SEQ ID NO: 88587 - DNA, 1728 bp, Artificial Sequence
  derived and/or modified sequence
atggccgccagaaccctgggcagaggcgtgggcagactgctgggcagcctgagaggcctgagcggccagcccgccagacccccctgcggcgtgagcgcccccagaagagccgccagcggccccagcggcagcgcccccgccgtggccgccgccgccgcccagcccggcagctaccccgccctgagcgcccaggccgccagagagcccgccgccttctggggccccctggccagagacaccctggtgtgggacaccccctaccacaccgtgtgggactgcgacttcagcaccggcaagatcggctggttcctgggcggccagctgaacgtgagcgtgaactgcctggaccagcacgtgagaaagagccccgagagcgtggccctgatctgggagagagacgagcccggcaccgaggtgagaatcacctacagagagctgctggagaccacctgcagactggccaacaccctgaagagacacggcgtgcacagaggcgacagagtggccatctacatgcccgtgagccccctggccgtggccgccatgctggcctgcgccagaatcggcgccgtgcacaccgtgatcttcgccggcttcagcgccgagagcctggccggcagaatcaacgacgccaagtgcaaggtggtgatcaccttcaaccagggcctgagaggcggcagagtggtggagctgaagaagatcgtggacgaggccgtgaagcactgccccaccgtgcagcacgtgctggtggcccacagaaccgacaacaaggtgcacatgggcgacctggacgtgcccctggagcaggagatggccaaggaggaccccgtgtgcgcccccgagagcatgggcagcgaggacatgctgttcatgctgtacaccagcggcagcaccggcatgcccaagggcatcgtgcacacccaggccggctacctgctgtacgccgccctgacccacaagctggtgttcgaccaccagcccggcgacatcttcggctgcgtggccgacatcggctggatcaccggccacagctacgtggtgtacggccccctgtgcaacggcgccaccagcgtgctgttcgagagcacccccgtgtaccccaacgccggcagatactgggagaccgtggagagactgaagatcaaccagttctacggcgcccccaccgccgtgagactgctgctgaagtacggcgacgcctgggtgaagaagtacgacagaagcagcctgagaaccctgggcagcgtgggcgagcccatcaactgcgaggcctgggagtggctgcacagagtggtgggcgacagcagatgcaccctggtggacacctggtggcagaccgagaccggcggcatctgcatcgcccccagacccagcgaggagggcgccgagatcctgcccgccatggccatgagacccttcttcggcatcgtgcccgtgctgatggacgagaagggcagcgtggtggagggcagcaacgtgagcggcgccctgtgcatcagccaggcctggcccggcatggccagaaccatctacggcgaccaccagagattcgtggacgcctacttcaaggcctaccccggctactacttcaccggcgacggcgcctacagaaccgagggcggctactaccagatcaccggcagaatggacgacgtgatcaacatcctgcagatcgtgggcttcttcagagaggccatcagaaacagcggcgacctgctggagcactag

SEQ ID NO: 88588 - DNA, 2606 bp, Artificial Sequence
  derived and/or modified sequence
aaaaggaaaacgaggcaccgagaagttaaggaacttgctcaaggtcacagagtttgaactcaggctacagatgctgcagcaactggagaaagtcctcatcgccccatatcacccaccaccgacccccagcaggacgtgacccccgccaggacggaggccggcagctggggggctggagcatgggacccagaacacggactcaggcttgcgcagcctcctggcttctaggcgggagcctagaaaggcgccagcccctttcgcgtgctgctgagactccaggggtggggttcactctcaggggcgcacaaaggcatgaaaaccttggcttcagcctctgagatgcggaactgaccgacctattgtcttgggacccaccagtgcgcttgggtgcaccagcccccttaacgttggtgccggctccctcccggctcctccccatcccagagggtcccctcgccccaggccctgagcctgcgtcctggggtcctgggccgcacgtgcctctggcagctcgaagaagctgtcggggcttgcaggagagcgtgcaaactgaaaccaaaacaggccgactcgaggaacatccgggtgggaccgcagactcaccggagcgcagcgcctgggccagggcctgggaccctgctccgccccgcgctcccctgcaccccttccccacgctgctcccctcttcctaagcggccccccctctcccgggcagcagaagaaggggtgggacccgggcgggctccgggagggggccctggaggaatggatggtggcggaagggcggagcaggggcggggcccgcggagactccacggggcgccccgggcgtgaggcacccactctgggagcacagagagctcaggtagcctgcctagatggcggcgcgcaccctgggccgcggcgtcgggaggctgctgggcagcctgcgagggctctcggggcagcccgcgcggccgccgtgcggggtgagcgcgccgcgcagggcggcctcgggaccctcgggcagcgctcccgcagttgcagcagcagcagcacagccaggctcgtatcccgcgctgagtgcacaggcagcccgggagccggccgccttctgggggcctctggcgcgggacactctcgtgtgggacaccccctaccacaccgtctgggactgcgacttcagcactggcaagatcggctggttcctgggaggccagttaaatgtctctgtcaactgcttggaccagcatgttcggaagtcccccgagagcgttgctttgatctgggagcgcgatgagcctggaacggaagtgaggatcacctacagggaactactggagaccacgtgccgcctggccaacacgctgaagaggcatggagtccaccgtggggaccgtgttgccatctacatgcccgtgtccccattggctgtggcagcaatgctggcctgtgccaggatcggagctgtccacacagtcatctttgctggcttcagtgcagagtccttggctgggaggatcaatgatgccaagtgcaaggtggttatcaccttcaaccaaggactccggggtgggcgcgtggtggagctgaagaaaatagtggatgaggctgtgaagcactgccccaccgtgcagcatgtcctggtggctcacaggacagacaacaaggtccacatgggggatctggacgtcccgctggagcaggaaatggccaaggaggaccctgtttgcgccccagagagcatgggcagtgaggacatgctcttcatgctgtacacctcagggagcaccggaatgcccaagggcatcgtccatacccaggcaggctacctgctctatgccgccctgactcacaagcttgtgtttgaccaccagccaggtgacatctttggctgtgtggccgacatcggttggattacaggacacagctacgtggtgtatgggcctctctgcaatggtgccaccagcgtcctttttgagagcaccccagtttatcccaatgctggtcggtactgggagacagtagagaggttgaagatcaatcagttctatggcgccccaacggctgtccggctgttgctgaaatacggtgatgcctgggtgaagaagtatgatcgctcctccctgcggaccctggggtcagtgggagagcccatcaactgtgaggcctgggagtggcttcacagggtggtgggggacagcaggtgcacgctggtggacacctggtggcagacagaaacaggtggcatctgcatcgcaccacggccctcggaagaaggggcggaaatcctccctgccatggcgatgaggcccttctttggcatcgtccccgtcctcatggatgagaagggcagcgtcgtggagggcagcaacgtctccggggccctgtgcatctcccaggcctggccgggcatggccaggaccatctatggcgaccaccagcgatttgtggacgcctacttcaaggcctacccaggctattacttcactggagacggggcttaccgaactgagggcggctattaccagatcacagggcggatggatgatgtcatcaacatactccaaatagttgggttcttcagggaagctattagaaactcaggtgacttgttagagcactaa

SEQ ID NO: 88589 - protein, 59 aa, Artificial Sequence
  derived and/or modified sequence
MGAYKYIQELWRKKQSDVMRFLLRVRCWQYRQLSALHRAPRPTRPDKARRLGYKAKQGT

SEQ ID NO: 88590 - protein, 145 aa, Artificial Sequence
  derived and/or modified sequence
MGAYKYIQELWRKKQSDVMRFLLRVRCWQYRQLSALHRAPRPTRPDKARRLGYKAKQGYVIYRIRVRRGGRKRPVPKGATYGKPVHHGVNQLKFARSLQSVAEERAGRHCGALRVLNSYWMESHSHSGGSAVGQSRLTATSVSRV

SEQ ID NO: 88591 - DNA, 180 bp, Artificial Sequence
  derived and/or modified sequence
atgggagcttacaagtatatccaggagctgtggagaaaaaagcaaagtgatgtcatgcggtttttactgcgagtccgttgctggcaataccgtcagttatcggcgcttcacagagcacctaggcccacaagacccgataaagccagaaggctgggttataaggctaaacagggcacctag

SEQ ID NO: 88592 - DNA, 438 bp, Artificial Sequence
  derived and/or modified sequence
atgggcgcctacaaatacattcaggaactgtggaggaaaaagcagagtgacgtgatgcggtttctgctgcgcgttcgctgctggcagtatagacaactgagcgccctgcaccgcgctccacggcctacaaggcctgataaggccagacgcctgggttataaggcgaaacaagggtacgttatctaccgtatccgagtgaggagaggtgggcgtaaaagacccgtgcccaaaggagctacatacggtaagcctgtgcatcacggtgtcaatcagttgaaatttgctaggtctctacagagcgtggctgaagaacgcgctggaagacactgcggggcccttcgggtgctcaattcctattggatggaatcccatagtcacagcgggggatctgccgttggacagagcagactcaccgccacttccgtctcacgggtctag

SEQ ID NO: 88593 - DNA, 180 bp, Artificial Sequence
  derived and/or modified sequence
atgggcgcctacaagtacatccaggagctgtggaggaagaagcagagtgatgtgatgaggttcctgctgcgggtgcgctgctggcagtaccggcagctgagcgccctgcaccgggccccccggcccaccaggccagacaaggcccggcggctgggctacaaggccaagcagggcacctag

SEQ ID NO: 88594 - DNA, 438 bp, Artificial Sequence
  derived and/or modified sequence
atgggcgcctacaagtacatccaggagctgtggaggaagaagcagagtgatgtgatgaggttcctgctgcgggtgcgctgctggcagtaccggcagctgagcgccctgcaccgggccccccggcccaccaggccagacaaggcccggcggctgggctacaaggccaagcagggctacgtgatctaccgcatccgggtgagaagaggaggcaggaagaggcctgtgcccaagggggccacctacggcaagcctgtgcaccacggcgtgaaccagctgaagtttgcccggagcctgcagagcgtggccgaggagcgggccggccgccactgtggggccctgcgggtgctgaacagctactggatggagagccacagccacagcggcggcagcgctgtgggccagagccggctgacagccacctctgtgtcccgggtgtag

SEQ ID NO: 88595 - DNA, 180 bp, Artificial Sequence
  derived and/or modified sequence
atgggcgcctacaagtacatccaggagctgtggcggaagaagcagtccgatgtgatgcgcttcctcctgagggtgcgctgctggcagtatagacagctttcagctctgcaccgcgctccccgcccaactagacccgacaaagcacgcagactgggttacaaagcgaagcagggcacatag

SEQ ID NO: 88596 - DNA, 438 bp, Artificial Sequence
  derived and/or modified sequence
atgggcgcctacaagtacatccaggagctgtggcggaagaagcagagcgacgtgatgcggttccttctacgggtgagatgttggcagtacagacagctgagcgcactccacagggcaccccgacccacccgtcctgacaaggccaggagactggggtacaaagcaaagcaggggtacgttatatatcgcatacgggtgaggcgtggggggcgaaaacgcccagtccccaagggcgcaacctatgggaagcccgtgcatcacggtgtgaatcagctgaagtttgccagatcgttgcaatcagttgcagaggagcgagctgggcggcactgtggcgccctacgagtcctgaattcctactggatggaaagccattcacacagcggaggttccgcggttggacagtccagactgaccgctacctccgtaagcagggtttag

SEQ ID NO: 88597 - DNA, 180 bp, Artificial Sequence
  derived and/or modified sequence
atgggcgcatacaagtatattcaggagctgtggcgaaagaagcaaagtgacgtaatgagattcctactgagggtacgatgttggcagtataggcagctgagcgcactccaccgcgctcctagaccaacaagacctgataaagccaggaggcttggatacaaagcaaaacaaggaacctag

SEQ ID NO: 88598 - DNA, 438 bp, Artificial Sequence
  derived and/or modified sequence
atgggcgcttataaatacatccaggagttgtggcgcaagaagcagtccgacgtaatgcgtttcctgctgcgagtccgatgctggcagtatcgccaacttagcgccctccatagggccccaaggccaactcgccctgacaaggcaaggcgtctggggtataaggctaaacaggggtacgtgatttatcgaattcgagttaggcgaggtggcagaaagagacccgtgcccaaaggagccacttatggcaaacctgttcaccacggcgtgaaccaactgaagtttgcgagatcgcttcagtctgtagctgaggagagggccggaaggcattgtggcgctctaagagttctgaactcttactggatggagtcgcattctcactccggaggatccgcagtgggccagtcccgccttacagccacctcagtcagccgggtgtag

SEQ ID NO: 88599 - DNA, 2500 bp, Artificial Sequence
  derived and/or modified sequence
cagctctttcctttccgtctggcggcagccatcaggtaagccaagatgggtgcatacaagtacatccaggagctatggagaaagaagcagtctgatgtcatgcgctttcttctgagggtccgctgctggcagtaccgccagctctctgctctccacagggctccccgccccacccggcctgataaagcgcgccgactgggctacaaggccaagcaaggttacgttatatataggattcgtgttcgccgtggtggccgaaaacgcccagttcctaagggtgcaacttacggcaagcctgtccatcatggtgttaaccagctaaagtttgctcgaagccttcagtccgttgcagaggagcgagctggacgccactgtggggctctgagagtcctgaattcttactggatggagtctcactctcactcaggtgggagtgcagtggggcaatcacggctcactgcaacctctgtctcccgggtttgagcaattcttctgcctcggcctcccaaatagccaggactacaggcgcacactgccatgcccagctaagttttgtatttttagtagagactgggtttcactatgttggccaggctggtctcgaactcctgacctcaagtgatccacctgccttggcctcccaaagtgctgggattacaggcgtgagccaccacccccagcccaatttttattttttgtacagacaggatctcactatgttgcccaggttggtctcaaactactggcctcaagcaatcctgccttggcctcccaaagtgctggaattataggaatgagccaccacaccgggcccaaatttactttagtaataacaacaattggctgggtgcggtggctcacgcctgcaatcccaacactttcggtaaccaaggtgggcttgagctcatgagttagagagcagcctgagcaacgtggtgagagcccatctcacaaaaaataacaaatcagctgggcatggtgttgcacgcctgtagtctccgaaatcacaccactgcactcccatcttgggtgatagagccagaacttgtctcaaaaataacaattggtttcttacaatcccaaaaggtgcagttactagtattaatccttttttgccaatgaggaaacacaaagatgaagcaacttgctcaaagtcatacagtgacagtctgaattcaaatcctatacacttaaagtttatttgttttgttttggttttttttgagatggagtctcactgtgtcgcaaggctggagtgcagtggcacgatctcagctcactgcaacccgggttcaagcgattctcctgcctcagcctcccgagtagctgggactacaggcacgcaccaccacacccagctaatttttgtatttttagtagagacggtttcaccatgttggccaggatggtctcgagctcctgacctcaggtgatcctcccgccttggcctcccaaagtgccgggattacaggtgtcagccactgcacgtggccaacttaaagtttttgatagataatacattaacgttaaaaattcaaaagataagtataggctctacagtacaaacccttctgcctcctagttcctctccctggaggcaaggtgatcagtttaacaatatttttttattttgagacagggtctcactgttgcccaggctggagtgtagtggcgcgttcacaacttactgtagcctcaacctcctggctcaagcaatcctcccacctcagcctgtcgagtagctggaaccacaggtgcacaccaccatgccaggctaatttttgtattttttgtagagacagggtttcaccatgttgttcaggctggtctcaaagtcctgggctcaagcaatcttcctgtctctgcttcccaaagtgctgggattacagatgtgggccacggtgcctggcctacatatgtattttttccttttcttccccaagtggtaggatatgatacacattgttgatttttttgtttagttatgtatctcagagcttattctttatcagctcatgaggaacttcatttttttttttttttttgagatgtagttttgctcttatagcccaggttggagtacagtaacacaatcttggctcgcagcaacttctgcctcccaggttcaagcgattctcctgcctcagcctccgagtagctaggattacaggtgcctgccactacatccagctatttttgtattttcagtagagacggggtttcaccattttggccaagctggtctcgaactcctgacctcaggtgatccgcccatctcagcctcccaaagtagtgggattacaggcatgagcaaccgtgcccggctggaacttcattcttttggtataactgcatggtatcccatcatgtggatgtaccatgattcattggatgtggaccctcctgatggacatttaaatttcttccaatctgttgctattacaaaaagaaaaatgtgtgcatacatctttattcatctgtagaataaattcttagaagt

SEQ ID NO: 88600 - DNA, 180 bp, Artificial Sequence
  derived and/or modified sequence
atgggcgcctacaagtacatccaggagctgtggagaaagaagcagagcgacgtgatgagattcctgctgagagtgagatgctggcagtacagacagctgagcgccctgcacagagcccccagacccaccagacccgacaaggccagaagactgggctacaaggccaagcagggcacctag

SEQ ID NO: 88601 - DNA, 438 bp, Artificial Sequence
  derived and/or modified sequence
atgggcgcctacaagtacatccaggagctgtggagaaagaagcagagcgacgtgatgagattcctgctgagagtgagatgctggcagtacagacagctgagcgccctgcacagagcccccagacccaccagacccgacaaggccagaagactgggctacaaggccaagcagggctacgtgatctacagaatcagagtgagaagaggcggcagaaagagacccgtgcccaagggcgccacctacggcaagcccgtgcaccacggcgtgaaccagctgaagttcgccagaagcctgcagagcgtggccgaggagagagccggcagacactgcggcgccctgagagtgctgaacagctactggatggagagccacagccacagcggcggcagcgccgtgggccagagcagactgaccgccaccagcgtgagcagagtgtag

SEQ ID NO: 88602 - protein, 96 aa, Artificial Sequence
  derived and/or modified sequence
MEPLLLGRGLIVYLMFLLLKFSKAIEIPSSVQQVPTIIKQSKVQVAFPFDEYFQIECEAKGNPEPTFSWTKDGNPFYFTDHRIIPSNNSGTFRIPN

SEQ ID NO: 88603 - protein, 181 aa, Artificial Sequence
  derived and/or modified sequence
MEPLLLGRGLIVYLMFLLLKFSKAIEIPSSVQQVPTIIKQSKVQVAFPFDEYFQIECEAKGNPEPTFSWTKDGNPFYFTDHRIIPSNNSGTFRIPNEGHISHFQGKYRCFASNKLGIAMSEEIEFIVPSVPKFPKEKIDPLEVEEGDPIVLPCNPPKGLPPLHIYWMNIELEHIEQDERVY

SEQ ID NO: 88604 - protein, 317 aa, Artificial Sequence
  derived and/or modified sequence
  misc_feature (1)..(1): Xaa can be any naturally occurring amino acid
XSVTLYSGEDYPDTAPVIHGVDVINSTLVKVTWSTVPKDRVHGRLKGYQINWWKTKSLLDGRTHPKEVNILRFSGQRNSGMVPSLDAFSEFHLTVLAYNSKGAGPESEPYIFQTPEGVPEQPTFLKVIKVDKDTATLSWGLPKKLNGNLTGYLLQYQIINDTYEIGELNDINITTPSKPSWHLSNLNATTKYKFYLRACTSQGCGKPITEESSTLGEGKYAGLYDDISTQGWFIGLMCAIALLTLLLLTVCFVKRNRGGKYSVKEKEDLHPDPEIQSVKDETFGEYSDSDEKPLKGSLRSLNRDMQPTESADSLVEY

SEQ ID NO: 88605 - DNA, 954 bp, Artificial Sequence
  derived and/or modified sequence
tagagcgtgacactgtatagtggagaggactaccccgacacggctccagtgatccatggcgttgacgtaatcaacagcactctagtcaaagtgacctggagcaccgtgccaaaagatcgcgtgcatggtcgactcaaaggataccagattaactggtggaaaactaaatctctactggatgggcgcactcaccctaaagaggtgaatattttaaggttctctgggcagaggaattccggcatggtcccatctctggacgctttctccgagttccatttaacagtcctcgcatataactccaaaggggccggtcctgaatccgagccttatatctttcagacccctgaaggcgtacctgagcagcctacatttttgaaagtcatcaaagtcgataaggatacagctactctatcatggggtttaccaaagaagctcaacggaaacctgactgggtatctcctgcagtatcagatcataaatgatacctacgagattggggagctaaatgatataaatatcacgacaccctcaaagccttcttggcacctttcaaacctcaatgcaaccaccaagtacaagttttaccttagggcatgtacctcgcagggttgtggtaaaccaatcacggaggagagctctaccttgggagaaggtaaatacgcagggctgtacgatgatatatcaacacaaggttggttcatcggactcatgtgtgctatcgcattactcaccctgttgctgctgaccgtatgttttgtgaaacgtaatagaggaggtaaatatagtgttaaagaaaaggaggacctgcaccccgaccctgaaatacagagcgtgaaggacgaaacctttggggaatattccgacagtgacgaaaagcccttgaaaggctcactacgctccctcaacagggacatgcagccaacggagtccgcagacagtcttgtcgaatattag

SEQ ID NO: 88606 - DNA, 954 bp, Artificial Sequence
  derived and/or modified sequence
tgaagcgtgaccctgtacagcggggaggactacccagacacagcccctgtgattcatggagtggatgtgatcaacagcaccctggtgaaggtgacctggagcacagtgcccaaggacagagtgcacggccgcctgaagggctaccagatcaactggtggaagaccaagagcctgctggatggccgcacccaccccaaggaggtgaacatcctgcgcttcagcggccagagaaattctggcatggtgcccagcctggatgccttcagcgagttccacctgactgtgctggcctacaacagcaaaggagctggccctgagagcgagccctacatcttccagaccccagagggcgtgcctgagcagcccaccttcctgaaggtgatcaaggtggacaaggacacagccaccctgtcctggggcctgcccaagaagctgaatggaaacctgaccggctacctgctgcagtaccagatcatcaatgacacctatgaaattggagagctgaatgacatcaacatcaccacccccagcaagcccagctggcacctgagcaacctgaatgccaccaccaagtacaagttctacctgcgggcctgcaccagccagggctgtgggaagcccatcacagaggagagcagcaccctgggggagggcaagtatgccggcctgtatgatgacatcagcacccagggctggttcatcggcctgatgtgtgccatcgccctgctgaccctgctgctgctgactgtgtgctttgtgaagaggaacagaggaggcaagtacagcgtgaaggagaaggaggacctgcacccagaccctgagatccagagcgtgaaggatgagacctttggagagtacagcgacagtgatgagaagcccctgaagggcagcctgcggagcctgaacagagacatgcagcccacagagagcgctgacagcctggtggagtactag

SEQ ID NO: 88607 - DNA, 954 bp, Artificial Sequence
  derived and/or modified sequence
tgaagcgtgaccctgtacagcggcgaggactaccccgacaccgcccccgtcattcacggggttgacgtaatcaattctacacttgtcaaagtaacgtggtccacagtgccaaaagaccgggtgcacggaaggctgaagggctatcagataaactggtggaagacgaagtctctacttgatggccgaacgcaccctaaggaggtcaacatactaagatttagcggacagcgcaacagcggaatggttccgagcctggatgctttctctgagttccacctcacagtgctcgcctataacagcaaaggagccggccccgagtcagaaccatatatattccagacccccgagggggttcctgagcagcccacattcctgaaggttatcaaggtcgataaagacactgcaactctgtcctgggggttgcccaaaaagttaaacggaaatctaacaggttatctgttacagtaccagattattaacgacacctacgaaataggtgagctgaacgatattaacatcactaccccctcaaagccatcttggcaccttagtaacttaaacgccaccactaagtataagttctatcttagagcatgcacctctcagggttgtggaaagcccattactgaggagtccagtacgctcggagaaggaaagtacgcgggtctctatgatgatatttctacgcagggttggttcatagggcttatgtgcgcaattgctcttctcaccttattgctccttaccgtctgtttcgttaaaaggaaccggggcgggaagtacagcgtgaaggaaaaagaagatctgcatccggatcctgagattcagtctgtgaaggacgagacattcggggaatatagcgatagtgatgaaaagcccctgaaagggtcgttgcggtctctcaaccgagatatgcaacccacggagagcgcggactccctagtggagtattag

SEQ ID NO: 88608 - DNA, 954 bp, Artificial Sequence
  derived and/or modified sequence
taatctgttacgctgtatagtggggaggactatccggataccgcccctgtaattcatggagtcgacgtgataaatagtaccttggttaaggtgacttggtccaccgtcccaaaagatcgcgtccatggacggctgaaaggataccagatcaactggtggaagacaaagagccttcttgacgggcgaacccacccaaaagaagtaaatattttacgcttttccggccaaagaaactctggtatggtaccctcattggatgccttcagtgagttccatctgacagtgctagcctacaacagtaagggtgcgggtcccgaatctgagccctatatcttccaaaccccggagggcgtacctgagcagcccacatttctgaaggttataaaggtagataaggatactgcaacattatcttggggcctcccgaagaagttgaatggtaacctcaccggctacctcttgcagtaccagataatcaatgatacttacgagattggagagttgaacgatattaacatcactaccccgtcaaaaccatcttggcacctaagcaacctaaacgcaactacgaagtataaattttatcttcgggcatgcacttctcaggggtgtggaaagccaattacagaggagagctcaactcttggggaaggtaaatacgcaggcctgtacgatgacatctcgacacagggatggttcatcgggctgatgtgcgctattgcgttgttaaccctgctattattgactgtgtgcttcgtgaagcggaaccgcggtggcaagtatagcgtgaaagagaaagaggatctgcacccagatcccgagatccaaagcgttaaagacgagacatttggagagtactccgacagcgatgagaagcctcttaaagggagccttcggtcattgaatagagatatgcagcccacagagtccgccgatagcttggtggaatattag

SEQ ID NO: 88609 - DNA, 1104 bp, Artificial Sequence
  derived and/or modified sequence
agtcagtgactctctattctggagaagactatcctgatacagctccagtgatccatggggtggacgttataaacagtacattagttaaagttacctggtcaacagttccaaaggacagagtacatggacgtctgaaaggctatcagataaattggtggaaaacaaaaagtctgttggatggaagaacacatcccaaagaagtgaacattctaagattttcaggacaaagaaactctggaatggttccttccttagatgcctttagtgaatttcatttaacagtcttagcctataactctaaaggagctggtcctgaaagtgagccttatatatttcaaacaccagaaggagtacctgaacagccaacttttctaaaggtcatcaaagttgataaagacactgccactttatcttggggactacctaagaaattaaatggaaacttaactggctatcttttgcaatatcagataataaatgacacctacgagattggagaattaaatgatattaacattacaactccatcaaagcccagctggcacctctcaaacctgaatgcaactaccaagtacaaattctacttgagggcttgcacttcacagggctgtggaaaaccgatcacggaggaaagctccaccttaggagaagggaaatatgctggtttatatgatgacatctccactcaaggctggtttattggactgatgtgtgcgattgctcttctcacactactattattaactgtttgctttgtgaagaggaatagaggtggaaagtactcagttaaagaaaaggaagatttgcatccagacccagaaattcagtcagtaaaagatgaaacctttggtgaatacagtgacagtgatgaaaagcctctcaaaggaagccttcggtcccttaatagggatatgcagcctactgaaagtgctgacagcttagtcgaatacggagagggagaccatggtctcttcagtgaagatggatcatttattggtgcctacgctggatctaaggagaagggatctgttgaaagcaatggaagttctacagcaacttttccccttcgggcataaacacaacatatgtaagcaacgctactgg

SEQ ID NO: 88610 - DNA, 954 bp, Artificial Sequence
  derived and/or modified sequence
tgaagcgtgaccctgtacagcggcgaggactaccccgacaccgcccccgtgatccacggcgtggacgtgatcaacagcaccctggtgaaggtgacctggagcaccgtgcccaaggacagagtgcacggcagactgaagggctaccagatcaactggtggaagaccaagagcctgctggacggcagaacccaccccaaggaggtgaacatcctgagattcagcggccagagaaacagcggcatggtgcccagcctggacgccttcagcgagttccacctgaccgtgctggcctacaacagcaagggcgccggccccgagagcgagccctacatcttccagacccccgagggcgtgcccgagcagcccaccttcctgaaggtgatcaaggtggacaaggacaccgccaccctgagctggggcctgcccaagaagctgaacggcaacctgaccggctacctgctgcagtaccagatcatcaacgacacctacgagatcggcgagctgaacgacatcaacatcaccacccccagcaagcccagctggcacctgagcaacctgaacgccaccaccaagtacaagttctacctgagagcctgcaccagccagggctgcggcaagcccatcaccgaggagagcagcaccctgggcgagggcaagtacgccggcctgtacgacgacatcagcacccagggctggttcatcggcctgatgtgcgccatcgccctgctgaccctgctgctgctgaccgtgtgcttcgtgaagagaaacagaggcggcaagtacagcgtgaaggagaaggaggacctgcaccccgaccccgagatccagagcgtgaaggacgagaccttcggcgagtacagcgacagcgacgagaagcccctgaagggcagcctgagaagcctgaacagagacatgcagcccaccgagagcgccgacagcctggtggagtactag

SEQ ID NO: 88611 - DNA, 210 bp, Artificial Sequence
  derived and/or modified sequence
atggttcttactaaacctcttcaaagaaatggcagcatgatgagctttgaaaatgtgaaagaaaagagcagagaaggagggccccatgcacacacacccgaagaagaattgtgtttcgtggtaacacactaccctcaggttcagaccacactcaacctgtttttccatatattcaaggttcttactcaaccactttcccttctgtggggt

SEQ ID NO: 88612 - DNA, 1071 bp, Artificial Sequence
  derived and/or modified sequence
atgctggagcaaatcagacgcgatataagggattttcgttccagtgcgggtctggacaaggtcatcgttctttggacagcaaatactgagcgcttttgcgaagtcattccaggcttgaacgacaccgctgagaatctccttcgaacaatagaactcggccttgaggtgagcccaagtacattgtttgctgtggcctccatcctggagggttgcgccttcctgaatggctcacctcaaaatactcttgtaccaggcgctctggaattggcctggcagcacagggtgtttgtgggcggggacgactttaagtctggacagaccaaggtcaaatccgtactcgtggactttttaattggctcggggctgaagaccatgagtatcgtgtcctataaccaccttgggaacaacgacggggagaacctttctgccccattacagtttcgtagtaaagaggtgtccaagtcaaacgtggtcgacgacatggtgcagagcaaccccgtgctgtatacaccaggggaggagcccgaccactgcgttgtgataaagtatgtgccctacgtcggcgatagcaagagggccttagacgaatatacctccgaactgatgctgggaggaactaacacactggttctccacaatacctgcgaggacagtttactcgctgcacccatcatgttggacctggccctcctgacggagctttgtcagcgtgtcagtttttgcacagatatggacccagagccccagacctttcaccctgttctgagtctcctttcttttctgttcaaggcccctttagtgccacctggcagccccgtagtaaacgctctgttccggcagagatcctgcatagaaaatattcttcgcgcgtgtgtggggttgccaccccagaatcacatgcttttagagcataagatggaaaggccaggacctagtctgaagagagtcggacccgtcgcagctacatatcctatgctgaataaaaagggcccagtgcccgccgccaccaacggctgtacaggggatgctaatggccatctgcaggaggaaccacccatgccaactacttag

SEQ ID NO: 88613 - DNA, 1227 bp, Artificial Sequence
  derived and/or modified sequence
atgaggagggccaaggtactggactggggccttcaggagcagctctggcctcatatggaggccctgcgcccaaggccaagcgtgtacatacccgaatttatcgccgccaaccagtccgcacgcgcagataatcttatcccaggatcacgggcccagcagctcgaacagattcgccgggacatacgcgactttaggagcagcgctggcctggacaaagtgatcgtgttatggactgcgaacacggagcgattctgcgaggtaatcccaggactgaatgatactgctgaaaacctgctacgtaccattgagctcggacttgaggtgtctccgagcacattatttgctgtggcctcaatcttagagggctgcgcgtttctgaatggcagtccccagaatacactcgtccccggggccctcgaactggcgtggcaacaccgagtcttcgtggggggtgacgattttaagtctggccagaccaaggtgaaatcggttctggttgattttttaatagggagcgggctcaaaactatgagcatcgttagctacaaccaccttggaaataacgatggggagaatctgagcgccccattgcaattcaggtctaaggaggtgagtaagtccaacgtggttgacgacatggtgcagagtaatcctgttctgtacactcctggagaggagcccgaccactgtgtggtcatcaaatatgttccatatgtgggcgacagtaagcgggctctcgatgagtataccagcgaactaatgttagggggcactaatacactcgttttgcacaatacttgcgaagactccctgctggccgcacccatcatgctcgatctcgcccttctcaccgagctgtgtcagcgagttagcttctgtaccgacatggaccctgagccacagacgttccatccagttctgagtctgcttagctttttgtttaaagctcccctggtgccacccggatcccccgtggtgaatgcactgtttcgccagagatcctgtatcgagaacatattgagagcctgcgtgggattgccaccccaaaaccacatgctgctagaacacaaaatggaacgccccgggcccagcctgaagcgggtggggcctgtggccgctacctatcccatgcttaacaaaaagggcccggtgcccgctgccacaaatggttgtactggcgatgcaaatgggcacctgcaggaggaaccccctatgcctaccacatag

SEQ ID NO: 88614 - DNA, 1647 bp, Artificial Sequence
  derived and/or modified sequence
ccggaggtcgcgcgcccgagagcccgcgctgtccgccgccgctgcctgagtcgactctgcgccgcccgccgcgatggaggccgccgcccagttcttcgtcgagagcccggacgtggtctacggccccgaggccatcgaggcgcaatacgagtaccggacgacgcgcgtcagccgcgagggtggcgttctcaaggtgcaccccacgtccacgcgcttcaccttccggaccgcccggcaggtgccccggctcggggtcatgcttgtcggctggggcgggaacaacggctccacactcaccgccgcggtgctggccaatcgactgcgtttgtcctggcccacgcgcagcggccgcaaggaggccaactactacggctcgctgactcaggcgggcaccgtgagcctgggcctggacgccgagggccaggaggtgttcgtacccttcagcgcggtgctgcccatggtggcgcccaacgacctcgtgttcgatgctggagcagatccgcagggacatccgagacttccggtctagcgcggggctggacaaagtcatagtgctgtggacggcgaacacggagcgcttctgtgaggtgattccaggcctcaacgacacagccgagaacctgctgcgcaccattgagctcggtctggaggtgtcgccctccacgctcttcgccgtggccagcatcctggagggctgtgccttcctcaatgggtctccgcagaacaccctggtgcccggagctcttgagctcgcgtggcagcaccgggtttttgtgggcggagatgacttcaagtcaggccagaccaaagtcaagtccgtgcttgtggacttcctcattggctccggcctcaagaccatgtccatcgtgagttacaaccacctgggcaacaacgatggggagaacctatcggcgccattgcagttccgctctaaggaggtgtccaagagcaacgtggtggacgacatggtgcagagcaacccagtgctctatacgcccggcgaagagcctgaccactgcgtggtcatcaagtatgtgccgtacgtgggtgacagcaagcgcgcgctggatgagtatacctcggagctgatgctgggcggaaccaacacactggtgctgcacaacacgtgtgaggactcgctgctggccgcacccatcatgctggacctagcgctgctgaccgagctgtgccagcgcgtgagcttctgcactgacatggaccccgagccgcagaccttccaccccgtgctgtccctgctcagcttcctcttcaaggcgccactagtgccgcccggcagcccggtggtcaatgcgcttttccgccagcgcagctgcatcgagaacatcctcagggcctgcgtggggctcccgccacagaaccacatgctcctggaacacaaaatggagcgcccagggcccagcctcaagcgagttggacccgtggctgccacctaccctatgttgaacaagaaaggaccggtacccgctgccaccaatggctgcaccggtgatgccaatgggcatctgcaagaggagcccccaatgcccaccacctgaggccccggtcacacagtttctcggctcttcctccccgctgccccccacgaccctaccttgaaggcccccacaaataaaggcgctgccactc

SEQ ID NO: 88615 - DNA, 2039 bp, Artificial Sequence
  derived and/or modified sequence
ctgagtcgactctgcgccggtgagtgcggttcggggcagggacggcctccgtggggacccaggctggcttggccccggccgcttagagtccccgctgaccccctgctcaccccgggcccccagcccgccgcgatggaggccgccgcccagttcttcgtcgagagcccggacgtggtctacggccccgaggccatcgaggcgcaatacgagtaccggacgacgcgcgtcagccgcgagggtggcgttctcaaggctgggacatctcgtcgctgaacctggccgaggcgatgcggcgcgcgaaggtgctggactgggggctgcaggagcaactgtggccgcacatggaggccctgcggccccggccttctgtttacatccccgaattcatcgcggccaaccagagcgcgcgcgcggacaacctcatcccaggctcgcgtgcgcagcagctggagcagatccgcagggacatccgagacttccggtctagcgcggggctggacaaagtcatagtgctgtggacggcgaacacggagcgcttctgtgaggtgattccaggcctcaacgacacagccgagaacctgctgcgcaccattgagctcggtctggaggtgtcgccctccacgctcttcgccgtggccagcatcctggagggctgtgccttcctcaatgggtctccgcagaacaccctggtgcccggagctcttgagctcgcgtggcagcaccgggtttttgtgggcggagatgacttcaagtcaggccagaccaaagtcaagtccgtgcttgtggacttcctcattggctccggcctcaagaccatgtccatcgtgagttacaaccacctgggcaacaacgatggggagaacctatcggcgccattgcagttccgctctaaggaggtgtccaagagcaacgtggtggacgacatggtgcagagcaacccagtgctctatacgcccggcgaagagcctgaccactgcgtggtcatcaagtatgtgccgtacgtgggtgacagcaagcgcgcgctggatgagtatacctcggagctgatgctgggcggaaccaacacactggtgctgcacaacacgtgtgaggactcgctgctggccgcacccatcatgctggacctagcgctgctgaccgagctgtgccagcgcgtgagcttctgcactgacatggaccccgagccgcagaccttccaccccgtgctgtccctgctcagcttcctcttcaaggcgccactagtgccgcccggcagcccggtggtcaatgcgcttttccgccagcgcagctgcatcgagaacatcctcagggcctgcgtggggctcccgccacagaaccacatgctcctggaacacaaaatggagcgcccagggcccagcctcaagcgagttggacccgtggctgccacctaccctatgttgaacaagaaaggaccggtacccgctgccaccaatggctgcaccggtgatgccaatgggcatctgcaagaggagcccccaatgcccaccacctgaggccccggtcacacagtttctcggctcttcctccccgctgccccccacgaccctaccttgaaggcccccacaaataaaggcgctgccactcagccctccttccacctggggttcttggggcctgtgacctgactctgcctccctctacttccccgactcttgagcgcccagcttcagtcccatcccctctgcccatggtcatcaccccaactcccagggagagcccagaacctggagcctcgctctgcccccagttctcaaaggtggggctagatgggggcggggacggaacaagaccacagggtggagagtgtggtggcagaaggccaaagagggaatctgagacaagctaccaaaaaccaaaaccagcttccatttatttatgggccccaccccctgacgtcctggggagaggggccccccaaagagcctttctctctgggacaaaatacaaatggcaggaagggtccatacagaaaagaacgtctctgaggtccttgcgtttttaataaaatggtaagagtc

SEQ ID NO: 88616 - DNA, 1071 bp, Artificial Sequence
  derived and/or modified sequence
atgctggagcagatccggcgggacatccgggacttccgcagcagcgctggcctggacaaggtgattgtgctgtggacagccaacacagagcgcttctgtgaggtgattcctggcctgaatgacacagctgagaacctgctgcggaccatcgagctgggcctggaggtgagccccagcaccctgtttgctgtggccagcatcctggagggctgtgccttcctgaatggcagcccccagaacaccctggtgcctggggccctggagctggcctggcagcaccgggtgtttgtgggcggagatgacttcaagagcggccagaccaaggtgaagtctgtgctggtggacttcctgattggcagcggcctgaagaccatgagcatcgtgtcctacaaccacctgggcaacaatgatggagagaacctgagcgcccccctgcagttccgcagcaaggaggtgtccaagagcaatgtggtggatgacatggtgcagagcaaccctgtgctgtacaccccaggagaggagccagaccactgtgtggtgatcaagtatgtgccctacgtgggggacagcaagagggccctggatgagtacaccagcgagctgatgctgggcggcaccaacaccctggtgctgcacaacacctgtgaggacagcctgctggccgcccccatcatgctggacctggccctgctgacagagctgtgccagagggtgtccttctgcacagacatggaccctgagccccagaccttccaccctgtgctgagcctgctgtccttcctgttcaaggcccccctggtgcccccaggcagccctgtggtgaatgccctcttccggcagaggagctgcatcgagaacatcctgcgggcctgtgtgggcctgcccccccagaaccacatgctgctggagcacaagatggagaggcctggccccagcctgaagagggtgggccctgtggccgccacctaccccatgctgaacaagaagggccctgtgcctgctgccaccaacggctgcacaggagatgccaacggccacctgcaggaggagccccccatgcccaccacctag

SEQ ID NO: 88617 - DNA, 1227 bp, Artificial Sequence
  derived and/or modified sequence
atgaggcgggccaaggtgctggactggggcctgcaggagcagctgtggccccacatggaggccctgcggccccggcccagcgtgtacatccctgagttcatcgccgccaaccagagcgcccgggctgacaacctgatccctggcagccgggcccagcagctggagcagatccggcgggacatccgggacttccgcagcagcgctggcctggacaaggtgattgtgctgtggacagccaacacagagcgcttctgtgaggtgattcctggcctgaatgacacagctgagaacctgctgcggaccatcgagctgggcctggaggtgagccccagcaccctgtttgctgtggccagcatcctggagggctgtgccttcctgaatggcagcccccagaacaccctggtgcctggggccctggagctggcctggcagcaccgggtgtttgtgggcggagatgacttcaagagcggccagaccaaggtgaagtctgtgctggtggacttcctgattggcagcggcctgaagaccatgagcatcgtgtcctacaaccacctgggcaacaatgatggagagaacctgagcgcccccctgcagttccgcagcaaggaggtgtccaagagcaatgtggtggatgacatggtgcagagcaaccctgtgctgtacaccccaggagaggagccagaccactgtgtggtgatcaagtatgtgccctacgtgggggacagcaagagggccctggatgagtacaccagcgagctgatgctgggcggcaccaacaccctggtgctgcacaacacctgtgaggacagcctgctggccgcccccatcatgctggacctggccctgctgacagagctgtgccagagggtgtccttctgcacagacatggaccctgagccccagaccttccaccctgtgctgagcctgctgtccttcctgttcaaggcccccctggtgcccccaggcagccctgtggtgaatgccctcttccggcagaggagctgcatcgagaacatcctgcgggcctgtgtgggcctgcccccccagaaccacatgctgctggagcacaagatggagaggcctggccccagcctgaagagggtgggccctgtggccgccacctaccccatgctgaacaagaagggccctgtgcctgctgccaccaacggctgcacaggagatgccaacggccacctgcaggaggagccccccatgcccaccacctag

SEQ ID NO: 88618 - DNA, 1071 bp, Artificial Sequence
  derived and/or modified sequence
atgctggagcagatccggcgggacatccgggacttccggagcagcgccgggctggataaggtgattgtcctctggacagcaaatacggagcggttctgtgaggtgatacccggtctcaacgacacagccgaaaacctattgagaactattgaacttggcctggaagtgagccctagcacactgtttgcagtggcctctattttagagggttgcgcattcttgaatgggagtcctcagaatacactggtgccgggcgccctggagctcgcctggcagcatcgtgtgtttgtgggcggggatgactttaagagcggacaaaccaaagttaagagcgtcttggttgatttcctgataggttccggtctgaaaactatgtcaatcgtgtcttacaatcatctggggaacaatgatggcgagaacctctctgctccactgcagttccgctctaaggaggtctccaaatctaatgtggtggacgacatggtccagtctaaccccgtgttgtataccccaggcgaagagccggaccactgtgtggttattaagtatgttccgtacgtcggcgattccaagcgcgctctagatgaatataccagtgagctcatgctaggcggtactaacacactggtgttgcacaacacctgcgaagattctcttctggcagcacctatcatgcttgacctggcccttctgacagagctgtgccagagagtgagcttctgtactgatatggatcctgaacctcagacatttcaccctgtgctgtctctcttgagtttcctgttcaaggcccctcttgttcccccaggcagccccgtggtcaacgccttgttcaggcaaagaagctgcatcgagaacatcctgcgggcttgcgtcgggctgccaccccagaatcacatgcttctggaacacaaaatggaaaggccaggaccctccctgaagagagtggggccagtggcagcaacgtatcccatgctgaacaaaaaaggcccagttcccgccgcgaccaatggttgtacgggtgatgcgaacggccacctgcaggaggaaccaccaatgccgacaacctag

SEQ ID NO: 88619 - DNA, 1227 bp, Artificial Sequence
  derived and/or modified sequence
atgcggcgggccaaggtgctggactggggcctgcaggagcagctgtggcctcacatggaggctctccggcccagaccctctgtgtacatccctgagtttattgcagctaatcagtctgcacgcgcagacaacctcattcccggatcgcgcgcccagcaattggaacaaatccgtagagacatcagggatttcaggtcatccgccgggctggataaagtgattgtgctgtggacagctaacaccgaacgcttttgcgaagtcatacccggcctcaacgataccgccgaaaacttactgagaacaatagagttgggattggaagttagtccctctactctctttgccgttgcaagcattcttgaagggtgcgcctttctgaacggcagcccgcagaatacattggtgccaggagccctagagctggcttggcagcaccgagttttcgttggcggagatgatttcaagagtggccaaacaaaggtgaagtcagtactggtcgactttctcatcggatccggccttaagacaatgagcatcgtatcctataatcatctgggtaacaacgatggcgaaaatctgtcggctcccctgcaattccggtccaaagaagtcagcaaaagcaacgtcgtggatgacatggttcagtccaatcccgtcctgtatacccccggtgaagagccagatcactgtgttgtgattaaatacgtcccctacgtcggggattcaaagcgcgctttagacgaatatacgtctgaactcatgttgggcggcactaatacacttgtgctacataatacatgcgaagacagcctccttgctgcacccattatgctggatctggcgctgctaactgagctttgccagcgggtttcattctgcacggatatggacccagaaccacaaacttttcaccctgtgctctcgctcttatccttcctgttcaaggcccccctggtgccccccggcagcccagtggttaacgccctctttcgccagaggtcatgcatcgagaacattttgagggcctgcgttgggctcccgccacagaatcatatgctcctcgaacacaaaatggagcgccccgggccaagtttgaaaagggttggcccagtcgccgccacttacccgatgctgaacaagaaggggccagtgcctgcggctacgaatgggtgcaccggggacgcaaatgggcatctccaggaggaacctccaatgccaacaacctag

SEQ ID NO: 88620 - DNA, 1071 bp, Artificial Sequence
  derived and/or modified sequence
atgctcgaacaaatacgccgtgatattagagacttcagaagcagcgcaggtctggacaaggtcatcgtgttgtggaccgctaacaccgagagattctgtgaggtcatcccgggtctgaacgacactgctgagaacctactaagaacaattgaactgggcctcgaagtgagccccagtacgctcttcgccgttgcctcgattctggagggatgcgctttccttaatggcagcccccaaaacactctggtgcccggtgccctggagctggcttggcaacaccgggtgtttgtcggcggagatgacttcaagtctggccagaccaaggtaaaaagcgtattggtggattttctcatcggctctggcctgaagactatgtcgatcgttagttataatcacctgggcaataatgacggcgaaaatctgtctgcacccctgcagttcaggtctaaggaagtaagcaagtcaaatgttgtggacgacatggtccagtccaacccagtcctgtacacaccgggtgaggagcccgatcactgcgtagtgataaagtacgtcccctacgtgggggactcaaagcgggctttggatgagtacacatccgagctgatgctgggcggaactaataccctggttcttcacaatacttgcgaggacagcctcctggcagcccctatcatgctcgaccttgcattgttaactgagttatgtcagcgcgtgagcttttgtaccgatatggaccctgagccccagactttccatcctgtcctgtccctcttgtcatttctcttcaaagcccctctagtaccccctggatcaccggtggtcaatgctctgtttcggcagcgcagctgcatcgaaaatatcttgagagcttgcgtcggactgccaccccaaaatcatatgctgctcgaacacaagatggaaagacccggtccatctcttaaacgggtgggacccgttgcggcaacttatcctatgctgaataaaaagggtcctgtacctgccgcaactaatggatgtactggcgatgccaatggtcatcttcaggaagaaccacctatgcctacaacttag

SEQ ID NO: 88621 - DNA, 1227 bp, Artificial Sequence
  derived and/or modified sequence
atgaggcgagccaaagtgctggattgggggttgcaggaacaactctggccccatatggaagcactgcgcccacgcccatctgtttatatccccgaattcattgcagctaatcagtctgcccgtgccgataatctcatcccaggaagtcgagcacagcagcttgagcagatacggcgtgatatccgagatttccgttctagtgccggattggacaaggtcatcgttctgtggaccgcaaatactgagcgcttttgcgaggtgatcccaggtttaaacgacaccgccgagaatctgctacgaaccattgagctaggactggaagtctctccgtccaccctcttcgcggtcgcctccatcctcgagggctgcgcctttcttaacggtagtcctcaaaatactcttgtgcctggggctctagaattggcgtggcaacatcgagtatttgtcgggggagatgattttaaaagcgggcagactaaggtcaagagtgtactggttgactttctgatagggagtgggttgaaaaccatgtctattgtatcttataaccatctgggcaacaacgatggcgagaacctttccgcgccactgcaattcagatcaaaggaggtgagcaagtctaacgtggtagatgacatggtacaatctaatcccgtgctctatacaccgggagaggagccagatcattgcgtagtaattaaatatgtcccctacgtgggagattcaaagcgtgcattggacgagtacaccagcgagctgatgctgggcggaaccaacaccttggtgctgcacaacacctgtgaagatagtctactcgccgcacctataatgttggatcttgccttactgacggagctttgtcaacgggtgtccttctgtacagatatggatcctgagccacagacgtttcaccccgttctctccctcctgtccttcctgtttaaggctcctttggttcctccaggcagtcccgtcgtgaatgcgctttttcgccaacgcagctgcattgaaaatatactcagagcttgcgttggactgccccctcaaaatcacatgctcctggaacacaagatggagcgccctggcccttctctcaaacgtgttggcccagtggcagccacataccccatgttgaataaaaaagggccagtacccgcagccaccaacggttgcacaggcgacgccaacgggcatctacaggaggagccgccaatgccaacgacttag

SEQ ID NO: 88622 - DNA, 1071 bp, Artificial Sequence
  derived and/or modified sequence
atgctggagcagatcagaagagacatcagagacttcagaagcagcgccggcctggacaaggtgatcgtgctgtggaccgccaacaccgagagattctgcgaggtgatccccggcctgaacgacaccgccgagaacctgctgagaaccatcgagctgggcctggaggtgagccccagcaccctgttcgccgtggccagcatcctggagggctgcgccttcctgaacggcagcccccagaacaccctggtgcccggcgccctggagctggcctggcagcacagagtgttcgtgggcggcgacgacttcaagagcggccagaccaaggtgaagagcgtgctggtggacttcctgatcggcagcggcctgaagaccatgagcatcgtgagctacaaccacctgggcaacaacgacggcgagaacctgagcgcccccctgcagttcagaagcaaggaggtgagcaagagcaacgtggtggacgacatggtgcagagcaaccccgtgctgtacacccccggcgaggagcccgaccactgcgtggtgatcaagtacgtgccctacgtgggcgacagcaagagagccctggacgagtacaccagcgagctgatgctgggcggcaccaacaccctggtgctgcacaacacctgcgaggacagcctgctggccgcccccatcatgctggacctggccctgctgaccgagctgtgccagagagtgagcttctgcaccgacatggaccccgagccccagaccttccaccccgtgctgagcctgctgagcttcctgttcaaggcccccctggtgccccccggcagccccgtggtgaacgccctgttcagacagagaagctgcatcgagaacatcctgagagcctgcgtgggcctgcccccccagaaccacatgctgctggagcacaagatggagagacccggccccagcctgaagagagtgggccccgtggccgccacctaccccatgctgaacaagaagggccccgtgcccgccgccaccaacggctgcaccggcgacgccaacggccacctgcaggaggagccccccatgcccaccacctag

SEQ ID NO: 88623 - DNA, 1227 bp, Artificial Sequence
  derived and/or modified sequence
atgagaagagccaaggtgctggactggggcctgcaggagcagctgtggccccacatggaggccctgagacccagacccagcgtgtacatccccgagttcatcgccgccaaccagagcgccagagccgacaacctgatccccggcagcagagcccagcagctggagcagatcagaagagacatcagagacttcagaagcagcgccggcctggacaaggtgatcgtgctgtggaccgccaacaccgagagattctgcgaggtgatccccggcctgaacgacaccgccgagaacctgctgagaaccatcgagctgggcctggaggtgagccccagcaccctgttcgccgtggccagcatcctggagggctgcgccttcctgaacggcagcccccagaacaccctggtgcccggcgccctggagctggcctggcagcacagagtgttcgtgggcggcgacgacttcaagagcggccagaccaaggtgaagagcgtgctggtggacttcctgatcggcagcggcctgaagaccatgagcatcgtgagctacaaccacctgggcaacaacgacggcgagaacctgagcgcccccctgcagttcagaagcaaggaggtgagcaagagcaacgtggtggacgacatggtgcagagcaaccccgtgctgtacacccccggcgaggagcccgaccactgcgtggtgatcaagtacgtgccctacgtgggcgacagcaagagagccctggacgagtacaccagcgagctgatgctgggcggcaccaacaccctggtgctgcacaacacctgcgaggacagcctgctggccgcccccatcatgctggacctggccctgctgaccgagctgtgccagagagtgagcttctgcaccgacatggaccccgagccccagaccttccaccccgtgctgagcctgctgagcttcctgttcaaggcccccctggtgccccccggcagccccgtggtgaacgccctgttcagacagagaagctgcatcgagaacatcctgagagcctgcgtgggcctgcccccccagaaccacatgctgctggagcacaagatggagagacccggccccagcctgaagagagtgggccccgtggccgccacctaccccatgctgaacaagaagggccccgtgcccgccgccaccaacggctgcaccggcgacgccaacggccacctgcaggaggagccccccatgcccaccacctag

SEQ ID NO: 88624 - protein, 1412 aa, Artificial Sequence
  derived and/or modified sequence
MTTKRSLFVRLVPCRCLRGEEETVTTLDYSHCSLEQVPKEIFTFEKTLEELYLDANQIEELPKQLFNCQSLHKLSLPDNDLTTLPASIANLINLRELDVSKNGIQEFPENIKNCKVLTIVEASVNPISKLPDGFSQLLNLTQLYLNDAFLEFLPANFGRLTKLQILELRENQLKMLPKTMNRLTQLERLDLGSNEFTEVPEVLEQLSGLKEFWMDANRLTFIPGFIGSLKQLTYLDVSKNNIEMVEEGISTCENLQDLLLSSNSLQQLPETIGSLKNITTLKIDENQLMYLPDSIGGLISVEELDCSFNEVEALPSSIGQLTNLRTFAADHNYLQQLPPEIGSWKNITVLFLHSNKLETLPEEMGDMQKLKVINLSDNRLKNLPFSFTKLQQLTAMWLSDNQSKPLIPLQKETDSETQKMVLTNYMFPQQPRTEDVMFISDNESFNPSLWEEQRKQRAQVAFECDEDKDEREAPPREGNLKRYPTPYPDELKNMVKTVQTIVHRLKDEETNEDSGRDLKPHEDQQDINKDVGVKTSESTTTVKSKVDEREKYMIGNSVQKISEPEAEISPGSLPVTANMKASENLKHIVNHDDVFEESEELSSDEEMKMAEMRPPLIETSINQPKVVALSNNKKDDTKETDSLSDEVTHNSNQNNSNCSSPSRMSDSVSLNTDSSQDTSLCSPVKQTHIDINSKIRQEDENFNSLLQNGDILNSSTEEKFKAHDKKDFNLPEYDLNVEERLVLIEKSVDSTATADDTHKLDHINMNLNKLITNDTFQPEIMERSKTQDIVLGTSFLSINSKEETEHLENGNKYPNLESVNKVNGHSEETSQSPNRTEPHDSDCSVDLGISKSTEDLSPQKSGPVGSVVKSHSITNMEIGGLKIYDILSDNGPQQPSTTVKITSAVDGKNIVRSKSATLLYDQPLQVFTGSSSSSDLISGTKAIFKFDSNHNPEEPNIIRGPTSGPQSAPQIYGPPQYNIQYSSSAAVKDTLWHSKQNPQIDHASFPPQLLPRSESTENQSYAKHSANMNFSNHNNVRANTAYHLHQRLGPARHGEMWAISPNDRLIPAVTRSTIQRQSSVSSTASVNLGDPGSTRRAQIPEGDYLSYREFHSAGRTPPMMPGSQRPLSARTYSIDGPNASRPQSARPSINEIPERTMSVSDFNYSRTSPSKRPNARVGSEHSLLDPPGKSKVPRDWREQVLRHIEAKKLEKKHPQTSSSGDPCQDGIFISGQQNYSSATLSHKDVPPDSLMKMPLSNGQMGQPLRPQANYSQIHHPPQASVARHPSREQLIDYLMLKVAHQPPYTQPHCSPRQGHELAKQEIRVRVEKDPELGFSISGGVGGRGNPFRPDDDGIFVTRVQPEGPASKLLQPGDKIIQANGYSFINIEHGQAVSLLKTFQNTVELIIVREVSS

SEQ ID NO: 88625 - DNA, 4239 bp, Artificial Sequence
  derived and/or modified sequence
atgacaacaaaacgtagcctgtttgtgagactcgtgccatgtagatgcttgaggggtgaggaggaaaccgtgactacactggactacagccactgttccttggagcaggtgcccaaagaaatctttacgttcgagaaaactttggaggaattgtacctggacgccaaccagattgaagagttgccaaagcaactcttcaactgtcagtctctccataaactatcattgcctgacaacgacctgacgaccctccccgcttccattgctaacctaatcaacttacgcgaactcgacgtgagcaaaaacggaattcaggagtttccagagaacatcaagaattgtaaggttcttaccattgtggaggcttccgtcaatcccatttcgaaactcccggacggcttctcacagcttctgaacttgacgcagctgtatctcaatgatgcttttctcgaatttttgcctgccaacttcggcaggttaaccaagctgcagattctcgaacttcgcgaaaaccagctaaaaatgctgccaaagaccatgaataggttgacccagcttgaacgtctggatttgggcagtaatgagttcactgaagttcccgaagtgctcgagcaactttctggattaaaagagttttggatggacgccaacaggctgaccttcatccccgggttcattggaagtctgaaacagcttacctatctggacgtcagcaaaaacaacattgaaatggtcgaagagggcatctcaacttgtgagaaccttcaagatctgttactgtccagcaacagcctgcagcagctgcctgagacgatagggtccctaaaaaacattaccacgctgaaaatcgatgagaatcagcttatgtacctccccgacagtatcggtgggctcatttctgtggaggagctcgattgttctttcaacgaggttgaagccttgcccagctccatcggacagcttacgaacctcagaacgtttgcagcggaccataactatctgcagcagctgccgccagaaatcggtagctggaagaatatcaccgtgctgttcttacacagcaacaagcttgagaccctgccagaggagatgggagacatgcagaagttgaaggtaatcaatctgagcgacaaccgactcaaaaacttgccgtttagcttcaccaaacttcaacagctgactgctatgtggctgagcgacaatcagagtaagccactcatccccctgcagaaggaaaccgactcggaaactcagaagatggtactgaccaactatatgttcccccagcagcctaggaccgaggacgtaatgttcatttcagacaacgagtcatttaacccatctctgtgggaggagcaacgaaagcagagagcacaggtggcttttgaatgtgacgaggataaagacgaacgggaagcacctcctcgagaaggcaacctgaagcggtaccccaccccataccccgacgagctcaagaatatggttaagaccgtgcaaaccattgtacataggctgaaagatgaggagaccaatgaggattccggcagagacctaaagccgcatgaggatcagcaggatattaacaaggatgtgggcgtcaaaacctcagaatccaccaccacagtgaaatctaaggtggacgagcgcgagaaatacatgatcggcaattcagtgcagaagatcagcgagcctgaggctgaaataagtccaggctcattgccagttaccgccaatatgaaggccagcgaaaatcttaagcatatcgttaaccacgacgatgtgttcgaggaaagtgaggagctttcttctgacgaagagatgaagatggcagagatgcgtcctccccttatagagacctccattaatcaaccgaaggtagtggcactttccaacaataagaaggatgataccaaggaaacagactcattaagcgacgaggttactcataactcaaaccagaataactctaattgctcttctcctagtaggatgtctgattccgtgagcttaaataccgattctagtcaggacacatctctctgcagcccagtcaaacagactcacatcgatatcaacagcaaaatcaggcaggaagacgagaactttaattctttactgcaaaatggcgacatcctgaactcttccacagaagagaagtttaaagcccatgacaaaaaagactttaacctacctgagtatgatctcaatgtagaagagcggctcgtgttgatcgaaaagtcagtcgacagcacagcaaccgccgatgacacccacaagttggatcacataaacatgaacctgaataaactgataaccaacgatacctttcagcctgaaatcatggagcggagcaagacgcaggatattgtgttgggaaccagcttcttgtctatcaactctaaagaggaaacagagcatctggagaacggaaacaagtatcctaacctggagtcagtcaacaaggtaaatggccacagcgaggagactagccagagtcccaacaggactgaaccccacgattctgactgttctgttgacctcggcatctcaaaatctacagaggatctgtcaccccagaagtcaggcccggtgggatctgtcgtgaagtcacattctattacaaatatggaaattggcgggcttaaaatatatgatatcctttcagacaatggcccgcagcagccatcaacaacagtcaagatcacaagtgccgtagacggcaaaaacattgtacggagtaagtccgcaacgctgctctatgaccagcctctgcaggtttttaccggcagcagttcctctagtgatctcatcagcggtacgaaagctatctttaagtttgacagtaatcacaaccctgaagaacctaatattatcaggggacctaccagtgggccacagtccgccccccagatctatggcccaccgcagtacaatatacagtattccagctcagctgctgtgaaggacacgctctggcacagtaaacaaaacccacagattgaccacgctagtttccctccccagcttctcccccggtctgagtctacggagaaccaatcctatgctaagcactcggctaacatgaactttagtaaccacaacaatgtgcgggcaaataccgcatatcatcttcaccaacgcctaggtcctgccagacacggtgagatgtgggcaatctcaccaaacgataggctaatccccgctgtgacaagatcaactatccaaaggcagtctagcgtctcatcgacagcaagcgtgaacctgggcgatccagggtcaactcggcgcgcacaaattcccgaaggcgactatctgtcttatcgggaattccactcagctggacggaccccacctatgatgccagggagccagcggccgctctctgcacgaacttactccattgacggacccaacgcctcgaggccccagtccgcccgcccttccattaacgaaattcccgaacggaccatgagtgtgagtgatttcaactacagtcgcactagccctagcaaacgcccgaacgctcgagtgggctccgagcactccttattggaccccccagggaagtccaaggtgcctagagactggcgcgaacaggtccttcgccacatcgaggccaagaagttggagaagaagcaccctcaaacatccagttcgggcgacccttgccaggatggtatcttcatcagtggccaacagaattattcatctgcaaccctgtcccataaggacgtgccacctgacagcctcatgaagatgcctttaagtaacggccagatgggccagcccctgagaccccaagcaaactatagccagatccaccatccaccccaggcatcggtagcacggcacccatcaagagagcagttgatcgattacttgatgctgaaggttgctcaccagccgccttacacacaaccacattgttcgcctcggcagggacatgaactcgccaaacaagagattagagtgcgcgtagagaaagacccggagcttgggtttagcatttcgggtggagtcggaggcagaggtaatccatttaggcccgacgatgatggcatattcgtgactcgagtgcagcccgaaggtcccgcatctaagttactccagcccggagataaaataatacaggctaacggctatagtttcatcaacattgagcacggacaggccgtaagtttgctgaagaccttccaaaatactgtcgagttgatcattgtgagagaggtgtcaagctag

SEQ ID NO: 88626 - DNA, 4239 bp, Artificial Sequence
  derived and/or modified sequence
atgaccaccaagaggagcctgtttgtgcggctggtgccctgccgctgcctgcggggggaggaggagaccgtgaccaccctggactacagccactgcagcctggagcaggtgcccaaggagatcttcacctttgagaagaccctggaggagctgtacctggatgccaaccagatcgaggagctgcccaagcagctgttcaactgccagagcctgcacaagctgagcctgcctgacaatgacctgaccaccctgcctgccagcatcgccaacctgatcaacctgcgggagctggatgtgtccaagaatggcatccaggagttccctgagaacatcaagaactgcaaggtgctgaccatcgtggaggcctctgtgaaccccatcagcaagctgcctgatggcttcagccagctgctgaacctgacccagctgtacctgaatgatgccttcctggagttcctgcctgccaactttggccgcctgaccaagctgcagatcctggagctgcgggagaaccagctgaagatgctgcccaagaccatgaaccggctgacccagctggagcggctggacctgggcagcaatgagttcacagaggtgcctgaggtgctggagcagctgagcggcctgaaggagttctggatggatgccaaccggctgaccttcatccctggcttcatcggcagcctgaagcagctgacctacctggatgtgtccaagaacaacatcgagatggtggaggagggcatcagcacctgtgagaacctgcaggacctgctgctgagcagcaacagcctgcagcagctgcctgagaccatcggcagcctgaagaacatcaccaccctgaagattgatgagaaccagctgatgtacctgcctgacagcattggaggcctcatctctgtggaggagctggactgcagcttcaatgaggtggaggccctgcccagcagcatcggccagctgaccaacctgcggacctttgctgctgaccacaactacctgcagcagctgcccccagaaattggctcctggaagaacatcaccgtgctcttcctgcacagcaacaagctggagaccctgcctgaggagatgggagacatgcagaagctgaaggtgatcaacctgagtgacaaccggctgaagaacctgcccttctccttcaccaagctgcagcagctgacagccatgtggctgagtgacaaccagagcaagcccctcatccccctgcagaaggagacagattctgagacccagaagatggtgctgaccaactacatgttcccccagcagcccaggacagaagatgtgatgttcatcagtgacaatgaaagcttcaaccccagcctgtgggaggagcagaggaagcagagggcccaggtggcctttgaatgtgatgaggacaaggatgagcgggaggccccaccccgggagggcaacctgaagcgctaccccaccccctacccagatgagctgaagaacatggtgaagacagtgcagaccatcgtgcaccggctgaaggatgaggagaccaatgaagacagcggccgggacctgaagccccatgaggaccagcaggacatcaacaaggatgtgggcgtgaagaccagcgagagcaccaccaccgtgaagagcaaggtggatgagcgggagaagtacatgattggcaacagcgtgcagaagatcagcgagcctgaggccgagatcagccctggcagcctgcctgtgacagccaacatgaaggccagcgagaacctgaagcacatcgtgaaccatgatgatgtgtttgaggagagcgaggagctgagcagtgatgaggagatgaagatggccgagatgaggcctcccctgattgagaccagcatcaaccagcccaaggtggtggccctgagcaacaacaagaaggatgacaccaaggagacagacagcctgagtgatgaggtgacccacaacagcaaccagaacaacagcaactgcagcagccccagcaggatgtctgattctgtgtccctgaacacagacagcagccaggacaccagcctgtgcagccctgtgaagcagacccacatcgacatcaacagcaagatccggcaggaggatgagaacttcaacagcctgctgcagaatggagacatcctgaacagcagcacagaggagaagttcaaggcccatgacaagaaggacttcaacctgcctgaatatgacctgaatgtggaggagcggctggtgctgattgagaagtctgtggacagcacagccacagcagatgacacccacaagctggaccacatcaacatgaacctgaacaagctgatcaccaatgacaccttccagcctgagatcatggagaggagcaagacccaggacatcgtgctgggcaccagcttcctgagcatcaacagcaaggaggagacagagcacctggagaatggaaacaagtaccccaacctggagagcgtgaacaaggtgaatggccacagcgaggagaccagccagagccccaacagaacagagccccatgacagcgactgcagcgtggacctgggcatcagcaagagcacagaggacctgagcccccagaagagcggccctgtgggctctgtggtgaagagccacagcatcaccaacatggagatcggcggcctgaagatctatgacatcctgagtgacaatggcccccagcagcccagcaccaccgtgaagatcaccagcgctgtggatggcaagaacatcgtgcgcagcaagagcgccaccctgctgtatgaccagcccctgcaggtgttcaccggcagcagcagcagcagtgacctgatcagcggcaccaaggccatcttcaagtttgacagcaaccacaaccctgaggagcccaacatcatccggggccccaccagcggcccccagagcgccccccagatctacggccccccccagtacaacatccagtacagcagcagcgctgctgtgaaggacaccctgtggcacagcaagcagaacccccagattgaccacgccagcttccccccccagctgctgcccaggtctgagagcacagagaaccagagctatgccaagcacagcgccaacatgaacttcagcaaccacaacaacgtgcgggccaacacagcctaccacctgcaccagaggctgggccctgcccggcatggagagatgtgggccatcagccccaatgacaggctcatcccagctgtgaccaggagcaccatccagaggcagagctctgtgagcagcacagcctctgtgaacctgggggaccccggcagcacccggcgggcccagatccctgagggggactacctgagctaccgggagttccacagcgctggccgcaccccacccatgatgcctggcagccagaggcccctgagcgcccggacctacagcattgatggccccaatgccagccggccccagagcgcccggcccagcatcaatgagatccctgagaggaccatgtctgtgtctgacttcaactacagcaggaccagccccagcaagaggcccaatgcccgggtgggcagcgagcacagcctgctggaccccccaggcaagagcaaggtgccccgggactggagggagcaggtgctgcggcacatcgaggccaagaagctggagaagaagcacccccagaccagcagcagcggggacccctgccaggacggcatcttcatcagcggccagcagaactacagcagcgccaccctgagccacaaggatgtgcccccagacagcctgatgaagatgcccctgagcaatggccagatgggccagcccctgcggccccaggccaactacagccagatccaccaccccccccaggcctctgtggcccggcaccccagccgggagcagctgattgactacctgatgctgaaggtggcccaccagcccccctacacccagccccactgcagcccccggcagggccacgagctggccaagcaggagatccgggtgcgggtggagaaggaccctgagctgggcttcagcatctctggaggagtgggcggccggggcaaccccttccggccagatgatgatggcatctttgtgaccagggtgcagcctgagggccctgccagcaagctgctgcagcccggggacaagatcatccaggccaacggctacagcttcatcaacatcgagcacggccaggccgtgtccctgctgaagaccttccagaacacagtggagctgatcatcgtgcgggaggtgagcagctag

SEQ ID NO: 88627 - DNA, 4239 bp, Artificial Sequence
  derived and/or modified sequence
atgaccaccaagcggagcctgttcgtgcggctggtgccctgccggtgcctgaggggggaggaggagacggtaactactctggactattctcactgcagccttgaacaagtgcccaaggagattttcacatttgagaagacactggaagaactgtacctggatgccaaccagatcgaggaacttccaaaacaactgtttaactgccagagcctgcacaaactttccttgcccgacaatgacctgacaactctgcccgcaagcatcgccaatttgatcaacctgagggaattggacgtctccaagaacggaatccaggaattcccagaaaacatcaaaaactgcaaggtcctgaccatagtagaagcctctgtcaaccctatcagcaaactgccggatggcttctcacaacttttgaacttaactcagttgtacctgaatgacgcatttctagagttcctcccggctaattttggtagactgacaaaactccagatcttggagcttcgtgaaaaccagctgaagatgctcccaaagactatgaaccggctgacccagcttgaacgtctggaccttggtagcaacgaatttacagaagtgcccgaagtcctggagcaactttccggcctgaaagagttctggatggatgctaatcgtcttacgtttataccgggattcattgggtccctgaagcagttgacctatttggatgtgtcaaagaacaatatcgagatggtagaggagggaatatctacatgcgaaaacctgcaagatcttctgcttagctcaaatagtctgcaacaactgcctgaaaccattggttctttgaaaaatatcactactcttaaaatcgatgaaaaccagctcatgtatctgccggacagcattgggggtcttattagtgttgaagagttggactgcagtttcaatgaggtcgaggctttgccttcctcgattggccaacttacaaacttacggaccttcgcagcagatcacaattacctacaacaactcccacctgagattggttcttggaagaatatcactgtgttgtttctccacagtaataaattggaaacactgcctgaggaaatgggggacatgcagaagctgaaggtcatcaacctcagcgataatcgactgaaaaatctccccttttcattcacaaaactgcagcagctgactgctatgtggctaagtgataatcagtccaagcccctcatacctctccagaaagaaacagattcagaaacacagaagatggttctgactaattacatgttcccccagcagcctaggaccgaggacgttatgttcatctctgacaatgagtcattcaaccccagtttatgggaggagcagagaaaacaacgggcccaggtggccttcgagtgcgacgaggataaggacgaacgggaagcaccaccccgggagggcaatttgaagaggtaccccacaccctatcccgacgagctgaaaaacatggtcaaaaccgtacaaactatcgttcacagactgaaagacgaggagaccaacgaagacagtggcagggacctgaagccccacgaagatcagcaggacattaataaggatgtcggcgtcaagactagcgaaagcactaccacggtgaagtctaaggtagacgaaagggaaaaatacatgatcggtaacagcgtgcagaagatctctgagcccgaagctgagatctctccggggtcactgccagtgactgcgaacatgaaggcctctgaaaacctgaagcacattgtcaaccacgatgacgtgttcgaagagtcagaagaactgtctagcgatgaggaaatgaagatggcagaaatgcggccacccttaatcgagacttcgattaaccagcccaaggttgttgccctgtcgaataataagaaggacgatactaaggagactgattcactgagcgatgaggtaactcacaactcaaatcagaacaactcgaattgcagcagcccttcgcggatgtcggacagcgtgagtttaaatactgactccagccaagacacctctctgtgcagcccagtgaaacagactcacatcgacatcaattccaaaattcggcaggaggacgagaattttaactcattgctgcagaatggtgatattctgaacagtagtactgaagagaagttcaaagctcatgacaagaaagattttaacctacctgaatacgacctcaatgtggaagaaaggctcgtacttatcgagaagtcggtcgactcgacagcgactgcggatgatacccacaagttggaccacattaatatgaaccttaataaactcatcacgaacgatactttccagcccgaaattatggaaagatcaaagactcaggacattgtattgggcacttccttcctgtctataaactccaaagaagaaacggagcacctggagaacggtaacaaatacccaaatctcgagagcgtcaataaagtaaatggccactcggaggagacctctcagtctcccaaccggactgagcctcacgattccgactgtagcgtggatctggggatttctaagagcaccgaagacctatcccctcagaaatcgggccctgttggctctgtggtgaagtcgcacagtataactaatatggaaatcggcgggcttaaaatctatgacattctgtcagacaacggtccacagcagcctagcacaactgttaaaattacatcagctgtggacggcaaaaacattgttcggtcaaaaagtgctacgctgctctacgatcagccactgcaggtctttacgggatccagtagctcgtctgacctcatcagcggaaccaaagcgattttcaaattcgactctaaccataatccggaggaacctaacatcatccggggaccgactagcggaccacagtccgcccctcagatttacgggcctccacagtataatattcagtactccagtagtgctgcagtcaaggatacgctgtggcattctaagcagaaccctcagatagaccatgccagtttccctccgcagttacttccaaggtcagagtccactgagaaccaatcttacgctaaacactcagccaacatgaacttttccaaccataacaacgtcagagccaatacagcataccacctacatcagcggctggggcccgccagacacggcgaaatgtgggcgatttctccaaacgatcgtctgattcccgcggtgacgagaagcaccattcaaaggcagtcctcagtgtcctctaccgcctccgttaatttgggggatccagggtctacacgacgagctcagatacctgaaggcgactacctctcctaccgcgaatttcatagtgccggacgaaccccgcccatgatgcccggttcacagagacctctgtccgcccggacctattccatcgatggtcccaatgcgagtcgcccgcagtctgctaggcctagcatcaacgagataccagaacgcaccatgagtgtgtcagacttcaactactctcgcacaagcccttctaaacggccaaacgcgagagtaggctctgagcatagcctgctggaccctcctggaaaaagcaaggttccacgcgactggagagagcaggtcttgcgacacattgaggcaaagaagcttgaaaagaagcatccgcagactagctcctccggagacccctgtcaggacggaattttcattagtggacagcaaaattactcttcagcgactctgtcccacaaagacgtccctcccgactccctcatgaagatgcctttaagcaacggtcagatgggccaacccttgagaccccaggccaactacagccagattcaccaccctccacaggcatcggtggctcggcatcccagtcgggagcaactgattgactacctgatgttaaaagtcgcacaccaaccgccctacacccagccccactgcagcccacgccaggggcatgaactggccaagcaggagataagagtccgggtagaaaaggaccctgagctgggattcagtatttcaggtggcgttggaggacgagggaatccattccggccagatgatgatggcatcttcgtcacccgcgtgcagccagaggggcctgcctctaagctcctccagccaggcgataagattattcaagcaaatggctattcttttatcaatatcgaacacggacaggcggtgtctctactgaagactttccagaacacggtcgagttgatcatagtgcgcgaagtctcaagttag

SEQ ID NO: 88628 - DNA, 4239 bp, Artificial Sequence
  derived and/or modified sequence
atgacgaccaagcgctctctgtttgttcgcttggtgccatgcagatgcctgcggggtgaggaggagactgtgacaacccttgattactcacactgctcattagaacaggtccccaaggagatttttacatttgaaaaaactctggaggagctgtacctggacgcaaatcagattgaggaattgcctaaacagttgtttaattgtcagtctctccacaagctgtcactacccgacaatgacctcaccacactccctgcttctatcgccaatttaatcaatcttagagagttggacgtgagtaaaaacggaattcaggaatttccagagaacattaagaactgcaaagttctgaccatcgtagaggcatctgtgaaccccattagtaaactaccagatggtttcagccagttgctgaacttgactcagctctatctgaacgacgcattcctggaattcctgccggctaacttcggacgtctgaccaagttgcaaattctcgagctcagggaaaaccaactcaagatgctgcccaaaaccatgaacagattgacccaactggagcgtctggatcttggctcgaatgaattcaccgaggtgccagaggtccttgagcaattatcggggttgaaggagttctggatggatgccaaccgtctgacctttatcccaggatttatcggctcccttaagcaattgacatacctggatgttagcaagaacaacatagagatggtggaggaagggatttcaacctgcgagaacctacaggatctgctgctgagctctaactcattacagcagttgcccgaaacaataggttctctcaagaatattacaacgctgaagattgacgaaaaccagctgatgtatctgcctgatagcatcgggggactcatttcggtagaagagttggattgctcattcaatgaagttgaagcgcttccatcctctattggccagttgaccaacctacgaacgttcgccgcagaccataactacttgcagcaactacccccagagattggatcctggaaaaatataacagtccttttcctgcacagcaataaactagaaacacttccagaagagatgggcgatatgcagaagctgaaggtaatcaatctctccgacaatcgactgaagaatcttccgttcagttttaccaaactacagcagctgaccgctatgtggttgagtgacaaccagagcaaaccattaatcccactgcagaaggaaacagatagcgaaactcagaagatggtcttgaccaattacatgtttcctcagcagccccgaacagaggacgtgatgtttataagcgacaacgaaagttttaatccgtccctgtgggaggaacaacgtaagcaacgcgcacaggtcgcttttgagtgcgacgaggacaaagacgaacgtgaggcgccacctagggaagggaacctgaaaaggtacccaaccccctacccagatgagctcaagaatatggttaagacggtccagacgattgtgcaccggctgaaggacgaagagactaatgaagactctggccgagacctcaagccgcacgaggatcagcaggatatcaacaaggacgttggtgtaaagacttccgaaagcaccacaaccgtcaagagcaaagtcgacgagagggagaaatatatgatcggaaactcagtgcaaaagatctctgaacccgaagcggagattagccctggatcactccccgtgaccgccaatatgaaagcctctgagaacctgaaacacatcgtgaatcacgacgacgtctttgaagagtcagaggagttgagctctgatgaagagatgaaaatggccgaaatgagacccccattgatcgaaacttccatcaaccagccaaaggtggtggccctgtcgaataacaagaaagacgatactaaggagacggacagcctgtccgacgaggtcacccataacagcaatcaaaacaattcaaattgtagctcgcccagccgaatgtcagattccgtttcactgaatacggattccagccaggataccagcctgtgtagcccggttaaacagactcacatcgatatcaatagcaaaatccggcaggaggacgagaactttaattccctgctgcaaaacggagacattctgaattcatccacagaagagaaatttaaagcccatgacaagaaggactttaatctcccagagtatgacctcaacgttgaagaacggctggtgttaattgagaagtcagtggacagtaccgctactgccgatgatacccacaagcttgaccacatcaacatgaaccttaacaagctcatcacaaacgacacgttccaaccagagatcatggagcgatcaaaaacccaggatattgtgctgggaacaagctttctctccatcaactctaaagaggaaactgaacacctagagaatggaaacaaataccccaatctggagagcgtgaacaaggtgaatgggcattccgaagagaccagccagagtccaaataggaccgaaccccacgacagtgattgctctgttgatttggggatttcgaagagcacagaagacctgtcgccccagaagtcagggccagtaggttccgttgtcaaatctcactccataacaaatatggagatcggaggtctcaaaatatatgacatcctctccgacaacggccctcagcaaccatcaaccacagtgaaaattacttctgctgtcgacgggaaaaacatcgtgagaagcaaaagtgctacccttctttatgaccagcccctgcaggtgttcaccgggtcctcctcaagctctgacctaatatcaggaactaaagcaatcttcaaatttgacagcaaccacaaccccgaagaaccaaatattattcggggacctacgagtgggccacaaagcgccccacagatatatggaccaccgcaatataacatacagtatagctcaagcgctgcagttaaggatactctgtggcactcgaaacaaaacccccagattgatcacgccagttttcctccccagctgttgcccaggagcgaatccactgagaatcagtcttacgccaagcactctgcgaatatgaacttttctaaccacaacaatgtgcgggctaatacagcgtaccaccttcaccagagactgggccctgcacgccacggagaaatgtgggcgatctcgcccaatgatcggttaatcccagccgtaacgcggtccacaattcaacgccagagctccgtgagctccactgccagcgtgaatctgggagatccgggttctactcggagggcgcagattccggagggggactacctttcctatcgggagttccattcagcagggcgaacgccgcctatgatgcccggttcacagagacctctgagcgcgaggacgtattccattgacggcccaaatgcttcacgcccacagtccgcaagaccttccatcaatgagattcctgaacggactatgagcgtgtccgactttaactattcccgtacgtcgccttctaagcgcccaaatgctagggttggcagtgaacattctcttttggatccacctggcaagagcaaagtccccagggattggagagagcaagtgttacgtcacatcgaagctaagaagctcgagaagaaacacccacagacgtcgtctagcggcgatccctgccaggacggtatttttatctccggccaacagaactattcttctgcaaccctgagccacaaagatgtgcctcccgactcactcatgaaaatgcctcttagcaacggacagatgggccagccattgaggccccaggctaactacagtcaaattcatcatcctcctcaagcttcagtggccaggcatcccagccgggagcagttgatcgactacttaatgttgaaggtggcacatcaacctccgtatacacagccccattgttctccacgtcagggccatgagctggcaaagcaggagattcgcgtgcgggttgagaaagatcccgaattaggcttttccattagtgggggagttggcggtcggggaaacccgttccgcccagacgacgatggcatctttgtgacaagagtacagccagagggaccagccagcaagcttttgcagcctggtgacaagattatccaggcgaatgggtactccttcatcaacattgaacacggccaggccgtgtcgctgctcaagactttccagaacaccgtggagctgattattgtgcgggaggtgagctcctag

SEQ ID NO: 88629 - DNA, 4239 bp, Artificial Sequence
  derived and/or modified sequence
atgaccaccaagagaagcctgttcgtgagactggtgccctgcagatgcctgagaggcgaggaggagaccgtgaccaccctggactacagccactgcagcctggagcaggtgcccaaggagatcttcaccttcgagaagaccctggaggagctgtacctggacgccaaccagatcgaggagctgcccaagcagctgttcaactgccagagcctgcacaagctgagcctgcccgacaacgacctgaccaccctgcccgccagcatcgccaacctgatcaacctgagagagctggacgtgagcaagaacggcatccaggagttccccgagaacatcaagaactgcaaggtgctgaccatcgtggaggccagcgtgaaccccatcagcaagctgcccgacggcttcagccagctgctgaacctgacccagctgtacctgaacgacgccttcctggagttcctgcccgccaacttcggcagactgaccaagctgcagatcctggagctgagagagaaccagctgaagatgctgcccaagaccatgaacagactgacccagctggagagactggacctgggcagcaacgagttcaccgaggtgcccgaggtgctggagcagctgagcggcctgaaggagttctggatggacgccaacagactgaccttcatccccggcttcatcggcagcctgaagcagctgacctacctggacgtgagcaagaacaacatcgagatggtggaggagggcatcagcacctgcgagaacctgcaggacctgctgctgagcagcaacagcctgcagcagctgcccgagaccatcggcagcctgaagaacatcaccaccctgaagatcgacgagaaccagctgatgtacctgcccgacagcatcggcggcctgatcagcgtggaggagctggactgcagcttcaacgaggtggaggccctgcccagcagcatcggccagctgaccaacctgagaaccttcgccgccgaccacaactacctgcagcagctgccccccgagatcggcagctggaagaacatcaccgtgctgttcctgcacagcaacaagctggagaccctgcccgaggagatgggcgacatgcagaagctgaaggtgatcaacctgagcgacaacagactgaagaacctgcccttcagcttcaccaagctgcagcagctgaccgccatgtggctgagcgacaaccagagcaagcccctgatccccctgcagaaggagaccgacagcgagacccagaagatggtgctgaccaactacatgttcccccagcagcccagaaccgaggacgtgatgttcatcagcgacaacgagagcttcaaccccagcctgtgggaggagcagagaaagcagagagcccaggtggccttcgagtgcgacgaggacaaggacgagagagaggccccccccagagagggcaacctgaagagataccccaccccctaccccgacgagctgaagaacatggtgaagaccgtgcagaccatcgtgcacagactgaaggacgaggagaccaacgaggacagcggcagagacctgaagccccacgaggaccagcaggacatcaacaaggacgtgggcgtgaagaccagcgagagcaccaccaccgtgaagagcaaggtggacgagagagagaagtacatgatcggcaacagcgtgcagaagatcagcgagcccgaggccgagatcagccccggcagcctgcccgtgaccgccaacatgaaggccagcgagaacctgaagcacatcgtgaaccacgacgacgtgttcgaggagagcgaggagctgagcagcgacgaggagatgaagatggccgagatgagaccccccctgatcgagaccagcatcaaccagcccaaggtggtggccctgagcaacaacaagaaggacgacaccaaggagaccgacagcctgagcgacgaggtgacccacaacagcaaccagaacaacagcaactgcagcagccccagcagaatgagcgacagcgtgagcctgaacaccgacagcagccaggacaccagcctgtgcagccccgtgaagcagacccacatcgacatcaacagcaagatcagacaggaggacgagaacttcaacagcctgctgcagaacggcgacatcctgaacagcagcaccgaggagaagttcaaggcccacgacaagaaggacttcaacctgcccgagtacgacctgaacgtggaggagagactggtgctgatcgagaagagcgtggacagcaccgccaccgccgacgacacccacaagctggaccacatcaacatgaacctgaacaagctgatcaccaacgacaccttccagcccgagatcatggagagaagcaagacccaggacatcgtgctgggcaccagcttcctgagcatcaacagcaaggaggagaccgagcacctggagaacggcaacaagtaccccaacctggagagcgtgaacaaggtgaacggccacagcgaggagaccagccagagccccaacagaaccgagccccacgacagcgactgcagcgtggacctgggcatcagcaagagcaccgaggacctgagcccccagaagagcggccccgtgggcagcgtggtgaagagccacagcatcaccaacatggagatcggcggcctgaagatctacgacatcctgagcgacaacggcccccagcagcccagcaccaccgtgaagatcaccagcgccgtggacggcaagaacatcgtgagaagcaagagcgccaccctgctgtacgaccagcccctgcaggtgttcaccggcagcagcagcagcagcgacctgatcagcggcaccaaggccatcttcaagttcgacagcaaccacaaccccgaggagcccaacatcatcagaggccccaccagcggcccccagagcgccccccagatctacggccccccccagtacaacatccagtacagcagcagcgccgccgtgaaggacaccctgtggcacagcaagcagaacccccagatcgaccacgccagcttccccccccagctgctgcccagaagcgagagcaccgagaaccagagctacgccaagcacagcgccaacatgaacttcagcaaccacaacaacgtgagagccaacaccgcctaccacctgcaccagagactgggccccgccagacacggcgagatgtgggccatcagccccaacgacagactgatccccgccgtgaccagaagcaccatccagagacagagcagcgtgagcagcaccgccagcgtgaacctgggcgaccccggcagcaccagaagagcccagatccccgagggcgactacctgagctacagagagttccacagcgccggcagaaccccccccatgatgcccggcagccagagacccctgagcgccagaacctacagcatcgacggccccaacgccagcagaccccagagcgccagacccagcatcaacgagatccccgagagaaccatgagcgtgagcgacttcaactacagcagaaccagccccagcaagagacccaacgccagagtgggcagcgagcacagcctgctggacccccccggcaagagcaaggtgcccagagactggagagagcaggtgctgagacacatcgaggccaagaagctggagaagaagcacccccagaccagcagcagcggcgacccctgccaggacggcatcttcatcagcggccagcagaactacagcagcgccaccctgagccacaaggacgtgccccccgacagcctgatgaagatgcccctgagcaacggccagatgggccagcccctgagaccccaggccaactacagccagatccaccaccccccccaggccagcgtggccagacaccccagcagagagcagctgatcgactacctgatgctgaaggtggcccaccagcccccctacacccagccccactgcagccccagacagggccacgagctggccaagcaggagatcagagtgagagtggagaaggaccccgagctgggcttcagcatcagcggcggcgtgggcggcagaggcaaccccttcagacccgacgacgacggcatcttcgtgaccagagtgcagcccgagggccccgccagcaagctgctgcagcccggcgacaagatcatccaggccaacggctacagcttcatcaacatcgagcacggccaggccgtgagcctgctgaagaccttccagaacaccgtggagctgatcatcgtgagagaggtgagcagctag

SEQ ID NO: 88630 - DNA, 8647 bp, Artificial Sequence
  derived and/or modified sequence
ggacggagctggatcctgcttctcgccaaggcaggaagtgagtttcgcactgcaattccgggcggtgtcacgagtgaaaagttttgtttttttttttttcggcggagatcctcgttggggctgggaaactcctgcaaaactcgagaccaggaagccagcccgcaccccaacccccaccaaagccacctactcttcttctgtgggaggccagtccacatccgctctcacccgagagagatattcagctggatccaaagtgactgatgaagggaaggaaatcatgtcaagcgaagccttgaaaaagctgccctgagacggtgtcccgccgaaagaatgttggctcaattaagaaacatcagggagataaattcaacccagtgtgtctaaaaatgactacaaaacgaagtttgtttgtgcggttggtaccatgtcgctgtctacgaggggaagaggagactgtcactactcttgattattctcattgcagcttagaacaagttccgaaagagatttttacttttgaaaaaaccttggaggaactctatttagatgctaatcagattgaagagcttccaaagcaactttttaactgtcagtctttacacaaactgagtttgccagacaatgatttaacaacgttaccagcatccattgcaaaccttattaatctcagggaactggatgtcagcaagaatggaatacaggagtttccagaaaatataaaaaattgtaaagttttgacaattgtggaggccagtgtaaaccctatttccaagctccctgatggattttctcagctgttaaacctaacccagttgtatctgaatgatgcttttcttgagttcttgccagcaaattttggcagattaactaaactccaaatattagagcttagagaaaaccagttaaaaatgttgcctaaaactatgaatagactgacccagctggaaagactggatttgggaagtaacgaattcacggaagtgcctgaagtacttgagcaactaagtggattgaaagagttttggatggatgctaatagactgacttttattccagggtttattggtagtttgaaacagctcacatatttggatgtttctaaaaataatattgaaatggttgaagaaggaatttcaacatgtgaaaaccttcaagacctcctattatcaagcaattcacttcagcagcttcctgagactattggttcgttgaagaatataacaacgcttaaaatagatgaaaaccagttaatgtatctgccagactctataggagggttaatatcagtagaagaactggattgtagtttcaatgaagttgaagctttgccttcatctattgggcagcttactaacttaagaacttttgctgctgatcataattacttacagcagttgcccccagagattggaagctggaaaaatataactgtgctgtttctccattccaataaacttgagacacttccagaggaaatgggtgatatgcaaaaattaaaagtcattaatttaagtgataatagattaaagaatttaccctttagctttacaaagctacagcaattgacagctatgtggctctcagataatcagtccaaacccctgatacctcttcaaaaagaaactgattcagagacccagaaaatggtgcttaccaactacatgttccctcaacagccaaggactgaggatgttatgtttatatcagataatgaaagttttaacccttcattgtgggaggaacagaggaaacagcgggctcaagttgcatttgaatgtgatgaagacaaagatgaaagggaggcacctcccagggagggaaatttaaaaagatatccaacaccatacccagatgagcttaagaatatggtcaaaactgttcaaaccattgtacatagattaaaagatgaagagaccaatgaagactcaggaagagatttgaaaccacatgaagatcaacaagatataaataaagatgtgggtgtgaagacctcagaaagtactactacagtaaaaagcaaagttgatgaaagagaaaaatatatgataggaaactctgtacagaagatcagtgaacctgaagctgagattagtcctgggagtttaccagtgactgcaaatatgaaagcctctgagaacttgaagcatattgttaaccatgatgatgtttttgaggaatctgaagaactttcttctgatgaagagatgaaaatggcggagatgcgaccaccattaattgaaacctctattaaccagccaaaagtcgtagcacttagtaataacaaaaaagatgatacaaaggaaacagattctttatcagatgaagttacacacaatagcaatcagaataacagcaattgttcttctccatctcggatgtctgattcagtttctcttaatactgatagtagtcaagacacctcactctgctctccagtgaaacaaactcatattgatattaattccaaaatcaggcaagaagatgaaaattttaacagccttttacaaaatggagatattttaaacagttcaacagaggaaaagttcaaagctcatgataaaaaagattttaacttacctgaatatgatttgaatgttgaagagcgattagttctaattgagaaaagtgttgactcaacagccacagctgatgacactcacaaattagatcatatcaatatgaatcttaataaacttataactaatgatacatttcaaccagagatcatggaaagatcaaaaacacaggatattgtgcttggaacaagctttttaagcattaattctaaagaggaaactgagcacttggaaaatggaaacaagtatcctaatttggaatccgtaaataaggtaaatggacattctgaggaaacttcccagtctcctaataggactgaaccacatgacagtgattgttctgttgacttaggtatttccaaaagcactgaagatctctcccctcagaaaagtggtccagttggatctgttgtgaaatctcatagcataactaatatggagattggagggctaaaaatctatgatattcttagtgataatggacctcagcagccaagtacaaccgttaaaatcacatctgctgttgatggaaaaaatatagtcaggagcaagtctgccacactgttgtatgatcaaccattgcaggtatttactggttcttcctcatcttctgatttaatatcaggaacaaaggcaattttcaagtttgattcaaatcataatcccgaagagccaaatataataagaggccccacaagtggcccacaatctgcacctcaaatatatggtcctccacagtataatatccaatacagtagcagtgctgcagtcaaagacactttgtggcactccaaacaaaatccccaaatagaccatgccagttttcctcctcagctccttcctagatcagagagcacagaaaatcaaagttatgctaaacattctgccaatatgaatttctctaatcataacaatgttcgagctaatactgcataccatttacatcagagacttggcccagcaagacatggggaaatgtgggccatctcaccaaacgaccgacttattcctgcagtaactcgaagtacaatccagcgacaaagtagtgtgtcctccacagcctctgtaaatcttggtgatccaggctctacaaggcgggctcagattcctgaaggagattatttatcatacagagagttccactcagcgggaagaactcctccaatgatgccaggatcacagagacccctttctgcacgaacatacagcatagatggtccaaatgcatcaagacctcagagtgctcgaccctctattaatgaaataccagagagaactatgtcagttagtgatttcaattattcacggactagtccttcaaaaagaccaaatgcaagggttggttctgagcattctttattagatcctccaggaaaaagtaaagttcctcgtgactggagagaacaagtacttcgacatattgaagccaaaaagttagaaaagaagcatccccagacatccagttcaggagatccttgtcaagatggtatattcatttcaggacagcagaactactcatcagccacacttagtcacaaagatgttcctccagacagcttgatgaaaatgcctttgagtaatggacagatgggccagcctctcaggcctcaggcaaattatagtcaaatacatcacccccctcaggcatctgtggcaaggcatccctctagagaacaactaattgattacttgatgctgaaagtggcccaccagcctccatatacacagccccattgttctcctagacaaggccatgaactggcaaaacaagagattcgagtgagggttgaaaaggatccagaacttggatttagcatatcaggtggtgtcgggggtagaggaaacccattcagacctgatgatgatggtatatttgtaacaagggtacaacctgaaggaccagcatcaaaattactgcagccaggtgataaaattattcaggctaatggctacagttttataaatattgaacatggacaagcagtgtccttgctaaaaactttccagaatacagttgaactcatcattgtacgagaagtttcctcataagcactgtggacaaaaaaagcggggaagacagcaagatttattggaagatacttacaggggaaattaatattttgactatttttatatataaagaagaactcaaaaaattatgttcaaatttgtacattaatgaaataatggaacttgtggttagagggaaagaaccactgtacagaatataaaggagactgttgaattcataccatataaaacttgttaggtttttaaacatagcaatcaaggctacaaaaacaaacctgtgttgtttttgtatagattgtaggtttatttttggatttcatatacatgactgaactgtgtgcaaggcaatagttagccttgattttagcccagagacagatggcagagctatctctctcatagcttttatgcccttatttttattcaactggtattaatgtttttctcctgaaactactttttttgatgtgggcaagagatttgaagtgttggcttttgctatgtgcatattgaattgaagagtgagtaggtgaaggtggtgctggtgggttcactttccaaggccagactaaaacagttattttctataaaaatctggaagcaaagaatggggatggggagagctacgtggtagtatgtttttattaggagaataatgcaataaaatatgtaatgtcttttttataaagcaaaaaagacaataattgcatttatgagctcggcaggatctgttcttgtcatagccattgactatacatttgctactggtgattcagtttttaattttttagtcacaggaaatttttaactctactgtagatgcatgtccatgcattttctgtgttatggaaatccactgatttttttttttttttcaaatggtggtacttgcaatctgttttataattagtgctccatttaaatctaatttataatttttattttaagcagcaaatgaaacaaaaatggccagttttaagattgtgttgcctgtaacacaaaatgttacgaaggtttaggaaagcctctttgatttttgtttggccttgcattgccttggtaaagtaaaaggaaacagtacacttggagctaggaaaccaaagcaagctttgtgaaactggcacagtgatagagaattgctgtggagagttatagagcaaagggatgggtccttgaggcctgccagtgtgtaaaggtgttcaaataaagggctgtttctacaggtaacattaaatgtgaactcaacacttccagagtctttaaagggtttctatgtgtatcagtgtaatagtgttttaccaccaactgcctttctttgttcctagttactgtaacaaatatttgatgatagaggtttattaattttgtttatccagaccattaattttatttgtttttgttctatgtaatcaaataaaatttgagtaacatgtaatggtaaggattaatgcatggttatttggaccagaaaaaagtgccatagaagaccaataactgtttagttgaggctagtctggaacctttcattagagcaatatttggttattgcacttcatttttatttactaagaaatgcaatttgggaatttttaatctgttatgctttgtttatcaaccttgattttaattaagacttttataagactagcttaaaacaccaaccaacattatttttgcaaaagtgagttggactcactttccattcttgctagtcagagtaagtaggcagcacttttaaaaatatgtgaactcaaatattgcacttctttcaagatgttatcaattggttattgtactgtatagttttaataattttgattgaaaccctttaacaactctttgtaaattttaactcattttagttgattttcagtactatttacataggaattgatttttatggatatagtagaagaaatgtgctgtattttgataaaattcacttattgtatgtgtgttgtaatctaaaaaaaaaaagaatgacaaacagcttctttaagacaagtctcggtgttccctttattcttagtttgtttttaaatattaattttggcattctaaaatagctaacatttcttttattgatttcagattttcacaggcacattctacttttaatcagaaatatatttaataagtataattgtgaagttttcaactactttaccttgaaccacatataccaattataattttggaaaaggaattaagcctcacggaacaatggatcttcagcaaaccttaacttcattgtctgcacattacattgaagtattataaatgcaacagatgttatatgcactggcattttatcctactctagttagttaaaattttatagtattcttgcaacacataaagttgcgtaagaaactttaccaagaggagtattatagccaagttttctttgaaagtattggaaaactaaaattaaatgacaaggactttgaattagaattttgctgtaataaagtttcaaaatttgaataaaataattaaattttttgaggaagtggagaagacatttttagtttatatattgttgagtaaattgtagttaaggcctatacccataactaactttagtaagtattatatagcaattcatcaaaaccacaactgtcttttagtgattttgtctttaagagtaatttcttactctaaccagtaaaaaaataatactgatcagagtaatttatacggcatacaatagttgatacaatctaaagatttatgctaattaaggaattatcacttcatctgaatcaatgaaattctaaaattccctacatatttattttgtaaatattcttctgacctctttggactggatatgaagatatatatatatacacttaattcttttaaacacaaaacttgccataagcagaaccaaacttttaagtattaatttgctgcacttaaaaaatcccattagcagctatgtaatatttttatcaaccaacatttattcattccaaatttttgtatatatctagatgaagtaacacatagaggatagataacaaactaatgatgtttaaactggtttatttacaaaattcggggttagagaaattctcatgaaaaatatacaatttttttttagcattaaaaccctgtatatctaggtgtggaagaagtgtagtttatctcaaattattattatttacttctaaagggaggcattaagatgggaaatgtttctctgatggagattgacgtgtgaaatctatttggaagggtatttttttcactcagtctgttgcattcttacagccttctgttttaatgttcagtgaataggtttcttatgaaatggacattgaaataaaaattatgattcaagagcattaattgatgaacaagtgaacaagatgcctctttaaaaaaaaaaaagaaaaagtaatctagacaggcagccaactcagacctttgggtattcctttgtttctaaataaggaccttcagaaaaagttgaccatattctacctaaagctgctaattctttacagaattcataagcccaggggatagtaagtagtcatttagttttggaaagttcttaagagaatgctatcttctacagtctcatgaagcagtttttcaagattagaatctgtggtcagctataacgtacagtcctaatatccaaccacctgagaagctcatcctaagctgagaaagcctaaaatgttagagaatgtttagagaaaacacctgaaattttttttaagagaacaacctaggttttattgtagagaacaatcaaaatactcctgaacctttctatagaatctttaggagagaggctgacaaaaagaatccttctgttacaactttcttttctaatgtaacaaccagggacaatggtgatctgtcacgcatctgcccatctagcttctcaatcggcccacggttttatttcaggataaaatttgagaaactagtatcactggggaaggaagaaacctaagctgtaaaattatgcttttcccctcaagggattcaataaagcttatttttcatgaaaacaa

SEQ ID NO: 88631 - protein, 1346 aa, Artificial Sequence
  derived and/or modified sequence
MTTKRSLFVRLVPCRCLRGEEETVTTLDYSHCSLEQVPKEIFTFEKTLEELYLDANQIEELPKQLFNCQSLHKLSLPDNDLTTLPASIANLINLRELDVSKNGIQEFPENIKNCKVLTIVEASVNPISKLPDGFSQLLNLTQLYLNDAFLEFLPANFGRLTKLQILELRENQLKMLPKTMNRLTQLERLDLGSNEFTEVPEVLEQLSGLKEFWMDANRLTFIPGFIGSLKQLTYLDVSKNNIEMVEEGISTCENLQDLLLSSNSLQQLPETIGSLKNITTLKIDENQLMYLPDSIGGLISVEELDCSFNEVEALPSSIGQLTNLRTFAADHNYLQQLPPEIGSWKNITVLFLHSNKLETLPEEMGDMQKLKVINLSDNRLKNLPFSFTKLQQLTAMWLSDNQSKPLIPLQKETDSETQKMVLTNYMFPQQPRTEDVMFISDNESFNPSLWEEQRKQRAQVAFECDEDKDEREAPPREGNLKRYPTPYPDELKNMVKTVQTIVHRLKDEETNEDSGRDLKPHEDQQDINKDVGVKTSESTTTVKSKVDEREKYMIGNSVQKISEPEAEISPGSLPVTANMKASENLKHIVNHDDVFEESEELSSDEEMKMAEMRPPLIETSINQPKVVALSNNKKDDTKETDSLSDEVTHNSNQNNSNCSSPSRMSDSVSLNTDSSQDTSLCSPVKQTHIDINSKIRQEDENFNSLLQNGDILNSSTEEKFKAHDKKDFNLPEYDLNVEERLVLIEKSVDSTATADDTHKLDHINMNLNKLITNDTFQPEIMERSKTQDIVLGTSFLSINSKEETEHLENGNKYPNLESVNKVNGHSEETSQSPNRTEPHDSDCSVDLGISKSTEDLSPQKSGPVGSVVKSHSITNMEIGGLKIYDILSDNGPQQPSTTVKITSAVDGKNIVRSKSATLLYDQPLQVFTGSSSSSDLISGTKAIFKFDSNHNPEEPNIIRGPTSGPQSAPQIYGPPQYNIQYSSSAAVKDTLWHSKQNPQIDHASFPPQLLPRSESTENQSYAKHSANMNFSNHNNVRANTAYHLHQRLGPARHGEMWAISPNDRLIPAVTRSTIQRQSSVSSTASVNLGDPGSTRRAQIPEGDYLSYREFHSAGRTPPMMPGSQRPLSARTYSIDGPNASRPQSARPSINEIPERTMSVSDFNYSRTSPSKRPNARVGSEHSLLDPPGKSKVPRDWREQVLRHIEAKKLEKMPLSNGQMGQPLRPQANYSQIHHPPQASVARHPSREQLIDYLMLKVAHQPPYTQPHCSPRQGHELAKQEIRVRVEKDPELGFSISGGVGGRGNPFRPDDDANGYSFINIEHGQAVSLLKTFQNTVELIIVREVSS

SEQ ID NO: 88632 - DNA, 4041 bp, Artificial Sequence
  derived and/or modified sequence
atgacaacaaagcgatctctgttcgtgagattggtaccgtgcagatgtctcaggggggaggaagagaccgtaaccactctcgactactcccattgttcacttgagcaagtgcctaaggaaatttttacattcgagaaaaccctggaggagctatacctggacgcaaatcagattgaggagctgcccaaacagctatttaattgccaaagcctccataaattgtctttgcccgataacgacctgacaacgctgcctgcttcaattgcaaaccttattaacttacgggagctggatgtgtcgaagaatggaatccaagaatttcctgagaacattaaaaactgtaaggtgctgaccatcgtggaagcgtctgtgaacccaattagcaaacttcccgacgggttttcacaactcctcaatctgacccagctttacctgaacgatgcctttcttgagtttctgccggctaacttcggacgcttgaccaaactgcaaatcctagagctccgggaaaaccaactgaagatgctgccgaagaccatgaatagacttacacagcttgaacggctggatctgggcagcaatgagtttacagaggtgccggaagtcctcgagcagctctccgggttaaaggaattttggatggacgcaaatagactcacttttatccccggtttcataggttctcttaaacaacttacttatttggacgtgagcaaaaacaatatcgagatggtggaagagggaatcagcacctgtgagaatctacaggacctgttgctttcatccaactcactgcagcagctgcctgaaaccataggtagcctgaaaaacattacaacactgaaaattgatgagaaccagcttatgtacctcccagatagcatcggaggtctcatctctgttgaggagcttgactgctcttttaacgaggtagaggccttaccctcaagcattgggcagctcactaacctgcgaacatttgctgccgaccataattacctacaacagcttccccctgagatcgggagctggaagaacattaccgttctttttttacactccaataaactcgagactctcccggaagagatgggcgatatgcagaaattaaaggttatcaatctcagtgataaccgtctaaaaaatctgccattttcctttaccaagctgcaacagttgaccgccatgtggctgtcagacaaccagagcaaacccttaatacccctccagaaggagacagatagcgagacacagaaaatggtgctcaccaactatatgtttccacagcagcctcggaccgaggatgtaatgttcatcagcgacaatgagtcctttaatcccagcctttgggaagagcagcgaaagcagagagcccaagtggctttcgagtgcgacgaagataaagatgagcgcgaggctccacccagggagggtaatctgaagagatatccaacaccgtaccccgacgagctcaaaaatatggtgaagacagtacagacgatcgtccatcgcctaaaggacgaggaaacaaatgaggacagcggacgggatctgaagcctcacgaagaccaacaagatatcaataaggacgtcggtgttaagacatcagaatctacaaccaccgtgaaaagcaaggtcgatgaaagggagaagtacatgatcggcaacagtgttcaaaagatctcagagccagaggctgagatctccccaggaagcctccccgtgactgctaacatgaaagcctcagagaacctgaagcatatcgttaatcacgacgatgtttttgaggagagcgaggaactgagctcagacgaggaaatgaaaatggccgaaatgagacctcccttaatcgagacctcaattaatcagcctaaggtggttgctctctctaacaacaagaaggatgatacgaaggaaacagattcgctctctgatgaggttacgcacaacagcaaccagaataattccaactgtagttctcctagcaggatgtctgatagtgtctccctcaataccgattcctcacaggacactagtctgtgttctccagtcaagcagacacacatcgacattaattccaagatcagacaggaggatgaaaacttcaattctctcctccagaacggcgatatcctgaatagcagcaccgaagaaaagtttaaagcccatgacaaaaaggactttaacctgcccgaatacgatctgaacgtcgaagaaagactggtcttgattgaaaaaagcgttgactctacggctactgctgacgatacgcacaagctggaccacattaacatgaacttaaacaagttgattaccaatgacacctttcagccagaaatcatggaaagatctaagacgcaggacatagtgttagggacctccttcctctctatcaactctaaggaagagaccgagcatttggagaatggtaataaatacccgaacctcgaatccgtaaataaggttaatggccattcagaagaaacctctcagtcccccaaccggacagagccccacgatagcgattgttcggtcgatctgggcatctccaaatctacggaagatctttctccacagaagtctggcccggtcggatctgtggtaaaatcgcacagtatcactaacatggaaattggcgggcttaaaatatatgatatcctctccgataatggaccccaacagccgtctactaccgtcaaaattactagcgctgtagatgggaaaaacattgtcagatccaagtccgcgacattgctatatgatcagcctctgcaagttttcacaggttcaagttctagtagtgatctgatctctggaactaaggccatcttcaagtttgacagcaaccacaaccccgaggagcccaatatcattaggggccctactagcggccctcaaagcgctcctcagatctacgggccgcctcaatataacatccagtattcttcatctgcagcggttaaggataccctttggcactctaaacaaaatcctcagattgaccacgcaagcttcccccctcagctgctgccccgatctgaaagcaccgagaatcaatcatacgccaaacatagtgcaaacatgaacttttctaatcacaataatgtccgggccaacacggcttaccacctgcaccaacgcctgggacctgctagacacggggagatgtgggcgatctcgccaaacgataggctgatccccgctgtaactcgatctactattcagcggcagagcagcgtctccagcactgcaagtgtgaacctgggtgatccaggttcaacaaggagagcacagatcccagaaggcgactacctcagctatcgcgaattccactctgcaggcaggaccccccccatgatgccggggagtcagcgaccccttagcgctagaacttatagtatcgacggtcccaacgcctcacgtccccaaagtgcaagaccttctatcaacgaaatccccgaacgaacaatgtcagtgagcgattttaattactcccgaacaagccctagcaaacgacctaacgcccgggtgggatcggagcacagcctcctggaccccccaggcaagagcaaggtgccaagggactggcgggagcaggtgctgaggcatattgaagctaagaagctggaaaaaatgcctttaagtaatggacagatgggtcaacccctgagaccccaggccaattatagtcagatacatcacccacctcaggctagcgtggcccggcatccctcccgggagcaactgatagactaccttatgctgaaggtggctcatcaacccccctatacccagccccactgttcaccacgccagggccacgagctggccaaacaagagatcagagttcgagtcgaaaaggatcctgagctgggtttctcaattagtggaggtgtgggggggagaggcaacccctttcgccccgacgatgatgcaaatggttacagcttcatcaatatcgaacacgggcaggccgtgtccctgctcaagacatttcaaaacaccgtcgagctgatcatcgtcagggaagtttcttcttag

SEQ ID NO: 88633 - DNA, 4041 bp, Artificial Sequence
  derived and/or modified sequence
atgaccaccaagaggagcctgtttgtgcggctggtgccctgccgctgcctgcggggggaggaggagaccgtgaccaccctggactacagccactgcagcctggagcaggtgcccaaggagatcttcacctttgagaagaccctggaggagctgtacctggatgccaaccagatcgaggagctgcccaagcagctgttcaactgccagagcctgcacaagctgagcctgcctgacaatgacctgaccaccctgcctgccagcatcgccaacctgatcaacctgcgggagctggatgtgtccaagaatggcatccaggagttccctgagaacatcaagaactgcaaggtgctgaccatcgtggaggcctctgtgaaccccatcagcaagctgcctgatggcttcagccagctgctgaacctgacccagctgtacctgaatgatgccttcctggagttcctgcctgccaactttggccgcctgaccaagctgcagatcctggagctgcgggagaaccagctgaagatgctgcccaagaccatgaaccggctgacccagctggagcggctggacctgggcagcaatgagttcacagaggtgcctgaggtgctggagcagctgagcggcctgaaggagttctggatggatgccaaccggctgaccttcatccctggcttcatcggcagcctgaagcagctgacctacctggatgtgtccaagaacaacatcgagatggtggaggagggcatcagcacctgtgagaacctgcaggacctgctgctgagcagcaacagcctgcagcagctgcctgagaccatcggcagcctgaagaacatcaccaccctgaagattgatgagaaccagctgatgtacctgcctgacagcattggaggcctcatctctgtggaggagctggactgcagcttcaatgaggtggaggccctgcccagcagcatcggccagctgaccaacctgcggacctttgctgctgaccacaactacctgcagcagctgcccccagaaattggctcctggaagaacatcaccgtgctcttcctgcacagcaacaagctggagaccctgcctgaggagatgggagacatgcagaagctgaaggtgatcaacctgagtgacaaccggctgaagaacctgcccttctccttcaccaagctgcagcagctgacagccatgtggctgagtgacaaccagagcaagcccctcatccccctgcagaaggagacagattctgagacccagaagatggtgctgaccaactacatgttcccccagcagcccaggacagaagatgtgatgttcatcagtgacaatgaaagcttcaaccccagcctgtgggaggagcagaggaagcagagggcccaggtggcctttgaatgtgatgaggacaaggatgagcgggaggccccaccccgggagggcaacctgaagcgctaccccaccccctacccagatgagctgaagaacatggtgaagacagtgcagaccatcgtgcaccggctgaaggatgaggagaccaatgaagacagcggccgggacctgaagccccatgaggaccagcaggacatcaacaaggatgtgggcgtgaagaccagcgagagcaccaccaccgtgaagagcaaggtggatgagcgggagaagtacatgattggcaacagcgtgcagaagatcagcgagcctgaggccgagatcagccctggcagcctgcctgtgacagccaacatgaaggccagcgagaacctgaagcacatcgtgaaccatgatgatgtgtttgaggagagcgaggagctgagcagtgatgaggagatgaagatggccgagatgaggcctcccctgattgagaccagcatcaaccagcccaaggtggtggccctgagcaacaacaagaaggatgacaccaaggagacagacagcctgagtgatgaggtgacccacaacagcaaccagaacaacagcaactgcagcagccccagcaggatgtctgattctgtgtccctgaacacagacagcagccaggacaccagcctgtgcagccctgtgaagcagacccacatcgacatcaacagcaagatccggcaggaggatgagaacttcaacagcctgctgcagaatggagacatcctgaacagcagcacagaggagaagttcaaggcccatgacaagaaggacttcaacctgcctgaatatgacctgaatgtggaggagcggctggtgctgattgagaagtctgtggacagcacagccacagcagatgacacccacaagctggaccacatcaacatgaacctgaacaagctgatcaccaatgacaccttccagcctgagatcatggagaggagcaagacccaggacatcgtgctgggcaccagcttcctgagcatcaacagcaaggaggagacagagcacctggagaatggaaacaagtaccccaacctggagagcgtgaacaaggtgaatggccacagcgaggagaccagccagagccccaacagaacagagccccatgacagcgactgcagcgtggacctgggcatcagcaagagcacagaggacctgagcccccagaagagcggccctgtgggctctgtggtgaagagccacagcatcaccaacatggagatcggcggcctgaagatctatgacatcctgagtgacaatggcccccagcagcccagcaccaccgtgaagatcaccagcgctgtggatggcaagaacatcgtgcgcagcaagagcgccaccctgctgtatgaccagcccctgcaggtgttcaccggcagcagcagcagcagtgacctgatcagcggcaccaaggccatcttcaagtttgacagcaaccacaaccctgaggagcccaacatcatccggggccccaccagcggcccccagagcgccccccagatctacggccccccccagtacaacatccagtacagcagcagcgctgctgtgaaggacaccctgtggcacagcaagcagaacccccagattgaccacgccagcttccccccccagctgctgcccaggtctgagagcacagagaaccagagctatgccaagcacagcgccaacatgaacttcagcaaccacaacaacgtgcgggccaacacagcctaccacctgcaccagaggctgggccctgcccggcatggagagatgtgggccatcagccccaatgacaggctcatcccagctgtgaccaggagcaccatccagaggcagagctctgtgagcagcacagcctctgtgaacctgggggaccccggcagcacccggcgggcccagatccctgagggggactacctgagctaccgggagttccacagcgctggccgcaccccacccatgatgcctggcagccagaggcccctgagcgcccggacctacagcattgatggccccaatgccagccggccccagagcgcccggcccagcatcaatgagatccctgagaggaccatgtctgtgtctgacttcaactacagcaggaccagccccagcaagaggcccaatgcccgggtgggcagcgagcacagcctgctggaccccccaggcaagagcaaggtgccccgggactggagggagcaggtgctgcggcacatcgaggccaagaagctggagaagatgcccctgagcaatggccagatgggccagcccctgcggccccaggccaactacagccagatccaccaccccccccaggcctctgtggcccggcaccccagccgggagcagctgattgactacctgatgctgaaggtggcccaccagcccccctacacccagccccactgcagcccccggcagggccacgagctggccaagcaggagatccgggtgcgggtggagaaggaccctgagctgggcttcagcatcagcggcggcgtgggcggccggggcaaccccttccggccagatgatgatgccaacggctacagcttcatcaacatcgagcacggccaggccgtgtccctgctgaagaccttccagaacacagtggagctgatcatcgtgcgggaggtgagcagctag

SEQ ID NO: 88634 - DNA, 4041 bp, Artificial Sequence
  derived and/or modified sequence
atgaccaccaagcggagcctgttcgtgcggctggtgccctgccggtgcctgcgtggggaagaggaaacagtaactactttggattatagtcattgttccctggaacaggttccgaaggagatctttaccttcgagaaaacactagaggaactctatctagatgccaaccagatcgaagagctgcctaagcagctgttcaactgtcagtccctgcacaagttaagccttccggataacgaccttactacgctgcccgcaagtatagcaaacctgattaacctgagggagctggacgtgagtaagaatggtattcaggagttcccagaaaacataaagaattgtaaggtgctgacaatcgttgaggccagtgtgaatcccatttctaagttgcctgatgggtttagtcaactgctcaatctcacacagctctaccttaatgacgcattcttggagttcctacctgcaaattttggtaggttgacgaagctgcagattctggaacttcgcgaaaaccagctgaagatgctgcccaaaaccatgaatagattaacccaactggagagactggatctgggttctaatgagttcacagaggtgcccgaggttctggaacaactgtccggcctgaaggagttctggatggacgcaaatcgcctcacctttattcctggctttatcggatcactgaagcaactcacctatctcgacgtgtcaaaaaataatattgaaatggtcgaggagggcatctctacatgcgaaaatctgcaagatctgttgctgagtagtaattctctgcagcagctaccggaaacgatcggaagcctgaagaacattacgactctgaagattgatgaaaaccagctgatgtacctcccggatagcattggcggactgatttccgtagaagagctggactgcagcttcaatgaggtagaggcactgccgagttctataggtcagcttaccaacttacggacattcgccgccgatcataactatcttcagcagctaccccctgaaatcggcagctggaaaaatatcacagtgttatttcttcattctaataaactagagacactgccagaggagatgggagacatgcagaagttgaaggtgattaaccttagcgacaacagacttaagaatctgcccttttcgtttactaaactgcagcagctgaccgccatgtggctgtccgataaccaaagtaaaccactgattccgctccaaaaagaaactgactcagaaacacagaagatggtgttgacgaattatatgttcccccagcagcctcgcaccgaggacgtgatgttcatctctgacaatgagagctttaaccctagtctatgggaagagcagagaaagcagcgtgcccaagtcgccttcgaatgcgacgaggataaggatgagagggaagcccccccaagggaaggtaatctgaagcgctaccctacaccctatccggacgagctgaaaaatatggtgaaaactgttcagactatcgtgcataggctgaaggatgaagagacaaacgaggattcagggcgcgacctaaaacctcatgaggatcagcaggacatcaataaggacgtgggcgtgaaaacttcagagtccacaacgacagtcaagagtaaggtggacgaaagagagaaatatatgattgggaattcagtgcaaaagatctctgagcccgaggcagaaatatcacctggaagtttgccagtgaccgcaaatatgaaggccagcgagaacctcaaacacatcgttaatcacgatgacgtgtttgaggagtctgaggaactgtcgtctgatgaggaaatgaaaatggcagaaatgcgccctccactgattgagactagcataaaccaacccaaggttgtggctctgagtaacaacaaaaaggacgataccaaagaaacggattcattgagtgatgaggtgacgcacaacagcaaccagaacaacagcaactgcagcagccctagtagaatgtctgattctgtctctctgaatacggactcctctcaggatacctcactttgctcccccgtcaaacagacccacatcgacatcaacagtaagatccggcaggaggatgaaaactttaactcgctgcttcagaatggcgatattctcaatagttctacagaggagaaattcaaagcccatgacaagaaggattttaacttacccgagtacgatctgaacgtcgaggagagactcgtattgattgagaagtctgtcgatagcacagccactgctgacgatacgcacaagcttgaccatatcaacatgaacttaaacaaactcataaccaacgataccttccagcccgaaattatggagaggtccaaaactcaagatattgtgctagggacatcgtttctgtctattaactcaaaagaagagacagaacatttagagaacggcaacaagtaccccaatctggagtcagtgaacaaggtaaacggccacagcgaagaaacttctcaatcgcctaatcggacagagccgcacgacagcgactgctccgtcgacctgggcatttcaaaaagcacagaagacctaagcccacaaaagtcgggccctgttggcagtgtcgtgaaaagccatagcatcacaaatatggagatcggtggcctgaaaatctacgatatcttgtcggacaatggtcctcagcagccctccacgaccgtgaaaatcacctcagcggtcgacgggaaaaacatcgttcggagcaagagtgcaaccttactgtacgaccagccattgcaagtatttactggctccagcagcagcagcgacctgatctccggtacaaaagccattttcaagttcgacagtaaccataacccagaggagccaaatattatacgcgggcccacttccggcccgcagtccgctcctcagatctacggcccccctcagtataatattcagtacagcagctccgccgccgtgaaagacaccctttggcatagcaagcagaacccccagatcgaccatgcttccttcccaccacagctgcttccacggagtgagtcgacagagaatcagtcttatgccaagcactctgctaatatgaatttctcaaaccataacaacgtgcgggcaaataccgcctaccacctccatcagcgcctgggcccagcgcgacacggtgagatgtgggccatttcccctaacgaccgccttattcccgccgtgacaagatccacaattcagcggcagagcagtgtctcaagtaccgcttccgttaacttgggtgaccctggatcaactcgccgagcccagattcctgaaggcgattatctttcctatagggagttccactctgccggaaggacgcccccaatgatgcctggctcacagagacccctctctgctagaacctatagcatagacggacccaacgcctcgaggcctcagtccgctaggccctccatcaatgagatccccgagcggacgatgagtgtgagtgacttcaactacagtcgcacgtcgccgtcaaaaagacctaacgctcgggtggggagcgaacatagcctcctggaccctccgggtaagagtaaagtgcccagagactggcgcgagcaggttctccgtcacatagaggccaaaaaactggaaaagatgccactgtctaacggccagatgggtcagccgctacgcccacaggccaactacagtcaaatacaccatccccctcaggcttctgtggcccggcacccctccagagagcaactgatagactatttaatgttgaaagtggcccaccagccaccttatactcaacctcactgtagccctaggcagggacatgagctggcaaagcaggaaatccgcgtgcgggttgagaaggaccctgagctgggcttttctataagcggaggtgtcggcgggcggggcaacccattcagacccgacgacgatgcaaatggatatagtttcatcaacatcgagcatggtcaagccgtgagcctcctcaaaacattccaaaacacagtggagctgattattgtgagagaagtatcttcttag

SEQ ID NO: 88635 - DNA, 4041 bp, Artificial Sequence
  derived and/or modified sequence
atgacgacaaaacggagcctgttcgtcagactggtcccctgtcgctgcttacggggagaagaagaaaccgtcaccaccctcgactatagccactgctcactggagcaagtgccgaaggagatattcacttttgagaagactttggaagagctttacctcgacgcaaaccagatcgaggaactacctaaacagctgtttaattgtcaaagtctgcataagctgtccctgcctgacaatgatctaaccactctacccgcaagcatcgccaacttgatcaacttgcgagagctcgacgttagcaagaacggtattcaggagtttcctgagaatattaagaattgtaaagtccttacaatagtcgaggcatctgttaaccccatatctaagctacccgacggctttagccaactgctgaacctgacccagttataccttaacgacgcattcttggagttcctccccgctaactttggccgtctgaccaaacttcaaattctcgagttgagggaaaatcaattaaagatgctccccaagacaatgaacagactcacccagttggagagactcgacctaggttccaacgaattcacagaggtgccagaagtcctcgagcaactttcagggctcaaagaattttggatggacgccaatagattgacttttataccaggcttcataggcagtcttaagcagctgacctacttggacgtgtccaaaaacaatatcgaaatggtggaggagggcatttcgacctgtgagaacctgcaggaccttctgctgtcttcaaattcactgcagcagcttcccgagactatcggctccttgaaaaacatcactacattgaaaattgatgaaaatcagctcatgtatctgcccgacagcattggtgggctgatttccgtggaggagctagattgttcatttaacgaggtagaggcattgccatcgtccatagggcagctgactaatctccgaacattcgccgcagatcacaattacctccagcagctgcctcccgaaatcggcagctggaagaacattaccgtgctctttttgcacagcaacaagctggagacgttgccggaggagatgggagatatgcaaaagttgaaggtgatcaacctgtcagacaatcgccttaagaacctgcccttttcattcacgaagttacagcagctcacggccatgtggttgtccgataaccagagcaaacccttgatccccctgcagaaagaaacggactccgaaacccagaagatggttctaacaaattacatgttcccacaacagccacggacagaagacgtgatgttcatcagtgataatgagtccttcaacccatctctgtgggaggaacagagaaaacaacgggcacaggtggcctttgagtgtgacgaggataaagatgagcgggaggcaccaccacgagaggggaaccttaagcggtaccccaccccttacccagatgagctcaaaaatatggtaaagaccgtccaaacgatcgtccacaggctaaaggacgaggagacgaatgaagactctggtagggacctgaaaccccatgaggatcaacaggacatcaataaagacgtgggtgtaaagaccagtgaatccactacgacagtgaagtccaaggtcgatgagcgagagaagtatatgatcggcaattctgtccagaaaatcagcgagcccgaagctgaaatttcacccggatcattgccagttactgccaacatgaaagcatcagagaacctcaaacacattgtgaatcatgacgacgtgttcgaagaaagcgaagagctctcctcagatgaagagatgaagatggcggagatgcgcccacccttaatagagacatcgatcaaccagccgaaggtggtggccctgagcaacaataaaaaggacgacacaaaagagaccgattcactaagcgacgaggttacacataattctaaccagaacaactccaattgttcttccccctcacgaatgagtgatagtgtcagtttgaacactgacagctctcaggatactagcctctgctcacccgtaaagcagactcatatagacatcaactcaaagatccgacaggaagacgaaaatttcaacagcctgttacagaatggcgatattctgaacagtagcactgaggagaagttcaaggcacatgacaagaaagactttaacctccccgagtacgacctgaatgttgaggagcggctggttctgatagaaaaaagcgtggattccactgctacagccgatgatacccacaaactggatcatattaatatgaacctgaataagctcatcaccaatgacacattccagcccgaaataatggagaggtcaaaaacacaggatatagttttggggacgagttttctcagcatcaactcaaaggaggagaccgagcacctggaaaatggtaacaagtatcccaatttagagagcgtcaacaaagtgaacgggcactctgaagagacctcccagagtcctaatcggactgagcctcatgactctgactgttcagtggacctgggcattagtaaatccacagaagacctgagtcctcagaagtcaggaccagtgggtagcgtcgttaaatcccatagcattaccaatatggagatagggggactcaaaatttacgacatacttagcgataacgggcctcagcagccgagtaccacagtgaaaataacaagcgccgtggatggtaagaacattgtcagaagcaagtcggcaaccctcttatatgatcagcctctgcaggtcttcacagggagcagttcttctagtgacctgatcagcggaaccaaggccatcttcaagtttgactccaaccacaatccagaggaacccaacatcatacgcggacccacttcaggaccacaaagcgccccacagatttacgggccaccccagtacaacatacagtactcatcatcagcagctgtaaaagacactctgtggcactccaagcagaatcctcagatcgaccacgcgtctttccctccgcagctgctgccgagaagcgagtccactgagaatcaatcttacgctaagcactcggctaacatgaacttctcaaatcataataatgtgcgagctaatacagcataccatctgcatcagaggctgggtcctgcacggcatggcgagatgtgggctatcagccccaatgacagactgattcctgcagtgactcggagcaccattcaaaggcagtcatccgtatcatcaacagcatccgttaatctgggagacccgggttcaaccaggcgggctcagatccctgaaggtgactatctctcatacagagagttccactcggccggacggactccaccaatgatgcctggctcccaacgtcccctatctgctaggacctactccatcgacggtcctaacgctagccgaccacagtccgcccgaccaagcatcaatgaaatcccggagaggacaatgagcgtttctgatttcaactactccaggacctcaccctctaagcgcccaaacgcaagggtcggcagcgagcactccctgctggacccgcctgggaagagtaaagtcccacgggattggcgcgaacaagtgttacggcatattgaagctaagaaactggagaagatgcctctgtctaatggccagatgggacaacccctgcgccctcaggctaattacagtcagattcatcaccctcctcaggcctctgtcgcccgtcacccaagcagggagcagcttatcgactacctcatgcttaaggtggctcaccaaccaccttatacccaaccacactgtagtccgcgacagggacacgaactggcaaagcaagagattagagtgcgagtggaaaaggaccctgagctcgggttctcgatctccggaggcgttggtggcaggggcaacccatttcggcctgacgatgacgctaatggatactcctttatcaatattgagcacgggcaagccgtctctcttttgaagaccttccaaaacacagtggagttgatcatcgtcagggaggtctcctcatag

SEQ ID NO: 88636 - DNA, 4041 bp, Artificial Sequence
  derived and/or modified sequence
atgaccaccaagagaagcctgttcgtgagactggtgccctgcagatgcctgagaggcgaggaggagaccgtgaccaccctggactacagccactgcagcctggagcaggtgcccaaggagatcttcaccttcgagaagaccctggaggagctgtacctggacgccaaccagatcgaggagctgcccaagcagctgttcaactgccagagcctgcacaagctgagcctgcccgacaacgacctgaccaccctgcccgccagcatcgccaacctgatcaacctgagagagctggacgtgagcaagaacggcatccaggagttccccgagaacatcaagaactgcaaggtgctgaccatcgtggaggccagcgtgaaccccatcagcaagctgcccgacggcttcagccagctgctgaacctgacccagctgtacctgaacgacgccttcctggagttcctgcccgccaacttcggcagactgaccaagctgcagatcctggagctgagagagaaccagctgaagatgctgcccaagaccatgaacagactgacccagctggagagactggacctgggcagcaacgagttcaccgaggtgcccgaggtgctggagcagctgagcggcctgaaggagttctggatggacgccaacagactgaccttcatccccggcttcatcggcagcctgaagcagctgacctacctggacgtgagcaagaacaacatcgagatggtggaggagggcatcagcacctgcgagaacctgcaggacctgctgctgagcagcaacagcctgcagcagctgcccgagaccatcggcagcctgaagaacatcaccaccctgaagatcgacgagaaccagctgatgtacctgcccgacagcatcggcggcctgatcagcgtggaggagctggactgcagcttcaacgaggtggaggccctgcccagcagcatcggccagctgaccaacctgagaaccttcgccgccgaccacaactacctgcagcagctgccccccgagatcggcagctggaagaacatcaccgtgctgttcctgcacagcaacaagctggagaccctgcccgaggagatgggcgacatgcagaagctgaaggtgatcaacctgagcgacaacagactgaagaacctgcccttcagcttcaccaagctgcagcagctgaccgccatgtggctgagcgacaaccagagcaagcccctgatccccctgcagaaggagaccgacagcgagacccagaagatggtgctgaccaactacatgttcccccagcagcccagaaccgaggacgtgatgttcatcagcgacaacgagagcttcaaccccagcctgtgggaggagcagagaaagcagagagcccaggtggccttcgagtgcgacgaggacaaggacgagagagaggccccccccagagagggcaacctgaagagataccccaccccctaccccgacgagctgaagaacatggtgaagaccgtgcagaccatcgtgcacagactgaaggacgaggagaccaacgaggacagcggcagagacctgaagccccacgaggaccagcaggacatcaacaaggacgtgggcgtgaagaccagcgagagcaccaccaccgtgaagagcaaggtggacgagagagagaagtacatgatcggcaacagcgtgcagaagatcagcgagcccgaggccgagatcagccccggcagcctgcccgtgaccgccaacatgaaggccagcgagaacctgaagcacatcgtgaaccacgacgacgtgttcgaggagagcgaggagctgagcagcgacgaggagatgaagatggccgagatgagaccccccctgatcgagaccagcatcaaccagcccaaggtggtggccctgagcaacaacaagaaggacgacaccaaggagaccgacagcctgagcgacgaggtgacccacaacagcaaccagaacaacagcaactgcagcagccccagcagaatgagcgacagcgtgagcctgaacaccgacagcagccaggacaccagcctgtgcagccccgtgaagcagacccacatcgacatcaacagcaagatcagacaggaggacgagaacttcaacagcctgctgcagaacggcgacatcctgaacagcagcaccgaggagaagttcaaggcccacgacaagaaggacttcaacctgcccgagtacgacctgaacgtggaggagagactggtgctgatcgagaagagcgtggacagcaccgccaccgccgacgacacccacaagctggaccacatcaacatgaacctgaacaagctgatcaccaacgacaccttccagcccgagatcatggagagaagcaagacccaggacatcgtgctgggcaccagcttcctgagcatcaacagcaaggaggagaccgagcacctggagaacggcaacaagtaccccaacctggagagcgtgaacaaggtgaacggccacagcgaggagaccagccagagccccaacagaaccgagccccacgacagcgactgcagcgtggacctgggcatcagcaagagcaccgaggacctgagcccccagaagagcggccccgtgggcagcgtggtgaagagccacagcatcaccaacatggagatcggcggcctgaagatctacgacatcctgagcgacaacggcccccagcagcccagcaccaccgtgaagatcaccagcgccgtggacggcaagaacatcgtgagaagcaagagcgccaccctgctgtacgaccagcccctgcaggtgttcaccggcagcagcagcagcagcgacctgatcagcggcaccaaggccatcttcaagttcgacagcaaccacaaccccgaggagcccaacatcatcagaggccccaccagcggcccccagagcgccccccagatctacggccccccccagtacaacatccagtacagcagcagcgccgccgtgaaggacaccctgtggcacagcaagcagaacccccagatcgaccacgccagcttccccccccagctgctgcccagaagcgagagcaccgagaaccagagctacgccaagcacagcgccaacatgaacttcagcaaccacaacaacgtgagagccaacaccgcctaccacctgcaccagagactgggccccgccagacacggcgagatgtgggccatcagccccaacgacagactgatccccgccgtgaccagaagcaccatccagagacagagcagcgtgagcagcaccgccagcgtgaacctgggcgaccccggcagcaccagaagagcccagatccccgagggcgactacctgagctacagagagttccacagcgccggcagaaccccccccatgatgcccggcagccagagacccctgagcgccagaacctacagcatcgacggccccaacgccagcagaccccagagcgccagacccagcatcaacgagatccccgagagaaccatgagcgtgagcgacttcaactacagcagaaccagccccagcaagagacccaacgccagagtgggcagcgagcacagcctgctggacccccccggcaagagcaaggtgcccagagactggagagagcaggtgctgagacacatcgaggccaagaagctggagaagatgcccctgagcaacggccagatgggccagcccctgagaccccaggccaactacagccagatccaccaccccccccaggccagcgtggccagacaccccagcagagagcagctgatcgactacctgatgctgaaggtggcccaccagcccccctacacccagccccactgcagccccagacagggccacgagctggccaagcaggagatcagagtgagagtggagaaggaccccgagctgggcttcagcatcagcggcggcgtgggcggcagaggcaaccccttcagacccgacgacgacgccaacggctacagcttcatcaacatcgagcacggccaggccgtgagcctgctgaagaccttccagaacaccgtggagctgatcatcgtgagagaggtgagcagctag

SEQ ID NO: 88637 - DNA, 4701 bp, Artificial Sequence
  derived and/or modified sequence
aaaactcgagaccaggaagccagcccgcaccccaacccccaccaaagccacctactcttcttctgtgggaggccagtccacatccgctctcacccgagagagatattcagctggatccaaagtgactgatgaagggaaggaaatcatgtcaagcgaagccttgaaaaagctgccctgagacggtgtcccgccgaaagaatgttggctcaattaagaaacatcagggagataaattcaacccagtgtgtctaaaaatgactacaaaacgaagtttgtttgtgcggttggtaccatgtcgctgtctacgaggggaagaggagactgtcactactcttgattattctcattgcagcttagaacaagttccgaaagagatttttacttttgaaaaaaccttggaggaactctatttagatgctaatcagattgaagagcttccaaagcaactttttaactgtcagtctttacacaaactgagtttgccagacaatgatttaacaacgttaccagcatccattgcaaaccttattaatctcagggaactggatgtcagcaagaatggaatacaggagtttccagaaaatataaaaaattgtaaagttttgacaattgtggaggccagtgtaaaccctatttccaagctccctgatggattttctcagctgttaaacctaacccagttgtatctgaatgatgcttttcttgagttcttgccagcaaattttggcagattaactaaactccaaatattagagcttagagaaaaccagttaaaaatgttgcctaaaactatgaatagactgacccagctggaaagactggatttgggaagtaacgaattcacggaagtgcctgaagtacttgagcaactaagtggattgaaagagttttggatggatgctaatagactgacttttattccagggtttattggtagtttgaaacagctcacatatttggatgtttctaaaaataatattgaaatggttgaagaaggaatttcaacatgtgaaaaccttcaagacctcctattatcaagcaattcacttcagcagcttcctgagactattggttcgttgaagaatataacaacgcttaaaatagatgaaaaccagttaatgtatctgccagactctataggagggttaatatcagtagaagaactggattgtagtttcaatgaagttgaagctttgccttcatctattgggcagcttactaacttaagaacttttgctgctgatcataattacttacagcagttgcccccagagattggaagctggaaaaatataactgtgctgtttctccattccaataaacttgagacacttccagaggaaatgggtgatatgcaaaaattaaaagtcattaatttaagtgataatagattaaagaatttaccctttagctttacaaagctacagcaattgacagctatgtggctctcagataatcagtccaaacccctgatacctcttcaaaaagaaactgattcagagacccagaaaatggtgcttaccaactacatgttccctcaacagccaaggactgaggatgttatgtttatatcagataatgaaagttttaacccttcattgtgggaggaacagaggaaacagcgggctcaagttgcatttgaatgtgatgaagacaaagatgaaagggaggcacctcccagggagggaaatttaaaaagatatccaacaccatacccagatgagcttaagaatatggtcaaaactgttcaaaccattgtacatagattaaaagatgaagagaccaatgaagactcaggaagagatttgaaaccacatgaagatcaacaagatataaataaagatgtgggtgtgaagacctcagaaagtactactacagtaaaaagcaaagttgatgaaagagaaaaatatatgataggaaactctgtacagaagatcagtgaacctgaagctgagattagtcctgggagtttaccagtgactgcaaatatgaaagcctctgagaacttgaagcatattgttaaccatgatgatgtttttgaggaatctgaagaactttcttctgatgaagagatgaaaatggcggagatgcgaccaccattaattgaaacctctattaaccagccaaaagtcgtagcacttagtaataacaaaaaagatgatacaaaggaaacagattctttatcagatgaagttacacacaatagcaatcagaataacagcaattgttcttctccatctcggatgtctgattcagtttctcttaatactgatagtagtcaagacacctcactctgctctccagtgaaacaaactcatattgatattaattccaaaatcaggcaagaagatgaaaattttaacagccttttacaaaatggagatattttaaacagttcaacagaggaaaagttcaaagctcatgataaaaaagattttaacttacctgaatatgatttgaatgttgaagagcgattagttctaattgagaaaagtgttgactcaacagccacagctgatgacactcacaaattagatcatatcaatatgaatcttaataaacttataactaatgatacatttcaaccagagatcatggaaagatcaaaaacacaggatattgtgcttggaacaagctttttaagcattaattctaaagaggaaactgagcacttggaaaatggaaacaagtatcctaatttggaatccgtaaataaggtaaatggacattctgaggaaacttcccagtctcctaataggactgaaccacatgacagtgattgttctgttgacttaggtatttccaaaagcactgaagatctctcccctcagaaaagtggtccagttggatctgttgtgaaatctcatagcataactaatatggagattggagggctaaaaatctatgatattcttagtgataatggacctcagcagccaagtacaaccgttaaaatcacatctgctgttgatggaaaaaatatagtcaggagcaagtctgccacactgttgtatgatcaaccattgcaggtatttactggttcttcctcatcttctgatttaatatcaggaacaaaggcaattttcaagtttgattcaaatcataatcccgaagagccaaatataataagaggccccacaagtggcccacaatctgcacctcaaatatatggtcctccacagtataatatccaatacagtagcagtgctgcagtcaaagacactttgtggcactccaaacaaaatccccaaatagaccatgccagttttcctcctcagctccttcctagatcagagagcacagaaaatcaaagttatgctaaacattctgccaatatgaatttctctaatcataacaatgttcgagctaatactgcataccatttacatcagagacttggcccagcaagacatggggaaatgtgggccatctcaccaaacgaccgacttattcctgcagtaactcgaagtacaatccagcgacaaagtagtgtgtcctccacagcctctgtaaatcttggtgatccaggctctacaaggcgggctcagattcctgaaggagattatttatcatacagagagttccactcagcgggaagaactcctccaatgatgccaggatcacagagacccctttctgcacgaacatacagcatagatggtccaaatgcatcaagacctcagagtgctcgaccctctattaatgaaataccagagagaactatgtcagttagtgatttcaattattcacggactagtccttcaaaaagaccaaatgcaagggttggttctgagcattctttattagatcctccaggaaaaagtaaagttcctcgtgactggagagaacaagtacttcgacatattgaagccaaaaagttagaaaagatgcctttgagtaatggacagatgggccagcctctcaggcctcaggcaaattatagtcaaatacatcacccccctcaggcatctgtggcaaggcatccctctagagaacaactaattgattacttgatgctgaaagtggcccaccagcctccatatacacagccccattgttctcctagacaaggccatgaactggcaaaacaagagattcgagtgagggttgaaaaggatccagaacttggatttagcatatcaggtggtgtcgggggtagaggaaacccattcagacctgatgatgatgctaatggctacagttttataaatattgaacatggacaagcagtgtccttgctaaaaactttccagaatacagttgaactcatcattgtacgagaagtttcctcataagcactgtggacaaaaaaagcggggaagacagcaagatttattggaagatacttacaggggaaattaatattttgactatttttatatataaagaagaactcaaaaaattatgttcaaatttgtacattaatgaaataatggaacttgtggttagagggaaagaaccactgtacagaatataaaggagactgttgaattcataccatataaaacttgttaggtttttaaacatagcaatcaaggctacaaaaacaaacctgtgttgtttttgtatagattgtaggtttatttttggatttcatatacatgactgaactgtgtgcaaggcaatagttagccttgattttagcccagagacagatggcagagctatctctctcatagcttttatgcccttatttttatt

SEQ ID NO: 88638 - protein, 1340 aa, Artificial Sequence
  derived and/or modified sequence
MTTKRSLFVRLVPCRCLRGEEETVTTLDYSHCSLEQVPKEIFTFEKTLEELYLDANQIEELPKQLFNCQSLHKLSLPDNDLTTLPASIANLINLRELDVSKNGIQEFPENIKNCKVLTIVEASVNPISKLPDGFSQLLNLTQLYLNDAFLEFLPANFGRLTKLQILELRENQLKMLPKTMNRLTQLERLDLGSNEFTEVPEVLEQLSGLKEFWMDANRLTFIPGFIGSLKQLTYLDVSKNNIEMVEEGISTCENLQDLLLSSNSLQQLPETIGSLKNITTLKIDENQLMYLPDSIGGLISVEELDCSFNEVEALPSSIGQLTNLRTFAADHNYLQQLPPEIGSWKNITVLFLHSNKLETLPEEMGDMQKLKVINLSDNRLKNLPFSFTKLQQLTAMWLSDNQSKPLIPLQKETDSETQKMVLTNYMFPQQPRTEDVMFISDNESFNPSLWEEQRKQRAQVAFECDEDKDEREAPPREGNLKRYPTPYPDELKNMVKTVQTIVHRLKDEETNEDSGRDLKPHEDQQDINKDVGVKTSESTTTVKSKVDEREKYMIGNSVQKISEPEAEISPGSLPVTANMKASENLKHIVNHDDVFEESEELSSDEEMKMAEMRPPLIETSINQPKVVALSNNKKDDTKETDSLSDEVTHNSNQNNSNCSSPSRMSDSVSLNTDSSQDTSLCSPVKQTHIDINSKIRQEDENFNSLLQNGDILNSSTEEKFKAHDKKDFNLPEYDLNVEERLVLIEKSVDSTATADDTHKLDHINMNLNKLITNDTFQPEIMERSKTQDIVLGTSFLSINSKEETEHLENGNKYPNLESVNKVNGHSEETSQSPNRTEPHDSDCSVDLGISKSTEDLSPQKSGPVGSVVKSHSITNMEIGGLKIYDILSDNGPQQPSTTVKITSAVDGKNIVRSKSATLLYDQPLQVFTGSSSSSDLISGTKAIFKFDSNHNPEEPNIIRGPTSGPQSAPQIYGPPQYNIQYSSSAAVKDTLWHSKQNPQIDHASFPPQLLPRSESTENQSYAKHSANMNFSNHNNVRANTAYHLHQRLGPARHGEMWAISPNDRLIPAVTRSTIQRQSSVSSTASVNLGDPGSTRRAQIPEGDYLSYREFHSAGRTPPMMPGSQRPLSARTYSIDGPNASRPQSARPSINEIPERTMSVSDFNYSRTSPSKRPNARVGSEHSLLDPPGKSKVPRDWREQVLRHIEAKKLEKMPLSNGQMGQPLRPQANYSQIHHPPQASVARHPSREQLIDYLMLKVAHQPPYTQPHCSPRQGHELAKQEGIFVTRVQPEGPASKLLQPGDKIIQANGYSFINIEHGQAVSLLKTFQNTVELIIVREVSS

SEQ ID NO: 88639 - protein, 1360 aa, Artificial Sequence
  derived and/or modified sequence
MTTKRSLFVRLVPCRCLRGEEETVTTLDYSHCSLEQVPKEIFTFEKTLEELYLDANQIEELPKQLFNCQSLHKLSLPDNDLTTLPASIANLINLRELDVSKNGIQEFPENIKNCKVLTIVEASVNPISKLPDGFSQLLNLTQLYLNDAFLEFLPANFGRLTKLQILELRENQLKMLPKTMNRLTQLERLDLGSNEFTEVPEVLEQLSGLKEFWMDANRLTFIPGFIGSLKQLTYLDVSKNNIEMVEEGISTCENLQDLLLSSNSLQQLPETIGSLKNITTLKIDENQLMYLPDSIGGLISVEELDCSFNEVEALPSSIGQLTNLRTFAADHNYLQQLPPEIGSWKNITVLFLHSNKLETLPEEMGDMQKLKVINLSDNRLKNLPFSFTKLQQLTAMWLSDNQSKPLIPLQKETDSETQKMVLTNYMFPQQPRTEDVMFISDNESFNPSLWEEQRKQRAQVAFECDEDKDEREAPPREGNLKRYPTPYPDELKNMVKTVQTIVHRLKDEETNEDSGRDLKPHEDQQDINKDVGVKTSESTTTVKSKVDEREKYMIGNSVQKISEPEAEISPGSLPVTANMKASENLKHIVNHDDVFEESEELSSDEEMKMAEMRPPLIETSINQPKVVALSNNKKDDTKETDSLSDEVTHNSNQNNSNCSSPSRMSDSVSLNTDSSQDTSLCSPVKQTHIDINSKIRQEDENFNSLLQNGDILNSSTEEKFKAHDKKDFNLPEYDLNVEERLVLIEKSVDSTATADDTHKLDHINMNLNKLITNDTFQPEIMERSKTQDIVLGTSFLSINSKEETEHLENGNKYPNLESVNKVNGHSEETSQSPNRTEPHDSDCSVDLGISKSTEDLSPQKSGPVGSVVKSHSITNMEIGGLKIYDILSDNGPQQPSTTVKITSAVDGKNIVRSKSATLLYDQPLQVFTGSSSSSDLISGTKAIFKFDSNHNPEEPNIIRGPTSGPQSAPQIYGPPQYNIQYSSSAAVKDTLWHSKQNPQIDHASFPPQLLPRSESTENQSYAKHSANMNFSNHNNVRANTAYHLHQRLGPARHGEMWAISPNDRLIPAVTRSTIQRQSSVSSTASVNLGDPGSTRRAQIPEGDYLSYREFHSAGRTPPMMPGSQRPLSARTYSIDGPNASRPQSARPSINEIPERTMSVSDFNYSRTSPSKRPNARVGSEHSLLDPPGKSKVPRDWREQVLRHIEAKKLEKMPLSNGQMGQPLRPQASVARHPSREQLIDYLMLKVAHQPPYTQPHCSPRQGHELAKQEIRVRVEKDPELGFSISGGVGGRGNPFRPDDDGIFVTRVQPEGPASKLLQPGDKIIQANGYSFINIEHGQAVSLLKTFQNTVELIIVREVSS

SEQ ID NO: 88640 - protein, 1419 aa, Artificial Sequence
  derived and/or modified sequence
MTTKRSLFVRLVPCRCLRGEEETVTTLDYSHCSLEQVPKEIFTFEKTLEELYLDANQIEELPKQLFNCQSLHKLSLPDNDLTTLPASIANLINLRELDVSKNGIQEFPENIKNCKVLTIVEASVNPISKLPDGFSQLLNLTQLYLNDAFLEFLPANFGRLTKLQILELRENQLKMLPKTMNRLTQLERLDLGSNEFTEVPEVLEQLSGLKEFWMDANRLTFIPGFIGSLKQLTYLDVSKNNIEMVEEGISTCENLQDLLLSSNSLQQLPETIGSLKNITTLKIDENQLMYLPDSIGGLISVEELDCSFNEVEALPSSIGQLTNLRTFAADHNYLQQLPPEIGSWKNITVLFLHSNKLETLPEEMGDMQKLKVINLSDNRLKNLPFSFTKLQQLTAMWLSDNQSKPLIPLQKETDSETQKMVLTNYMFPQQPRTEDVMFISDNESFNPSLWEEQRKQRAQVAFECDEDKDEREAPPREGNLKRYPTPYPDELKNMVKTVQTIVHRLKDEETNEDSGRDLKPHEDQQDINKDVGVKTSESTTTVKSKVDEREKYMIGNSVQKISEPEAEISPGSLPVTANMKASENLKHIVNHDDVFEESEELSSDEEMKMAEMRPPLIETSINQPKVVALSNNKKDDTKETDSLSDEVTHNSNQNNSNCSSPSRMSDSVSLNTDSSQDTSLCSPVKQTHIDINSKIRQEDENFNSLLQNGDILNSSTEEKFKAHDKKDFNLPEYDLNVEERLVLIEKSVDSTATADDTHKLDHINMNLNKLITNDTFQPEIMERSKTQDIVLGTSFLSINSKEETEHLENGNKYPNLESVNKVNGHSEETSQSPNRTEPHDSDCSVDLGISKSTEDLSPQKSGPVGSVVKSHSITNMEIGGLKIYDILSDNGPQQPSTTVKITSAVDGKNIVRSKSATLLYDQPLQVFTGSSSSSDLISGTKAIFKFDSNHNPEEPNIIRGPTSGPQSAPQIYGPPQYNIQYSSSAAVKDTLWHSKQNPQIDHASFPPQLLPRSESTENQSYAKHSANMNFSNHNNVRANTAYHLHQRLGPARHGEMWAISPNDRLIPAVTRSTIQRQSSVSSTASVNLGDPGSTRRAQIPEGDYLSYREFHSAGRTPPMMPGSQRPLSARTYSIDGPNASRPQSARPSINEIPERTMSVSDFNYSRTSPSKRPNARVGSEHSLLDPPGKSKVPRDWREQVLRHIEAKKLEKSMLSRSFNSNFTTVSSFHCGSSRDLHGSQGSLALSVADRRGSGGHIFRMPLSNGQMGQPLRPQANYSQIHHPPQASVARHPSREQLIDYLMLKVAHQPPYTQPHCSPRQGHELAKQEIRVRVEKDPELGFSISGGVGGRGNPFRPDDDGIFVTRVQPEGPASKLLQPGDKIIQANGYSFINIEHGQAVSLLKTFQNTVELIIVREVSS

SEQ ID NO: 88641 - DNA, 4260 bp, Artificial Sequence
  derived and/or modified sequence
atgaccactaagagatcgctgtttgtcagactcgttccttgccgctgcctccgtggagaagaggagaccgtcacaaccctggactactcccattgctcactcgaacaagtgcctaaagaaatctttacttttgagaagacgctcgaggaactttacctcgacgcaaaccagattgaggagttgcccaaacagttgttcaactgccagtcgctccacaagttgagcctccccgacaatgacctcactaccctgccagcatcaatcgctaatctcattaatctcagagagctggatgttagcaaaaatggcatacaggagttcccggagaacatcaaaaattgtaaagtgctgactatcgtggaggcgagcgtgaatcccatcagcaagctgcctgacggcttcagtcaattacttaatttaacccaactatatcttaacgatgcctttctggagttccttccggccaactttggcagactcaccaagctgcagatcctggagctaagggaaaaccaactaaagatgctgcccaaaacgatgaatcggttaactcagctcgagcggctggatctgggctcaaatgaatttactgaggtgcccgaggtccttgaacagctgtctggactgaaggagttttggatggacgctaatcggctgaccttcatcccgggattcatcggctcactgaaacagttaacatatctggacgtatctaaaaataatattgagatggtggaggaagggattagtacatgtgagaacttgcaggacctgctgctgtccagtaattcactccagcagcttccagagacgataggcagcttgaaaaacatcactactttgaagatagatgaaaaccagcttatgtacttacccgattccatcggcgggcttatttctgtggaggaattggattgtagctttaacgaggtggaggccctgccatcctctattggccagttgacaaatctcagaacattcgccgcagaccataactacctgcaacagctgccccccgaaataggctcctggaagaatatcaccgtgctcttcttgcacagtaataagctcgaaactttgccagaagagatgggagacatgcagaaacttaaggttatcaatctgtcagacaacagactaaagaatctgcccttctcctttacaaagttgcagcaactgacagctatgtggctcagcgataaccagtccaaacctcttattccattacagaaggaaactgattcagagactcagaagatggtactgacaaattatatgtttccccagcagccacgcactgaggacgtgatgttcatctcagacaacgagtctttcaacccgagcctgtgggaggaacaacgcaagcagagagcccaggtagccttcgagtgcgatgaggataaggacgaacgcgaagccccaccgcgcgagggcaacctcaaaagataccctactccctaccccgatgagctgaagaatatggtgaaaaccgtgcagacaattgtgcacagacttaaggacgaggaaactaatgaggatagtggccgtgacctgaagcctcacgaggaccagcaggatataaacaaggatgttggcgtgaagacaagcgagtctactaccacagtgaagagtaaagtggacgagagggagaagtatatgattgggaattcagtgcagaagatcagcgaacctgaggccgaaatcagtcctggctccctgcccgtgaccgccaacatgaaggcgtctgagaatctcaagcacatcgttaatcatgatgatgtgttcgaggagtctgaagaattgagtagcgatgaagagatgaagatggcagagatgcggccccccctcattgagaccagtatcaatcagcccaaggtggtggccctgtctaacaataagaaggatgataccaaagaaaccgactcacttagcgatgaggtgactcacaactccaatcaaaacaattccaattgctcttctccttcacgcatgtccgattctgtgtcactgaacactgattctagccaggacacttccctgtgctcacctgtcaaacagacccatattgatatcaactctaagatccgccaggaagacgaaaacttcaactctctgcttcagaacggggatatcctgaattcctcaacagaggagaagttcaaagcccatgacaagaaggactttaacctgccagagtacgatcttaacgtggaggaaaggttggtgctcatcgaaaaatcagtggacagtaccgctaccgcagatgacactcacaagctcgaccacattaatatgaacctgaataaactgatcacgaacgacaccttccagccagaaataatggaaaggtccaagactcaggacatcgtgctgggcacgtccttcctgtcgattaactctaaagaggagactgagcatctggaaaacggtaataagtatccaaatctcgaatcagtcaataaggtcaacggccatagcgaggagacctcccagtcccccaatcgaacagagccacatgattctgactgcagcgtagatttgggcatttcaaaatcaacagaagatttgtcacctcagaagagcgggccagtgggatcagtggtgaagagccacagcataactaacatggaaattggcgggctgaagatctatgacattctgtcagataatgggccgcaacagccaagtacaaccgtcaagatcacaagtgccgtggacggcaaaaatatcgtgcggagcaagagcgccacgttgctctacgatcaaccacttcaggtgtttacgggctctagttcctcttccgacctgatctctggaacaaaagccatctttaaattcgactctaaccataacccagaggaaccaaacatcattaggggtcctaccagtggcccacagtccgccccccaaatatacggcccgcctcaatataatattcagtattctagcagcgctgctgtgaaagacaccttgtggcatagcaaacaaaacccccaaatcgatcatgcctcgtttcctccccagcttttgccccgctcggaatccactgagaaccagtcttacgccaaacattcggcaaacatgaattttagcaatcacaacaatgtccgtgccaataccgcttaccatttgcaccagcggttggggcccgcgcggcacggagagatgtgggcgatcagccctaatgacagactcatccccgcagtcacccgcagcacaatccagcgccagagcagtgtcagtagtaccgcctcagtcaatcttggcgatcctgggtcgacgagacgggcccaaatcccagagggcgactaccttagctatagagagtttcactcagcaggacgtacccctcccatgatgccaggttctcagagacccctgtccgccagaacctattcgatcgacggccccaatgcctcgcgcccccagtcagctaggccaagcataaacgaaattccagagcgtactatgagcgtctctgacttcaactattcacgaacttcaccttctaagaggcctaatgcccgggtgggcagtgagcacagccttcttgaccctcctggaaagtccaaggtcccgcgcgactggcgtgaacaagtactgcggcacatcgaggccaaaaaactggaaaaaagcatgttatctaggtccttcaacagcaatttcactacggtaagctcatttcactgcggatccagcagggacctccacggaagccagggatctctggcactgagtgttgccgatcgaaggggtagcggaggtcacatttttcgaatgccactcagtaatggccagatgggccagccgctcaggccccaagccaactactctcagatccaccacccacctcaggccagcgtcgctaggcatccctcgagagaacaattaatcgactaccttatgctgaaagtggcacaccagcccccgtacactcagccccattgctccccccgacagggccacgaattggccaagcaggagatccgggtgagagtggaaaaggacccagaattagggttctctatttctggaggtgtgggaggccgcggcaatcctttccgcccagacgacgacggcatctttgtcaccagggttcaaccagaggggcctgcctccaagcttctccagcccggagataaaatcattcaggccaacggatactctttcatcaatattgagcacggtcaggctgtgagtctcctgaaaacattccagaacacagtcgaattgattatagtccgggaggttagctcctag

SEQ ID NO: 88642 - DNA, 4260 bp, Artificial Sequence
  derived and/or modified sequence
atgaccaccaagaggagcctgtttgtgcggctggtgccctgccgctgcctgcggggggaggaggagaccgtgaccaccctggactacagccactgcagcctggagcaggtgcccaaggagatcttcacctttgagaagaccctggaggagctgtacctggatgccaaccagatcgaggagctgcccaagcagctgttcaactgccagagcctgcacaagctgagcctgcctgacaatgacctgaccaccctgcctgccagcatcgccaacctgatcaacctgcgggagctggatgtgtccaagaatggcatccaggagttccctgagaacatcaagaactgcaaggtgctgaccatcgtggaggcctctgtgaaccccatcagcaagctgcctgatggcttcagccagctgctgaacctgacccagctgtacctgaatgatgccttcctggagttcctgcctgccaactttggccgcctgaccaagctgcagatcctggagctgcgggagaaccagctgaagatgctgcccaagaccatgaaccggctgacccagctggagcggctggacctgggcagcaatgagttcacagaggtgcctgaggtgctggagcagctgagcggcctgaaggagttctggatggatgccaaccggctgaccttcatccctggcttcatcggcagcctgaagcagctgacctacctggatgtgtccaagaacaacatcgagatggtggaggagggcatcagcacctgtgagaacctgcaggacctgctgctgagcagcaacagcctgcagcagctgcctgagaccatcggcagcctgaagaacatcaccaccctgaagattgatgagaaccagctgatgtacctgcctgacagcattggaggcctcatctctgtggaggagctggactgcagcttcaatgaggtggaggccctgcccagcagcatcggccagctgaccaacctgcggacctttgctgctgaccacaactacctgcagcagctgcccccagaaattggctcctggaagaacatcaccgtgctcttcctgcacagcaacaagctggagaccctgcctgaggagatgggagacatgcagaagctgaaggtgatcaacctgagtgacaaccggctgaagaacctgcccttctccttcaccaagctgcagcagctgacagccatgtggctgagtgacaaccagagcaagcccctcatccccctgcagaaggagacagattctgagacccagaagatggtgctgaccaactacatgttcccccagcagcccaggacagaagatgtgatgttcatcagtgacaatgaaagcttcaaccccagcctgtgggaggagcagaggaagcagagggcccaggtggcctttgaatgtgatgaggacaaggatgagcgggaggccccaccccgggagggcaacctgaagcgctaccccaccccctacccagatgagctgaagaacatggtgaagacagtgcagaccatcgtgcaccggctgaaggatgaggagaccaatgaagacagcggccgggacctgaagccccatgaggaccagcaggacatcaacaaggatgtgggcgtgaagaccagcgagagcaccaccaccgtgaagagcaaggtggatgagcgggagaagtacatgattggcaacagcgtgcagaagatcagcgagcctgaggccgagatcagccctggcagcctgcctgtgacagccaacatgaaggccagcgagaacctgaagcacatcgtgaaccatgatgatgtgtttgaggagagcgaggagctgagcagtgatgaggagatgaagatggccgagatgaggcctcccctgattgagaccagcatcaaccagcccaaggtggtggccctgagcaacaacaagaaggatgacaccaaggagacagacagcctgagtgatgaggtgacccacaacagcaaccagaacaacagcaactgcagcagccccagcaggatgtctgattctgtgtccctgaacacagacagcagccaggacaccagcctgtgcagccctgtgaagcagacccacatcgacatcaacagcaagatccggcaggaggatgagaacttcaacagcctgctgcagaatggagacatcctgaacagcagcacagaggagaagttcaaggcccatgacaagaaggacttcaacctgcctgaatatgacctgaatgtggaggagcggctggtgctgattgagaagtctgtggacagcacagccacagcagatgacacccacaagctggaccacatcaacatgaacctgaacaagctgatcaccaatgacaccttccagcctgagatcatggagaggagcaagacccaggacatcgtgctgggcaccagcttcctgagcatcaacagcaaggaggagacagagcacctggagaatggaaacaagtaccccaacctggagagcgtgaacaaggtgaatggccacagcgaggagaccagccagagccccaacagaacagagccccatgacagcgactgcagcgtggacctgggcatcagcaagagcacagaggacctgagcccccagaagagcggccctgtgggctctgtggtgaagagccacagcatcaccaacatggagatcggcggcctgaagatctatgacatcctgagtgacaatggcccccagcagcccagcaccaccgtgaagatcaccagcgctgtggatggcaagaacatcgtgcgcagcaagagcgccaccctgctgtatgaccagcccctgcaggtgttcaccggcagcagcagcagcagtgacctgatcagcggcaccaaggccatcttcaagtttgacagcaaccacaaccctgaggagcccaacatcatccggggccccaccagcggcccccagagcgccccccagatctacggccccccccagtacaacatccagtacagcagcagcgctgctgtgaaggacaccctgtggcacagcaagcagaacccccagattgaccacgccagcttccccccccagctgctgcccaggtctgagagcacagagaaccagagctatgccaagcacagcgccaacatgaacttcagcaaccacaacaacgtgcgggccaacacagcctaccacctgcaccagaggctgggccctgcccggcatggagagatgtgggccatcagccccaatgacaggctcatcccagctgtgaccaggagcaccatccagaggcagagctctgtgagcagcacagcctctgtgaacctgggggaccccggcagcacccggcgggcccagatccctgagggggactacctgagctaccgggagttccacagcgctggccgcaccccacccatgatgcctggcagccagaggcccctgagcgcccggacctacagcattgatggccccaatgccagccggccccagagcgcccggcccagcatcaatgagatccctgagaggaccatgtctgtgtctgacttcaactacagcaggaccagccccagcaagaggcccaatgcccgggtgggcagcgagcacagcctgctggaccccccaggcaagagcaaggtgccccgggactggagggagcaggtgctgcggcacatcgaggccaagaagctggagaagtccatgctgagccgctccttcaacagcaacttcaccaccgtgtcctccttccactgcggcagcagccgggacctgcacggcagccagggcagcctggccctgtctgtggccgaccggcggggcagcggcggccacatcttcaggatgcccctgagcaatggccagatgggccagcccctgcggccccaggccaactacagccagatccaccaccccccccaggcctctgtggcccggcaccccagccgggagcagctgattgactacctgatgctgaaggtggcccaccagcccccctacacccagccccactgcagcccccggcagggccacgagctggccaagcaggagatccgggtgcgggtggagaaggaccctgagctgggcttcagcatcagcggcggcgtgggcggccggggcaaccccttccggccagatgatgatggcatctttgtgaccagggtgcagcctgagggccctgccagcaagctgctgcagcccggggacaagatcatccaggccaacggctacagcttcatcaacattgaacatggccaggccgtgtccctgctgaagaccttccagaacacagtggagctgatcatcgtgcgggaggtgagcagctag

SEQ ID NO: 88643 - DNA, 4260 bp, Artificial Sequence
  derived and/or modified sequence
atgaccaccaagcggagcctgttcgtgcggctggtgccctgccggtgcctgcggggcgaagaggaaacggtgaccacactggactactctcactgttctttggagcaggttcccaaagagatatttaccttcgagaaaacattggaagagctgtacctcgatgccaaccaaatagaagagttgcccaaacagctgtttaattgccagtctttgcacaaactatccttgccagataatgacctgaccacattgcctgcctcaattgccaatctcatcaacctccgagagcttgacgtgtccaagaatggaatccaagagtttcccgagaacattaaaaattgtaaagtacttacaattgtggaagcctcggtaaatccaatcagcaagctcccagatggctttagccagctgttgaatctgactcagttgtatctgaatgacgccttcctggagttcttgcctgctaattttggcaggcttacaaagctgcagatcctggaactgcgggaaaatcagctcaaaatgctgcccaaaacaatgaacagacttacccagcttgagcgcctggatctggggagcaacgagttcacagaagttccagaagtcttggagcagctctccggcctcaaggagttctggatggatgcgaacaggttgacgtttattccgggtttcataggttcactaaaacagctgacctatctggatgtaagcaagaacaacattgagatggtcgaagaggggattagtacctgcgaaaacctccaagacctgttgctgtcatccaacagccttcagcagctgcccgaaacaatcggaagcttgaaaaacattacaactttgaagattgacgagaaccaactaatgtacctccctgattcaatcggtggtttgatttccgtagaggagctggactgctcgtttaatgaggtggaagcccttcctagctcaatcggacagcttaccaatcttagaaccttcgccgcagatcataactacttacaacagctacctcctgaaatcggtagttggaagaacatcacggttctctttctgcacagtaacaaattggagactcttccggaggagatgggtgacatgcaaaagcttaaagtcatcaacttgagcgacaataggctcaagaatctgccatttagtttcacaaagctccaacagctgactgctatgtggctgagcgacaaccagagcaaacctctgattcccttgcagaaggagacagacagtgagacacaaaaaatggttctgactaattacatgtttccccagcagccccggacagaagacgtgatgttcataagtgataatgagtctttcaacccttctctgtgggaggaacagagaaagcaacgcgcgcaggtcgcctttgagtgcgatgaggataaagatgaacgcgaagctccccctagagagggtaatcttaagcgttaccctacaccgtaccctgacgagctcaaaaatatggtgaaaacggtgcagaccatcgtgcataggctcaaagatgaggaaaccaatgaggattcgggacgcgatctgaaacctcatgaagatcagcaggacataaacaaagatgtgggagttaagacatctgagtctactactacagtaaagtctaaggttgatgagcgggaaaagtacatgatcggtaactcagttcaaaagatcagcgaaccggaggcggaaatcagccccgggtcccttcccgtgacagctaatatgaaggccagcgagaatctcaagcatatcgttaatcacgatgacgtgtttgaggagagtgaagaactgagtagtgatgaggagatgaaaatggcggagatgaggccaccactcattgagacaagcattaaccagccaaaggtggtcgcgctgtcaaataacaagaaggacgatactaaggaaaccgattcgctaagcgatgaagtgactcacaatagcaatcagaacaattcaaattgctcatccccatccagaatgtccgactccgtatctctaaacaccgattctagccaggacacaagcctgtgcagcccagtgaaacagactcatattgacatcaattccaagattaggcaagaagatgaaaattttaactcccttctgcagaatggtgacatacttaacagctccaccgaagaaaagtttaaagcccatgacaaaaaggactttaacctgcccgaatacgatttgaacgtagaggagcggttagtacttatcgagaagtcagtagatagtacagccacggcagacgatacacacaagctcgaccacatcaacatgaatctgaacaagttgattacaaatgatacattccagccagaaattatggaacgaagcaaaactcaggacatcgtattggggacaagctttctgagtattaatagcaaagaagagactgagcatctggagaatggaaataagtatccgaatttagagtctgtgaacaaggtgaatgggcactcagaagaaacgagccagtctccgaaccgtacggagccacacgattccgactgctcagtggacttagggatctccaagtccacagaagacttgagcccacagaagagcggacccgttggcagcgttgtgaagagtcactctattactaatatggagattggaggacttaaaatctatgacatcctgtcagacaatggtcctcagcagccttctacaacagtgaaaatcacatctgccgtagacggcaagaacatcgtccgctctaagagtgccacccttttatacgaccagccccttcaggtgttcacgggatcctcatcctccagcgatctcattagtgggacaaaggcgatcttcaaatttgatagcaaccataaccccgaggagcctaatataatccgaggcccaactagcggcccccagtccgctccgcagatctatggtcccccccagtataacattcagtacagttcttcagcggccgtgaaggataccttatggcactccaaacagaacccccagatagatcacgcctccttccctcctcagctgctgcctcgcagcgaatctactgagaaccagagttacgcaaagcacagcgcgaatatgaacttcagcaaccataacaacgtaagggctaacaccgcataccacctacaccagagactgggccccgcaaggcacggtgagatgtgggctattagtcccaatgatcggctgatacctgccgtgaccagatccactatccagcggcagagtagtgtatcctccacagcatcagtgaacctgggcgacccgggcagtacccggagagcccagattcctgagggcgactacttaagttacagggaatttcatagcgctggccgtacaccacctatgatgcctggatcacagagaccactgtcagcacgaacttatagcatcgacggtccaaacgcctcccgcccacaatcggcaagacccagcatcaacgagatccccgagagaactatgtcagtgtccgacttcaactatagccggacgtccccctctaaacgacctaacgcaagagtggggagcgagcactcactgcttgatccccctggcaagtcaaaagtgccacgggactggcgggagcaggtcttgaggcacatagaggcgaaaaagctcgagaaatctatgctgtcccgcagttttaatagcaactttaccactgtttccagctttcactgcggctcttctagggacctgcacggaagtcagggcagcctggccctcagtgtggccgatcgccgagggagcggcggccacatctttcggatgcctttgagtaatggacagatgggccagcctttacgcccccaggctaactattcccagattcatcatccacctcaggccagcgtggcgcgccatcctagtcgggaacagttgatcgattacctcatgctcaaggtagctcaccaacctccgtatacacagccccactgctcaccgcgacagggccacgagctcgccaagcaagaaattagggtgagagtagaaaaggacccggaactgggctttagcatctcaggaggagttggggggagaggaaatccatttcgcccagacgacgacggtattttcgtcacccgtgtccagccagaaggcccggcttccaagctgctacaacctggcgacaaaattatccaggcaaatggttattccttcattaatattgaacacggacaggccgtgagtttactgaagacctttcaaaacactgtcgagcttatcatcgtgcgcgaggtaagcagttag

SEQ ID NO: 88644 - DNA, 4260 bp, Artificial Sequence
  derived and/or modified sequence
atgacaacaaagcgatcgttgttcgtgaggcttgttccatgtcggtgtctgcgaggagaagaagaaaccgtcacaactctcgactacagccactgttccctggagcaggtgcccaaggaaatctttacattcgagaagaccctggaggagctatatttggatgccaaccagatcgaagaacttccaaaacagctgtttaattgtcagagcctgcacaaattatcacttccggacaacgatttgactacattgccggcaagcatcgccaatctgattaacctgagagagctggacgtttccaagaatgggatccaggaatttccagagaatataaagaactgtaaggttctgactatagtcgaggcttctgttaatcccatctcaaaactcccagacgggttcagccagctgcttaatctgacgcagctgtatctgaatgatgcatttctcgaatttctgcctgccaatttcggtagactgactaagcttcagattctggagctcagggaaaaccagctgaagatgctgccaaaaactatgaacaggcttacccagttggagaggctagatctgggaagtaatgagtttacagaagttcctgaggtcttggagcagcttagtggcttgaaagagttctggatggatgcaaatcgccttacatttataccaggttttatcggctcactgaaacaactgacttatttagacgtcagcaagaataatatcgagatggtcgaggagggaatttctacatgcgagaacctccaagacctgcttttatcttccaactcccttcagcagctcccggaaaccatcgggtccctgaagaacattacgacactgaaaattgacgagaatcagcttatgtatctcccggacagtatcgggggactgatttctgtcgaagagctggattgcagcttcaacgaagttgaagccctcccttctagtattggacaactcacaaatctcagaaccttcgctgctgaccataactatctgcagcagttgccgccagagatcggtagctggaagaatatcacagtcctgtttctccactctaacaagctcgaaacattacccgaagaaatgggagacatgcagaaactaaaagttatcaacctgtcagacaaccgcctgaaaaacctgccctttagcttcaccaaactccagcaactgaccgcaatgtggctaagtgacaaccaaagcaaacctcttatccccctgcagaaggaaaccgactccgaaacacagaaaatggtgttaacaaattacatgtttccccagcagcctcgaaccgaagacgttatgttcatatcagataatgagagctttaacccttctttgtgggaagaacagcggaagcagcgagcacaggtggcattcgagtgtgacgaagacaaggacgagcgcgaagccccaccgagggaaggaaacctaaaacgatacccaactccttaccccgatgagctaaaaaatatggtgaagacagtgcaaaccatcgttcacaggcttaaggatgaggaaactaatgaagactccggaagagacctgaaaccccatgaggaccagcaggacatcaacaaggatgtcggcgttaagacttcagagagcaccaccactgtaaagtcaaaagttgatgaacgcgagaaatatatgattggcaattccgtccagaaaatcagtgagcctgaagcggaaatctcccctggcagtctcccagtcactgctaatatgaaggcttccgaaaatctaaagcatattgtaaaccatgacgatgtgtttgaggagtctgaggaactaagcagcgatgaggaaatgaagatggcggaaatgcgcccacctctgatcgagacttcaattaatcagcctaaggtcgtagccttatccaacaataagaaagatgacacaaaggagacagactctctgtccgatgaggtgacccacaacagtaaccaaaataactcgaactgctcatcacccagccggatgagcgatagcgtctccttgaatacagattcaagtcaggatactagcctttgtagccctgttaagcaaacccatatcgacattaacagcaaaatcaggcaggaagacgagaattttaactctttactccaaaatggtgacatattaaatagcagtactgaagagaagtttaaggcccatgacaaaaaagacttcaaccttccagaatacgatctcaatgtcgaagagcgcctggtccttatcgagaaatccgttgatagcacagctaccgccgacgacacgcacaagttggaccacattaatatgaacctcaataaacttataacgaacgatactttccaacccgaaatcatggaaaggagcaaaacacaggacatagtgctgggcacttctttcctgagcattaacagtaaagaggagaccgagcacctagagaatggcaataaataccccaaccttgagtcagtcaataaggtgaacggacattctgaagaaacatctcaaagcccaaataggacagaaccgcacgatagcgactgtagtgtggatttgggcatcagtaaatcaaccgaggatttgtcaccccagaaaagcggccctgtgggcagcgttgttaagtcccattccatcacaaacatggagatcggaggcttaaagatctatgacatcctgtctgataacgggcctcaacaaccatccacgactgtgaagatcacctctgccgtggacgggaagaacattgtgaggagcaaatcggcaaccctgttgtacgatcagccactgcaagtattcactggatcctcttcttcgagtgatctaatttccgggaccaaagccattttcaagtttgacagtaatcacaatcccgaagaacccaacatcataagagggcctaccagcggaccccagtccgctccccaaatctacggaccccctcagtacaatattcagtactcttcttcagctgccgtgaaagacacattgtggcatagtaaacagaatccccagattgaccacgcatcgtttccaccacagcttctcccacggtctgagtccacagaaaatcaatcttacgcaaagcacagcgctaatatgaatttcagcaaccacaacaacgtgcgggcaaatactgcttatcaccttcatcagcggttgggccctgcccgacacggtgagatgtgggcgatatcccctaacgataggctgattcctgccgtcactagatcaacgattcagcggcagtctagtgtttcatctactgcctctgtgaatttaggtgacccagggagcacacgcagggcccagattcctgagggagattatctgtcctacagagagttccatagtgccggtagaacaccccctatgatgcctggatcacagcgcccactgtcggcaaggacctattcaatcgacgggcctaatgcttcccgtccccagtccgctcggccatcaataaatgagatcccggagcgcaccatgagcgtgtctgattttaactactctcgcacaagcccttccaagcgacccaacgctcgggtgggttcagagcatagtctcctagacccgccaggcaagagtaaggtgcctagggactggcgcgagcaagtgcttcgccacattgaggctaaaaagcttgagaagtcaatgctgagtagatcgttcaacagtaattttaccacagtgtcgagcttccactgcggctcaagccgagatctgcatggcagtcaagggtcactggctctgtcagtggccgacaggcggggatccggcggacatatatttaggatgccactgtcaaatggacaaatgggacaaccactgcgccctcaggcgaactattcacagatccaccatccgccacaggccagcgtagcaaggcatccaagcagggagcagctgattgattatctgatgctgaaggttgcccaccagccgccatacacccagccacattgcagtcctaggcaaggtcacgagctggccaaacaagagatccgggtcagggttgagaaggaccctgaactggggttctctattagcgggggagtgggcggtagaggaaacccttttcgtcctgacgatgatggcatcttcgtgaccagagtacagccagaaggtcccgctagtaagctgcttcagccgggagataaaattattcaggcgaacggctacagctttatcaatatcgaacatgggcaagcagtgtccctgcttaagacattccagaacaccgtggagctgataatagtccgagaggtcagtagttag

SEQ ID NO: 88645 - DNA, 4260 bp, Artificial Sequence
  derived and/or modified sequence
atgaccaccaagagaagcctgttcgtgagactggtgccctgcagatgcctgagaggcgaggaggagaccgtgaccaccctggactacagccactgcagcctggagcaggtgcccaaggagatcttcaccttcgagaagaccctggaggagctgtacctggacgccaaccagatcgaggagctgcccaagcagctgttcaactgccagagcctgcacaagctgagcctgcccgacaacgacctgaccaccctgcccgccagcatcgccaacctgatcaacctgagagagctggacgtgagcaagaacggcatccaggagttccccgagaacatcaagaactgcaaggtgctgaccatcgtggaggccagcgtgaaccccatcagcaagctgcccgacggcttcagccagctgctgaacctgacccagctgtacctgaacgacgccttcctggagttcctgcccgccaacttcggcagactgaccaagctgcagatcctggagctgagagagaaccagctgaagatgctgcccaagaccatgaacagactgacccagctggagagactggacctgggcagcaacgagttcaccgaggtgcccgaggtgctggagcagctgagcggcctgaaggagttctggatggacgccaacagactgaccttcatccccggcttcatcggcagcctgaagcagctgacctacctggacgtgagcaagaacaacatcgagatggtggaggagggcatcagcacctgcgagaacctgcaggacctgctgctgagcagcaacagcctgcagcagctgcccgagaccatcggcagcctgaagaacatcaccaccctgaagatcgacgagaaccagctgatgtacctgcccgacagcatcggcggcctgatcagcgtggaggagctggactgcagcttcaacgaggtggaggccctgcccagcagcatcggccagctgaccaacctgagaaccttcgccgccgaccacaactacctgcagcagctgccccccgagatcggcagctggaagaacatcaccgtgctgttcctgcacagcaacaagctggagaccctgcccgaggagatgggcgacatgcagaagctgaaggtgatcaacctgagcgacaacagactgaagaacctgcccttcagcttcaccaagctgcagcagctgaccgccatgtggctgagcgacaaccagagcaagcccctgatccccctgcagaaggagaccgacagcgagacccagaagatggtgctgaccaactacatgttcccccagcagcccagaaccgaggacgtgatgttcatcagcgacaacgagagcttcaaccccagcctgtgggaggagcagagaaagcagagagcccaggtggccttcgagtgcgacgaggacaaggacgagagagaggccccccccagagagggcaacctgaagagataccccaccccctaccccgacgagctgaagaacatggtgaagaccgtgcagaccatcgtgcacagactgaaggacgaggagaccaacgaggacagcggcagagacctgaagccccacgaggaccagcaggacatcaacaaggacgtgggcgtgaagaccagcgagagcaccaccaccgtgaagagcaaggtggacgagagagagaagtacatgatcggcaacagcgtgcagaagatcagcgagcccgaggccgagatcagccccggcagcctgcccgtgaccgccaacatgaaggccagcgagaacctgaagcacatcgtgaaccacgacgacgtgttcgaggagagcgaggagctgagcagcgacgaggagatgaagatggccgagatgagaccccccctgatcgagaccagcatcaaccagcccaaggtggtggccctgagcaacaacaagaaggacgacaccaaggagaccgacagcctgagcgacgaggtgacccacaacagcaaccagaacaacagcaactgcagcagccccagcagaatgagcgacagcgtgagcctgaacaccgacagcagccaggacaccagcctgtgcagccccgtgaagcagacccacatcgacatcaacagcaagatcagacaggaggacgagaacttcaacagcctgctgcagaacggcgacatcctgaacagcagcaccgaggagaagttcaaggcccacgacaagaaggacttcaacctgcccgagtacgacctgaacgtggaggagagactggtgctgatcgagaagagcgtggacagcaccgccaccgccgacgacacccacaagctggaccacatcaacatgaacctgaacaagctgatcaccaacgacaccttccagcccgagatcatggagagaagcaagacccaggacatcgtgctgggcaccagcttcctgagcatcaacagcaaggaggagaccgagcacctggagaacggcaacaagtaccccaacctggagagcgtgaacaaggtgaacggccacagcgaggagaccagccagagccccaacagaaccgagccccacgacagcgactgcagcgtggacctgggcatcagcaagagcaccgaggacctgagcccccagaagagcggccccgtgggcagcgtggtgaagagccacagcatcaccaacatggagatcggcggcctgaagatctacgacatcctgagcgacaacggcccccagcagcccagcaccaccgtgaagatcaccagcgccgtggacggcaagaacatcgtgagaagcaagagcgccaccctgctgtacgaccagcccctgcaggtgttcaccggcagcagcagcagcagcgacctgatcagcggcaccaaggccatcttcaagttcgacagcaaccacaaccccgaggagcccaacatcatcagaggccccaccagcggcccccagagcgccccccagatctacggccccccccagtacaacatccagtacagcagcagcgccgccgtgaaggacaccctgtggcacagcaagcagaacccccagatcgaccacgccagcttccccccccagctgctgcccagaagcgagagcaccgagaaccagagctacgccaagcacagcgccaacatgaacttcagcaaccacaacaacgtgagagccaacaccgcctaccacctgcaccagagactgggccccgccagacacggcgagatgtgggccatcagccccaacgacagactgatccccgccgtgaccagaagcaccatccagagacagagcagcgtgagcagcaccgccagcgtgaacctgggcgaccccggcagcaccagaagagcccagatccccgagggcgactacctgagctacagagagttccacagcgccggcagaaccccccccatgatgcccggcagccagagacccctgagcgccagaacctacagcatcgacggccccaacgccagcagaccccagagcgccagacccagcatcaacgagatccccgagagaaccatgagcgtgagcgacttcaactacagcagaaccagccccagcaagagacccaacgccagagtgggcagcgagcacagcctgctggacccccccggcaagagcaaggtgcccagagactggagagagcaggtgctgagacacatcgaggccaagaagctggagaagagcatgctgagcagaagcttcaacagcaacttcaccaccgtgagcagcttccactgcggcagcagcagagacctgcacggcagccagggcagcctggccctgagcgtggccgacagaagaggcagcggcggccacatcttcagaatgcccctgagcaacggccagatgggccagcccctgagaccccaggccaactacagccagatccaccaccccccccaggccagcgtggccagacaccccagcagagagcagctgatcgactacctgatgctgaaggtggcccaccagcccccctacacccagccccactgcagccccagacagggccacgagctggccaagcaggagatcagagtgagagtggagaaggaccccgagctgggcttcagcatcagcggcggcgtgggcggcagaggcaaccccttcagacccgacgacgacggcatcttcgtgaccagagtgcagcccgagggccccgccagcaagctgctgcagcccggcgacaagatcatccaggccaacggctacagcttcatcaacatcgagcacggccaggccgtgagcctgctgaagaccttccagaacaccgtggagctgatcatcgtgagagaggtgagcagctag

SEQ ID NO: 88646 - DNA, 4386 bp, Artificial Sequence
  derived and/or modified sequence
aaaaagctgccctgagacggtgtcccgccgaaagaatgttggctcaattaagaaacatcagggagataaattcaacccagtgtgtctaaaaatgactacaaaacgaagtttgtttgtgcggttggtaccatgtcgctgtctacgaggggaagaggagactgtcactactcttgattattctcattgcagcttagaacaagttccgaaagagatttttacttttgaaaaaaccttggaggaactctatttagatgctaatcagattgaagagcttccaaagcaactttttaactgtcagtctttacacaaactgagtttgccagacaatgatttaacaacgttaccagcatccattgcaaaccttattaatctcagggaactggatgtcagcaagaatggaatacaggagtttccagaaaatataaaaaattgtaaagttttgacaattgtggaggccagtgtaaaccctatttccaagctccctgatggattttctcagctgttaaacctaacccagttgtatctgaatgatgcttttcttgagttcttgccagcaaattttggcagattaactaaactccaaatattagagcttagagaaaaccagttaaaaatgttgcctaaaactatgaatagactgacccagctggaaagactggatttgggaagtaacgaattcacggaagtgcctgaagtacttgagcaactaagtggattgaaagagttttggatggatgctaatagactgacttttattccagggtttattggtagtttgaaacagctcacatatttggatgtttctaaaaataatattgaaatggttgaagaaggaatttcaacatgtgaaaaccttcaagacctcctattatcaagcaattcacttcagcagcttcctgagactattggttcgttgaagaatataacaacgcttaaaatagatgaaaaccagttaatgtatctgccagactctataggagggttaatatcagtagaagaactggattgtagtttcaatgaagttgaagctttgccttcatctattgggcagcttactaacttaagaacttttgctgctgatcataattacttacagcagttgcccccagagattggaagctggaaaaatataactgtgctgtttctccattccaataaacttgagacacttccagaggaaatgggtgatatgcaaaaattaaaagtcattaatttaagtgataatagattaaagaatttaccctttagctttacaaagctacagcaattgacagctatgtggctctcagataatcagtccaaacccctgatacctcttcaaaaagaaactgattcagagacccagaaaatggtgcttaccaactacatgttccctcaacagccaaggactgaggatgttatgtttatatcagataatgaaagttttaacccttcattgtgggaggaacagaggaaacagcgggctcaagttgcatttgaatgtgatgaagacaaagatgaaagggaggcacctcccagggagggaaatttaaaaagatatccaacaccatacccagatgagcttaagaatatggtcaaaactgttcaaaccattgtacatagattaaaagatgaagagaccaatgaagactcaggaagagatttgaaaccacatgaagatcaacaagatataaataaagatgtgggtgtgaagacctcagaaagtactactacagtaaaaagcaaagttgatgaaagagaaaaatatatgataggaaactctgtacagaagatcagtgaacctgaagctgagattagtcctgggagtttaccagtgactgcaaatatgaaagcctctgagaacttgaagcatattgttaaccatgatgatgtttttgaggaatctgaagaactttcttctgatgaagagatgaaaatggcggagatgcgaccaccattaattgaaacctctattaaccagccaaaagtcgtagcacttagtaataacaaaaaagatgatacaaaggaaacagattctttatcagatgaagttacacacaatagcaatcagaataacagcaattgttcttctccatctcggatgtctgattcagtttctcttaatactgatagtagtcaagacacctcactctgctctccagtgaaacaaactcatattgatattaattccaaaatcaggcaagaagatgaaaattttaacagccttttacaaaatggagatattttaaacagttcaacagaggaaaagttcaaagctcatgataaaaaagattttaacttacctgaatatgatttgaatgttgaagagcgattagttctaattgagaaaagtgttgactcaacagccacagctgatgacactcacaaattagatcatatcaatatgaatcttaataaacttataactaatgatacatttcaaccagagatcatggaaagatcaaaaacacaggatattgtgcttggaacaagctttttaagcattaattctaaagaggaaactgagcacttggaaaatggaaacaagtatcctaatttggaatccgtaaataaggtaaatggacattctgaggaaacttcccagtctcctaataggactgaaccacatgacagtgattgttctgttgacttaggtatttccaaaagcactgaagatctctcccctcagaaaagtggtccagttggatctgttgtgaaatctcatagcataactaatatggagattggagggctaaaaatctatgatattcttagtgataatggacctcagcagccaagtacaaccgttaaaatcacatctgctgttgatggaaaaaatatagtcaggagcaagtctgccacactgttgtatgatcaaccattgcaggtatttactggttcttcctcatcttctgatttaatatcaggaacaaaggcaattttcaagtttgattcaaatcataatcccgaagagccaaatataataagaggccccacaagtggcccacaatctgcacctcaaatatatggtcctccacagtataatatccaatacagtagcagtgctgcagtcaaagacactttgtggcactccaaacaaaatccccaaatagaccatgccagttttcctcctcagctccttcctagatcagagagcacagaaaatcaaagttatgctaaacattctgccaatatgaatttctctaatcataacaatgttcgagctaatactgcataccatttacatcagagacttggcccagcaagacatggggaaatgtgggccatctcaccaaacgaccgacttattcctgcagtaactcgaagtacaatccagcgacaaagtagtgtgtcctccacagcctctgtaaatcttggtgatccaggctctacaaggcgggctcagattcctgaaggagattatttatcatacagagagttccactcagcgggaagaactcctccaatgatgccaggatcacagagacccctttctgcacgaacatacagcatagatggtccaaatgcatcaagacctcagagtgctcgaccctctattaatgaaataccagagagaactatgtcagttagtgatttcaattattcacggactagtccttcaaaaagaccaaatgcaagggttggttctgagcattctttattagatcctccaggaaaaagtaaagttcctcgtgactggagagaacaagtacttcgacatattgaagccaaaaagttagaaaagagcatgctgtcaaggtcctttaattccaattttactactgtaagcagttttcactgtggcagctctagggatctgcatggcagccagggcagtcttgccttgagtgttgcagacagaagaggttctggtgggcacatttttcgaatgcctttgagtaatggacagatgggccagcctctcaggcctcaggcaaattatagtcaaatacatcacccccctcaggcatctgtggcaaggcatccctctagagaacaactaattgattacttgatgctgaaagtggcccaccagcctccatatacacagccccattgttctcctagacaaggccatgaactggcaaaacaagagattcgagtgagggttgaaaaggatccagaacttggatttagcatatcaggtggtgtcgggggtagaggaaacccattcagacctgatgatgatggtatatttgtaacaagggtacaacctgaaggaccagcatcaaaattactgcagccaggtgataaaattattcaggctaatggctacagttttataaatattgaacatggacaagcagtgtccttgctaaaaactttccagaatacagttgaactcatcattgtacgagaagtttcctcataagcactgtggacaaaaaaagcggggaagacagcaag

SEQ ID NO: 88647 - protein, 564 aa, Artificial Sequence
  derived and/or modified sequence
MLANSASVRILIKGGKVVNDDCTHEADVYIENGIIQQVGRELMIPGGAKVIDATGKLVIPGGIDTSTHFHQTFMNATCVDDFYHGTKAALVGGTTMIIGHVLPDKETSLVDAYEKCRGLADPKVCCDYALHVGITWWAPKVKAEMETLVREKGVNSFQMFMTYKDLYMLRDSELYQVLHACKDIGAIARVHAENGELVAEGAKEALDLGITGPEGIEISRPEELEAEATHRVITIANRTHCPIYLVNVSSISAGDVIAAAKMQGKVVLAETTTAHATLTGLHYYHQDWSHAAAYVTVPPLRLDTNTSTYLMSLLANDTLNIVASDHRPFTTKQKAMGKEDFTKIPHGVSGVQDRMSVIWERGVVGGKMDENRFVAVTSSNAAKLLNLYPRKGRIIPGADADVVVWDPEATKTISASTQVQGGDFNLYENMRCHGVPLVTISRGRVVYENGVFMCAEGTGKFCPLRSFPDTVYKKLVQREKTLKVRGVDRTPYLGDVAVVVHPGKKEMGTPLADTPTRPVTRHGGMRDLHESSFSLSGSQIDDHVPKRASARILAPPGGRSSGIW

SEQ ID NO: 88648 - protein, 190 aa, Artificial Sequence
  derived and/or modified sequence
MLANSASVRILIKGGKVVNDDCTHEADVYIENGIIQQVGRELMIPGGAKVIDATGKLVIPGGIDTSTHFHQTFMNATCVDDFYHGTKAALVGGTTMIIGHVLPDKETSLVDAYEKCRGLADPKVCCDYALHVGITWWAPKVKAEMETLVREKGVNSFQMFMTYKDLYMLRDSELYQVLHACKDIGAIARV

SEQ ID NO: 88649 - protein, 174 aa, Artificial Sequence
  derived and/or modified sequence
MLANSASVRILIKGGKVVNDDCTHEADVYIENGIIQQVGRELMIPGGAKVIDATGKLVIPGGIDTSTHFHQTFMNATCVDDFYHGTKAALVGGTTMIIGHVLPDKETSLVDAYEKCRGLADPKVCCDYALHVGITWWAPKVKAEMETLVREKGVNSFQMFMTYKDLYMLRDSEL

SEQ ID NO: 88650 - protein, 165 aa, Artificial Sequence
  derived and/or modified sequence
MLANSASVRILIKGGKVVNDDCTHEADVYIENGIIQQVGRELMIPGGAKVIDATGKLVIPGGIDTSTHFHQTFMNATCVDDFYHGTKAALVGGTTMIIGHVLPDKETSLVDAYEKCRGLADPKVCCDYALHVGITWWAPKVKAEMETLVREKGVNSFQMFMTYKD

SEQ ID NO: 88651 - DNA, 1695 bp, Artificial Sequence
  derived and/or modified sequence
atgctcgctaattcagctagcgtgaggattctcattaaaggcggtaaagtagtcaacgacgactgtactcatgaagcggatgtctatattgagaatggtatcatccagcaggtcggccgggaacttatgatcccgggcggggccaaagtgatcgacgcaactgggaagctggtgattccgggggggattgacacctcaacccattttcaccagacattcatgaacgctacctgtgttgacgatttttaccatggaactaaagccgccttggtgggcggtactaccatgataattggccatgttttgcccgataaggagacatctctggtcgatgcgtatgagaagtgtcgcggcctcgcagacccaaaggtgtgttgtgactacgcattgcacgtgggtattacctggtgggcccctaaagtgaaggcggagatggaaacactggtacgggagaaaggagttaacagctttcagatgttcatgacctacaaggatctctacatgctgagggacagcgagctatatcaggtgctgcacgcctgcaaagacatcggagcaatagcccgggtccatgcggaaaatggcgagttagtggcagaaggggccaaagaagcgctggatttgggcatcaccgggcccgagggaattgagatcagtagaccagaagagctcgaagcggaggctacccaccgggtgatcactatcgctaaccgcacacattgtccaatctatctggtcaacgtatcatctatctctgccggtgacgtgatcgccgctgctaaaatgcaagggaaggtggtgttggcagaaaccaccaccgcccatgccactctgactggtcttcactattatcaccaggattggtctcatgccgccgcctatgttactgtgccaccgcttcgcctggacacaaacacatcaacatatctaatgagcctgcttgctaatgacacacttaacattgtagcgagtgaccaccgccctttcactacaaaacaaaaagcaatgggcaaagaagattttaccaagattccacacggggtctctggagttcaggacaggatgagcgttatttgggaacgcggcgtggttggggggaagatggacgaaaaccgctttgtggccgtgacatcctcgaacgccgccaagcttctgaacttgtatcctaggaaaggtcgcatcatcccgggtgctgatgcagacgttgtcgtgtgggatccagaggcaactaagacgatctcagcttccactcaggtgcaggggggcgactttaatctctatgagaacatgagatgccatggcgtgcctctggtcaccataagtcggggacgggtggtttatgaaaatggagttttcatgtgcgctgaggggactggcaagttctgtccactacgctcctttccagatactgtgtataaaaagcttgtgcagagagagaagacactgaaagtccgtggtgtggataggaccccttacctcggcgacgttgcagtggtcgttcatcccggcaagaaagagatgggcaccccccttgccgacactcctacgagacctgtaactcgccatggcggcatgagggaccttcacgagtcctccttttccctctctgggtcacagatcgatgatcacgtgcccaagcgtgcctccgccaggatcctggcccctccgggaggacgaagttcagggatctggtag

SEQ ID NO: 88652 - DNA, 1695 bp, Artificial Sequence
  derived and/or modified sequence
atgcttgcaaatagcgcttctgtgagaatcctcattaagggtgggaaggtggtaaacgacgattgcacccacgaagctgatgtgtacatcgagaacggaattattcagcaggtcggccgggaattaatgatacccggaggagccaaagtcatagacgccactgggaaacttgtaattcccggaggaatcgacacgtcaacccattttcatcagacatttatgaacgctacttgcgtcgatgatttctatcatggaacaaaggcagcactcgtgggaggcactacgatgattattgggcacgttctgccagataaggaaaccagcttggtggacgcgtacgaaaaatgtagaggcttagctgaccctaaggtgtgctgcgactacgcattgcatgtggggattacttggtgggctccgaaagtgaaagcagaaatggagaccctggtgagggaaaagggcgtcaactcgttccagatgttcatgacctacaaagacttgtacatgttgagggactccgagctctatcaggtgctgcacgcatgtaaagatatcggagcaattgcgagggtgcacgcagagaacggtgagcttgtcgccgagggcgctaaagaggctcttgacttggggatcactggccccgaggggatcgaaatctcccggccggaggagctggaagcagaggccacccaccgcgtcattactattgcgaaccgcactcattgtccaatatatctggtaaacgtctctagcataagtgctggagatgtgatcgctgctgccaaaatgcaaggaaaagttgtactggccgaaaccacaacagctcatgccaccttaaccggcctgcactactatcatcaagattggtctcatgctgccgcttacgtgaccgtgccccctctgaggctggacacaaatacaagtacctaccttatgtccctcctggcaaatgatactctgaacatcgtggctagcgaccacaggcccttcaccacaaaacagaaggccatgggcaaagaagactttaccaagatcccccatggtgtgagcggcgtgcaggatagaatgagtgtcatttgggagcggggagtagtgggtggcaagatggacgaaaaccggttcgtggcggtcaccagttcaaatgccgccaagcttctgaacctctacccgagaaaaggacgcattatccccggggctgatgcagacgtcgttgtttgggatccagaggcgaccaagaccatctccgctagcactcaagtgcagggaggtgactttaatctgtacgagaacatgcgctgccacggcgtgcccctggtgaccattagtcgaggacgggtggtctatgagaacggcgttttcatgtgcgccgaaggcaccggcaaattctgccctttacgttcatttcctgacacagtctataaaaagcttgttcagcgcgagaaaaccttgaaagtaaggggcgttgataggaccccctatctaggtgacgtggcagtggttgtgcaccctggaaagaaagaaatgggaactcccctcgcagatacaccaactagacctgtgacgcgccacggtgggatgcgcgatcttcacgaatcctcttttagcctctccggatcacaaatcgatgaccacgtgccgaaaagggcatccgcgcgcatcctggctccaccaggaggaaggtcatccggaatctggtag

SEQ ID NO: 88653 - DNA, 573 bp, Artificial Sequence
  derived and/or modified sequence
atgctggccaactctgcctccgtccgcattctgatcaaggggggtaaggtggtgaacgacgattgcacgcacgaagctgatgtctacatcgagaatggcatcattcaacaggttgggagagagctgatgattcccgggggagctaaagtgatcgatgccaccggaaaacttgtgataccgggggggatcgacacctccacccattttcaccagacatttatgaacgccacatgtgtcgacgacttttatcacggtactaaagccgctctcgtaggcggtactacaatgattatcggccacgttttgccggataaggaaacctccctggtcgatgcgtatgagaaatgccgtgggcttgcggatccgaaagtatgttgtgattacgctctgcacgtcggaatcacatggtgggctccaaaggttaaggccgagatggagaccctggtgcgggaaaagggagtgaacagctttcagatgtttatgacttacaaggacctgtacatgctgcgggacagcgaattgtatcaagtgctgcacgcttgcaaggacattggggctatcgcgagggtctag

SEQ ID NO: 88654 - DNA, 525 bp, Artificial Sequence
  derived and/or modified sequence
atgctggcaaattctgctagtgtgcgaatcctcatcaagggaggtaaggtggtcaacgacgactgtacccatgaggccgatgtgtacatcgagaatggtattatacagcaggtggggcgtgaactaatgatccctgggggcgccaaggtcatagatgccaccggcaaacttgttattcctggggggattgatacctcaacacacttccaccagacctttatgaatgcgacctgtgttgacgatttttaccacggcaccaaagccgccctggtgggaggtacgacaatgatcatcggccatgtcctgcccgataaagagacctccttagttgatgcttatgagaagtgccgggggctcgccgaccccaaggtttgctgtgattatgccttacacgtgggtattacatggtgggcaccaaaggtcaaggctgaaatggagacactggttcgcgagaaaggcgtaaactcctttcagatgttcatgacctataaggacttgtacatgctgagagacagcgagctctag

SEQ ID NO: 88655 - DNA, 498 bp, Artificial Sequence
  derived and/or modified sequence
atgctagccaatagtgcatccgtgcggatcctcatcaaaggcggcaaagtcgtaaacgacgattgtactcatgaagctgatgtgtatatagaaaacggcattattcaacaggtaggtcgtgagttaatgatacccggaggagccaaagtgattgatgctaccgggaagctcgtgattcctggcggcatcgataccagtacccacttccatcaaacttttatgaatgctacatgtgtggacgatttttaccacggcacgaaggctgccttggtggggggaacaaccatgattataggccatgtgttgcccgataaggagacaagtttggtggatgcatatgaaaagtgtcgcggtctggctgatccaaaagtctgctgcgactacgcccttcacgttggtattacttggtgggcccccaaggtcaaggccgaaatggaaactctagtgcgcgaaaagggcgtcaactcttttcagatgttcatgacttacaaggattag

SEQ ID NO: 88656 - DNA, 1695 bp, Artificial Sequence
  derived and/or modified sequence
atgctggccaacagcgcctctgtgcgcatcctgatcaagggcggcaaggtggtgaatgatgactgcacccatgaagcagatgtgtacattgaaaatggcatcatccagcaggtgggccgggagctgatgatccctggaggagccaaggtgattgatgccaccgggaagctggtgattcctgggggcatcgacaccagcacccacttccaccagaccttcatgaatgccacctgtgtggatgacttctaccacggcaccaaggccgccctggtgggcggcaccaccatgatcatcggccacgtgctgcctgacaaggagaccagcctggtggatgcctatgaaaaatgtcggggcctggccgaccccaaggtgtgctgtgactatgccctgcacgtgggcatcacctggtgggcccccaaggtgaaggccgagatggagaccctggtgcgggagaagggcgtgaacagcttccagatgttcatgacctacaaggacctgtacatgctgcgggacagcgagctgtaccaggtgctgcacgcctgcaaggacatcggggccatcgcccgggtgcatgctgaaaatggagagctggtggccgagggcgccaaggaggccctggacctgggcatcactggacctgagggcatcgagatcagcaggcctgaggagctggaggccgaggccacccacagggtcatcaccatcgccaacagaacccactgccccatctacctggtgaatgtgagcagcatctctgctggagatgtgattgctgctgccaagatgcagggcaaggtggtgctggccgagaccaccacagcccacgccaccctgaccggcctgcactactaccaccaggactggagccatgctgctgcctacgtgacagtgccccccctgcggctggacaccaacaccagcacctacctgatgagcctgctggccaatgacaccctgaacatcgtggccagtgaccaccggcccttcaccaccaagcagaaggccatgggcaaggaggacttcaccaagatcccccacggcgtgtctggagtgcaggacaggatgtctgtcatctgggagcggggcgtggtgggcggcaagatggatgagaacagatttgtggccgtgaccagcagcaatgctgccaagctgctgaacctgtaccccaggaagggccgcatcatccctggagcagatgctgatgtggtggtgtgggaccctgaggccaccaagaccatcagcgccagcacccaggtgcagggcggggacttcaacctgtatgagaacatgcgctgccacggcgtgcccctggtgaccatcagccggggccgggtggtgtatgaaaatggagtcttcatgtgtgccgagggcaccgggaagttctgccccctgcggagcttcccagacacagtgtacaagaagctggtgcagcgggagaagaccctgaaggtgcggggcgtggacaggaccccctacctgggagatgtggccgtggtggtgcaccctgggaagaaggagatgggcacccccctggccgacacccccaccaggcctgtgaccaggcatggaggcatgagggacctgcacgagagcagcttcagcctgagcggcagccagattgatgaccacgtgcccaagagggccagcgcccgcatcctggcccctcctgggggccgcagcagcggcatctggtag

SEQ ID NO: 88657 - DNA, 573 bp, Artificial Sequence
  derived and/or modified sequence
atgctggccaacagcgcctctgtgcgcatcctgatcaagggcggcaaggtggtgaatgatgactgcacccatgaagcagatgtgtacattgaaaatggcatcatccagcaggtgggccgggagctgatgatccctggaggagccaaggtgattgatgccaccgggaagctggtgattcctgggggcatcgacaccagcacccacttccaccagaccttcatgaatgccacctgtgtggatgacttctaccacggcaccaaggccgccctggtgggcggcaccaccatgatcatcggccacgtgctgcctgacaaggagaccagcctggtggatgcctatgaaaaatgtcggggcctggccgaccccaaggtgtgctgtgactatgccctgcacgtgggcatcacctggtgggcccccaaggtgaaggccgagatggagaccctggtgcgggagaagggcgtgaacagcttccagatgttcatgacctacaaggacctgtacatgctgcgggacagcgagctgtaccaggtgctgcacgcctgcaaggacatcggggccatcgcccgggtgtag

SEQ ID NO: 88658 - DNA, 525 bp, Artificial Sequence
  derived and/or modified sequence
atgctggccaacagcgcctctgtgcgcatcctgatcaagggcggcaaggtggtgaatgatgactgcacccatgaagcagatgtgtacattgaaaatggcatcatccagcaggtgggccgggagctgatgatccctggaggagccaaggtgattgatgccaccgggaagctggtgattcctgggggcatcgacaccagcacccacttccaccagaccttcatgaatgccacctgtgtggatgacttctaccacggcaccaaggccgccctggtgggcggcaccaccatgatcatcggccacgtgctgcctgacaaggagaccagcctggtggatgcctatgaaaaatgtcggggcctggccgaccccaaggtgtgctgtgactatgccctgcacgtgggcatcacctggtgggcccccaaggtgaaggccgagatggagaccctggtgcgggagaagggcgtgaacagcttccagatgttcatgacctacaaggacctgtacatgctgcgggacagcgagctgtag

SEQ ID NO: 88659 - DNA, 498 bp, Artificial Sequence
  derived and/or modified sequence
atgctggccaacagcgcctctgtgcgcatcctgatcaagggcggcaaggtggtgaatgatgactgcacccatgaagcagatgtgtacattgaaaatggcatcatccagcaggtgggccgggagctgatgatccctggaggagccaaggtgattgatgccaccgggaagctggtgattcctgggggcatcgacaccagcacccacttccaccagaccttcatgaatgccacctgtgtggatgacttctaccacggcaccaaggccgccctggtgggcggcaccaccatgatcatcggccacgtgctgcctgacaaggagaccagcctggtggatgcctatgaaaaatgtcggggcctggccgaccccaaggtgtgctgtgactatgccctgcacgtgggcatcacctggtgggcccccaaggtgaaggccgagatggagaccctggtgcgggagaagggcgtgaacagcttccagatgttcatgacctacaaggactag

SEQ ID NO: 88660 - DNA, 1695 bp, Artificial Sequence
  derived and/or modified sequence
atgctggccaacagcgccagcgtgcggatcctgatcaagggcggcaaggtggtcaatgacgattgtacccacgaggccgatgtctacatcgaaaacggcatcattcagcaggtgggacgggaactgatgattccagggggcgccaaggtaatcgatgctacgggtaaattggtgattccaggcggcatcgatacctcaacgcatttccatcagacattcatgaacgccacatgcgtggatgatttttaccacggcactaaggctgctctggtgggggggaccaccatgataattggacatgttttaccggataaggagacatctttggtggatgcctacgaaaaatgtaggggtctggctgatcctaaggtttgctgcgattacgccctgcacgtgggaattacctggtgggctccaaaagtgaaggccgaaatggaaaccctcgtgagggagaagggggtgaacagttttcagatgtttatgacttacaaggatctctacatgcttcgcgattcagagttataccaggtactccacgcctgcaaggacatcggggcaatcgccagggtgcatgccgaaaacggcgaactggtcgccgagggagctaaggaggctctagatctgggaattacggggccagagggcatcgagatatcccgacctgaagagctcgaagctgaagccacacatcgggtaatcaccatcgctaaccgcacccactgcccaatatacctggtaaacgttagttccatcagtgctggcgatgtgattgcagccgcgaagatgcaaggcaaagtcgtgctggccgagaccaccactgctcacgccacgctcactgggctacactactaccaccaggactggtcccacgcagcagcctatgtgaccgtgcctccccttagactagacactaatacttcaacctatctgatgtccctcctcgccaacgataccctgaacatcgtggcttctgaccacaggccctttacaacgaagcagaaggcaatgggcaaagaggacttcacaaaaatcccgcatggcgtgtccggtgtccaggaccggatgagcgtcatttgggaacgaggagtggtggggggaaaaatggacgaaaacagattcgtcgccgtcacaagctccaacgctgctaagttactcaacctgtaccccaggaaaggcagaattattccaggagccgacgccgacgtcgtggtttgggatcccgaagccacaaaaactatcagcgcttccacccaggttcagggtggggatttcaatctgtatgaaaacatgcgatgtcacggggtaccactggttaccatctcaaggggcagagtcgtgtatgagaacggcgtattcatgtgcgctgaagggacaggcaaattttgccctttgagatcgttccctgatacggtttacaagaagctggtacagcgggagaagactctcaaagtgcgcggggtggaccgcacaccttatctgggcgatgtggccgtcgtcgtgcatccaggaaaaaaggagatgggaacaccactggctgatacccccacccgacctgttactcggcacggcggtatgagagacctgcatgagtcaagtttctccctgtctgggtcacagatagatgatcatgtgcctaagcgcgccagtgcccggatcttggctccccccggcggccgctcctctggaatctggtag

SEQ ID NO: 88661 - DNA, 1695 bp, Artificial Sequence
  derived and/or modified sequence
atgctggccaacagcgccagcgtgcggatcctgatcaagggcggcaaagtggttaatgacgattgcactcacgaagctgacgtgtacatcgaaaatggcatcatccagcaggtgggcagagaactgatgatccccggcggggccaaagtcattgacgcaactggtaagctggttatcccggggggtatcgacacctccacacactttcaccaaaccttcatgaacgcaacttgcgttgacgacttctaccacggtacgaaggccgccttggtggggggcacaacgatgattataggccatgtcctccctgacaaggaaacttcattagtggacgcatacgaaaagtgcagaggcctggccgacccaaaggtgtgttgtgactacgctctccatgtcggaattacctggtgggcaccaaaagtcaaggctgagatggagactctcgtgcgagagaagggggtgaacagctttcagatgttcatgacctacaaggatctatatatgctacgcgacagtgagctataccaggttttacatgcctgtaaagacatcggggcaatcgcaagagttcacgctgagaatggggaattggtggccgagggtgcgaaagaggcactggatctcggaattacagggccagaggggatagaaatcagccggcccgaggaactggaggctgaagcaacccacagggtcatcaccattgccaaccgcactcactgccccatctatctggtcaacgtctcttccatcagtgcaggggacgtgattgcagcagccaagatgcagggaaaggtggtgctggccgagaccacaacggcccacgccacactcacaggactgcactactaccaccaggactggtcccatgcggctgcttatgtgactgtacctcccctgagactcgacacaaatacctctacatacctcatgtcactgctggccaacgacacattaaacattgtggcaagtgaccaccgaccattcactacaaaacagaaggctatgggtaaagaggacttcaccaagatcccccatggcgtgagcggtgtgcaggaccgcatgtccgtgatttgggaacgaggcgtagtgggaggaaagatggatgagaaccggtttgtggctgtgacaagttctaacgccgcaaaacttctgaatctctatcccaggaaaggcaggataattccgggggcggacgccgacgtggtggtgtgggatcctgaagctactaagacgatctccgcctcaacacaggtccagggtggcgatttcaatctgtacgaaaatatgcgctgtcatggggttccacttgttacaatttcgagagggagggttgtgtatgagaatggcgttttcatgtgcgcggagggaactggtaagttttgtccgctgaggagcttccccgatactgtttacaagaaactggtacagcgggagaagaccctaaaggtgaggggggtcgaccgcacgccctatttgggtgatgtcgcggttgtggtccaccccggcaagaaagaaatggggacacccctggctgatacaccgactcggccagtgacgcgacatggtggaatgagggacctgcacgagtcaagcttttctttgtctggatcacagatcgatgaccacgtccctaaaagagccagtgcgcgtattctcgccccaccggggggtaggtccagtggcatctggtag

SEQ ID NO: 88662 - DNA, 573 bp, Artificial Sequence
  derived and/or modified sequence
atgctggccaacagcgccagcgtgcggatcctgatcaagggcggcaaggtggttaatgatgactgcacacacgaagcagacgtgtacatcgagaatggaatcatccagcaggtagggagagagctaatgatcccaggaggtgcaaaggttattgatgcaacaggcaaactggttattcccggaggtattgatacaagtacacattttcatcaaaccttcatgaacgccacatgcgttgacgatttctaccatggcaccaaggcggctctagtcggcggcaccaccatgatcatcgggcatgtcctgccggataaggagacaagccttgtggatgcctatgagaagtgtagaggccttgccgatccaaaggtttgctgtgattatgcattacatgtcggtattacttggtgggctcccaaggtgaaagccgagatggaaaccttggttcgtgagaagggggtcaactcattccagatgttcatgacatataaggacctgtatatgctgcgggattccgagttataccaagtgcttcatgcttgtaaggatattggagcaatcgcgcgggtttag

SEQ ID NO: 88663 - DNA, 525 bp, Artificial Sequence
  derived and/or modified sequence
atgctggccaacagcgccagcgtgcggatcctgatcaagggcggcaaggttgtgaatgatgattgtacccatgaggccgatgtgtacatcgaaaacggaattattcagcaggtaggacgagaactgatgatccccggcggtgccaaagttatcgacgctaccggcaagttggttatccccggaggcattgatacctctacccattttcaccagacgtttatgaacgcgacttgcgttgacgatttttatcacggcacaaaagcagcccttgttgggggcacaaccatgataatcgggcatgtgcttccagacaaggaaacttcattagtcgacgcttatgagaagtgcaggggcctcgcagaccctaaggtctgctgcgactatgccttgcatgtgggtatcacctggtgggccccaaaagtcaaagctgaaatggagacactcgtgagggagaaaggagtgaattccttccagatgttcatgacatacaaggacctctacatgctgcgagacagcgaactgtag

SEQ ID NO: 88664 - DNA, 498 bp, Artificial Sequence
  derived and/or modified sequence
atgctggccaacagcgccagcgtgcggatcctgatcaagggcggcaaagtggtcaatgacgactgtacccatgaggcagatgtgtatattgagaacggaatcattcagcaagtgggtagggagctgatgatcccgggaggcgctaaagttatcgatgcaactgggaaattagtgattccgggcggtatcgatacaagcacacacttccatcagacattcatgaatgccacatgcgtggacgatttctaccacgggactaaagcagccttggtcggtggaaccactatgatcataggtcatgtgctacccgataaagaaactagtctggtcgatgcctacgagaagtgtcgtggcctggcagatccaaaagtttgctgcgactacgccctccatgtcggcattacttggtgggccccaaaagttaaggccgagatggagacgcttgtcagagagaagggagttaattcgttccagatgttcatgacttataaagactag

SEQ ID NO: 88665 - DNA, 1695 bp, Artificial Sequence
  derived and/or modified sequence
atgctcgcgaattcagcgagcgttcggatactaattaaaggcggaaaagtggtcaatgacgactgcacccatgaagctgatgtctatattgagaatggcattattcaacaagtgggacgggaactgatgatcccagggggtgccaaagtcatcgacgctactggcaaattggttattcccggtggcatcgacacaagtacgcactttcatcagacctttatgaacgccacatgcgtggatgatttctaccatggaacgaaggctgccttggttggtggcacgaccatgataatagggcatgtgctccctgacaaggagacttcactagtggatgcctatgagaagtgtagaggattggctgaccctaaagtgtgctgcgattacgcactccatgtcgggataacttggtgggcaccgaaagttaaggccgagatggaaaccttggttcgagagaaaggcgtgaactctttccagatgttcatgacgtataaggatctctatatgcttcgcgattccgagctataccaggtgctacatgcctgtaaggatattggggctattgcccgtgtgcacgccgagaatggtgaactggttgcagaaggggcaaaggaagccctcgacctgggaatcaccggtccagagggaattgaaattagccgccctgaagaactggaagcagaagccacacaccgtgtcatcacgatcgcgaacaggacacactgtccaatctatctcgttaatgtatcgtccatttcggccggagatgttatcgccgctgcaaaaatgcagggaaaggtggtgctggcggagaccactaccgcccacgccaccttgaccgggttgcattattatcaccaggattggtcccacgctgccgcatatgtaaccgtgccccctctgagactcgacaccaatacaagtacataccttatgtcccttctagccaatgacaccctgaatatagtagccagtgatcacaggccttttaccacaaagcagaaagccatgggcaaggaggactttactaagattccacatggagtcagtggagtgcaagaccgcatgagtgttatctgggagcgcggagtcgtggggggaaagatggacgaaaaccgatttgtggctgttacgtcgagcaatgcggcaaagctgctgaacctgtacccccgtaagggcagaatcatccctggagcggatgccgacgtggtcgtctgggatcctgaagccacaaagaccataagtgcctctacacaggtccagggaggggatttcaacctctacgaaaacatgcggtgtcacggagtgcctctggtaacaatctctcggggacgcgttgtgtacgaaaatggcgtgtttatgtgcgccgagggcaccggaaagttctgccctctacgttcctttcccgacacagtgtataaaaagctggtgcagcgggagaaaacactgaaggtcagaggtgtggatcgtacaccttacctcggcgatgtggcggtcgtagtgcatccaggcaagaaagagatgggaacacccctggccgataccccaaccagaccagttacccggcacgggggtatgcgcgatctgcacgaatcaagtttctctctgagcggctcacagatcgatgatcatgtgccgaaacgggcatcggcaaggatcctcgctccgcctgggggtagaagcagtggaatttggtag

SEQ ID NO: 88666 - DNA, 1695 bp, Artificial Sequence
  derived and/or modified sequence
atgctcgccaattccgcaagcgtgagaattttgatcaagggcggaaaagtggtgaacgatgattgcactcatgaggccgatgtgtatattgaaaacggcatcatacagcaagtcggcagagaactgatgattcccggtggggcaaaggtgatcgatgccacgggaaaacttgtgatccccggaggaatcgatacctccacccatttccatcagacttttatgaatgctacatgtgtcgacgatttctatcatggaacaaaagctgccctggtgggtggaaccacaatgataataggccacgtgctacctgacaaagagactagcctcgtggatgcatacgaaaaatgtcgtggattggctgacccgaaggtttgctgcgactatgcactgcacgtgggcattacttggtgggcccctaaggtcaaggctgagatggaaactctggtgcgagaaaaaggggtgaactctttccagatgttcatgacttacaaagacctatacatgctccgggatagtgaactgtatcaagtcctgcacgcatgcaaggacatcggggctattgccagagtacatgcagaaaacggcgagctcgtggccgagggtgctaaagaggctcttgatttgggcattacggggcctgagggaatagaaatctcacgacctgaagaactcgaggctgaagcaacacaccgggtgatcactattgctaatagaacacattgtccaatctacctagtgaacgtctccagtatatccgccggagatgtgatagccgctgccaaaatgcagggcaaagtcgtgttggcggagactaccactgcccacgccaccctgactggcctgcattattatcatcaggactggagccatgctgccgcatacgtcacagtgccacccctcagactggacaccaacactagcacttatttaatgagcctactggcaaatgacaccctgaacatcgtagcctctgatcacaggcccttcacgaccaaacagaaagcgatgggtaaagaagattttaccaaaatcccccatggagtgagcggggtacaggaccggatgtcagttatctgggagcggggagtcgtggggggtaagatggatgagaaccgtttcgtggccgtgaccagctctaacgcagcaaaactgctcaatctttatcctaggaaggggaggatcatcccaggcgctgacgcggacgtggttgtatgggatcctgaggctactaaaaccatttctgcctccactcaagtgcagggcggtgactttaacctctacgagaacatgcggtgtcatggagtaccgctggtgactatcagtagggggagggtagtctacgagaatggcgtgttcatgtgtgcagaaggcacaggcaaattctgcccccttcgttcattccccgatactgtttacaaaaagttagtacaacgtgaaaaaacgctgaaggtgaggggcgttgataggaccccctatttgggcgacgttgctgtggtggtgcacccaggcaaaaaggagatgggcacacccttggccgacacgcctactcgacccgtgacccgccatggcggtatgagggatttgcatgagagctccttctcactctctggcagccagattgatgatcacgtgcctaagcgcgctagcgccagaatactcgcgcctccaggcggacgtagcagtggcatctggtag

SEQ ID NO: 88667 - DNA, 573 bp, Artificial Sequence
  derived and/or modified sequence
atgctcgccaactcggcaagcgtgagaatcctcataaaaggcggaaaagtggttaacgacgactgcacccacgaggccgatgtgtacattgagaacggaattatccagcaagtcggccgtgagctaatgatcccagggggtgcaaaggtcatcgacgcaacaggaaagttagtaattccagggggaattgacacaagcacccacttccaccagacattcatgaatgccacctgtgtggatgatttctaccacgggaccaaggctgcgctcgtgggcggaaccacaatgattatcgggcatgtgctcccagacaaggaaacgtccttggtggatgcttacgagaaatgcagaggtctggctgacccgaaagtatgctgtgattacgcactgcatgtcggaattacctggtgggcccctaaagtaaaagccgaaatggagacccttgtgcgtgaaaagggcgttaattcgtttcagatgttcatgacttataaggacctgtacatgctgagagactctgagctgtaccaggtgcttcacgcctgtaaggatataggagctattgcccgtgtctag

SEQ ID NO: 88668 - DNA, 525 bp, Artificial Sequence
  derived and/or modified sequence
atgttggcaaactccgccagtgtgagaatcctgatcaagggcggaaaagtggtcaacgacgattgtactcacgaggccgacgtgtatattgaaaacggaatcatacaacaagtaggccgagagttaatgatccccggtggggctaaagtgattgatgcaacaggaaagctggtgataccagggggaatcgacacttctacccattttcaccagactttcatgaatgccacatgtgtggatgacttttatcatggcactaaggccgcacttgtcggcggaactacgatgattattgggcatgtcctgcctgacaaagagacgtcactggttgacgcctacgagaaatgtcgaggactcgccgatcccaaagtgtgctgtgattatgccctgcacgtagggataacatggtgggcaccaaaagtaaaggccgaaatggaaactctagtccgggagaagggcgtgaatagttttcagatgtttatgacatacaaggatttgtacatgctcagggatagtgagctgtag

SEQ ID NO: 88669 - DNA, 498 bp, Artificial Sequence
  derived and/or modified sequence
atgttagccaactccgctagtgtgaggatcctgataaaagggggaaaggtcgtcaatgatgactgcacacacgaggcagacgtgtatatcgaaaatgggattatccaacaggtggggcgtgagctaatgattcccggaggtgctaaagtgatcgacgctactggtaaactcgtgataccaggcggaattgacacttccacacacttccaccagacctttatgaatgccacctgtgtcgacgatttttaccacggaaccaaggccgcactggtgggaggaacgactatgatcatcgggcacgtcctgcctgacaaggagactagcctggttgatgcctatgaaaagtgtagaggcttagccgatcccaaggtgtgctgtgattacgctctccatgtcggcattacatggtgggccccaaaagtgaaggccgagatggaaactttggtccgggagaagggtgtgaattcttttcagatgttcatgacctataaggactag

SEQ ID NO: 88670 - DNA, 1695 bp, Artificial Sequence
  derived and/or modified sequence
atgctggccaacagcgccagcgtgagaatcctgatcaagggcggcaaggtggtgaacgacgactgcacccacgaggccgacgtgtacatcgagaacggcatcatccagcaggtgggcagagagctgatgatccccggcggcgccaaggtgatcgacgccaccggcaagctggtgatccccggcggcatcgacaccagcacccacttccaccagaccttcatgaacgccacctgcgtggacgacttctaccacggcaccaaggccgccctggtgggcggcaccaccatgatcatcggccacgtgctgcccgacaaggagaccagcctggtggacgcctacgagaagtgcagaggcctggccgaccccaaggtgtgctgcgactacgccctgcacgtgggcatcacctggtgggcccccaaggtgaaggccgagatggagaccctggtgagagagaagggcgtgaacagcttccagatgttcatgacctacaaggacctgtacatgctgagagacagcgagctgtaccaggtgctgcacgcctgcaaggacatcggcgccatcgccagagtgcacgccgagaacggcgagctggtggccgagggcgccaaggaggccctggacctgggcatcaccggccccgagggcatcgagatcagcagacccgaggagctggaggccgaggccacccacagagtgatcaccatcgccaacagaacccactgccccatctacctggtgaacgtgagcagcatcagcgccggcgacgtgatcgccgccgccaagatgcagggcaaggtggtgctggccgagaccaccaccgcccacgccaccctgaccggcctgcactactaccaccaggactggagccacgccgccgcctacgtgaccgtgccccccctgagactggacaccaacaccagcacctacctgatgagcctgctggccaacgacaccctgaacatcgtggccagcgaccacagacccttcaccaccaagcagaaggccatgggcaaggaggacttcaccaagatcccccacggcgtgagcggcgtgcaggacagaatgagcgtgatctgggagagaggcgtggtgggcggcaagatggacgagaacagattcgtggccgtgaccagcagcaacgccgccaagctgctgaacctgtaccccagaaagggcagaatcatccccggcgccgacgccgacgtggtggtgtgggaccccgaggccaccaagaccatcagcgccagcacccaggtgcagggcggcgacttcaacctgtacgagaacatgagatgccacggcgtgcccctggtgaccatcagcagaggcagagtggtgtacgagaacggcgtgttcatgtgcgccgagggcaccggcaagttctgccccctgagaagcttccccgacaccgtgtacaagaagctggtgcagagagagaagaccctgaaggtgagaggcgtggacagaaccccctacctgggcgacgtggccgtggtggtgcaccccggcaagaaggagatgggcacccccctggccgacacccccaccagacccgtgaccagacacggcggcatgagagacctgcacgagagcagcttcagcctgagcggcagccagatcgacgaccacgtgcccaagagagccagcgccagaatcctggccccccccggcggcagaagcagcggcatctggtag

SEQ ID NO: 88671 - DNA, 573 bp, Artificial Sequence
  derived and/or modified sequence
atgctggccaacagcgccagcgtgagaatcctgatcaagggcggcaaggtggtgaacgacgactgcacccacgaggccgacgtgtacatcgagaacggcatcatccagcaggtgggcagagagctgatgatccccggcggcgccaaggtgatcgacgccaccggcaagctggtgatccccggcggcatcgacaccagcacccacttccaccagaccttcatgaacgccacctgcgtggacgacttctaccacggcaccaaggccgccctggtgggcggcaccaccatgatcatcggccacgtgctgcccgacaaggagaccagcctggtggacgcctacgagaagtgcagaggcctggccgaccccaaggtgtgctgcgactacgccctgcacgtgggcatcacctggtgggcccccaaggtgaaggccgagatggagaccctggtgagagagaagggcgtgaacagcttccagatgttcatgacctacaaggacctgtacatgctgagagacagcgagctgtaccaggtgctgcacgcctgcaaggacatcggcgccatcgccagagtgtag

SEQ ID NO: 88672 - DNA, 525 bp, Artificial Sequence
  derived and/or modified sequence
atgctggccaacagcgccagcgtgagaatcctgatcaagggcggcaaggtggtgaacgacgactgcacccacgaggccgacgtgtacatcgagaacggcatcatccagcaggtgggcagagagctgatgatccccggcggcgccaaggtgatcgacgccaccggcaagctggtgatccccggcggcatcgacaccagcacccacttccaccagaccttcatgaacgccacctgcgtggacgacttctaccacggcaccaaggccgccctggtgggcggcaccaccatgatcatcggccacgtgctgcccgacaaggagaccagcctggtggacgcctacgagaagtgcagaggcctggccgaccccaaggtgtgctgcgactacgccctgcacgtgggcatcacctggtgggcccccaaggtgaaggccgagatggagaccctggtgagagagaagggcgtgaacagcttccagatgttcatgacctacaaggacctgtacatgctgagagacagcgagctgtag

SEQ ID NO: 88673 - DNA, 498 bp, Artificial Sequence
  derived and/or modified sequence
atgctggccaacagcgccagcgtgagaatcctgatcaagggcggcaaggtggtgaacgacgactgcacccacgaggccgacgtgtacatcgagaacggcatcatccagcaggtgggcagagagctgatgatccccggcggcgccaaggtgatcgacgccaccggcaagctggtgatccccggcggcatcgacaccagcacccacttccaccagaccttcatgaacgccacctgcgtggacgacttctaccacggcaccaaggccgccctggtgggcggcaccaccatgatcatcggccacgtgctgcccgacaaggagaccagcctggtggacgcctacgagaagtgcagaggcctggccgaccccaaggtgtgctgcgactacgccctgcacgtgggcatcacctggtgggcccccaaggtgaaggccgagatggagaccctggtgagagagaagggcgtgaacagcttccagatgttcatgacctacaaggactag

SEQ ID NO: 88674 - DNA, 5209 bp, Artificial Sequence
  derived and/or modified sequence
ccccactctggactcccgcgctgggcgcgctgaggcggcccccgagcgagcgcgcgtgcagccgccgccgccccgagcacccgcagctccggcgccgcggcgagacggagacggaccgagccacgggcccccgcggccgcagcatctcggaggagaacatgcttgccaactcagccagcgtgaggatcctcatcaagggaggcaaggtggtgaacgatgactgcacccacgaggctgacgtctacatcgagaatggcatcatccagcaggtgggccgcgagctcatgatccctggcggggccaaggtgattgatgccacaggaaaactggtgatccctggtggcatcgacaccagcacccacttccaccagaccttcatgaatgccacgtgcgtggacgacttctaccatgggaccaaggcagcactcgtcggaggcaccaccatgatcatcggccacgtcctgcccgacaaggagacctcccttgtggacgcttatgagaagtgccgaggtctggccgaccccaaggtctgctgtgattacgccctccacgtggggatcacctggtgggcacccaaggtgaaagcagaaatggagacactggtgagggagaagggtgtcaactcgttccagatgttcatgacctacaaggacctgtacatgcttcgagacagtgagctgtaccaagtgttgcacgcttgcaaggacattggggcaatcgcccgcgtccatgctgaaaatggggagcttgtggccgagggtgctaaggaggcactggatttggggatcacaggcccagaaggaatcgagatcagccgtccagaggagctggaagctgaagccactcatcgtgttatcaccattgcaaacaggactcactgtccaatctacctggtcaacgtgtccagtatctcggctggtgacgttatcgcagctgctaagatgcaagggaaggttgtgctggcggagaccaccactgcacatgccacgctgacaggcttacactactaccaccaggactggtcccacgcggctgcctatgtcacggtgcctcccctgagactggacaccaacacctcaacctacctcatgagcctgctggccaatgacactctgaacatcgtggcatcagatcaccggcctttcaccacaaagcagaaagctatgggcaaggaagacttcaccaagatcccacatggagtgagtggcgtgcaggaccgcatgagcgtcatctgggagagaggagtggttggaggaaagatggatgagaaccgttttgtggccgttaccagttccaacgcagctaagcttctgaacctgtatccccgcaagggccgcattattcccggagccgatgctgatgtggtggtgtgggacccagaagccacaaagaccatctcagccagcacgcaggtccagggaggagacttcaacctgtatgagaacatgcgctgccacggcgtgccactggtcaccatcagccgggggcgcgtcgtgtatgagaacggcgtcttcatgtgcgccgagggcaccggcaagttctgtcccctgaggtccttcccagacactgtctacaagaagctggtccagagagagaagactttaaaggttagaggagtggaccgcactccctacctgggggatgtcgctgttgtcgtgcaccctgggaaaaaagagatgggaaccccactcgcagacactcctacccggcccgtcacccggcatgggggcatgagggaccttcacgaatccagcttcagcctctctggctctcagatcgatgaccatgttccaaagcgagcttcagctcggatcctcgctcctcccggaggcaggtcgagtggcatttggtaaaggcattgccaagccccccgagtgaggacgcaccgccgccaccagcccgcaactctccagccgaagctgcaggggcaggagaggctgggctgggtggcacaccacccgaggggggccccgggacccacggagccctccctatgtctgcaaagtgattcactgtgcttcgagccaactctaacaggcactttgagatgtgttcctcctgctgtagtcctttctgccttggcctcggcgggcttttctggggcccaggaagcccacactatgcacagagcccaatgcatagagccctggccagcccttcctctcactcctgcctccgctggctttgggaaagcccagactttagtgccctgccccctggctgactggccagttgcccagagcactttagcagatgtggtttcaaagtaaaggcctcctcccccaccccttaggccccgtggtgacatttcccaagtcagacagatgtcagcttcccagccatgcccaggacgtcctatctcccccaacccacctctggccctgtgtaggggcagggatgggggtggctgggactcctggtgcccctcgccagcttctcctgcgccccgcccacaccctcggggggtcacaggcccagaagggtagctgggcggggctcgaggctggtgccaggcgcgtgtaaatggttttgttttgcacgtttggtttgcgcagtagtttggtttgacttgtttgtgcatcctgtgaaaaataacggtgcttgtgtcactagcatagaatagcgacaggaatagatgtggtccttaggagacgctgcacttgacaccaaccagacagcacagggcaggggtggtggagggggctgggctcacaggcctctcttttccccgcctgcagtcttctgggctgcgggaggccctggccctttccccttcccctcccctccttgtctagtttcccacattccaaaagggggcctgggatgctagccccagagatgccagcccttcaggaagcaggtgtcctttcccctctctgcccctgatcactcccagcactccccttgccttcccctgtcttcacctgccaccacacacacacacacacacacacacacacacacacacgcacggcttcctataacttcttcctgctggacagagactcagcgctcctcctgtgtgactggcaagaggcctcatgcctgctgagagaggaggagtgggagaggggcttgccagacaccagagagggagaccccaggcccacaggacctggctgtcgaacccgcattgctgctcaggtgccgtgatctcccgtggtcggcaccaggcccttgccagctcatggcctcatcttctcccctgtccatccaggtgggccctccctgcttctaaagccccacagaagttcccatggaaacactagaggccgggtgtctccttccacctccagtgatctgggaagtgacccagccgcctgcccttgttaagcctggtctgccccgtgggaagtgacttcatgttgcacatgtgatttcagcccccgaggcttgcgcgaggcttctggaccctcggttaaaggtcagcccctggccgggtgcggtggctcacgcctgtaatcccagcactttgggaggccaaggcgggtggatcatggagtcaggagatcgagaccatcctggctaacacggtgaaaccccgtctctactaaaaatacaaaaattacccaggcgtggtggcgggcgcctgtagtcccagctactgaggaggctgaggcaggagaatagcgtgaacccgggaggcggagcttgcagtgagccaagatcacgccactgcacttcagcctggacgacagagtgagactccatctcaaaaaacagacaaacaaaaaagtcagcccctgcacatctctgtagtgcttttcatgtattcaaaccacttccgtatatgacctctcacttagtcctcatgacaatggagcacttattattcttcccattttacagatgaggaaactaagacccagaaagttcaggtcctctgaccccagaagtgtctgtgatgaccctcccaaccttggctatctaccccacctgtggagaggaggtctggggtgacatctattgtagatcccacctgagagtttaaccaatgagaagacttactttcctggtaggcagcctgctttgttttgcacaggaagatagattttttttctcatctttcttataaacaacctcatgcacattctgtgtttgagccaagactagtcacccattgggggctaaccgtgcagtgtgagctgcgtccacaccctcacttctcccttcactccccctttcctcactcaggggctgagaggacagaggtggtcagccggggagcagaggtggcgaaggggctcatggcaagtggcagccattggaacaggggtgaggacccaggcctgggaaagccaccagggatgggggaaaccatgacgccgcctcctggtgcagtgcacaccatctctatccctgtcagccctcactgggtcatgggccttgggcagatgtcaaagagcccagcagcagcggtggtggccagctgggcagagcatccttgcttgggctaggaaagctttaccttctctgagtgcctccgcctgagagatgtgtgacccgtggcaccagggaaccacgtcttggagtggtccactgtaggccatgcgcttcatccacccccagtccctacataggccctacccttgcccgggagcttctagatagaaatcagaaagagattcaaggagccaaatgagcggtcagcccccaccatgcactccttgccccgtgcagagctccagccagcttcgtcaccagccccactggctcctggttggaacgaaagggtctctggttgcactgaatgcagctctcaaactggtcttgtacttgctgaataaatactgttgttcttgccttagctgctctctaggtttgtggggttaagttgccagaaaattgtgctactgtgtgtgcgtgtgcgtgcgtgtgtgtagtgctaggagtccacagtaggtctctgtcaagccgatgtcgtgatgagggcttttctgatactgacccagaagccacagaaccacaaggaaacccaaaccccctccagctgctgaggcgcaggcacagcctggggtcggatggagcctccagcaccccagcacccaggtgacttccccactcccctgtaaatgtcatggtgctaagactgtgtcaaccccaagacgacacatggtcctgtgctttggccaccgtttgaggcaaaaactaaacagcccgacacgttgtgttctggtgcaggtttgtattaaactgtagctacttctca

SEQ ID NO: 88675 - DNA, 1972 bp, Artificial Sequence
  derived and/or modified sequence
ctcccgggctaggacatcctcctctcccccttctgtttctgcgtgaggcgcacaaaagggcggggagccgggaacatgcttgccaactcagccagcgtgaggatcctcatcaagggaggcaaggtggtgaacgatgactgcacccacgaggctgacgtctacatcgagaatggcatcatccagcaggtgggccgcgagctcatgatccctggcggggccaaggtgattgatgccacaggaaaactggtgatccctggtggcatcgacaccagcacccacttccaccagaccttcatgaatgccacgtgcgtggacgacttctaccatgggaccaaggcagcactcgtcggaggcaccaccatgatcatcggccacgtcctgcccgacaaggagacctcccttgtggacgcttatgagaagtgccgaggtctggccgaccccaaggtctgctgtgattacgccctccacgtggggatcacctggtgggcacccaaggtgaaagcagaaatggagacactggtgagggagaagggtgtcaactcgttccagatgttcatgacctacaaggacctgtacatgcttcgagacagtgagctgtaccaagtgttgcacgcttgcaaggacattggggcaatcgcccgcgtccatgctgaaaatggggagcttgtggccgagggtgctaaggaggcactggatttggggatcacaggcccagaaggaatcgagatcagccgtccagaggagctggaagctgaagccactcatcgtgttatcaccattgcaaacaggactcactgtccaatctacctggtcaacgtgtccagtatctcggctggtgacgttatcgcagctgctaagatgcaagggaaggttgtgctggcggagaccaccactgcacatgccacgctgacaggcttacactactaccaccaggactggtcccacgcggctgcctatgtcacggtgcctcccctgagactggacaccaacacctcaacctacctcatgagcctgctggccaatgacactctgaacatcgtggcatcagatcaccggcctttcaccacaaagcagaaagctatgggcaaggaagacttcaccaagatcccacatggagtgagtggcgtgcaggaccgcatgagcgtcatctgggagagaggagtggttggaggaaagatggatgagaaccgttttgtggccgttaccagttccaacgcagctaagcttctgaacctgtatccccgcaagggccgcattattcccggagccgatgctgatgtggtggtgtgggacccagaagccacaaagaccatctcagccagcacgcaggtccagggaggagacttcaacctgtatgagaacatgcgctgccacggcgtgccactggtcaccatcagccgggggcgcgtcgtgtatgagaacggcgtcttcatgtgcgccgagggcaccggcaagttctgtcccctgaggtccttcccagacactgtctacaagaagctggtccagagagagaagactttaaaggttagaggagtggaccgcactccctacctgggggatgtcgctgttgtcgtgcaccctgggaaaaaagagatgggaaccccactcgcagacactcctacccggcccgtcacccggcatgggggcatgagggaccttcacgaatccagcttcagcctctctggctctcagatcgatgaccatgttccaaagcgagcttcagctcggatcctcgctcctcccggaggcaggtcgagtggcatttggtaaaggcattgccaagccccccgagtgaggacgcaccgccgccaccagcccgcaactctccagccgaagctgcaggggcaggagaggctgggctgggtggcacaccacccgaggggggccccgggacccacggagccctccctatgtctgcaaagtgattcactgtgcttcgagccaactctaacaggcactttgagatgtgttc

SEQ ID NO: 88676 - DNA, 647 bp, Artificial Sequence
  derived and/or modified sequence
atcggggctaagccggggcgctcttggggtcctctttgtacgcccgcgaagcgccgtgccgggccttgctcatagaacatgcttgccaactcagccagcgtgaggatcctcatcaagggaggcaaggtggtgaacgatgactgcacccacgaggctgacgtctacatcgagaatggcatcatccagcaggtgggccgcgagctcatgatccctggcggggccaaggtgattgatgccacaggaaaactggtgatccctggtggcatcgacaccagcacccacttccaccagaccttcatgaatgccacgtgcgtggacgacttctaccatgggaccaaggcagcactcgtcggaggcaccaccatgatcatcggccacgtcctgcccgacaaggagacctcccttgtggacgcttatgagaagtgccgaggtctggccgaccccaaggtctgctgtgattacgccctccacgtggggatcacctggtgggcacccaaggtgaaagcagaaatggagacactggtgagggagaagggtgtcaactcgttccagatgttcatgacctacaaggacctgtacatgcttcgagacagtgagctgtaccaagtgttgcacgcttgcaaggacattggggcaatcgcccgcgt

SEQ ID NO: 88677 - DNA, 560 bp, Artificial Sequence
  derived and/or modified sequence
aatgcgtgctcgcggggttgcaaagccctggggaacatgcttgccaactcagccagcgtgaggatcctcatcaagggaggcaaggtggtgaacgatgactgcacccacgaggctgacgtctacatcgagaatggcatcatccagcaggtgggccgcgagctcatgatccctggcggggccaaggtgattgatgccacaggaaaactggtgatccctggtggcatcgacaccagcacccacttccaccagaccttcatgaatgccacgtgcgtggacgacttctaccatgggaccaaggcagcactcgtcggaggcaccaccatgatcatcggccacgtcctgcccgacaaggagacctcccttgtggacgcttatgagaagtgccgaggtctggccgaccccaaggtctgctgtgattacgccctccacgtggggatcacctggtgggcacccaaggtgaaagcagaaatggagacactggtgagggagaagggtgtcaactcgttccagatgttcatgacctacaaggacctgtacatgcttcgagacagtgagctgta

SEQ ID NO: 88678 - DNA, 621 bp, Artificial Sequence
  derived and/or modified sequence
gtcctccggaaccgcccccggccctccctggggacccgtgcctcagcgcgtccaggctttgtggtgtcctgagtcgccatggaaacccgagggaacgcggagccgggtgctaggggggtcggaacatgcttgccaactcagccagcgtgaggatcctcatcaagggaggcaaggtggtgaacgatgactgcacccacgaggctgacgtctacatcgagaatggcatcatccagcaggtgggccgcgagctcatgatccctggcggggccaaggtgattgatgccacaggaaaactggtgatccctggtggcatcgacaccagcacccacttccaccagaccttcatgaatgccacgtgcgtggacgacttctaccatgggaccaaggcagcactcgtcggaggcaccaccatgatcatcggccacgtcctgcccgacaaggagacctcccttgtggacgcttatgagaagtgccgaggtctggccgaccccaaggtctgctgtgattacgccctccacgtggggatcacctggtgggcacccaaggtgaaagcagaaatggagacactggtgagggagaagggtgtcaactcgttccagatgttcatgacctacaaggacc

SEQ ID NO: 88679 - DNA, 570 bp, Artificial Sequence
  derived and/or modified sequence
atgaccagcggcagcgtgttcttctacatcctgatcttcggcaagtacttcagccacggcggcggccaggacgtgaagtgcagcctgggctacttcccctgcggcaacatcaccaagtgcctgccccagctgctgcactgcaacggcgtggacgactgcggcaaccaggccgacgaggacaactgcggcgacaacaacggctggagcctgcagttcgacaagtacttcgccagctactacaagatgaccagccagtaccccttcgaggccgagacccccgagtgcctggtgggcagcgtgcccgtgcagtgcctgtgccagggcctggagctggactgcgacgagaccaacctgagagccgtgcccagcgtgagcagcaacgtgaccgccatgagcctgcagtggaacctgatcagaaagctgccccccgactgcttcaagaactaccacgacctgcagaagctgtacctgcagaacaacaagatcaccagcatcagcatctacgccttcagaggcctgaacagcctgaccaagctgagcagagccgtgaaggacggcagcgagaagtag

SEQ ID NO: 88680 - DNA, 474 bp, Artificial Sequence
  derived and/or modified sequence
atgaccagcggcagcgtgttcttctacatcctgatcttcggcaagtacttcagccacggcggcggccaggacgtgaagtgcagcctgggctacttcccctgcggcaacatcaccaagtgcctgccccagctgctgcactgcaacggcgtggacgactgcggcaaccaggccgacgaggacaactgcggcgacaacaacggctggagcctgcagttcgacaagtacttcgccagctactacaagatgaccagccagtaccccttcgaggccgagacccccgagtgcctggtgggcagcgtgcccgtgcagtgcctgtgccagggcctggagctggactgcgacgagaccaacctgagagccgtgcccagcgtgagcagcaacgtgaccgccatgagcctgcagtggaacctgatcagaaagctgccccccgactgcttcaagaactaccacgacctgcagaagctgaccctgtag

SEQ ID NO: 88681 - DNA, 570 bp, Artificial Sequence
  derived and/or modified sequence
atgaccagcggttctgtcttcttttacatcctgattttcggcaagtatttcagtcatggtggaggccaggatgtgaaatgcagcctcgggtacttcccctgtggtaatatcacaaagtgtctgccccaactgctacattgtaatggcgtggatgattgtggaaaccaggcagatgaagataactgcggcgataacaacggatggtctctgcaattcgacaagtacttcgcctcatattacaagatgacgtctcagtaccccttcgaggcggaaactccggaatgtctggtaggatcagtgcccgttcagtgcttgtgccagggactggagctcgattgcgacgagaccaatctaagggctgtgccatccgtgtccagtaacgtcaccgcaatgtcgctgcagtggaacctcatacggaagcttccccctgactgctttaagaattaccacgacctgcagaagctctacctgcaaaataataagattacttcaataagtatttatgcattccgcggattgaattctctgaccaagctctctcgagcagtgaaggacggttctgagaaatag

SEQ ID NO: 88682 - DNA, 474 bp, Artificial Sequence
  derived and/or modified sequence
atgacttcaggctctgtctttttttacatcttgatcttcgggaagtatttttcacatggaggcggccaggacgtgaagtgttctctcggctattttccatgcggtaacattactaagtgcctcccccagctgctccactgtaacggggtcgacgactgcggaaaccaggctgatgaggacaattgtggggataacaatggctggtcccttcagtttgataagtacttcgcatcttactataagatgacatcccagtaccctttcgaggcagagacacccgagtgtctggtaggctcagtgcctgttcaatgtctgtgccaaggacttgagcttgattgcgacgagaccaacctccgcgcagtgccctcagtctccagcaacgtgacagctatgtcactgcagtggaatctcatccgtaagttgccgcctgactgttttaaaaattaccatgatctccagaagttgacactatag

SEQ ID NO: 88683 - DNA, 570 bp, Artificial Sequence
  derived and/or modified sequence
atgaccagcggctctgtgttcttctacatcctgatctttgggaagtacttcagccatggaggcggccaggatgtgaagtgcagcctgggctacttcccctgtggcaacatcaccaagtgcctgccccagctgctgcactgcaatggagtggatgactgtggcaaccaggctgatgaggacaactgtggggacaacaacggctggagcctgcagtttgacaagtactttgccagctactacaagatgaccagccagtacccctttgaggccgagaccccagagtgcctggtgggctctgtgcctgtgcagtgcctgtgccagggcctggagctggactgtgatgagaccaacctgcgggctgtgcccagcgtgagcagcaatgtgacagccatgagcctgcagtggaacctgatcaggaagctgcccccagactgcttcaagaactaccatgacctgcagaagctgtacctgcagaacaacaagatcaccagcatcagcatctatgccttccggggcctgaacagcctgaccaagctgagcagagctgtgaaggatggcagcgagaagtag

SEQ ID NO: 88684 - DNA, 474 bp, Artificial Sequence
  derived and/or modified sequence
atgaccagcggctctgtgttcttctacatcctgatctttgggaagtacttcagccatggaggcggccaggatgtgaagtgcagcctgggctacttcccctgtggcaacatcaccaagtgcctgccccagctgctgcactgcaatggagtggatgactgtggcaaccaggctgatgaggacaactgtggggacaacaacggctggagcctgcagtttgacaagtactttgccagctactacaagatgaccagccagtacccctttgaggccgagaccccagagtgcctggtgggctctgtgcctgtgcagtgcctgtgccagggcctggagctggactgtgatgagaccaacctgcgggctgtgcccagcgtgagcagcaatgtgacagccatgagcctgcagtggaacctgatcaggaagctgcccccagactgcttcaagaactaccatgacctgcagaagctgaccctgtag

SEQ ID NO: 88685 - DNA, 570 bp, Artificial Sequence
  derived and/or modified sequence
atgaccagcggcagcgtgttcttctacatcctgatcttcggcaagtacttcagtcatgggggggggcaggacgtgaaatgctcactgggttatttcccttgcggcaacatcacaaagtgtctccctcagcttctgcattgtaacggcgtggacgactgtgggaaccaagccgacgaagacaactgtggtgataataatggctggtccttgcagttcgataaatactttgctagttattacaaaatgacctcccagtacccatttgaggccgaaacccccgagtgcctggtgggatccgttcccgtgcagtgcctctgtcaggggttggaactggattgtgatgagactaacctgcgtgcagtgcctagcgtgagcagcaacgttactgcaatgtctctccagtggaatcttattagaaagctgccccctgactgtttcaagaactaccatgacctgcagaaactgtacctgcaaaacaacaaaattaccagcatcagcatatatgcctttagagggttgaattctctaaccaaactgtctagggccgtgaaggacggatcagagaaatag

SEQ ID NO: 88686 - DNA, 474 bp, Artificial Sequence
  derived and/or modified sequence
atgaccagcggcagcgtgttcttctacatcctgatcttcggcaagtactttagccacgggggcgggcaggacgtgaagtgttcacttggctactttccttgcgggaacatcacaaagtgcctgccacagctgcttcactgcaatggagtagacgattgcggtaaccaggcggatgaggacaactgcggagataataatggatggagcctgcaatttgacaaatacttcgctagctactacaaaatgacaagccagtatccattcgaggccgaaactcctgaatgcctggtgggcagcgtgcctgtgcagtgcttgtgccaagggctggagctggactgtgatgagactaatttgagagccgtcccctccgtttcttctaatgtcactgcaatgtctctgcaatggaatctgataaggaagctcccgcccgattgctttaagaattatcacgatctgcagaagcttacactgtag

SEQ ID NO: 88687 - DNA, 570 bp, Artificial Sequence
  derived and/or modified sequence
atgactagcgggtcagtgtttttctatatcctgatctttggtaaatacttctctcacggcggtggtcaggacgtgaaatgctctctgggctattttccctgtggaaacatcacaaaatgtctccctcagctgttacattgcaacggggtggatgattgcgggaaccaggccgatgaggataactgcggggataacaacgggtggagcttgcagttcgacaagtatttcgccagctattacaagatgacatcacaataccccttcgaggctgaaactcccgagtgcctggtgggaagcgtcccagtgcaatgtctgtgtcagggactggaactagactgcgatgagactaatctgcgggctgtacctagcgtgagcagcaatgtaaccgcaatgtccttacagtggaacctgatcagaaagttaccacccgactgctttaagaactatcacgacttgcagaagctctatctgcagaataataagatcacctccattagcatctatgcatttagaggcctgaacagcctgacaaaactgtcccgcgcagtcaaggatggatccgagaagtag

SEQ ID NO: 88688 - DNA, 474 bp, Artificial Sequence
  derived and/or modified sequence
atgacttccgggagtgtcttcttctacatcctcatctttgggaaatattttagccatggaggtggccaggacgtgaagtgtagcctgggatacttcccgtgcggcaatatcacaaaatgtctcccccaacttctgcattgcaacggagtagacgattgcgggaatcaagctgacgaagacaattgcggtgacaacaatggatggagcttacagttcgataagtatttcgcgtcatactacaagatgacatcccagtacccttttgaagcagagacacccgagtgcttggtgggctctgtcccagtccaatgcttatgccagggtcttgagttggactgtgacgaaactaacctgcgcgctgtgcccagtgtgtccagcaacgtgactgccatgagtctgcagtggaacctgatccgcaaacttcctccggattgttttaagaactatcatgatctgcagaagctcactttgtag

SEQ ID NO: 88689 - DNA, 770 bp, Artificial Sequence
  derived and/or modified sequence
gagaatagaaaggaggaaagaaaaaaagaggaatggaaagagacagagaaaggaaatgggagtggaaggagggaggactgctttgtaactgctaagattgcagacagaaatagcacacaaccactgtgagctgtatgcgattcagaaaccaagaccaaattttgctcactttcattaatcagttgctcagatagaaggaaatgacatctggttctgtcttcttctacatcttaatttttggaaaatatttttctcatgggggtggacaggatgtcaagtgctcccttggctatttcccctgtgggaacatcacaaagtgcttgcctcagctcctgcactgtaacggtgtggacgactgcgggaatcaggccgatgaggacaactgtggagacaacaatggatggtctctgcaatttgacaaatattttgccagttactacaaaatgacttcccaatatccttttgaggcagaaacacctgaatgtttggtcggttctgtgccagtgcaatgtctttgccaaggtctggagcttgactgtgatgaaaccaatttacgagctgttccatcggtttcttcaaatgtgactgcaatgtcacttcagtggaacttaataagaaagcttcctcctgattgcttcaagaattatcatgatcttcagaagctgtacctgcaaaacaataagattacatccatctccatctatgctttcagaggactgaatagccttactaaactgtccagagcagtaaaggatggctctgaaaaatga

SEQ ID NO: 88690 - protein, 627 aa, Artificial Sequence
  derived and/or modified sequence
RTMVTCTQNMKAALKSLLYHSRNLGYLQNNKITSISIYAFRGLNSLTKLYLSHNRITFLKPGVFEDLHRLEWLIIEDNHLSRISPPTFYGLNSLILLVLMNNVLTRLPDKPLCQHMPRLHWLDLEGNHIHNLRNLTFISCSNLTVLVMRKNKINHLNENTFAPLQKLDELDLGSNKIENLPPLIFKDLKELSQLNLSYNPIQKIQANQFDYLVKLKSLSLEGIEISNIQQRMFRPLMNLSHIYFKKFQYCGYAPHVRSCKPNTDGISSLENLLASIIQRVFVWVVSAVTCFGNIFVICMRPYIRSENKLYAMSIISLCCADCLMGIYLFVIGGFDLKFRGEYNKHAQLWMESTHCQLVGSLAILSTEVSVLLLTFLTLEKYICIVYPFRCVRPGKCRTITVLILIWITGFIVAFIPLSNKEFFKNYYGTNGVCFPLHSEDTESIGAQIYSVAIFLGINLAAFIIIVFSYGSMFYSVHQSAITATEIRNQVKKEMILAKRFFFIVFTDALCWIPIFVVKFLSLLQVEIPGTITSWVVIFILPINSALNPILYTLTTRPFKEMIHRFWYNYRQRKSMDSKGQKTYAPSFIWVEMWPLQEMPPELMKPDLFTYPCEMSLISQSTRLNSYS

SEQ ID NO: 88691 - DNA, 1884 bp, Artificial Sequence
  derived and/or modified sequence
agaaccatggtgacctgcacccagaacatgaaggccgccctgaagagcctgctgtaccacagcagaaacctgggctacctgcagaacaacaagatcaccagcatcagcatctacgccttcagaggcctgaacagcctgaccaagctgtacctgagccacaacagaatcaccttcctgaagcccggcgtgttcgaggacctgcacagactggagtggctgatcatcgaggacaaccacctgagcagaatcagcccccccaccttctacggcctgaacagcctgatcctgctggtgctgatgaacaacgtgctgaccagactgcccgacaagcccctgtgccagcacatgcccagactgcactggctggacctggagggcaaccacatccacaacctgagaaacctgaccttcatcagctgcagcaacctgaccgtgctggtgatgagaaagaacaagatcaaccacctgaacgagaacaccttcgcccccctgcagaagctggacgagctggacctgggcagcaacaagatcgagaacctgccccccctgatcttcaaggacctgaaggagctgagccagctgaacctgagctacaaccccatccagaagatccaggccaaccagttcgactacctggtgaagctgaagagcctgagcctggagggcatcgagatcagcaacatccagcagagaatgttcagacccctgatgaacctgagccacatctacttcaagaagttccagtactgcggctacgccccccacgtgagaagctgcaagcccaacaccgacggcatcagcagcctggagaacctgctggccagcatcatccagagagtgttcgtgtgggtggtgagcgccgtgacctgcttcggcaacatcttcgtgatctgcatgagaccctacatcagaagcgagaacaagctgtacgccatgagcatcatcagcctgtgctgcgccgactgcctgatgggcatctacctgttcgtgatcggcggcttcgacctgaagttcagaggcgagtacaacaagcacgcccagctgtggatggagagcacccactgccagctggtgggcagcctggccatcctgagcaccgaggtgagcgtgctgctgctgaccttcctgaccctggagaagtacatctgcatcgtgtaccccttcagatgcgtgagacccggcaagtgcagaaccatcaccgtgctgatcctgatctggatcaccggcttcatcgtggccttcatccccctgagcaacaaggagttcttcaagaactactacggcaccaacggcgtgtgcttccccctgcacagcgaggacaccgagagcatcggcgcccagatctacagcgtggccatcttcctgggcatcaacctggccgccttcatcatcatcgtgttcagctacggcagcatgttctacagcgtgcaccagagcgccatcaccgccaccgagatcagaaaccaggtgaagaaggagatgatcctggccaagagattcttcttcatcgtgttcaccgacgccctgtgctggatccccatcttcgtggtgaagttcctgagcctgctgcaggtggagatccccggcaccatcaccagctgggtggtgatcttcatcctgcccatcaacagcgccctgaaccccatcctgtacaccctgaccaccagacccttcaaggagatgatccacagattctggtacaactacagacagagaaagagcatggacagcaagggccagaagacctacgcccccagcttcatctgggtggagatgtggcccctgcaggagatgccccccgagctgatgaagcccgacctgttcacctacccctgcgagatgagcctgatcagccagagcaccagactgaacagctacagctag

SEQ ID NO: 88692 - DNA, 1884 bp, Artificial Sequence
  derived and/or modified sequence
aggactatggtgacttgcacccagaacatgaaggccgctctgaaatcgcttctctaccactcccgcaatctgggatacctgcagaacaacaaaatcaccagcatctcaatatacgcatttcggggacttaacagtctcactaaactgtacctgagccacaatcggataaccttcctgaagcctggcgtcttcgaggatttgcatagactggagtggttgataatagaggataatcatctatctcgcatatcaccacccaccttttatggcctgaattctctgatcctactagtgttgatgaacaatgtcctcacaaggttaccagataaacctctgtgccagcatatgcctagattacattggctggacttggagggcaatcacatccacaatctgcggaacttgacgtttatctcctgttctaatctcactgtgcttgtaatgcggaagaacaaaatcaatcacctgaatgagaatacctttgcccccctccagaagcttgatgagttggatctgggcagtaacaagatcgaaaatctccctccactgatattcaaggacttgaaggagctgagtcaactgaacctcagctacaatcctattcagaagatccaggccaaccaatttgattacctggtgaaactcaagagtctttctctggaaggtatcgagattagcaacattcagcagcgcatgttccgccctcttatgaatttgtctcacatctattttaaaaagttccagtactgcggttatgctccgcacgtgaggagctgtaagcctaatacagatgggatctctagcttggaaaacctgctggccagtatcatccaacgtgtattcgtctgggtcgtgtcggctgttacctgtttcggaaacatcttcgttatttgtatgcgaccctacatccgctcagagaataagttgtacgccatgtccatcatcagcctgtgctgtgcagactgccttatgggaatttacctgttcgtcatcggagggttcgacttaaagttccggggtgaatacaataagcacgcgcaactgtggatggaaagcacccactgccagttggtgggatctttggctatactgagtacagaggtgagtgtgctgttgctgactttcttaaccctggagaagtacatctgcatcgtgtacccgttcagatgtgtcaggcccgggaagtgcagaaccatcaccgtgctgattctgatatggatcaccggctttattgtggctttcatccccctgagtaataaagagttttttaagaattactacggaactaatggcgtgtgtttcccccttcactccgaggataccgagtcgatcggcgcgcaaatatattctgtggccatcttcctgggaattaacctggcagccttcataatcattgtgttcagctatgggtccatgttttacagcgttcatcagagtgccattaccgctactgagattcgcaaccaagtgaaaaaagaaatgatattggccaagagatttttctttatcgtgtttacagacgctttatgttggattcccatattcgttgtcaagtttctctccctccttcaagtcgagatacccggtacgattacttcctgggtcgtaatctttattctgccaattaatagcgcactcaaccccattctgtacacactgacgactaggccgttcaaggagatgatccaccggttttggtataactatcggcaacgcaagtctatggacagcaaggggcagaagacctacgcccctagtttcatatgggttgaaatgtggcccctgcaagaaatgcccccagaacttatgaaacctgatctgttcacctatccttgtgaaatgagtttaatcagtcaaagcacgaggctgaattcatactcatag

SEQ ID NO: 88693 - DNA, 1884 bp, Artificial Sequence
  derived and/or modified sequence
aggaccatggtgacctgcacccagaacatgaaggccgccctgaagagcctgctgtaccacagcaggaacctgggctacctgcagaacaacaagatcaccagcatcagcatctatgccttccggggcctgaacagcctgaccaagctgtacctgagccacaaccgcatcaccttcctgaagccaggagtgtttgaggacctgcaccggctggagtggctgatcatcgaggacaaccacctgagccgcatcagcccccccaccttctacggcctgaacagcctcatcctgctggtgctgatgaacaacgtgctgacccggctgcctgacaagcccctgtgccagcacatgccccggctgcactggctggacctggagggcaaccacatccacaacctgaggaacctgaccttcatcagctgcagcaacctgactgtgctggtgatgaggaagaacaagatcaaccacctgaatgaaaacacctttgcccccctgcagaagctggatgagctggacctgggcagcaacaagattgagaacctgcccccactcatcttcaaggacctgaaggagctgagccagctgaacctgagctacaaccccatccagaagatccaggccaaccagtttgactacctggtgaagctgaagagcctgagcctggagggcatcgagatcagcaacatccagcagaggatgttccggcccctgatgaacctgagccacatctacttcaagaagttccagtactgcggctacgcccctcatgtgcgcagctgcaagcccaacacagatggcatcagcagcctggagaacctgctggccagcatcatccagagggtgtttgtgtgggtggtgtctgctgtgacctgctttggaaacatctttgtgatctgcatgaggccctacatccgctctgagaacaagctgtatgccatgagcatcatcagcctgtgctgtgccgactgcctgatgggcatctacctgtttgtgattggaggctttgacctgaagttccggggggagtacaacaagcacgcccagctgtggatggagagcacccactgccagctggtgggcagcctggccatcctgagcacagaggtgtctgtgctgctgctgaccttcctgaccctggagaagtacatctgcatcgtgtaccccttccgctgtgtgcggcctggaaaatgtaggaccatcaccgtgctgatcctgatctggatcaccggcttcatcgtggccttcatccccctgagcaacaaggagttcttcaagaactactacggcaccaacggggtgtgcttccccctgcacagcgaggacacagagagcatcggggcccagatctacagcgtggccatcttcctgggcatcaacctggccgccttcatcatcatcgtgttctcctatggctccatgttctacagcgtgcaccagagcgccatcacagccacagagatccggaaccaggtgaagaaggagatgatcctggccaagcgcttcttcttcatcgtgttcacagatgccctgtgctggatccccatctttgtggtgaagttcctgagcctgctgcaggtggagatccctggcaccatcacctcctgggtggtgatcttcatcctgcccatcaacagcgccctgaaccccatcctgtacaccctgaccacccggcccttcaaggagatgatccaccgcttctggtacaactaccggcagaggaagtccatggacagcaagggccagaagacctacgcccccagcttcatctgggtggagatgtggcccctgcaggagatgcctcctgagctgatgaagccagacctcttcacctacccctgtgagatgagcctcatcagccagagcacccggctgaacagctacagctag

SEQ ID NO: 88694 - DNA, 1884 bp, Artificial Sequence
  derived and/or modified sequence
cggaccatggtgacctgcacccagaacatgaaggccgccctgaagtcacttctgtaccattccagaaacctcgggtacctgcagaacaacaagataacatcaatctcgatttatgcatttcgcgggctgaattccctaactaaactctacctgtcacacaaccggattacatttctgaagcccggcgtgtttgaggatcttcacagattagagtggctgattattgaggataatcatttgtctaggattagtccacctaccttctatggtcttaattctctgattttgctcgtcctcatgaacaacgtccttacgcgtttacctgacaaacccctctgtcagcatatgcctaggcttcactggctagatctggaaggcaaccacattcacaatttacggaacctcactttcatctcatgtagtaatctcaccgtgctagtgatgagaaaaaacaagataaatcatcttaacgaaaatacctttgcccctctccagaagctcgatgagctagatctaggttccaataagattgagaacctgcctcctctgatctttaaggacctgaaagaactttcacagctgaatctctcttacaatcctatccagaagatccaagctaatcaattcgactacttagtaaaactcaaaagcctctccctcgagggcatcgaaatatcaaacatacagcaacgcatgttccgcccattgatgaacctctcccacatctactttaaaaaattccagtactgcggatacgcgccgcacgttcgatcatgcaaacccaacacagatggaatctcatcgctcgaaaatttgctcgctagcatcatccagcgcgtattcgtgtgggtggtttccgctgtaacctgctttggtaatatttttgtgatctgcatgaggccctacattcgctcagagaacaagctatatgctatgtcaatcatttctctgtgctgcgcagattgtctcatgggaatttaccttttcgtgattggaggctttgatctgaagttccgaggtgaatacaataaacacgcgcagttgtggatggagtcaacacactgtcagctggtgggctcacttgccatattgagcacagaagtgtccgtactcctgcttacgttcctgaccctagaaaaatacatctgtatagtttaccctttccgctgcgttcgtcccggcaaatgccggaccatcaccgtccttatcctgatttggataacggggtttattgtagctttcataccgttaagcaataaagaattctttaagaactattatgggaccaacggggtatgttttccgcttcacagtgaagacacggaatccattggggcacaaatttattctgtagcaatctttctgggcattaacctggccgcttttataatcattgtgttctcgtatggctctatgttctattctgttcatcaatctgccattaccgccacagagattagaaaccaggtgaagaaggaaatgatactcgcaaaacgctttttcttcatagtgtttaccgacgccctgtgctggatccccatcttcgttgtgaaatttctttcactgctgcaagtcgaaatccccggcacaatcacatcatgggtagtaatcttcattctcccaatcaattccgctctaaatccgatcctgtacactttgacaactcgcccatttaaggagatgattcaccggttctggtacaactatagacagcgcaagtccatggatagtaaaggccagaaaacttatgccccctcttttatctgggtcgaaatgtggcctttgcaggaaatgccccccgagctcatgaaaccggacctatttacctatccttgcgagatgagcctcatcagtcagagcactaggcttaactcatacagttag

SEQ ID NO: 88695 - DNA, 1884 bp, Artificial Sequence
  derived and/or modified sequence
agaactatggtaacctgcacacagaacatgaaggccgctttgaaatctttgctctaccacagcagaaacctcggctatcttcagaacaataaaatcacatctattagcatctacgcctttcgtgggctgaattctcttactaaattgtacttaagccataatagaattacctttctaaagcctggcgtgtttgaggatctgcatcgtctcgagtggctgatcattgaagacaaccacctgtctaggatcagtcctccaaccttctacggcctcaattctctaatcctactcgttctgatgaataacgtgcttacaagactccccgacaaacccttatgccaacacatgcctcggttgcattggctggatctcgagggcaatcatatacataatctgaggaatctgacatttataagctgttcaaacctcacggtgctggtgatgcgaaagaacaagataaatcaccttaacgagaatacctttgcgccactgcagaagctagacgaactggacttggggagcaataagatcgagaatctgccccctctcatttttaaggatctgaaagaactgagccaactgaacttatcctacaaccctatccagaagatccaggcaaatcagtttgattacctggtgaaactcaagtccctgagcttggaaggaatcgagatttctaatatccagcagcgaatgtttcgacccctcatgaatttgtcccacatatatttcaaaaagttccagtattgtggatacgccccacacgtgcgctcctgtaaacccaatactgacgggatctcttctttggagaacttgctagcttccataatacagcgggtctttgtctgggtggtctccgccgtgacatgcttcggcaacattttcgtgatctgcatgcgcccatatatacgctccgaaaataagttatacgctatgagcatcatctctttgtgttgtgctgactgtctaatgggaatttacttattcgtcatcggcggattcgaccttaagttccgcggtgagtacaataagcacgcgcagctgtggatggagagcacccactgtcagttggtcgggtcactggctatcttatccaccgaggtcagcgtgctcctactgaccttccttacactcgagaagtacatttgtattgtgtacccttttaggtgtgtcagaccaggaaaatgtagaaccataacagtgctgatcctcatctggatcactggctttattgtggccttcattccactcagtaacaaggaattttttaagaattactatgggacgaatggcgtgtgctttcctttacattctgaggatactgagagcatcggagctcagatttactcagtcgctatctttctaggtatcaatcttgccgcattcattattatcgtcttctcctatggctccatgttttactctgttcaccagtccgccatcactgccacggaaatacgcaatcaggtaaagaaggagatgatccttgcaaagaggtttttctttatagtgttcaccgatgctttgtgctggattccaatattcgtggtcaaatttctgtcccttctgcaggttgaaattcctggaactattacttcatgggttgttatctttatactccctatcaattctgcactcaatccgatcctgtacaccctgacaacgcgacccttcaaagagatgatacacagattctggtataattataggcagcgaaagagcatggacagtaaaggccagaaaacctacgccccttcatttatttgggtcgagatgtggcctctccaagagatgccccctgagttgatgaagcctgatctgtttacctatccttgcgagatgtcattaatcagccagtccacacggctgaactcctacagctag

SEQ ID NO: 88696 - DNA, 3196 bp, Artificial Sequence
  derived and/or modified sequence
agaacaatggtgacctgcactcagaacatgaaggcagccttgaaatccttactttatcattcccgcaatctggggtacctgcaaaacaataagattacatccatctccatctatgctttcagaggactgaatagccttactaaactgtatctcagtcataacagaataaccttcctgaagccgggtgtttttgaagatcttcacagactagaatggctgataattgaagataatcacctcagtcgaatttccccaccaacattttatggactaaattctcttattctcttagtcctgatgaataacgtcctcacccgtttacctgataaacctctctgtcaacacatgccaagactacattggctggaccttgaaggcaaccatatccataatttaagaaatttgacttttatttcctgcagtaatttaactgttttagtgatgaggaaaaacaaaattaatcacttaaatgaaaatacttttgcacctctccagaaactggatgaattggatttaggaagtaataagattgaaaatcttccaccgcttatattcaaggacctgaaggagctgtcacaattgaatctttcctataatccaatccagaaaattcaagcaaaccaatttgattatcttgtcaaactcaagtctctcagcctagaagggattgaaatttcaaatatccaacaaaggatgtttagacctcttatgaatctctctcacatatattttaagaaattccagtactgtgggtatgcaccacatgttcgcagctgtaaaccaaacactgatggaatttcatctctagagaatctcttggcaagcattattcagagagtatttgtctgggttgtatctgcagttacctgctttggaaacatttttgtcatttgcatgcgaccttatatcaggtctgagaacaagctgtatgccatgtcaatcatttctctctgctgtgccgactgcttaatgggaatatatttattcgtgatcggaggctttgacctaaagtttcgtggagaatacaataagcatgcgcagctgtggatggagagtactcattgtcagcttgtaggatctttggccattctgtccacagaagtatcagttttactgttaacatttctgacattggaaaaatacatctgcattgtctatccttttagatgtgtgagacctggaaaatgcagaacaattacagttctgattctcatttggattactggttttatagtggctttcattccattgagcaataaggaatttttcaaaaactactatggcaccaatggagtatgcttccctcttcattcagaagatacagaaagtattggagcccagatttattcagtggcaatttttcttggtattaatttggccgcatttatcatcatagttttttcctatggaagcatgttttatagtgttcatcaaagtgccataacagcaactgaaatacggaatcaagttaaaaaagagatgatccttgccaaacgttttttctttatagtatttactgatgcattatgctggatacccatttttgtagtgaaatttctttcactgcttcaggtagaaataccaggtaccataacctcttgggtagtgatttttattctgcccattaacagtgctttgaacccaattctctatactctgaccacaagaccatttaaagaaatgattcatcggttttggtataactacagacaaagaaaatctatggacagcaaaggtcagaaaacatatgctccatcattcatctgggtggaaatgtggccactgcaggagatgccacctgagttaatgaagccggaccttttcacatacccctgtgaaatgtcactgatttctcaatcaacgagactcaattcctattcatgactgactctgaaattcatttcttcgcagagaatactgtgggggtgcttcatgagggatttactggtatgaaatgaataccacaaaattaatttataataatagctaagataaatattttacaaggacatgaggaaaaataaaaatgactaatgctcttacaaagggaagtaattatatcaataatgtatatatattagtagacattttgcataagaaattaagagaaatctacttcagtaacattcattcatttttctaacatgcatttattgagtacccactactatgtgcatagcattgcaatatagtcctggaagtagacagtgcagaacctttcaatctgtagatggtgtttaatgacaaaagactatacaaagtccatctgcagttcctagtttaaagtagagctttacctgtcatgtgcatcagcaagaatcataggcacttttaaataaaggtttaaagttttggaatactcagtgtatttgcatcatagaaaatgtctgactgtttgcaaaataatattctgttttaagaatccatcttacctctctttaagtttccatacacttgagagccaacacaacatatttattactaaaaagatgctttgctagaaactcaaaaacagcacttcttttggcacttcctgcccagttttctctttgctttaaatgaacatcatcatatggaattggaataggagagtatgagtacggcagagaagtggatcagaaaaactagaatgaggataaacatttacattagtggaaactcctgaaataaatccttgtattgtcagttaactgattttcaacaaggatgccaagacaaaaaggcttttcaacaaaccgtgctgttttaagaacagacctaagtggtttaattcacccactttagatgggtgaatgttatggtgtgtgaaatatctcagtaaagcagttaaaaggaaaaagagctggaatgcactgattcaggaacttaatttcaggaaggaaaggtctgtatgtacacatttcactttaagcagaaaatctttcttcaagaaatgactttactttctctttgcactgccagcacgtgagatactaactttttaactagttgttcttctctagtctctacgttattagaattttttgctttcataatgtgaaacctttaagcaggagaagaaaatgttttcagatagtttcaaatacaccaaaaatgtttgaaacacaaaaatactggaatcaaaccataatgcacttattgaatatatagttgtatagatttgttctgaaaataaattatctgaaatttaactatt

SEQ ID NO: 88697 - protein, 35 aa, Artificial Sequence
  derived and/or modified sequence
QDITAMLITFLLYLQMAFLQCVYISDVSVYPNFFL

SEQ ID NO: 88698 - DNA, 1069 bp, Artificial Sequence
  derived and/or modified sequence
caagacattactgctatgctgatcacctttttgctgtaccttcaaatggcatttcttcaatgtgtgtacatctctgatgtctctgtgtatccaaatttcttcttgtaaggacattatcagattggattagggcccaccgcaatggcctcactaaatccaatcttttttgacatatgcatatagaagttcctagacttcagtgctgaggagacagaggctacaggcatccatatgtctgtctctggggtcttcttaggaagaggcctctgatgaagagaacaaagctcttgtttgatatcccagcttgagcaagaggaatgggacaagttcgtggcagccaccagccgccaggagatggctgaagtagacaatcaatttccaggttattgggaaattcaagaccaatcaatagaattatctggagataaactctctgggacagtgttcatcaagttgcagtgccctgtttgagtccgagttagtgttagtcggagatacagtgaagtctaaggaggatgaggaagagtgattggtgatagcagataaaagaaaaatgaatcagtgggataaatggagatgaccaagtttggcgagaagacaatactatgagagaaggtgtccagagacagagtgagacacagatataggaacaggatcctgggccttcctgctccaggaaaagcatggaaaaggcaagttgtgagggcagaagacagtcccacaagaacatgaaattcagtcatgcaaagggctgggaaggcagaaacacagtggtgagagtgagccagaaaggagatgtggggagcaaggactcatggcagagaaggccctggtaaccaagataagaaagtcaactgtgaaggtgaactaagaacacatgatggatgagtggaaaccaggggccagaaagtctttgaaggcagaagatacaaggcaatttgtgggcaggagggaaaaaagtagtgaaaatgtgcaggccaatgtgagaggggcctgtgatggcagagaggaggccaatgatgtgagtaaaaggagcactgcaggaaccggacccagtgtgacgttatga

SEQ ID NO: 88699 - DNA, 108 bp, Artificial Sequence
  derived and/or modified sequence
caggacatcaccgccatgctgatcaccttcctgctgtacctgcagatggccttcctgcagtgcgtgtacatcagcgacgtgagcgtgtaccccaacttcttcctgtag

SEQ ID NO: 88700 - DNA, 108 bp, Artificial Sequence
  derived and/or modified sequence
caagatattaccgccatgcttattaccttcctgctgtatttacaaatggccttccttcagtgcgtttacatatcagatgtgagtgtttatccaaatttttttctgtag

SEQ ID NO: 88701 - DNA, 108 bp, Artificial Sequence
  derived and/or modified sequence
caggacatcacagccatgctgatcaccttcctgctgtacctgcagatggccttcctgcagtgtgtgtacatcagtgatgtgtctgtgtaccccaacttcttcctgtag

SEQ ID NO: 88702 - DNA, 108 bp, Artificial Sequence
  derived and/or modified sequence
caggacatcaccgccatgctgatcaccttcctgctgtacctgcagatggcgttcctccagtgtgtgtatatcagcgacgttagtgtgtacccaaattttttcctctag

SEQ ID NO: 88703 - DNA, 108 bp, Artificial Sequence
  derived and/or modified sequence
caggatatcactgccatgcttatcactttcttactttacctgcagatggcctttctacaatgtgtctatatcagtgatgtgagtgtctacccaaacttcttcctctag

SEQ ID NO: 88704 - protein, 248 aa, Artificial Sequence
  derived and/or modified sequence
MEVLESGEQGVLQWDRKLSELSEPGDGEALMYHTHFSELLDEFSQNVLGQLLNDPFLSEKSVSMEVEPSPTSPAPLIQAEHSYSLCEEPRAQSPFTHITTSDSFNDDEVESEKWYLSTDFPSTSIKTEPVTDEPPPGLVPSVTLTITAISTPLEKEEPPLEMNTGVDSSCQTIIPKIKLEPHEVDQFLNFSPKEGLSALPVSLWVMDMVSGSTEREYGERAGMSLYHRCCSWLYEIALFLKNKNFASK

SEQ ID NO: 88705 - DNA, 528 bp, Artificial Sequence
  derived and/or modified sequence
atggaggtgctggagagcggcgagcagggcgtgctgcagtgggacagaaagctgagcgagctgagcgagcccggcgacggcgaggccctgatgtaccacacccacttcagcgagctgctggacgagttcagccagaacgtgctgggccagctgctgaacgaccccttcctgagcgagaagagcgtgagcatggaggtggagcccagccccaccagccccgcccccctgatccaggccgagcacagctacagcctgtgcgaggagcccagagcccagagccccttcacccacatcaccaccagcgacagcttcaacgacgacgaggtggagagcgagaagtggtacctgagcaccgacttccccagcaccagcatcaagaccgagcccgtgaccgacgagcccccccccggcctggtgcccagcgtgaccctgaccatcaccgccatcagcacccccctggagaaggaggagccccccctggagatgaacaccggcgtggacagcagctgccagaccaacaccacctag

SEQ ID NO: 88706 - DNA, 747 bp, Artificial Sequence
  derived and/or modified sequence
atggaggtgctggagagcggcgagcagggcgtgctgcagtgggacagaaagctgagcgagctgagcgagcccggcgacggcgaggccctgatgtaccacacccacttcagcgagctgctggacgagttcagccagaacgtgctgggccagctgctgaacgaccccttcctgagcgagaagagcgtgagcatggaggtggagcccagccccaccagccccgcccccctgatccaggccgagcacagctacagcctgtgcgaggagcccagagcccagagccccttcacccacatcaccaccagcgacagcttcaacgacgacgaggtggagagcgagaagtggtacctgagcaccgacttccccagcaccagcatcaagaccgagcccgtgaccgacgagcccccccccggcctggtgcccagcgtgaccctgaccatcaccgccatcagcacccccctggagaaggaggagccccccctggagatgaacaccggcgtggacagcagctgccagaccatcatccccaagatcaagctggagccccacgaggtggaccagttcctgaacttcagccccaaggagggcctgagcgccctgcccgtgagcctgtgggtgatggacatggtgagcggcagcaccgagagagagtacggcgagagagccggcatgagcctgtaccacagatgctgcagctggctgtacgagatcgccctgttcctgaagaacaagaacttcgccagcaagtag

SEQ ID NO: 88707 - DNA, 453 bp, Artificial Sequence
  derived and/or modified sequence
atggaggtgctggagagcggcgagcagggcgtgctgcagtgggacagaaagctgagcgagctgagcgagcccggcgacggcgaggccctgatgtaccacacccacttcagcgagctgctggacgagttcagccagaacgtgctgggccagctgctgaacgaccccttcctgagcgagaagagcgtgagcatggaggtggagcccagccccaccagccccgcccccctgatccaggccgagcacagctacagcctgtgcgaggagcccagagcccagagccccttcacccacatcaccaccagcgacagcttcaacgacgacgaggtggagagcgagaagtggtacctgagcaccgacttccccagcaccagcatctgccacagcgaccaccacagccacctgcaccccgtgggcaagggcggcaccagcagcggcaacgagcactggggctag

SEQ ID NO: 88708 - DNA, 528 bp, Artificial Sequence
  derived and/or modified sequence
atggaagtgttggaaagcggagaacagggcgtgcttcaatgggataggaaactctcagaactgagcgaaccgggcgacggcgaggccctgatgtaccacacccatttttccgaactcttggatgagttttcacagaatgtcctaggccagttgctcaacgaccctttcctatccgagaaaagcgtttctatggaggttgagccctccccaaccagcccggcacctctgatccaagccgagcactcttacagtctgtgtgaggagccaagggcacagtctccttttacccacatcaccacaagcgattcgttcaatgacgacgaagtggagtctgaaaaatggtacttgagtaccgatttccctagcacctcaatcaagactgagcctgtgactgatgaaccaccgcccggcttagtccccagcgtgaccctgactatcacggcaatctcaaccccgcttgagaaggaggagccaccactcgagatgaatacaggcgtcgattcaagttgccagactaacactacgtag

SEQ ID NO: 88709 - DNA, 747 bp, Artificial Sequence
  derived and/or modified sequence
atggaagtcctcgaatctggggaacaaggtgttttgcaatgggaccgcaaactgtctgagctgagtgagcctggggacggtgaggccctcatgtatcacacccactttagcgaacttcttgatgagtttagtcagaacgtgctgggacaactgctaaatgatcccttcctgtctgagaaatctgtgagcatggaggtggaaccgtcgcccacctcccctgcgcccctgatccaagccgagcactcatatagtctctgcgaggagccccgtgcccagtcacctttcacccacattactacaagcgatagtttcaatgatgatgaagttgaatccgagaagtggtacctctctaccgatttcccctcaacatccattaagaccgagcccgtgactgacgagccgcctcccggtcttgtgcccagcgtgaccttgactataacagctatcagcacaccacttgaaaaagaggagccccccctcgagatgaacactggagtggactcatcgtgtcagaccatcatacctaagattaaactggagccccacgaagtagatcaatttttaaattttagtcccaaggagggtctgtccgctctccccgtgagtttgtgggtaatggatatggtttccgggtccaccgagcgcgaatatggtgaacgcgcggggatgagtctataccataggtgctgcagctggctttacgaaatcgcgctgtttcttaagaacaaaaacttcgcttccaagtag

SEQ ID NO: 88710 - DNA, 453 bp, Artificial Sequence
  derived and/or modified sequence
atggaagtgttagagtctggagagcaaggggtgcttcagtgggatcggaagctctctgaactctcagagcctggggacggggaagccctcatgtaccacactcatttcagcgagctgctagacgaattctctcagaacgtgctgggccaactgctcaacgacccgttcctgagcgagaagtcggtgagcatggaagtcgagccctcgccgaccagcccagcaccactgatccaggccgagcatagttattccctgtgtgaagagcccagagcgcaatcacccttcacccacattaccaccagcgattcctttaacgatgatgaagtggaaagcgaaaaatggtaccttagcacggatttcccatctacctccatatgccattcagatcaccacagtcatttgcacccagtagggaagggggggacatccagtggaaacgagcactggggctag

SEQ ID NO: 88711 - DNA, 528 bp, Artificial Sequence
  derived and/or modified sequence
atggaggtgctggagagcggggagcagggcgtgctgcagtgggacaggaagctgtctgagctgtctgagcctggagatggagaggccctgatgtaccacacccacttcagcgagctgctggatgagttcagccagaatgtgctgggccagctgctgaatgaccccttcctgtctgagaagtctgtgtccatggaggtggagcccagccccaccagccctgcccccctcatccaggccgagcacagctacagcctgtgtgaggagccccgggcccagagccccttcacccacatcaccaccagtgacagcttcaatgatgatgaggtggagagcgagaagtggtacctgagcacagacttccccagcaccagcatcaagacagagcctgtgacagatgagcccccacctggcctggtgcccagcgtgaccctgaccatcacagccatcagcacccccctggagaaggaggagccccccctggagatgaacacaggagtggacagcagctgccagaccaacaccacctag

SEQ ID NO: 88712 - DNA, 747 bp, Artificial Sequence
  derived and/or modified sequence
atggaggtgctggagagcggggagcagggcgtgctgcagtgggacaggaagctgtctgagctgtctgagcctggagatggagaggccctgatgtaccacacccacttcagcgagctgctggatgagttcagccagaatgtgctgggccagctgctgaatgaccccttcctgtctgagaagtctgtgtccatggaggtggagcccagccccaccagccctgcccccctcatccaggccgagcacagctacagcctgtgtgaggagccccgggcccagagccccttcacccacatcaccaccagtgacagcttcaatgatgatgaggtggagagcgagaagtggtacctgagcacagacttccccagcaccagcatcaagacagagcctgtgacagatgagcccccacctggcctggtgcccagcgtgaccctgaccatcacagccatcagcacccccctggagaaggaggagccccccctggagatgaacacaggagtggacagcagctgccagaccatcatccccaagatcaagctggagccccatgaggtggaccagttcctgaacttcagccccaaggagggcctgagcgccctgcctgtgtccctgtgggtgatggacatggtgtctggcagcacagagcgggagtatggagagagagctggcatgagcctgtaccaccgctgctgctcctggctgtatgagatcgccctcttcctgaagaacaagaactttgccagcaagtag

SEQ ID NO: 88713 - DNA, 453 bp, Artificial Sequence
  derived and/or modified sequence
atggaggtgctggagagcggggagcagggcgtgctgcagtgggacaggaagctgtctgagctgtctgagcctggagatggagaggccctgatgtaccacacccacttcagcgagctgctggatgagttcagccagaatgtgctgggccagctgctgaatgaccccttcctgtctgagaagtctgtgtccatggaggtggagcccagccccaccagccctgcccccctcatccaggccgagcacagctacagcctgtgtgaggagccccgggcccagagccccttcacccacatcaccaccagtgacagcttcaatgatgatgaggtggagagcgagaagtggtacctgagcacagacttccccagcaccagcatctgccacagcgaccaccacagccacctgcaccctgtgggcaaaggaggcaccagcagtggaaatgagcactggggctag

SEQ ID NO: 88714 - DNA, 528 bp, Artificial Sequence
  derived and/or modified sequence
atggaggtgctggagagcggcgagcagggcgtgctgcagtgggacaggaagctgtcagaactctccgagcccggcgatggggaggcactcatgtaccacacgcatttctcggaactcctggatgaattcagtcagaatgtgctagggcagctcctgaatgacccctttctgtctgaaaagagtgtctctatggaggtggagccctctccaactagtcctgcgccactgatccaggccgaacactcctattcattatgtgaggagccacgggctcagtccccctttacccatattacaactagcgacagctttaatgatgacgaggtagagagtgaaaaatggtacctctctacggacttccctagtacaagcattaagaccgagccggtcacagacgagcctccccctggcctggtgccatctgttactttgacaatcacagcaatcagcacacctctggaaaaagaagaacctcccctggaaatgaacaccggggtggacagttcttgtcagaccaacaccacatag

SEQ ID NO: 88715 - DNA, 747 bp, Artificial Sequence
  derived and/or modified sequence
atggaggtgctggagagcggcgagcagggcgtgctgcagtgggacagaaaactgagcgaactttctgagcccggcgatggggaggctctgatgtatcacacacacttttccgaacttctggacgagttttcccagaacgtcctgggacaactcttgaacgacccctttttgagcgaaaagtctgtgagcatggaggtcgaacctagtcctacctcacccgctccacttattcaggctgagcattcctattcactgtgcgaagagccccgggcccagtctccttttacacacatcaccacatcagactcctttaacgatgacgaggtcgaatctgaaaaatggtacctctcaacagatttcccatctacctctatcaagacagaacccgttaccgacgagccaccaccaggattggtgccctcagtgacactgaccattactgctatttctactcccctggaaaaggaggagcccccactggagatgaacaccggggtagattcaagttgtcagaccatcatcccgaagatcaaactggaaccgcatgaggttgatcaatttcttaacttttcaccaaaggagggtctgtccgcactcccggtatctctctgggtcatggacatggttagcggatctactgaaagggaatatggagaaagagcgggaatgtctctataccacagatgctgctcttggctttacgagatcgccctattccttaagaacaaaaacttcgccagtaagtag

SEQ ID NO: 88716 - DNA, 453 bp, Artificial Sequence
  derived and/or modified sequence
atggaggtgctggagagcggcgagcagggcgtgctgcagtgggaccgcaagctgtccgagctctctgaaccaggtgatggcgaagcgcttatgtaccacacccatttttccgagcttttggatgagttctcccagaatgtcctgggacagctcctcaatgacccgttcctgtcagaaaagagtgtgagtatggaggtggagccaagcccaacatctcccgctcccctaattcaggctgaacactcctactccctgtgcgaggaacctagggcacagtctccatttacgcacattaccacatccgatagtttcaatgatgacgaggtcgagtctgagaagtggtatctctccaccgacttccccagcacatccatctgtcattctgatcaccattcccatctgcatcctgtcggcaagggtgggactagcagtgggaatgaacactgggggtag

SEQ ID NO: 88717 - DNA, 528 bp, Artificial Sequence
  derived and/or modified sequence
atggaagtcctggagtcaggcgaacagggcgtgctacagtgggaccgcaagttgagtgaactgtcggaacccggagatggagaggccctaatgtaccatactcacttctctgagctgttggatgaattctcacaaaacgtgctgggccaactgctgaatgatcctttcctcagcgagaaatcggtgagtatggaggttgagcccagtccgacaagccccgctccgctgattcaggccgaacacagttacagcctgtgtgaggagccaagagcccaaagtccttttacccacatcacaacgagcgactcctttaacgatgatgaggtcgagtccgagaaatggtacctcagtaccgattttcctagcacctctatcaaaacagagccagtgaccgacgagcccccacccggactggttccttccgttacccttactatcacagctataagtacaccgctggagaaggaggagcctccgctagagatgaatacaggagttgactcgtcgtgtcagaccaacaccacatag

SEQ ID NO: 88718 - DNA, 747 bp, Artificial Sequence
  derived and/or modified sequence
atggaagtcttggaatcaggggaacagggcgtgttacagtgggatcgcaaactgtccgagctttccgaacccggagatggggaggctcttatgtaccatacccacttctcagaactcctggacgaattctctcagaacgtgcttggccagttgcttaatgacccatttctgtctgagaaaagcgtgtccatggaggtggagccgtcgccaacgtcacctgctcccctgattcaggctgagcactcgtactccctttgtgaggagccgagagcccagtcccccttcacacatatcacgacatccgatagctttaacgacgatgaagtagagtccgagaaatggtacctgtcaacggatttccctagcacctctatcaagacggagcccgttaccgacgagcctcctcctggcttggtgcccagcgtaacgttgactataacggccatctctactccattagagaaggaggaaccacccctagagatgaacacaggggtcgacagtagctgtcagaccattatacctaagatcaagctcgaaccacatgaagtagaccagtttctgaacttttccccaaaagaaggcctttcagctttacctgtgtccctttgggtgatggatatggtgtccggttccacagaaagagagtatggcgagcgggcaggcatgagcctgtaccacagatgttgttcttggctgtacgagatagcgctgtttttgaagaacaagaatttcgctagcaagtag

SEQ ID NO: 88719 - DNA, 453 bp, Artificial Sequence
  derived and/or modified sequence
atggaggtcctggagtcaggcgagcagggggttcttcagtgggatcgcaagttgtccgaactgagtgagcctggggatggggaggcactcatgtatcacacacactttagcgagctcctagacgaattctcccagaatgtgttaggccaattgctaaacgaccctttcctgagtgagaaatccgtgtctatggaagtggaaccttctccgacatctccagccccactgattcaggccgagcattcatatagcctctgcgaagagccccgagctcagtctcctttcacgcacattaccacctccgactcgttcaatgatgatgaagtggaatccgagaaatggtacctgtctacagacttccctagcacctctatatgccacagcgaccaccactcacaccttcatcctgtagggaagggagggaccagctccgggaacgagcactggggttag

SEQ ID NO: 88720 - DNA, 1053 bp, Artificial Sequence
  derived and/or modified sequence
cggcagaggagcagacgtttgctttccaagtgcaaaactacagacacgcgcgcgcacacacgcaagcacacgcggagagagaggaaccttgccggtccgaggcagctctgcgcgtcccctcctgcgcttagcatcctcggcccagcgcggcccgcaccgccatggaggtgctggagagcggggagcagggcgtgctgcagtgggaccgcaagctgagcgagctgtcagagcccggggacggcgaggccctcatgtaccacacgcacttctcagaacttctggatgagttttcccagaacgtcttgggtcagctcctgaatgatcctttcctctcagagaagagtgtgtcaatggaggtggaaccttccccgacgtccccggcgcctctcatccaggctgagcacagctactccctgtgcgaggagcctcgggcccagtcgcccttcacccacattaccaccagtgacagcttcaatgacgatgaggtggaaagtgagaaatggtacctgtctacagacttcccttcaacatccatcaagacagagccagttacagacgaaccacccccaggactcgttccgtctgtcactctgaccatcacagccatctccaccccgttggaaaaggaggaacctcctctggaaatgaacactggggttgattcctcgtgccagaccaatacaacctaatccccaacctacttttagtttttttgttttttttttatggttaaaagtaacttttgtagtttaaaaaaatctttcctctttcatataaataagaagtggaaattgcctttttattgtgtaatgtagaaaaccctcaagtgttttttccgagcttgggaaagattttgtgtaggaaatgtgcatagagtttgtattttatttttattagcagctgaaatgcctttggttttggcttctctctctccctctctctctctgtctctccttctctctctccccccaccacccacccccacacacgtcatctgcattgttattggagcctgtacttagagggattaagcccacaccctggcttccattc

SEQ ID NO: 88721 - DNA, 1105 bp, Artificial Sequence
  derived and/or modified sequence
ggagccgtagcggcaagtgggcttgcggctaagggattttcctgggatgagagcgggtcttctgccttcattttggatgcacatcccgctttagccccggcagcctttggtccggctcgtgtccctggggattctcggatctccgaggacaccggacgggagcgcttggccatcctctctccggcagaggagcagacgtttgctttccaagtgcaaaactacagacacgcgcgcgcacacacgcaagcacacgcggagagagaggaaccttgccggtccgaggcagctctgcgcgtcccctcctgcgcttagcatcctcggcccagcgcggcccgcaccgccatggaggtgctggagagcggggagcagggcgtgctgcagtgggaccgcaagctgagcgagctgtcagagcccggggacggcgaggccctcatgtaccacacgcacttctcagaacttctggatgagttttcccagaacgtcttgggtcagctcctgaatgatcctttcctctcagagaagagtgtgtcaatggaggtggaaccttccccgacgtccccggcgcctctcatccaggctgagcacagctactccctgtgcgaggagcctcgggcccagtcgcccttcacccacattaccaccagtgacagcttcaatgacgatgaggtggaaagtgagaaatggtacctgtctacagacttcccttcaacatccatcaagacagagccagttacagacgaaccacccccaggactcgttccgtctgtcactctgaccatcacagccatctccaccccgttggaaaaggaggaacctcctctggaaatgaacactggggttgattcctcgtgccagaccattattcctaaaattaagctggagcctcatgaagtggatcagtttctaaacttctctcctaaagaaggtctgtctgccctccctgtgtccctttgggttatggatatggtctctgggtctacagagagggaatatggcgagagagctgggatgagtttgtaccacagatgttgtagctggctttatgaaatagctctgttcttaaaaaataaaaattttgcttccaaataaaaattttgcaagctaa

SEQ ID NO: 88722 - protein, 445 aa, Artificial Sequence
  derived and/or modified sequence
MAAPTPARPVLTHLLVALFGMGSWAAVNGIWVELPVVVKELPEGWSLPSYVSVLVALGNLGLLVVTLWRRLAPGKDEQVPIRVVQVLGMVGTALLASLWHHVAPVAGQLHSVAFLALAFVLALACCASNVTFLPFLSHLPPRFLRSFFLGQGLSALLPCVLALVQGVGRLECPPAPINGTPGPPLDFLERFPASTFFWALTALLVASAAAFQGLLLLLPPPPSVPTGELGSGLQVGAPGAEEEVEESSPLQEPPSQAAGTTPGPDPKAYQLLSARSACLLGLLAATNALTNGVLPAVQSFSCLPYGRLAYHLAVVLGSAANPLACFLAMGVLCRSLAGLGGLSLLGVFCGGYLMALAVLSPCPPLVGTSAGVVLVVLSWVLCLGVFSYVKVAASSLLHGGGRPALLAAGVAIQVGSLLGAVAMFPPTSIYHVFHSRKDCADPCDS

SEQ ID NO: 88723 - protein, 357 aa, Artificial Sequence
  derived and/or modified sequence
MVGTALLASLWHHVAPVAGQLHSVAFLALAFVLALACCASNVTFLPFLSHLPPRFLRSFFLGQGLSALLPCVLALVQGVGRLECPPAPINGTPGPPLDFLERFPASTFFWALTALLVASAAAFQGLLLLLPPPPSVPTGELGSGLQVGAPGAEEEVEESSPLQEPPSQAAGTTPGPDPKAYQLLSARSACLLGLLAATNALTNGVLPAVQSFSCLPYGRLAYHLAVVLGSAANPLACFLAMGVLCRSLAGLGGLSLLGVFCGGYLMALAVLSPCPPLVGTSAGVVLVVLSWVLCLGVFSYVKVAASSLLHGGGRPALLAAGVAIQVGSLLGAVAMFPPTSIYHVFHSRKDCADPCDS

SEQ ID NO: 88724 - DNA, 1338 bp, Artificial Sequence
  derived and/or modified sequence
atggccgcccccacccccgccagacccgtgctgacccacctgctggtggccctgttcggcatgggcagctgggccgccgtgaacggcatctgggtggagctgcccgtggtggtgaaggagctgcccgagggctggagcctgcccagctacgtgagcgtgctggtggccctgggcaacctgggcctgctggtggtgaccctgtggagaagactggcccccggcaaggacgagcaggtgcccatcagagtggtgcaggtgctgggcatggtgggcaccgccctgctggccagcctgtggcaccacgtggcccccgtggccggccagctgcacagcgtggccttcctggccctggccttcgtgctggccctggcctgctgcgccagcaacgtgaccttcctgcccttcctgagccacctgccccccagattcctgagaagcttcttcctgggccagggcctgagcgccctgctgccctgcgtgctggccctggtgcagggcgtgggcagactggagtgcccccccgcccccatcaacggcacccccggcccccccctggacttcctggagagattccccgccagcaccttcttctgggccctgaccgccctgctggtggccagcgccgccgccttccagggcctgctgctgctgctgccccccccccccagcgtgcccaccggcgagctgggcagcggcctgcaggtgggcgcccccggcgccgaggaggaggtggaggagagcagccccctgcaggagccccccagccaggccgccggcaccacccccggccccgaccccaaggcctaccagctgctgagcgccagaagcgcctgcctgctgggcctgctggccgccaccaacgccctgaccaacggcgtgctgcccgccgtgcagagcttcagctgcctgccctacggcagactggcctaccacctggccgtggtgctgggcagcgccgccaaccccctggcctgcttcctggccatgggcgtgctgtgcagaagcctggccggcctgggcggcctgagcctgctgggcgtgttctgcggcggctacctgatggccctggccgtgctgagcccctgcccccccctggtgggcaccagcgccggcgtggtgctggtggtgctgagctgggtgctgtgcctgggcgtgttcagctacgtgaaggtggccgccagcagcctgctgcacggcggcggcagacccgccctgctggccgccggcgtggccatccaggtgggcagcctgctgggcgccgtggccatgttcccccccaccagcatctaccacgtgttccacagcagaaaggactgcgccgacccctgcgacagctag

SEQ ID NO: 88725 - DNA, 1338 bp, Artificial Sequence
  derived and/or modified sequence
atggccgcccccactccggccaggcctgtcctaacacacctactggttgctctgtttggcatgggctcctgggctgccgtgaacggaatatgggttgagttgcccgtggttgtgaaggagctccctgaagggtggagcttgccttcatacgttagtgtcctggtggctctaggaaacctcggccttctcgtggtgaccctttggaggaggttggcaccaggcaaagacgaacaggtccctatccgcgtagtgcaagtcttggggatggttggcactgcactgttagccagcctgtggcaccatgttgccccagtggctggtcagctgcattcagtcgccttcttggcactcgcgtttgttttagcactcgcctgttgtgcttctaacgtcacttttctcccattcctgagtcacctccctccccggtttttgagatctttttttctggggcaaggtctatccgccttgctgccttgtgtgttggcacttgttcagggcgtgggtcgcctggagtgcccacctgcaccaatcaatggaaccccaggaccaccactggactttctggagaggttccccgcgagcaccttcttctgggctttaacggccctgttggtggcctcagctgccgccttccaaggcctgctcttgttgctgcctcctcccccctctgttccgacgggagaacttggtagcggtctgcaagtgggagcaccgggggcagaagaggaagttgaggagtcatcacccctgcaagagcctccaagccaagctgccgggacaacccccggacctgatccgaaggcctatcagcttctcagtgccagatctgcctgtcttctgggactgttagcagcaaccaacgccctaaccaacggtgtgctgcccgccgtgcaaagcttcagctgtcttccctacggccggctggcatatcatttagctgtggtcctcggctcagcagctaatccacttgcctgcttcctggccatgggcgtgttatgccggagcctagcagggctaggcgggctgtcactgctaggagtgttctgcggaggatatcttatggccctggccgtgctgtcgccgtgtccaccgctcgtggggacttccgcgggtgtggtgttagtagtgctgtcctgggtgttatgtttgggcgtcttttcctacgttaaggtggcagcgtcaagcttgttgcacggtgggggccggccggcacttcttgctgccggtgtcgcaatacaggtgggaagtcttctgggagccgtcgctatgtttccacccacatcgatttatcacgtgtttcatagcagaaaggactgtgctgacccctgcgactcgtag

SEQ ID NO: 88726 - DNA, 1338 bp, Artificial Sequence
  derived and/or modified sequence
atggcggcaccaacccctgccaggccagtgctgacccatctcctggtcgcactcttcgggatgggctcctgggcagccgttaacgggatctgggtggaactacctgtagtagttaaagaacttcctgagggatggtcactgcctagctatgtgtccgtattggtcgcccttggaaaccttggcctgctcgtcgtgactctgtggagaagactggcgcctgggaaggacgaacaggttcccatcagagtggtgcaggtcttaggcatggtgggtacagccctactggcttcactctggcaccacgtcgcccctgtggccggccagcttcattctgtcgccttcttggcactggcctttgtgctggccctcgcgtgctgcgctagtaatgtcaccttcttacccttccttagtcacctgcccccgaggttcttgagatcctttttcttgggccaaggactgagtgccttactgccctgtgtgctggctctggttcagggcgtggggcgcttggaatgcccacccgctcctatcaacggcacccccggaccgccgcttgacttccttgagaggtttcctgcaagtacatttttttgggccctgactgccctcctggtggcaagtgccgcagcctttcagggactcttactactgctgccgccccctcctagtgtgcctacgggtgagctcggcagtggactgcaggtgggggctccaggtgccgaagaggaggtcgaggagagttctccactgcaggagcccccctctcaggccgcaggcacgactccagggccggatccgaaagcatatcaacttctgagtgcgcggtctgcatgcttgctgggcctgttagctgccacaaacgctctgactaacggcgtcttgcccgcggtgcagtctttctcctgtctgccttacggccgcctggcttatcacctcgccgttgtgctcgggtcggcagccaatcccctggcctgttttctggcaatgggagttctgtgtagatctcttgccggcttaggcggtctctctctcctgggcgtgttctgcgggggctacctcatggcattggccgttttgagtccttgcccccccctggtcggtacctccgctggggtggtcctggtggttttgagctgggtattatgtctcggagtgttctcttatgtgaaggtggcagcatcttctctgttgcacgggggagggcgacctgccctgctggctgcaggggtggctatccaggttggctccctgttgggagctgtcgctatgttccctccaacctccatctatcatgttttccactcgcgcaaggactgcgctgatccctgtgactcttag

SEQ ID NO: 88727 - DNA, 1338 bp, Artificial Sequence
  derived and/or modified sequence
atggcggctccaaccccagccagaccggtgctgactcacctactggtggctctgttcggcatgggaagctgggccgcggtgaatgggatttgggtcgaacttcctgtggttgtgaaggaactgcccgaggggtggagtctgccatcctacgtgagcgtcctagtggctctgggtaacctggggctactcgtcgttaccctctggcggaggttggcccctggcaaagatgagcaggtccccatccgcgtggtccaggtgctaggaatggtgggaacggcccttctcgcgtctttgtggcaccacgttgcccctgttgcaggccaactacactcggtggcttttctcgccctagccttcgtgcttgccctggcctgctgtgcgagtaatgttacatttctgccctttctgtctcacctgccaccaagatttctgcggtcttttttcctcggccagggactgtcagccctgctgccttgtgtgcttgcactggttcagggcgtcggtagactcgaatgtcctcctgctcccattaacggaacacccggcccaccactggactttttggagcgtttcccagcttccacattcttctgggctctgactgctctcctggtggcatcagctgcggctttccaaggcctccttctgttattaccgcccccaccatcggtgcccacaggcgagctaggctcaggcctacaggtgggggcgcccggcgccgaggaggaggtggaggaaagttcacccctgcaggagccaccaagccaggccgccggcactaccccaggtcccgaccctaaggcctaccagctcctaagcgccagatcggcctgtttgctggggctgctggcagcaacaaatgcgctcaccaatggcgtactgccagcggtacagtctttctcttgtctgccatatgggcgattggcttatcacctggcagtcgtgctgggcagcgcagccaaccctctcgcctgcttcctcgcaatgggcgtcctgtgtcgctctctcgcaggactcggaggcctatcattgctaggcgtgttctgcgggggttacttgatggccttagccgtgctgagtccctgcccccccctcgtcggcacatcagccggcgtggtcctggtcgttctgtcgtgggttctgtgccttggcgtgttttcctatgtgaaagtggctgcaagtagcctcctgcatggtggaggccggcccgcattgctggcggccggtgtcgccattcaagttgggagcctcctcggcgctgtggccatgtttcctcccactagtatttaccacgtcttccactcccgtaaggattgtgcggacccatgcgattcttag

SEQ ID NO: 88728 - DNA, 1338 bp, Artificial Sequence
  derived and/or modified sequence
atggccgcccccaccccagcccggcctgtgctgacccacctgctggtggccctgtttggcatgggctcctgggccgctgtgaatggcatctgggtggagctgcctgtggtggtgaaggagctgcctgagggctggagcctgcccagctatgtgtctgtgctggtggccctgggcaacctgggcctgctggtggtgaccctgtggaggcggctggcccctgggaaggatgagcaggtgcccatccgggtggtgcaggtgctgggcatggtgggcacagccctgctggccagcctgtggcaccacgtggcccctgtggccggccagctgcacagcgtggccttcctggccctggcctttgtgctggccctggcctgctgtgccagcaatgtgaccttcctgcccttcctgagccacctgcccccacgcttcctgcggagcttcttcctgggccagggcctgagcgccctgctgccctgtgtgctggccctggtgcagggcgtgggccgcctggagtgccccccagcccccatcaatggcaccccaggcccccccctggacttcctggagcgcttccctgccagcaccttcttctgggccctgacagccctgctggtggccagcgctgctgccttccagggcctgctgctgctgctgcccccacctccttctgtgcccaccggggagctgggcagcggcctgcaggtgggcgcccctggagctgaggaggaggtggaggagagcagccccctgcaggagccccccagccaggccgccggcaccaccccaggccctgaccccaaggcctaccagctgctgagcgcccggagcgcctgcctgctgggcctgctggccgccaccaatgccctgaccaatggagtgctgcctgctgtgcagagcttcagctgcctgccctacggccgcctggcctaccacctggccgtggtgctgggcagcgctgccaaccccctggcctgcttcctggccatgggcgtgctgtgccgcagcctggccggcctgggcggcctgagcctgctgggcgtcttctgtggcggctacctgatggccctggccgtgctgagcccctgcccccccctggtgggcaccagcgctggggtggtgctggtggtgctgtcctgggtgctgtgcctgggcgtcttctcctatgtgaaggtggccgccagcagcctgctgcacggcggcggccgcccagccctgctggccgccggcgtggccatccaggtgggcagcctgctgggcgctgtggccatgtttcctcccaccagcatctaccacgtgttccacagcaggaaggactgtgccgacccctgtgacagctag

SEQ ID NO: 88729 - DNA, 1338 bp, Artificial Sequence
  derived and/or modified sequence
atggccgcccccacccccgcccggcccgtgctgacccacctgctggtcgcactcttcggcatgggttcctgggcagcggtaaatggaatctgggttgagcttcctgtcgtcgtgaaagagttgccagaaggctggagccttccctcctacgtctctgtactggttgccctcggcaacctcggactgctggttgtcaccctctggaggcggctggcacctggaaaagacgaacaagtgcccattcgcgttgtgcaagttcttggtatggtgggtactgcgctattagcctcgctgtggcaccacgtcgctcccgtggcaggccagctccactctgtcgcttttctagcactggcattcgtcctggcactggcttgctgcgcttctaatgtgaccttcttgcccttcctgagtcacctgcccccacgtttcttgcggagtttctttttgggtcaaggactgtcagctctgttaccctgtgtgctggccctcgttcaaggggtaggacggctggagtgccctcccgcaccaattaacggcacaccagggcctcctttggactttctggagcggttccctgcttccactttcttttgggctctgacagctctgctagttgctagcgcggctgcattccaaggacttcttctgctcttgccaccacctcctagcgtgcccaccggagaacttgggtcaggcctgcaggtgggtgcccccggagcggaagaagaagtggaggaatcctcccccctccaggagccgccatctcaggccgccgggactactcccggaccagatcccaaagcttatcaactactgagcgctcggtccgcttgcttgctcggattgctggcagcaaccaacgccctaaccaacggagtgttaccagcggttcagtctttttcatgcctcccgtacggcaggttggcataccacctggctgtggtccttggctctgccgccaatcccctggcctgctttctggccatgggcgtcttgtgccgctccctggccggcctgggaggcttgagcctcctgggcgtcttctgcggcggatatttaatggcccttgccgtactgtcaccatgcccaccgttggtgggaacctctgccggtgtggtgctggtcgttctcagttgggttctgtgcttgggtgtgttctcttatgtcaaagtggccgcatctagcctacttcatggcgggggcagacctgcgctgcttgcagcgggcgtggcgatccaggtcggatctcttctgggcgctgtggcaatgtttcctccaaccagtatctatcacgtgttccactctcgaaaggattgcgcagacccatgtgactcatag

SEQ ID NO: 88730 - DNA, 1338 bp, Artificial Sequence
  derived and/or modified sequence
atggccgcccccacccccgcccggcccgtgctgacccacctgctggtcgcacttttcggcatggggtcctgggcagctgttaatgggatttgggtggagctgcccgtggtcgtgaaagagctgccagaaggatggtcccttccttcctacgtcagcgtgcttgtagccctaggaaatttagggttgctagtggtaacactctggcgccgattggcaccaggcaaggacgagcaggtgccgattcgtgtcgttcaggtgctgggaatggtgggcaccgcactgttggcgtccctctggcatcacgtcgcgcctgttgccggacagcttcactccgtggctttcctcgccctcgcattcgtactggctcttgcctgttgtgcaagcaacgtcacgtttctcccttttcttagccacctcccacctagatttttgcgcagttttttcctaggacaaggcctttccgccttgctgccttgcgtgctcgccctcgtgcagggagttggccgtttggagtgtcccccggctcccataaacgggacacctggcccccctttggatttcctggaacggtttcccgcctctacgtttttctgggcacttactgctctcctcgtggcttcagccgccgcattccaagggctgctgcttctgctcccacctccaccttccgttccaaccggggaattgggaagcggcctccaggtgggggccccaggggcagaagaggaggtggaggagtccagccctctgcaggaacccccttctcaggcggccggcaccacacccggtcctgacccgaaagcttatcagttgctttcggccaggtccgcctgtctgctaggcctgcttgcagcgaccaacgctctgactaacggggtgctgcccgctgtgcagtccttctcctgtctcccgtacggacgcctagcataccacctcgccgtggtgctgggctcagctgcaaacccactggcctgtttcttagctatgggggtcttatgtcgcagcctggccggacttggcggcttgtcactcttaggtgttttctgcggcgggtatttgatggctctggccgtcctgagcccttgtccaccattggtggggacttccgcgggggtcgttctggtcgtgctctcatgggttctctgcctaggggtcttttcctacgtcaaggtcgccgcctctagcctcctgcacggcggcggccggcctgcactgctagctgccggagtggccattcaggtagggtcactcctcggcgccgtcgccatgtttccccctacgagcatctaccacgtgttccactctaggaaggactgcgccgatccttgcgatagctag

SEQ ID NO: 88731 - DNA, 1338 bp, Artificial Sequence
  derived and/or modified sequence
atggccgcccccacccccgcccggcccgtgctgacccacctgctggtagctctcttcggtatgggcagctgggccgccgtgaatggcatatgggtggaactccctgtggtagtgaaggagctgcctgagggctggagcctgccatcctatgtaagcgtgctggtggcattgggaaacctagggctgttagtcgtcactctctggaggaggctcgctccagggaaggatgagcaagttccaattagagtcgtgcaagtgctgggcatggtcggaactgccttgctggcctctctctggcatcacgtggcacccgtcgccggccaactccatagcgtagctttcttggctctggctttcgtgctagcgcttgcctgttgtgctagcaacgtgacgttcctacctttcttatctcacttgcccccacggtttctgaggtcatttttcttggggcagggactcagcgcattactcccctgcgttctagctctggttcagggagttgggcgattagagtgtccacccgcccctattaacggaactccaggcccccccctagatttcctagagaggtttccagcctccacctttttttgggctctaaccgccctgctggtggcctctgccgccgcttttcagggtctgcttctactgcttcctccccctccatctgtgcctaccggagaattgggttcaggattgcaggtgggggctcctggggccgaggaggaagtggaggagtcatctccactgcaagagccaccaagccaggctgcgggcaccacaccgggtcctgaccctaaagcctatcagctcctgagcgctcgttccgcatgtttactgggcctgctcgccgccaccaatgccttgaccaatggggtacttccagctgtacagagcttctcatgccttccctacggaagattggcctatcatctggctgtggtgctcggatccgccgctaatcccctagcatgttttctcgctatgggcgtattgtgtagaagcctcgctggcctcggcggactgagtctgctcggggtgttctgcggcggctacctcatggcccttgccgtgttgagcccttgtccccccctagttgggacgagcgctggcgtcgtgttggtggtgctgtcatgggtgctctgtctcggcgtcttcagttatgttaaggtggccgccagctccctgctgcacggcggtggacggccagctctactggctgcaggagtagccatccaggttgggagcctgcttggggcagtagcaatgtttcctccaactagcatttaccacgttttccacagtaggaaggattgcgccgatccttgtgattcctag

SEQ ID NO: 88732 - DNA, 1338 bp, Artificial Sequence
  derived and/or modified sequence
atggctgcccctacacctgccaggccagttctgacccacctgttagtggctctgttcggtatgggcagctgggccgctgttaatggcatttgggtcgaattgcccgtggtcgtaaaagagcttcctgagggctggtcactgccctcgtacgtgagcgtacttgttgcccttgggaaccttggcctgctcgtcgttacactgtggagacgccttgccccaggaaaggatgaacaggtcccaatacgcgtggtgcaggtcttgggaatggtgggcaccgccctcctggcgtccctttggcaccacgtagccccagtggctgggcagctccactcagtcgcttttctagccctggcctttgtgctggcgctcgcctgctgtgctagtaatgtgaccttccttcccttcctgtcccacctgccacctcgctttctgcgttcattctttcttgggcaggggctgagtgccctgcttccatgcgtgttggctctggtgcagggcgtaggcagactggagtgtcctccagcacccattaacggaacaccaggaccccctctggactttcttgaacgatttccagcctctactttcttctgggccctgacggccctcctggtggcttccgctgcagctttccaagggttgttgctcctgttgcctcctcctccctcggtgcccactggcgaactggggagtgggcttcaagtcggggcaccgggagctgaggaagaagtagaggaatcatctcctctccaggagcctcccagccaagctgcagggacaacaccgggacctgaccctaaggcataccaattactcagcgctaggtctgcctgcctactgggactgctggcagcgactaacgcactcaccaacggcgtactgccagcagtccagtcattcagctgtcttccttatggcaggctggcatatcatctggccgtagttcttgggtcagcagctaaccccctggcgtgcttcctggcaatgggcgtgctttgtcgctctctggcaggcctcggcggtctttctctattgggcgtgttttgcggcggttacctgatggctctggcggtcctcagcccttgtccccctctcgtgggcacttccgctggggttgtcctggtagtgttaagctgggttttatgtctcggtgtcttttcgtacgttaaagtggccgcaagttccctcctgcacggcggagggagacctgcccttctggctgctggcgtcgcgatccaggtgggaagcctgctgggcgcagtggctatgttccctcccacctctatttatcacgttttccatagtagaaaggattgtgcggacccttgtgactcctag

SEQ ID NO: 88733 - DNA, 1338 bp, Artificial Sequence
  derived and/or modified sequence
atggctgcgccaaccccggcaagacccgtgctgacacatttgcttgtcgcacttttcgggatggggtcgtgggccgcagtcaacggaatttgggtggagctgccagtcgtcgtgaaagagctccccgagggatggtcactgccgtcttatgttagcgtgttagtggcacttgggaacctgggacttctggtggtgacattgtggaggcgcttggctcccggaaaggatgagcaggtgcctattagggtggtgcaggtcttgggaatggtaggtaccgcgctcctagcctctctctggcaccatgtggcgccagttgctgggcagctccactcagtagccttcctggcactggctttcgtgcttgcattggcctgctgcgccagtaacgttacattcctgccgtttttgtctcacctcccacctaggtttcttagaagcttcttcctgggtcaaggactttctgccctccttccttgtgttctggccctggtgcagggcgtgggacgcttagagtgtcctccagcacctattaatggaaccccaggccctcctctcgattttcttgagcggtttccagcatcgactttcttctgggccctcacggcattgctggtcgcatctgcagccgctttccagggcctgttactgcttctgccccctcccccttcagtgcctaccggcgagttgggatcgggcctgcaggtgggggctccgggtgctgaagaggaagtggaagagtcaagcccacttcaggaacctcctagtcaagctgctggcactacgcctggccctgatccaaaggcatatcagctactcagtgccaggtcagcttgccttcttggtctccttgccgctactaatgcacttaccaacggggtcctgcccgcagtgcagagctttagctgcttgccgtatgggcgtctcgcttaccacttggctgtggtgctggggagtgccgcaaatcccctggcatgttttctggccatgggtgtcctgtgcagaagccttgccggattagggggactgtctctgctcggcgtgttctgcgggggatacctgatggccctggccgtcttgtccccctgtccgccattagttggtacatcggctggggttgtgttggtcgttctttcctgggttctctgcctcggagtgttctcctacgtgaaagtggcagccagctctcttctgcacggcggtgggaggcccgctctactagcagctggggtagcaattcaggtaggtagcctgctgggggctgttgccatgtttccgccaacctccatttaccacgtgtttcattccagaaaagattgcgccgacccttgcgattcatag

SEQ ID NO: 88734 - DNA, 1338 bp, Artificial Sequence
  derived and/or modified sequence
atggctgcacccacaccggctcgaccggtcctgacccacttactagtggccctctttggcatggggtcctgggcagctgtcaatggaatctgggtggagctgccagtggtggtaaaggaattgcccgaggggtggtctctcccaagttacgtttcagtcctggttgcactggggaatctgggcttgctggtggttactctgtggcgccgactggccccaggaaaagatgagcaggtcccaattcgggtggtgcaggtactgggaatggtcgggacggccttgctggctagtctgtggcaccatgtggctccagtggccggacagctccactccgttgcctttctggccttggcgtttgtgctcgccttggcttgttgcgcctctaacgtgacctttctgcccttcctgtcacacctgccaccacgctttctgcggagttttttcctggggcagggcctcagcgcgctactgccgtgcgtgctcgctttggtgcaaggggtaggccgacttgagtgccctcccgcacccatcaatgggacgcctgggcctcccctggatttcctggaacgtttcccagcctccacattcttttgggcgcttaccgcgcttcttgttgcttccgcggctgcctttcaggggctcttgctgctgcttccaccgccaccatccgtccctaccggcgagttgggcagcggtctgcaggtcggcgctccaggggctgaggaggaagtggaggagagctcaccactccaggaaccgcctagccaggcggcagggaccacgccgggacctgatccaaaggcttatcagttgctcagtgcaagaagtgcttgtttgttgggcctcctcgccgcaaccaatgctctgactaacggtgtgcttcccgctgttcagtccttctcctgtctcccttacggaaggctcgcgtaccacctggcagtggtgttggggagtgccgcaaatccactggcctgttttctagccatgggagtgctctgccgatccttggccggactgggaggcctgtccctcctcggggttttctgtggtgggtacttgatggctctggctgttttgagcccatgcccaccactggtgggcaccagtgccggtgttgtcttggtggttttatcctgggtgctttgtcttggagtgttctcatatgtcaaggttgcagcttctagcttgctgcacgggggtggcaggccagccctcctggccgcaggcgtcgcgattcaggtcggctccctactgggggctgtggctatgttcccccctacctccatctatcacgtgtttcacagccgcaaggactgcgccgatccttgcgactcttag

SEQ ID NO: 88735 - DNA, 1757 bp, Artificial Sequence
  derived and/or modified sequence
gggcgggacttccggtcgtgggccatgccgggggcgggcccggaaccgccacggctagaagaagtcttcacttcccaggagagccaaagcgtgtctggccctaggtgggaaaagaactggctgtgacctttgccctgacctggaagggcccagccttgggctgaatggcagcacccacgcccgcccgtccggtgctgacccacctgctggtggctctcttcggcatgggctcctgggctgcggtcaatgggatctgggtggagctacctgtggtggtcaaagagcttccagagggttggagcctcccctcttacgtctctgtgcttgtggctctggggaacctgggtctgctggtggtgaccctctggaggaggctggccccaggaaaggacgagcaggtccccatccgggtggtgcaggtgctgggcatggtgggcacagccctgctggcctctctgtggcaccatgtggccccagtggcaggacagttgcattctgtggccttcttagcactggcctttgtgctggcactggcatgctgtgcctcgaatgtcactttcctgcccttcttgagccacctgccacctcgcttcttacggtcattcttcctgggtcaaggcctgagtgccctgctgccctgcgtgctggccctagtgcagggtgtgggccgcctcgagtgcccgccagcccccatcaacggcacccctggccccccgctcgacttccttgagcgttttcccgccagcaccttcttctgggcactgactgcccttctggtcgcttcagctgctgccttccagggtcttctgctgctgttgccgccaccaccatctgtacccacaggggagttaggatcaggcctccaggtgggagccccaggagcagaggaagaggtggaagagtcctcaccactgcaagagccaccaagccaggcagcaggcaccacccctggtccagaccctaaggcctatcagcttctatcagcccgcagtgcctgcctgctgggcctgttggccgccaccaacgcgctgaccaatggcgtgctgcctgccgtgcagagcttttcctgcttaccctacgggcgtctggcctaccacctggctgtggtgctgggcagtgctgccaatcccctggcctgcttcctggccatgggtgtgctgtgcaggtccttggcagggctgggcggcctctctctgctgggcgtgttctgtgggggctacctgatggcgctggcagtcctgagcccctgcccgcccctggtgggcacctcggcgggggtggtcctcgtggtgctgtcgtgggtgctgtgtcttggcgtgttctcctacgtgaaggtggcagccagctccctgctgcatggcgggggccggccggcattgctggcagccggcgtggccatccaggtgggctctctgctcggcgctgttgctatgttccccccgaccagcatctatcacgtgttccacagcagaaaggactgtgcagacccctgtgactcctgagcctgggcaggtggggaccccgctccccaacacctgtctttccctcaatgctgccaccatgcctgagtgcctgcagcccaggaggcccgcacaccggtacactcgtggacacctacacactccataggagatcctggctttccagggtgggcaagggcaaggagcaggcttggagccagggaccagtgggggctgtagggtaagcccctgagcctgggacctacatgtggtttgcgtaataaaacatttgtattt
